United States Patent Application Publication US 2026/0103690 A1 - sequence listing, part 66

SEQ ID NO: 321940 - protein, 342 aa, unidentified
MSEIITVGLDLAKNVFQAHSADASGRAVLRRKLRRDQVLDFFGRLAPCVVAMEACGGAHFWGREIGKLGHEVRLIPPAYVKPFVKRQKNDAADAEAICEAAQRPTMRFVPVKSEETQGAAMVFRIRELLIRQRTQAINALRGHLGEFGRIVPQGAANAARLIAIVEDPDSGLPADAIATLKVLVGVLTHLEAEIGKLDAEIARRAQENEVARRLMTVPGIGPLIATAIAVLAPPPETFRKARDFAAWLGLTPRQHSTGGKQRLGATTKMGERSLRRLLIIGANSVIIKRHVHATAQPGTWLGGMLTRKPPMLVRVALANKMARIVWALMARGGVYQSPAAAA

SEQ ID NO: 321941 - protein, 298 aa, unidentified
MAMVVADSKRLIGVDVAKAELVIWDDESAELIAIPNTKAAIKKWLKGFSGAMSVAIEATNIYHVLFTDLAFEFGHTIYVVDGYALSHYRKGVNVRAKTDAIDAQLLARYLKNEGQDLTPWAPPPAIYRQLLSLFRRRAGLVQARTSLSQGWANEPLLRAAFKTHLRAMQRLELLVEKMIKGLLEKAGLMPQVKRCMKVEGIGFLTAARLTATFQRGNFSGGDAFIAFLGMDLRIAQSGQKKGNPSSRSEETPKLDASFTTQPCRHAARQYGNRTTKSAWHVVLARQHRLSCSHANWRE

SEQ ID NO: 321942 - protein, 450 aa, unidentified
MERGVTQQDKSKKRAPKLEVTNPNAAGIDIGSASHYVAVPADRDDEPVREFKSFTVDVHKLADWLEACGVDTVAMESTGVYWIPVYEILERRGFKVLLVNARHVKNVAGRKSDVLDCQWLQQLHSYGLLRGAFRPADQVCVLRSLSRQRAMLLRLQARHIQHMQKALVQMNIQLANVISDVVGETGQKILRAIVAGERDPYVLAGMKNVRIKASAEEIAKSLRGNWRNEHVFALKQALELFDFYAERVADCDALIEQQMIELHQHDRLPGKARKVSNRNKPKFDLRTRLYQMCGVDLTRIDGIDVCTAMTVLSEVGADMSKFPTVKHFAAWLGLCPGTKISGGKVLGSKTQKCANKTAQALKQAASCLKNSQSALGAYYRRMCAKMDKPKAITAAAHKLARLIYTMITQGEEYVDQGQAYYEERYRQRVEINLRRKAEMLGLRLVPMAAA

SEQ ID NO: 321943 - protein, 354 aa, unidentified
MHEDNTTILGIDLGDLTSTFCLVGSDGKVKESGRVATKSGAMLKLVARLRPTRVLFEAGTHSPWLDRDLREAGQDVVVLNPRRLRAISDSVKKTDETDAQMLAMLGTFDRKRLWTVSHRGADSERLLRLLKVRHALVKQRTLLVNTIRGLLKSAGERLPKVDPDRVHTMLHLVPEELQEEFKPMFTMLEQLATQIEALDAKLCTELEAHPDAKRLTSVPGVGPIVALAFVAVLDDPERFKHSRQVGAFLGLTPRIDQSGNSDKQLRITKAGHMLLRSLLVQGAQCVLRSNTRDSAMRRWGISLTERGGKAAKKRAVIAVARKLATLMHHLWRTGATFQAFPEAVPTDALAAAAA

SEQ ID NO: 321944 - protein, 377 aa, unidentified
MSKLRFVGLDVHADTIAVAVAEAGGEVRSLGIIPNRLESIRKVIGKLAPIETLKCCYEAGPTGYVLYWQLAQMGVGCEVIAPSLIPTKAGDRVKTDRRDAEKLARCYRAGELTPVWVPDANHEALRDLVRAREAAKKDQLRHRHRLGKFLLRHGKRPTDAGKAWTQKYLNWIRIHVRFEQPALEATLKHYQEEVDHIAERIVKLEQAIDEAVKQAPAEIRVAIEALQALRGVAQTTAATVVAELGSLSRFASPSQLIGYSGLVSREYTSGNRVQRGTITKSGNAHLRRVLVEAAWTYRHRPNVQGRVLRRQKALALSEEAVKIAWKAQQRLHKRFAALTARGKESNVAAIAIARELLGFMWAIAVHTEAQQKQAKAA

SEQ ID NO: 321945 - protein, 373 aa, unidentified
MNHHSGAYVGIDTSKLRNAVAVAEEGRGGEVRYLGEIDTTEAATRKLVTKLAAKYRQLTFCYEAGPTGYGLYRLIRKLGHDCIVAAPSLIPKKPGDRVKTNRRDAVGLAKLLRAGELTAVWVPDERHEAMRDLSRAREAARKDLKGKRQQVSSFMLRLGRHFPGKKTWGPAHMNWLMLQKLEHREQRIALEELLGAVRQESERVERLEQAIRDAVPEWSLAEVVTALQAMRGIDLVSAVTVLAEIGDLSRFQNPRELMGYLGLVPSESSTGDTVNRGGITKAGNGRARRILVESAWSYRYPPRVSREKQMKVAAAPRAVREIAWKAQMRLCGRFRSLTRKGKRPTVVATAIARELAAFIWAINREVMAHATAS

SEQ ID NO: 321946 - protein, 350 aa, unidentified
MIIGVDYHPSFQQIAFFEEETGECGEQELNHSDRQAEKFYRDLKQRGISVRVGMEATGYSRWFERLLAELGFEVWMGDPAEIKTRRVKKQKTDRKDAQLLLRLMRENNFPQIWVPNPENRDLRQLLWHRHRLVQMRTRIMNQLQALAMNEGYRWKKKLFSEQGRALLEKLALAPWASRRRQELLELLDRMNPTIEELTAAVEREARKRPEVLRLMTHPGVGPLTALAYVLIIGTPTRFQRGKQIGTYVGMIPCEESSAHKQRLGHISKQGSSLLRFLLVEAAQAAARNHPDWRRRYIHLAMRRHKSIAKVAMGRRLAIRLYWMWRNGCEYSPSLEFGSYAGQLGIGHGVK

SEQ ID NO: 321947 - protein, 374 aa, unidentified
MPKYSTAFGMDVHLRSTTVCALDADTGEAVTRRFPGNPWGEIAGWMDGFPGPSLAAYESGYLGFAPQRELAGLGVECVVAAVSKIPRSAADSASKNDRNDAARMAKAILAHDISPVWIPSPEVEGIRDLAGAYDGATARLATAKQRLLAFLDAERGFVYGGTTPAGNPRKYWTYDFLRWLDKVRPEDDGGVRTLAALRNEVEAAAEARADLLSEYRAAVDASPIAAEVAALQSIKGCAFALAAAFSAEVGDFTRFRSGRQVTAYFGLAPSQRSSGDSVRLGGISGAGNALVRKLAVEGSWCYAAARHQPKLMPRDTGVPLEIRMHGRKGSERLLRRREEMLARGMPAAKANAATAAELVRWLWALGMMCREGAE

SEQ ID NO: 321948 - protein, 438 aa, unidentified
MWWSSQWLLYLTLKGVLTMKVVYQTCCGVDVHKSFLVATIIKTASGIEPSYQKKRFSTFNNSILQFKDWLMKNQCRDVCMESTGKYWVPVFNLLEDDINVTIANPKWVKAVKGNKDDTKDSKWIGDLFRLGLVPGSYIPCKPIRILREFTRYRYKLTSCRTSEKNRYQNALTVCNVALDSVVSDIFGKSATSVIDYLIERSDNSINHEEIASRLLRSLKKKSDSVIESIEGYQMTDSQKYRMRLVRAHLDYITSTINDIDTMLDSLIAPYENAVQLLCTIPGVDRNSAITVISEIGTDMTPFSNSKRLCCWAGLTPGNNESAGKKKSVRITRAGVYLKPALVQVAHAAVKSDKSPYYKQKYERIMKRRGKKRAIIAIARMILTAIYQMLSTGEAWNPTDLYKIDIPEPLKEKQKEKAIKQAKKLLIREGILSESQLAS

SEQ ID NO: 321949 - protein, 342 aa, unidentified
MSVYVGIDVHRKRSQVAVVDQSGEVLTNRNVPNGVEPILKVIGGLPPGTPAAFEAAYGTSWLVELLEDYGFAPHLVHSLGCKAIASARLKNDKVDAAILAQLLRADLLPEAWIAPPPVRQLRALLRHRVALVRLRTLLRNRIHAIVADHGHDRPAGAYWSGPGRAWLVSLDLPAVSRELVEDDLALIDALQDRIDRLDWEIRQRARSDPRVKVLTQLPGIGPFTALVILAEIGEVSRFGSARKLASWAGLTPTVRGSDRVAHYGHISKEGSVWLRWVLCEAAQTAKRHPPFAASYQAIARRRGKKIATTSVARKLLTRAWHLLTDAEHAAAPQPATPQTAAR

SEQ ID NO: 321950 - protein, 336 aa, unidentified
MTIIRIGLDTSKHVFQIHGVDENEQPGVRRQIRRSEVAKVFAKLAPTRIGLEACGAAHHWARVLRGLGHEVMLLPPQYIKPYVKRGKNDKIDAEAICEAMSRPTMRFVPVKNTEQQAALTMLGVRDLLVKQRTMLINAIRGHAAEFGVTAAKGPKQVTELLQRLASGEGVPALAREMVGMLASQLGGLDIKLKAIEARLMAWHRQDQTSQCLATIPGIGPIGGVSFALKVPDPKAFRSGRHFAAWIGITPREDSPAGRQKLGRISRAGDEDLRRLLVIGATAVIRAAKPGRTAPWLLALLARKSKKLAAVALANKMARIVWAMMVSGETYRRPVQA

SEQ ID NO: 321951 - protein, 352 aa, unidentified
MPRITTIGLDLAKKVFQVHGVDAEGKVVVARKLRRKQVLTFFAKLPPCLIGMEACGSAHYWGREIAKLGHTVKLMPPKYVKAYVKRGKTDAGDAAAICEAVTRPSMSFVLVKGIEQQGLSMLHSARSLLIGQRTQLINAVRGHLSELGIVAARGLLGLAELAEIVRNKKDKRLPVTARAALMILVRQIETVSSEIAALDNALRKENKASELGPRLETVPSIGPVTASAFRARVTDPKLFKNGRHLSAWIGVVPENDSTGGKVKQKGLSKKGDRYLRSLLVNGAMAVVRQAQRRPDRHPSVAKLLGRMSKKQAAIAIANKTARIAWAIMVKGGVYAAGHRAAQYQAEACAATG

SEQ ID NO: 321952 - protein, 359 aa, unidentified
MEGLKQIRRFKYFMGIDQHKRYSQISVVDEIGELVEERRLYHQDKEGMLNYFKSFKQEETKVVLEATGNWYWLGDLLEESGLTNRILAHPYKTRIIAESKIKTDSISSFTLAQLLRAGLIPQSYLASKKTRSLRELLRYRISLVKIRSSLKCRVHSILDREGIDTPKFSDLFGKKALIWLKNLSLAYPLSQTLKGYLNLIEELTFLIEETEKSIKLTIKEDPLAQLLITIPGIGFFTAYLILCEVVDITRFLTPKKLSSYIGIVPSIHQSGSFSHTGKITKQGNKYLRWALIEASQKAIIKDPSLKEIYDKISYKKGKQKAKVAIANKLAHIIWAVLKYRQPYKPKKRLIMHSCSGQAR

SEQ ID NO: 321953 - protein, 386 aa, unidentified
MMVIGIDPHKSTHTATAVDPHTNRATASLRIDANLGEYRRLMRWARQFEQRRWAVENAEGLGRHLSTWLLARGEQVVDVPTTATARVRQLSRGGGRKNDQIDAAAAASVAALQGESRPLEPEGVTDALALLDESRMNLAQSRVRLVNQLHALLRELVAGGAPRDLSASTAAALLRRVRPAGDVERVRKQIAAGLVAQIRSVDALLKSNATQISERVAASGSTLTGTVGIGAITAGRLIGRTGRASRFPSSASFANYAGAAPVEVASADKARHRLSRSGDRQLNAALHTVAITQIRTPASRGHAYYNAKVAEGKTAREARRCLKRRLADHIWRTMITDERRLAANPGGHSGAALISSAAGSTPTTSPSEKSLPGPARRNSTTSRPAA

SEQ ID NO: 321954 - protein, 408 aa, unidentified
MDVIVKRCAGLDVHKRTVVACVRIASDGEVRREVRTFGTTTGELLELFDWLSDHDCTHVVMESTGVYWKPVWHILESGFELVLANAKHVRNLPGRKTDVSDAVWLADLLAHGLIRGSFVPPLPIQDLRDLTRTRKQLRQEMSRHTLRIQKILEDANIKLSGLVSDILGVSGRAVLQAIIAGESNPEALVAVTNGRLKASHDSLVAAARGTTRDHHRFLLELHLKQIDEIRNTIASVDAHIETVVRPFREHVERLVTIPGVSLIVALVILAEIGADMSRFPTVQNLISWAGLCPRSDESAGKHRSTRLKPGDPWLKTILVQAAWAATRVKGSYLQAQFLRLRAHRGPQKAIVAVAASILTATYYMLRDHTTYVDLTANHFQKHDKQKTADRLVRQLSALGYSVTLEAAA

SEQ ID NO: 321955 - protein, 465 aa, unidentified
MLLCARVSVSCTDLGALAGGALVPVRRGVPLQEVAARMKVLYERVAGIDVHKDMIKVAIRSPGEKPWARTTEILEYRTFYGVLQEMARELRKRGVTHVVMEASGVYTEPVYYALCEQDFTEVAVINPAHAKALKGHKTDAKDCARLAELFECGLLRGSCIPAPELKEVRDLTRYKIKTVQARTSEIQRLAKALESAGVKLGSVVSEITGKSATAMIEALIDGERRGAVLADLARGRMRTAGKRADLSMALAGRFTGHHAVLCRLHLDRIELFDAAVAGLAEQIAAKAVPWQRELGLLKTVPGFGDAVAQAWIAEIGPAPHAWFSRHEKLASWVTLCPGNNISAKKRKYGRTGDAGTYIKPMLIQAAWSAIRVRGRLQARYHRLVRRFGGDKNPAAKKKAITAIAHTLLKIAYQVLKSGQPYQDLGADFYTRRESPAQRQAYLERQLQKLHPGCAITITISPPEAA

SEQ ID NO: 321956 - protein, 331 aa, unidentified
MGFEPEPSKEGSWMMAQNGLVVAGIDVAKDKVDACIRASSQRRTFESTAEGRRQLIAWLRKHKAAKVVMEASGGYEREWAKALREKKVEVRIVDPKRVRHFAQSAGRLAKNDTIDADTIAWFAETFSEAPGQAYDAEREKLMQMVNARRGLLEIETMLTNQGEHSVPDVVEKMQARLLKKIALEIVKLETAIAAMIKATAHFAELAAIIESVPGLGSGTAAGLIAAMPELGQVSNKVAAALLGTAPYDDDSGKRRGQRQIKGGRRRLRNLFYMGCLGAATRHNPVLKAFYLRLLARGKEKKVALVACMRKLIVILNVMIARQQKWNPQAVS

SEQ ID NO: 321957 - protein, 351 aa, unidentified
MFMIGVDYHPSVQQIAFTDTETGECGERRLNHSDGEAGKFYRELKQRGLSVLVGMEATGYARWFERLLAELGFELWIGDPAEIKTKRVRKQKTDRQDAQLLLRLLLENRFPRIWRPSPENRDLRQLLWHRHRLVQMRTRIMNQLQAVAMNEGKRWKKKLFSAQGRAQLEELPLAPWASRRRHDLLELLDRLNPTIETLTAAIEQEAKRRPEVLRLMTVPGVGPITALAFVLIIGTPERFQCGKQIGSYVGLIPCEDSSAGRQRLGHISKQGNTLLRFLLVEAAQAAVRWDPDWRRRYLHLAMRRDRRISKVAMARRLGVRLYWMWRNGWEYSQLVKFGSHAGQPVHVHGVR

SEQ ID NO: 321958 - protein, 342 aa, unidentified
MMIIGCDFHPSFQQIAYVEQETGECGERCLRHREEAVGFYRSLAGGAVRVGVEATGNDRWFRRLMSELGYELLVGDASAIHASAPREQRTDKRDARHILKLLVENRLPAVWQPSAGNEEQRQLLLHRCRLVRMRARIKNQLDSMAKNEGLTGSRVWSARRRQQIEALPLTGWYAQRRKDLLGLMEEMDKRIQPLDEAVKAAAEQNAEARLLKTHPGVGPVVSLAYVLTIGNWQRFARGKQVASYLGLIPAEASSGKHQQRMGHITKQGNTLLRWLLVEAASKAQSKDPSWHRQYLRLSMSKHHGVAKVAIAHKLAVRLYWMLRSGQDYTQIMERGSHVGQSA

SEQ ID NO: 321959 - protein, 345 aa, unidentified
MSIVGGLDIHRKQITFDYLDTATGEVRCGQITPASRKHVRAWLAQFAGRGDVAFAVEGCTGWRYIAEELAAAGLAAHLAEPADTAAARGRKRHAKTDKTDARHLRTLLAEGRLPECWIPPEQILECRALLETYHDLRTEHTAWVQRIHAVFFHQGAPPLAEGMLRTEQGVAGLRAAAAAHLSPAGQLQVATALDMLAAVEARLGPLRHQLRDAARHLTGAKVLAERLYGAGPVTALALTCWLAGKGRFSSSRKAVRFTGLDITVWSSDRKGPPGRLSRQGPPVLGWAVYEAGKTHGRAAAPDHGYYATVKDRKNGKRAALSEARKIVRQACHILAELGDDALTAT

SEQ ID NO: 321960 - protein, 365 aa, unidentified
MKKSSKKQSEKTMNEVVAIGIDTSDRTGKFYAIDDEGKMIAEGTIALRTPELEKWAMSIGRTVIAIEAGTHSPWISRLLARCGHEVIVANPVKVALITQNVHKTDPVDAEYLARLARFDRELLFPIQHRGEQAQIDLQVIRTRDIAVKMRSTAISHVRGAVKSLGGRLSKCSTDAFVNTARKEVPEALKTALDPMFDQIDQLTKTIDGYKRKIEKLVEQRYPEVERVAQIKGVGALTGLAYILVLEDAKRFADSRSVGAYLGLTSKKDQSGDSDPQRGITKAGDRLLRRLLVQSAHYIQGPFGVDSDLRRHGEKIAARGGKRAKKRATIAVARKLSVLMHRLWVSGETYEPLRNSTEIADATKAA

SEQ ID NO: 321961 - protein, 411 aa, unidentified
MTDSGKRYIGLDVHKHYLIALGVDAELNVVLPVRRVELSRLENWMEKTLTEQDEVALEMTTNTWQLYDELCEYAGSVVVVHPPHVALITRSQVMNDKIAASILARLLAKGLLAGIWVPPQEVRELRGLVAQRKKMTRLATQAKNRLHAVLQRHHLQPPDGNPFRESQNDWWLALPLGQLEKMNLQSDLETLQFAEKQEVRLTEVMTRIAAENEEISRLLHLSGFGVITAVTVWAAIGNIQRFAEPKHLVGYAGLGARVHDSGQTTRTGRITKAGRRDLRIALVEAAQVAANTHPHWKAELARLEPRLGRNKAIVAIARKLLMSVWYILSQQATDRFAEPEAIAQKLLKFAYQVGKNNRPAGQSAAEFVRQRLDVLHLGSDLSSISWGSKKPIPLPPSVWQEKGVSDVPNLS

SEQ ID NO: 321962 - protein, 400 aa, unidentified
MDDIDDVGVFLGLDVGKSAHHGHGLTPAGKKVFDKQLPNSEPKLRAVFDKLATKFGTVLVIVDQPASIGALPLTVARDAGCKVAYLPGLSMRRIADLYPGEAKTDAKDAAVIADAARTMPHTLRSLELTDEITAELTVLVGFDQDLAAEATRTSNRIRGLLTQFHPSLERVLGPRLDHPAVTWLLERYGSPAALRKAGRRKLVEVIRPKAPRMAQRLIDEVFDALDEQTVVVPGTGTLDLVIPSLARSLAAVHEQRRALEAQIGQLLEAHPLSAVLTSIPGVAVRTAATLLVTVGDGTSFPTAAHLASYAGLAPTTKSSGTSIHGEHAPRDGNRQLKRAMFLSAFAALHDPASRTYYDRCRARGKTHTQALLRLARQRINVLFAMLRDGTFYEPRTPHLA

SEQ ID NO: 321963 - protein, 416 aa, unidentified
MKGKQKTSERRYIGLDVHKHYITVGGMNREQDVILRPRNVEMERFKRWAEENLRDTDEVVLEATTNTWDIYDTVAPLVQRVVVAHPAEVKQIANARVKTDNQDVIRLLRLLIADMIPEVWVPPVEVRELRALISYRWRLVKMATAIQNRMHSLLHRHNIQAPEGKIDTGENREWWEQVQLSELERLRLNQELQTLRLVREHIVEVEHELGRLSTSERWGKQATHIMQLPGVGIVVTMTILSAIGEIQRFPSAKKLVGYAGFGAGVEDSGQKHRDKGITKFGRKELRWALVEAAWQAIRSNPRLRAQYDELCKRKHPNQAIVAIARKLLVTLWYVLSRQEAYDHFTDEDLAYKMLTWAWHMDRSALRGLSPQQFAKCGLIELGRGQDLTRIVKGGQPRRIAPKEEVLVLRPELSLKQ

SEQ ID NO: 321964 - protein, 485 aa, unidentified
MALVLAVVLGLLILEVAMSRRKPNPTSPDPASLALLQTLHPHAAGIDVGAAELWVCVPPGAVAVPHPPAVLPAHVRRFGAFTADLHAIAAWLRQCGVTTVAMESTGVYWIPLYDFLESAGFEVLLVDPRQVQRAPNRPKTDVHDCQWIQRLHSLGLLTAAFRPEEKIRVWRSYQRHRTNLIEDAGRHLQRIEKALEQMNVKLTEVVSDITGVTGMSMVRAMVQGERDPKALAKLRDHRCKESMETIAQALQGTWQPEHLFALRQSLELYDYYHQQIRDCDRVIEAHLQGMALPAVTPLEPTRRVRRRKDNEATFDARQRLHHVAGVDLTAIEGIEESTALVVVRAIGTDMRRWPREKHCGSWLGLAPNPRKSGGKVKSSATRPGVNRAAQALRLAAKNLQRSRSALGAFFRRIAARRGLAKAITATAYKLARIVYALLKYGTAYVTQGLEAYETAYRERVVRQVKRKAMELGLVVVEREAVAQPS

SEQ ID NO: 321965 - protein, 370 aa, unidentified
MAQSSTLFVGMDVHKETIAVAYVAQEPGADVTYLGTIGTRQCDIDQLIRKMQSKAQHLIFIYEAGPCGYWLYRYLQKKDYDCWVVAPSLIPKKAGERVKTDRRDALQLARLARSGDLTPVYVPKVDDEAIRDLTRAREDTISDLKDAKFRLKAFLLRQDIRYAGRANWGPAHLRWLAEVVCPTPAQQIVFQEYVRAVTDHTERLGRLDQELREQVKTWRLHPVVDALQALRGVQFTVAVTMVAEIGDLTRFEHPSELMKFLGLVPSEYSSGARRQQGGITKTGNTHARRVLVEGAWAYRYPAKVSRQLQLRLEHQPPSIQDISWKAQVRLCKRYQRLVAKGKHANVVTVAIARELVGFVWAIAKEVPLTQ

SEQ ID NO: 321966 - protein, 334 aa, unidentified
MEEVTTVGIDLAKNVFSLHGVDAAGKTVLRRTVRRDRLVQTVASLSPCLIGMGACSGAHEWGRRFQLHGHTVKLMAPKFVAPYRKSDKNDGNDAEAVCEAVTRPSMRFVPVKSVEQQALLTMHRVRQGFVVERTALINRLRGLLSEFGVVLPLRSVTVRRQAADAAEVLPELARRAIADLLEQLHLLDGRIDAYDKEIEAQARLSEPARRLMKIRGIGPTTALAIVASVGNAREFKNGRQFAAWIGLVPGQYSTGGKARLGHISKRGDAYLRNLLVQGARSVLQTAPAHQDRLSRWALELQERRGYYRTLVAIANKNARIAWALLAKNEQPHKN

SEQ ID NO: 321967 - protein, 349 aa, unidentified
MSQRNTSSVARLGIDIGKSAFHVVGLDEKGAPVFKGRFNRERLLEFLARASPATIGMEACPGSNWLARKAIGFGHQVRIVPAQFVKPFVKSNKTDIVDAEAIAEAISRPTMRFTQPKTEAQLDLQALHRVRQRLVSSKTAVINQSRAFLLEYGLTIGVGPAYFVRDMPNILSDETNGLTTAMRGLLQELWQEYRSIEARLLQMRRQIEAIASADDVATRLTSIPGIAHLTATAITAFSGTGTQFKSGRNFASWLGLVPREFSTGGKQNLLGITKRGNPYLRKLLVHGARACVLHLDRTKDHLGIWISAMEAKGIHRNKVIVALANKLARIAWTILTRKGTFYLRQPRAL

SEQ ID NO: 321968 - protein, 334 aa, unidentified
MKQVNDVGVDVDSKALVCAMQRAGQRLPLASFANTAAGHKKFIRWATKGACPARVCLEATGIYSLDFALALHHAKNVEVMVVNPRAIKDFVRACMQRAKTDAVDAGGILDYLERMPFAAWQPPAREILELQAINRRSDQLHTELTREKNRRHAVEFAGASADAIAHDIEVNIHHLQRRIERMQESGLQLVHRVPALAAKLAHLVSAKGIGEASAMRILAELLVLPEDLAAPQWVAHAGLDPRPYESGTSIHRPRRISKVGNRHLRAALYMPALVAIQHEPNVRAFYNKLVAAGKKPMQAVVAVMRKLLHAIWGMLKHDQDFDGEKFFNIAIKSA

SEQ ID NO: 321969 - protein, 370 aa, unidentified
MIQHTTDTIWVGMDVHQASITAAILHGDDVEPQVVRLPGDLNAARRLFRRLAEKGAPRACYEASGAGYVLQRALSEDGFHCEVIAPSLIPSRPGDHRKTDRLDAVHLARQFRSGHLTAVAVPDVNQEAVRHLVRAHLFNRRQITRAKHRIAGILRTGGHHFTETKSGWTKQHRAWLAKLRHELTGPMQTVLTSELQHLEYLEASLSSLEAAITEISVQPPWREPVEALCCFRGIKTLTAMTIVSEIGDIKRFGSPRQLMGYVGLVPSERSSGERSHRGPITKSGNRYLRRVLIESSWHYSKRACSTLKLQRRRAGQDPAVIGIALKAQHRLERRHQHLSRTKHTNKATTAVARELCGFLWAMLWEVEGRK

SEQ ID NO: 321970 - protein, 386 aa, unidentified
MPQPNDMSRSLATFDHDRTLIAVIEMSQSSWLVAGIVPGIERHPLKKLAIDEEALLRLVQRWQDEAAQAGRKIERIAVAFEAGRDGFWLARWLRARNIEAYVIHPTSVAVSREHRRAKTDRLDTELLKRAFLGWLRGEPDHCSMAAIPTMEEEDAKRPHRERESLVAERTRIVNRMKGCLARLGIRTFKPTLQRATDLLPTLRTPEGTPLPANALAEMSRDLARLHFVEDQIREIEAARLERLNQAPDERSHAMVRLLARIIGVGIETADMLVREVLSRNLRDRRAVARYAGLTGAPDESGSKRREKGLARAGNARVRRAMIQLAWRFLMFQKESALAQWYRGRTADGRQGTRKSLIVAMARKLLIQLWHFVTTGQALVGVEMRPA

SEQ ID NO: 321971 - protein, 387 aa, unidentified
MKNMYSNVACGGMDVHYKFSNVTFRDRAGRVVRRERFKHPDREQLRTRLRRWPQGTPIVLEASFGWGWLSDLLEETGLDPHLSNCYKLEQMRKARGSVKTNKKDADLVSLLPFETSPWWEVWRAPRQVRNRREQMRFRADLVGLQTMVKNRIHAIFHRHGLFHAFSDLFGGRGRRFLADLCLHGSAALSPEALDALRGQVKLLTHLRDQLADVERILRKQLARTPLTRRLKTIDGIGLILAHVLAAEIGRIERFRHHKALASYSCLAPRSQDSGEADPTRSPLGRRLGVQGNRTLKWAFIEAAHGAVRSGGRWRAMFDRVTRNGTKDCNRGYIKVARELVKVVYAVWSKGVDYQRIPPARPGRSKKKQPSRSGTGQLFHPMVHALQA

SEQ ID NO: 321972 - protein, 334 aa, unidentified
MNLKNFIGIDISKDTFDFALIKDGDLLNPISGKATNNPSGIVKLEEFLRKQSLIMEETLFCMEHTGVYCRLLSQYLVENNYHVWLEMPIQIIRSQGVQRGKNDYIDAIRIAQYACEKKDKAILWQPPREVVLQINDLLTLRDRLIESRKSLKQPIKEFLDAGFKDTAKRIESRCSGTLKALDKEIEQIEKELDELINKDSNLKRLYKLATSVSGIGKITALALLYFTNEFKLYTNPNQLACYCGVAPFAHTSGTSVKGKPRVSHFANKKLKKLLHLVAMVSISCDNQLSEYYHRKVGEGKNKMSVINAIRNKIIHRLCAVINRGTPYQVEFQTT

SEQ ID NO: 321973 - protein, 421 aa, unidentified
MRGLRGVGRKRLKEGTLIATVDIGLTSNTGYCTTLDGRDIKPFRFDNTQEGFERFWCITIASKNRFGCDEVVVGYESTGPYAEPLVHYLGHKGAKIVQVNPLHTKKMKEINDNSPLKTDEKDPRVIADIIRLGHALTIIVPEGDAAYLRRLNNARERHVGEQTALLNQLQQLVFLIFPEFKTVLKNLKGKTAQYILRRYTTPEKIATASKELLGEEMRKRSMGQFGVPEAESLIGLARQTVGIKEGLDGLLMDIRHILMQLEAERRFISEIEAEMGATLERLPFSGRLLSIKGLGIISVAGLIGEVGDFSKFRTQSEIMKLAGLDLYEISSGKRKGQRRISKRGRGLLRKILFYAAIQMIRKNGIMYDYYVRLTGRGMERMRALIAVSRKLLRIIHALMRDNSDYVEQYQAPERRVVRIAA

SEQ ID NO: 321974 - protein, 377 aa, unidentified
MKLAVGIDVHKEKCVACAVYAGQGEATSKQQYFLDRFEDGFKRFPSDGRGMLDMVRFLRGHELHVLIENSTKSHDIYWLLRALDVDVIVAHATDLYRITKSVRKNDDNDARELAGYMRRKLMGEVEFSVSHIPSHETLEKRELCRFDMNDRSELTAVKLQIRSHLLIRGMELSKKYSDITSISALDELTATKDTILMLDAKKAKELKLRILFTDRIIRQKMWNDRIFEIVWSIPGFGVLSAAYLACMADDMSRFDDGRAFAASFGLTPKLDESADKSKNCGISRRGDADMRRLIGQATFVHVTRAESFISEKYKRLRARGKHHNEALVACANSMVRMIFALIRDDRPYSADPESLAETRVYADSDALEDDMEAAGKD

SEQ ID NO: 321975 - protein, 347 aa, unidentified
MVTIGIDPHKASHTAVALDPNGEMLGELRVVADASMLRRLRKWASSWPQRVWAIEGAAGLGRLLAHQLVAAGERVVDVPSALAARARVLASGHGRKSDGIDARSVAVVAQHRGDLLAVAADDHTAVLRLLSDRRDELTGERRRTINRLHRVLRDMHPGGAPRQLSADRAARLLTSIRPASAVDLERKAIARQLIADVRRIDRALLENRRRCEQAIAASGSTLTEIFGISDVLAAKILGHTGDITRFASADHYASYTGTAPVEASSGEQTRHRLSRAGNRSLNHALHIAARVQTMHPGPGHTYYQRKRAEHKTSTEALRSLKRQLAKIVYRQLRHDHLGRPFIDSELT

SEQ ID NO: 321976 - protein, 343 aa, unidentified
MEHYAGIDVSLEESSVCIVDATGTIVREVKIASEPAVLVRYFDELELPVGCIGLEAGPLSQWLHAGLVAAGRDAVLLETRHVKAALSAMTVKTDRKDARGIAQLLRMGWYRPVHAKSVTCKDSRALLVGRKLLQGKLLDVELSIRGILRGYGLKVGEVSRGKFEARIRELTAGHITLETVIGAMLAARTALWCEFTKLHREMLKIARADKVCRRLMSTLGVGALVALTYRSAVDEPMRFGKSSTVGAYFGLTPKKYQSGETDRDGGVSKVGDAMVRTALFEAAHIMLTRATRFSSLKHWALNVAKRRGMKRAKVALARKLGVVLHRMWVDATDFRWSRTAAMA

SEQ ID NO: 321977 - protein, 402 aa, unidentified
MNCVGIDVSKGKSMIAVMRPFGEVVVSPFEVRHTASELNELAKLLKSLDGETRVVMESTGNYHTPVAWLLHDAGLYVSVVNAMLVHDYGNNSLRRVKTDKKDAVKLANYGLDHWLTLPRYVPEEDTRLLLKNCYRQYQQSSKVQTMLKNSLISLLDAVFPEVNRLFSSPPRADGSEKWVDFVSAFWHCQCVSELSLKSFSAKYQKWCRKHGYNFSQEKAREIHAKAGSCIGVIPQNDTTRLLVEQAVMQLQTTSAALSALKQEMQSLAASLPEYPVVMKMFGVGPTLGPQLMAEIGDVRRFHSKKALVAFAGIDAPPCQSGQMDIRSRSISKRGSAALRRTLFLVMGVYLQSAPLDEPVYQFMDKKRSEGKPYRVYMMASANKFLRIYYASVTAYLNALEQI

SEQ ID NO: 321978 - protein, 316 aa, unidentified
MNFVGIDVAKNSMEVTVDGGNESWNFPNDESGLEKLVKKMKKFSPCLIVLEATGGYESMVVALLQSKGFPLAVINPRQIRDFARSVGTLAKTDILDAKVIANFAAKIQPAPRILPTEAAKKLGDILVRRRQIVTMRTAEKNRLQQAAPSVMKRVKAHVTWLEKELSDINTELKQMIQDDPEWQEKDEIIQSVPGVGPNLSITLLVDFPELGILNRKQIAALGGVAPFNRDSGKMRGKRTIWGGRDIVRTATYMAAFSAIRCNPSLKSLFDRLIAVGKPRKVAMVACMRKLLCILNAMLKNRTTWNYCKPQLVRSCY

SEQ ID NO: 321979 - protein, 334 aa, unidentified
MSLDLLAIDLGKQSFHVYGIDSDGVIVSRKLSRAKLMRAIAELAPDVIAMEACASAHYWGRQFLAAGHRIRLINPRFVKPFVKGSKNGAADAEAIYEAASRPTMRFVPVKSIAQQDLQSVHRARERVVCTRTALINHMRGLLAEYGVILPQGAWRFTTQVTTAIEEAELSDLTREIFMDMLDQLSDLNRRLEKFDAQLMTLCRTNEACRRLSKLPGVGPVIATALVAAVDDGRHFRSGRELAAWIGLVPRQYTTGGKPRLGGIGRRANHYLRRQMIHGARSVVMRLAKHDDRRSEWLKGLTARRGFNRTIVALANKTARIAWALLTRKEDYVAA

SEQ ID NO: 321980 - protein, 421 aa, unidentified
MPYTIAAIDVHKRVLMVVVATGSEQVKDPVGEALEFECRRFGALEADRQQLVDWLKERGVQEVVMESTAQYWKPVWLDLEPHFGKLHLAQAQSNRAPKGRKNDFRDGKRLARRLLAGELMLSFVPDGEQRTWRELARTKDHYVAERVRLQNRVEALLEEMRIKLSGVISDLFGVSGRRILHALSGGENDPVRLAELGDGSLRCGPETLADALRGHPTPVQLAILKLHLELLRKFDEMIGALDQLMAAELKKHEEAVIRLAETPGFGVDSAQRLIAEVGVDADAFPSAEEFGSWFGGCPGSNISAEQKHGSRSPKGNRYVRKLLTQAAQAAVKKKGCHFQSLFRRFLPRLGYKGAIWLVAHRLGKLAWKILHDGVRYIEQGNETNPKARKRRAQKLAQALRKLGYAVTLSPVIPAAPADGQG

SEQ ID NO: 321981 - protein, 324 aa, unidentified
MVYVGMDVHRKRTQVAILDEEGSELANRNVDNGSVEMRMVLDSLPAGTPVVFEAGLSMGWMIDELEAAGLEAHMAHPTGVKAIAAARLKNDRVDARTLAHLLRTDLLPEAWIAPRPVRDLRGLLRQRAWLVRRRTSAKVRIRGVLADQGVPVTGLWTRPGRARLAAMVLSPINRVIVDQCCSLIDAFTPLISAIEDEIRGRVGSDARLDALLKLPGVGWVTAVTAIAEIGDIKRFPTARQLSSWAGLTPTVRASDRTVRHGHISKRGSSLLRWTLGEAAHTAKRHPDFQEAYQRIARRRGNKIATVAIARQLLVRIFYTLQSID

SEQ ID NO: 321982 - protein, 454 aa, unidentified
MSRKKTRLQSVTEVPQMRADAAGIDISPEMIYVAVDARRDAPAVRCFGTVTQQLYRIANWLKGCGVRTVAMESTGVYWIPLFQVLEERGFEVFLVNARHYKNVPGRKTDVGDAAWLQYLHAVGLLQGSFRPAQEICAFRTVLRHRGELVQAASQHIQHMQKSLDQMNVQIHRVLSDITGVSGLAMVEAILAGERDGHRLAALRDGRVQASEESIVAALEGDYRAEHLFTLQQSLESYRHYQKLIAECDRQLRGLLESLGEGAEGDAEPPAPRKNMRKTQDEQLRQKFYRVLGVDLTAIPSVNVGTVEVLLGEVGPDLSRFRSAGAFASWLALCPSNEITGGKILSSKTRKANNRLSGALRLAAESLCRDKSYLGQFYRRMKAKLGGGPQAITAAAHKLARIIYTLVTKRVEYDESQFARIEQRAQDRQRQRLIKQARTLGYILVPATPSGATVS

SEQ ID NO: 321983 - protein, 427 aa, unidentified
MAAVMIGVDPHKASHTAVVISAAEEPLGELRVRACAVQAERLLAWAAAWPQRTWAVEGAGGLGHLLAQQLLSAGERVLDVPPKLGARVRLLAAGDTNKNDPNDARSVAIAALRSAGVREVRADDHAAVLKIWSKRHRDLGRSRTQVVCRLHAVLCELIPGGVSKAITAAGAARLLEPAAPAGAVEAARCELAAAFAEDLRGIDARIRETRKKLAVAVQATGTSLTGLYGVGPVVAAVVIGDVRDVSRFPGRDHFAACNGTAPIEVSSGPRKIYRLSRRGNRRLNHAIHMAAVTQIGHRHSQGRAYYDKKLAEGKTPKEALRSLKRQISNAIFACLQADARRAASRAGGPGGQPGNNSVASAAGSHPRHRLFGQATPGPGHHTTTAAGNPAPSPAHAAARKARGQRSPRKPQRPKDTSQASKNTSGAP

SEQ ID NO: 321984 - protein, 339 aa, unidentified
MQVTTIGLDLAKNVFQVHGITEDGTVAFNRSLRRAQMFAFFEMLEPCLIGMEACGSSHYWARELGQLGHVVKLIAPIYVKPYVKRGKSDAADAEAICEAVTRPTMRFVEIKSPEQQAILSLHRARDLIVRQRTQTINLLRGLLAEFGIIFAQGVGHAIQFAKRVTDGHSPDLPQAARDVVTDLGEQLLALHERVNWYGRRMTAAAKSEPRIALLQTIPGIGPITASAIVATVGSGAQFQCGRDLSAWLGLTPINKSTGGKERLGRISKMGDRYIRRLMVVGMTSRIKQIKSTPERFDPWFADILQRKPAKLAAIAMANKTARIIWAVLTRNKPYEARTV

SEQ ID NO: 321985 - protein, 362 aa, unidentified
MKKGIREMESEWKQRPERTVGIDLGDRFSRYCVLNRDGEVLEEGQVRTGAEGFRRHWEGELRQRIVMETGTHSPWISRLLQSFGHQVIVANARKLRAISQNESKNDRQDAEMLARLGYCDPKLLAPIRHRSAERQRDLNLLRARDTLVRARTMLINATRGLVKSAGGRLPAAASDYFVARVAAAVPAELEAATQPLLHQIAALSAAIRRLDQAIEKLGERYPEMVRLRTVPGVGPVIAAAYVLTLDGVDAVERSRSVGAFLGLRPRQSQSGNSDPEHNISKTGNQYLRRLLVQAAHYTLGRFGPDSALRRWGLKLAAGGKRAKQRAVVAVARKLAVLLHHLWRTGQDYRNFPEAAAVAGSAV

SEQ ID NO: 321986 - protein, 426 aa, unidentified
MNCTQNQKINQVTEQTLVVGIDIAKRTHYACFVDDRGRVLRKSFPIFQSKEGFRQLYEAIQEAMQAFGKLKVIVAVEPTGHYWLNLAYFLEEKGIPLVMVNPAHVCRSKELDDNLPTKHDAKDALVIARLAKDGRFLVPRLLHEIEADLRVGSTLKEKLRKEQTAVKNAIIRWTDRYFPEFWTVFRDLGKTALSVLEWTPLPADMAGRTAQELIEVYRQSEGMKCPQKVKIQALIDAAKDSIGVTEGTTMARFEIAALVRRYRQWEADIATLDAELKALVQTTMEYQWLKTVDGLGDATIIDLLAEIGSFAYYRDPRQWVKLAGLTLKEHSSGQRKGQKHISKRGRKRLRSVLFRAMIPLIRHNEAFRELHEYYTTRSVNPLTGKQSIVALCRKLLNVLFAICTKKQAFDAERMKQDVLSQVHRAA

SEQ ID NO: 321987 - protein, 388 aa, unidentified
MTSTKYIGMDVHKESISIAVMNSIGKIVMECVIETKASMILQFIDGLRGDLQVTFEEGTSAAWLYDLLKPRVTKLVVCDPRKNKSMREGNQSDKIDARRLAELLRLHHLTPVYHGEHGLRTLKELVRSYLTITKDLARVMTRVKAIYRSWAIPCTGKQVYARCHRAEWLAKITEPGVHRRAEFYYQQLDALRLLRQEARRDLLAESKKHKAWKRLCQIPSIGPIRAAVLLGILQTPHRFRTKRQLWNYGGLAIEMHSSADHRSVDGQLQRSRKNVLVRGLNRNCNHDLKNLFKGAAAVASSKPGPFEQFYAALAAKGMRPEMARLTLARKIATIVLIVWKSVLRRPTSETTNSLSVLDRVRSILGIFSSGGCRVLETLWFESESQPSC

SEQ ID NO: 321988 - protein, 403 aa, unidentified
MQRYHVGIDVGKNQHHLCVRDSQTDQYTKIISFQVNREGFEKALEFLERMGDKEEFLVGIEASGPYAATICNFLMERGYSVVEINPFRANEFRKAQGKKAKTDRIDARSLAGFLAIDSYKPLSISDEILENLRELTRFRADLLQDRTRQINRLQETVAEAFPELNSLLASLDSPTALTLLATYPGPQALAHTDITILGAFLSRISHGCINQTHAANIINSAKATVGLLQRQQSIALKLRLLAEAILSLNTQIEQIESAIKDLFGKLHHKPSDFPVGSIQSLASILAEIDDIHKFATLKQFLSHFGWCPQTFQTGGFRLEHPRMSHAGNPYVRRMIWLLAILAIKSVQPFKEYFHRRTANGKKKMHSIVCVGRKILSIIYSVLKTGVPYNPLQEVPSSLAFART

SEQ ID NO: 321989 - protein, 352 aa, unidentified
MAKGNKLDFTGQHIYVGMDIHKKSWSVSIYTEHFEHKTFTQPPEVKKLTNYLQRNFPGATYHCVYEAGFSGFWIHDRLTEEGIHCMVVNPADVPTKHKEKAGKADKVDCRKLARNLRSGDIKGIYVPFRVQAEDRHLIRTRQSMVRKQTRCKNQIKAILFFYGILIPEEGHWSRNFINWIETIRMERASGDLALKVHLEELKHLRQIIAGLNKAILALSRADTYRDKVLLLRSVPGISTLTAMTLLTELYDISRFSSLDKLASYAGLVPDIKSSGEKEHTSGITHRRNPALRAVLIEASWVAARKDPALIMAFHKFSLRMKKTAAIVHIARKLLNRVRFVLMNQERYVPAVV

SEQ ID NO: 321990 - protein, 328 aa, unidentified
MNYFIGIDVAKATLQVNIPYGEIDLEFSNTKSGLNKLYKALKVKYKESLQELVFVYESTGCYSRPLEAFCQKMEINCFKVGAYQSASFSKTIKNRNKTDKVDARMLSAMQILAGKGDIKIPYRDEDAHQLRSYIKYYQSLNKEKTRQKNYLEAAEINQEDDYILKQVKKRIKQIDKEQENVMALSMKLIKANSDYLNAYENIISIKGLGQKSGVVLLYLFLRYPNASRQQMTALTGLDPVQKESGTSLKSKTRISKQGISLVRGLLYMPILSAVQYNNEMKHFYERLIESGKVKMSAQIAVMRKVILLAHSLYKNNERYDENKYLAFI

SEQ ID NO: 321991 - protein, 445 aa, unidentified
MHYKRLLTLIDSVSSYLSVGLDVGADFTWMSIALPNGSFIGKPFKIVHSDPRSRDLAVAKIKEAQETYSLKSRCFLESTGIYHIPLLCFLRDKGFDCSVINPIITKNSTNINIRKLHNDKFDSKKAALVGLNVSLKTSILPDDSVVDLRNLVRDYYYFKDLQSAVSLKLTAELKVSFPAYAKVFSKVTTQSSLKLLTAYPLAADMLAASKDDIVKIIHSTARFGESYALRKYDAIIAAAQDAAVFGRALPSNAVRIRLYIDTYQEYQKHLDALLKALHETVERLQDTLIYDQICLLQSLRGIGFLSAVVLIAEMGDFKLFSSPKKLYAYFGLDPAVKQSGKLNGDKVHMSKRGSSLARRVLHMVALNNVKVDKGSGTPVNPVVYDYYTRKCSGKKKTVAMGAVMHKICNIIFAMLRDNKPFEVITPEEHCRRFAAEHPDKIRKAA

SEQ ID NO: 321992 - protein, 359 aa, unidentified
MDAQEGAVRRIIGGVDTHKDLHVAAVVDEQDRVLGTQSFASTRQGYRQMLAWMRTFGEVQRVGVESTGSYGAGLLRFLQQAGVTVLEVTTPDRQDRRRRGKKDDFDAQNAAHAAFAGIRTVTPKSRDGMIEALRVLSACRKTAVTARRIALQMIQNTIVCAPESLREMLRRMTRMQLVRTLAAWRPDLTAYRDVEAAYRISLKSLARRYLELHDEIADLDAMIAAIVNELAPNLVARNSIGHVGAAQLLLTAGGNPQRLRSEAGFAALCGVSPVPASSGKTARHRLNRGGDRGANSALHIIAIGRLRTDARTQAYVAKRIGEGHSKLEAIRCLKRYIAREVFMLIKQRQREINQTRIAA

SEQ ID NO: 321993 - protein, 418 aa, unidentified
MEPNRFRHYIGIDWATEAHRICLLDHNGQLCAKVSIPHSGAGLDQLLEWLASHGVEPAFAAVAIETPRGALVETLVERHYAVFAINPKQLAHFRDRYTSAGAKDDDRDAWVAASALRTDEKAFQRVAIDAPELIQLRELYRTADELREEVQRLTSRLREQLNRYYPQMLALYSAADQPVLWDLLELAPLPATAHQLTLPQVETVLRKRRIRRFPAGKVLEQLRATPLTLANGAAAAASQHALVLVAQLRVIYELRKQTLKRLAGVVKKMRQTTTGSGAPSDAAIVASLPGAGILSTAALLSESSRAVAERDAPALRAYAGVAPVTQQSGKTLKVSMRYACNNRLRNALYHFAMGSLRDPLARRHYDRLRGEGHSHARALRGVADRWVTVLMAMLRSGTLYDATRRKAWSAADAAGVTA

SEQ ID NO: 321994 - protein, 336 aa, unidentified
MLYIGVDLHRKASQVAVVDEQGKLIFNRHVPSQRQELLRIFGEAGPVESMQVAYEATYGWGWFADLLEEVGIPAHMAHPRANKAIASARVKNDAVDAKTLAQLLRTGLLPESWIAPPETREARRLVRMRTAMVRIRSRLKNQIHALLADRGLHPEGSDIFAGDLTRMTKQLPAVTKQRAEANLRLIEELDKEVDLADSHIHKLFARDEGVRRLLPIPGVGIITAAIVVAEVGDITRFPTARQFSSWCGLTPTEHSSADNIRRGHISKQGSRWLRWVLVEAACHAYRNRELSNFEAGIASRRGDKIARVALARRIATLCYHALRSPQGCRAFPARTR

SEQ ID NO: 321995 - protein, 370 aa, unidentified
MGNASTLHVGLDVHKESIAVAYATEDGAVAPVPFGTIGTRQCDIDALVRKLQSKSGRLVFVYEAGPCGYWLYRYLTKKALTCFVVAPSLIPRRPGDRVKTDKRDALTLARLARSGDLTPVYVPAVPDEAVRDLARAREDALKDLNAARFRLKALLLRNDIRYTGRANWSTEHCRWLARLVLPTAAQQIVFQEYVRTVTERTDLVRRLEAELLEQAKTWRLSPVVEALQALRGVQFTVAITTLAELGDLTRFATPRQLMSYLGLIPSEYSSGERRRLGGITKAGNGHARRVLIEAAKAYRHRAKVSEQIQARQQRLPAAIRDIAWRAQLRLCGRYRKLLARGKHPNTVAAAIARELAAFMWAIAKARPVPA

SEQ ID NO: 321996 - protein, 363 aa, unidentified
MEYNIIGIDLAKNIFHLHAVDKYGKNLFKKKLTREKFLDFMANQPKSLVGMEACGGSNHWAREITKFGHDVKLMAPQFVKPYVKSNKNDFKDAEAICEAVGRPTMRFVPIKSVEQQDVLSIHRVRERLVKNRTALANEIRGLLHEFGVTIPRGVNKIISHVNTAMDGNKLSNKSKETFCLLLEEFRDNNKRIIDLEKRLNQIAKNNENHAKLMAIPGLGLITATALTASIGNAANFENGRQLSAWLGLVPKQHSTGGKERLLGISKRGDVYLRNLLIHGARSVFTARVLRTKKLDKVTGDKSKFTDWMFRLQERRGYNTSVVAVANKLARVVFAVLRNDQPYSEQKYVTKSLILIILRRWLIF

SEQ ID NO: 321997 - protein, 354 aa, unidentified
MATTSKQTLPALASVGIDIGKDVFHIVGFDPDGTVVLRRKIKRLALVSTFEKLPRCIVGMEACLSAHFVSRSLRKLGFEPRIIPAKYTKPFVKGQKNDYNDAEGIAEAALRPNLKLVGEKTQEQLDLQAMHRVRSRLVSRRTATINQIRAFLIEQGITVRTGAHALRNSLFAILKNREDEISSRMSDLIVGLYEDWLWLDERIETITGEIEVISKREGNCQRLMSIPGVGPMISTAMVAAVGTGDAFDRGRDFGAWLGLVPRQYSTGGRPILGRISKRGSKYLRTLFVQAAHVILMRPHNWEKFSFGPWLKEASQRMHKNKLAAALANKLARIAWSVLRNGKAFDTNRNEVTAV

SEQ ID NO: 321998 - protein, 337 aa, unidentified
MNKIMRIGLDLAKSVFVLYGVDDLERCQLRKNLKRSEVLRFFAELEPCLVGMEAGSGAHYWAWELRQLGHDARIIDPRLVAPYRSQGRTGKNDSNDAAAICEAVGRPQMPFVPIKDPDQQAVLLVHRVRKGLVNEQNRLANQLRGLLAEFGIVLPKGLHLLKRHWPTMRQRDDADRVPQLAWTELDAQYRRLTELHELILAYDRKIEAHVRRDPRAQRLVPVNGIGSITASALVATIGNGRDFKNGRQLGAWLGLVPKQYSSGGRNTLGRITKRGDEYLRTLLVHGARSELMHVHRRTDAKSQWAHRLRQEKSWNKVSVALANKHARIAWAILRDES

SEQ ID NO: 321999 - protein, 415 aa, unidentified
MTATDPTRFVGIDLGSKNNDVCIRAPGQGREEAEHRRFANTPEGIEELCGYLSDLVGGQVERVHVGAERPHGPVVEGLMRRGFAVFAVNPKQVDAFRTRYTVAEQKDDRLDAYLLAHCLETDPQVFRKVKFPDALLTLLAGLRSMHYDLTVEVGRLSSQIRAQLERYFPQILRLGTPREPWILSLLEAASTPEKAKALQGKEVADILKRHRIRRLKVDDVLSVLRTTPELLLAPGTVEAASRHVQMLIPRLRLALEQQASVYRDIQQTLRRLEEKERAEDDGRPQTVTIVRSMPGVGPLVAATLLAEAPQAIADKDYKVLRAQSGQAPVTRRSGGKIRVHRRWACNPMLTEALYHWSRVAVQKDPYWRAAYAALRARGHWHARALRTIGDRLLRVLCAALRDATLYDPTRLKAAA

SEQ ID NO: 322000 - protein, 342 aa, unidentified
MKITTVGIDLAKNLFQVHGVDERGKTVLKKQLKRDQMMAFFTNLPACLIGMEACGSAHYWANKLQRLGHTVKLMAPQFVKPYVKTNKNDVADAEAICEAVSRPNMRFVPIKNSEQQAVLALHRARQGFVKARTAQANQIRGLLAEHGIIIPKGIAYIGKHLPEILEDGENGLPGSFRILIKRLGDHLKELDRHTQELDVQIQNWHRDSTASRNLAKIPGIGPITASALVASVGDAKNFENGRQLAAWLGLVPRQNSSGGKQTLLGISKRGDSYLRTLLIHGARAVLRVAERQAHQANSWLAGVMERRNYNVAAVALANKNARIVWALLAHDREFEADYGAEV

SEQ ID NO: 322001 - protein, 350 aa, unidentified
MKVTTIGIDLAKNVFQVHGVDEHAKTVIKKQLKREQMAAFFVNMPACLIGMEACSGAHHWARKLTAMGHTVRLMAPQYVKPYVKSQKNDAADAEAICEAVGRPNMRFVAIKTVAQQSVLALHTVRAGFVSERTALSNRMRGLLAEFGVVIPQGLSKLSRRLPEELEDASNELTGVVRLLMQDLLEQLKTLDALVKKLEKQIKVWSRQDEQACLIEQVPGIGPITASAMVASLGDVKNFEDGRQVSAWLGLVPRQHSSGGKTVLLGITKRGDSYLRTLLIHGARSAILAAQKRKDGPPPWLASLLGRKHPNVAAVALASRNARTVWALLAHKRDYDPKHGLDKRISAALAA

SEQ ID NO: 322002 - protein, 345 aa, unidentified
MGMDLHKKTSNFCAMTKDGEVLRETKIPTIKEEVEKFIKSFGKQEDLKIVLEPVSQSGFYADLLESLGVEVHLAHPKRVKAIAFAKIKTDSIDAKVLADLLRTNLLPESYHSPKEYRLLKEKARGRMSLVELRTQLKNKVHGILFRNAIVYSKTTLFTKQGRRWLDSLDLSVEYKNHLNSNLVIIDSLDSEIKKMEKDFKETAIKNKSLALLKTIPGIADITAMTILSEIGDIHRFKDPKHLHSYAGLVPRIYASGESSRYGRITKEGSKFLRYVMVETAHHQLMLKRSLVGLKWYYQRIANRKNNQTAAVATARKLLTIVWKVLSEERPYQERLPKTMQIISSI

SEQ ID NO: 322003 - protein, 369 aa, unidentified
MEKDTTYVALDDSKRKIVAGILRPGDAQPELREIANDPRQIRRLFERLKREGPVAVCYEAGVSGYDLYRQITALDVACAVIAPALTPRRLGQRVKTDRRDAAKLVRLFRAGELTAIHVPDEAEEAVRDLVRCRDDIRRDVLRWRHRVLKLLARHGRAYLAGKNWSHAHWRWIREQRFDLPPLQRAFEATAFALEQALVRQAELDKELEAIATTAPYREPVGWLRCFRGIDTLSAIILVAEVVDFQRFRRPRELMAYLGLVPSEYSSGETQRRGALTKAGNSHARRVLVEAAWHYRHRPTIGRSLASRSEGQPPEIVGHAWRAQQRLHRRYRHLVGHGKRTPVAVAAVARELVGFIWAAMTPHESRSSAA

SEQ ID NO: 322004 - protein, 387 aa, unidentified
MDVLYQSCAGIDVHQANIVVCILHGPLTSTRPKREMATFDTTTKGLRACHDFLSQFHVEAVGMESTGVYWRPVWHALCDDFELILAQPAHMKAIPGQKTDKKDAHWIAKLTRIGLLPRSFVPDETIQELRELTRQRKHYVESRNRETNRIHKILQSGGIKLTTYIEDIMGLSGRNLLQLLVDGTPITPRIVHQSVYTSLKKKVPQLLEALDGYFSDHHRFMLKQSLEIYDFYQKQIELLEERITVYLSQYENHVETLDSIPGIDVITASVIISEVGVDMSQFPTSGHLASWAGLCPGNNESAGKKRSTKIRHGNSYLKKCLCQAAFAVKRQKGSPLAERYYQIQSRRGSQKATIALAHQLLKIAYILLKEQMTYPEFLAQKRLLGTS

SEQ ID NO: 322005 - protein, 356 aa, unidentified
MKNNELNFIGQDFYIGIDVHKKSWDLTIRSNGLKIKEFSMNPSPKQLSKYLNKNYPNGNYFSAYEAGFSGFWADRQLRALGINNIVVNPADVPSRSKERRRKNDRIDSGKLSRELSVGNLEGIYIPTKEEESLRILVRLREQLKKDQTRQKNRIKSLLNFIGVKLSEDIETKHWSKIYIAALRELPIEQAETKQALNELLDNLENIRIQIARIIKDLREKVFSEAEVKRIMVFLLSVPGVGFITAITFYSEIFDIKRFKKLDELAAYIGLAPAVYSSGQKEKVLGLSKQRNKYLRNLLIESTWVAIRQDPALQMSYGKLCKKMPATKAIIKMSKKLLNRMRHVWIQEEKYVLSVVE

SEQ ID NO: 322006 - protein, 483 aa, unidentified
MKSDSKEKSKKTTNHPTRPHWDEMNRKQRRETMRKIQSEDLNLEVLHPDAAGIDIGNESHYVAVPPSRDKQPVRRFGCTTAELKAMAAWLKQCSIQTVAMQSTGVYWIAVYDILEQAGLEVYLVNARDTKNLPGRKSDVQESQWLMKLHTYGLLRNSFRPSQEIRTMRTYWRQRNDLVQSASRHILRMQKALTQMNIQLANVLSDVSGMTGQAIIKAILRGERDPHKLAEFRDPRVKANEEQIARSLEGNWQSDLLFVLKQEQDGYEFCQKQIAECDSHLAQYLQQKKDRSQDATLPVEQRKGRLKKTKRKVPQFDLRERLFCLTGTDLTQIDSIDVMTATTVISETGYDMSKWQTENHFVSWLRLRPDNRISGDKIIGKGRLPTSNRAAIALKMAATTLRKSNTYLGAQFRRLRTKLGAPSAIKAMAAKLARLIYRMLRYGIKYIDQGAAFYQLKHRELQVHQLKRKAASLGYQVTPIPAAA

SEQ ID NO: 322007 - protein, 415 aa, unidentified
MDVIVDRCAGLDVHKKTVMATVRTPDGKGGRAQHTREYATFTGRLVELRDWLVAEGVTQVAMEATGVYWRPVWHVLEEAASLELLLVNPAHFKNLPGRKTDVKDSEWLAQLLECGLLRGSFIPPANVAKLRDLTRYRTKIVGERVRETQRVQKLLEDAGIKLDSVATDVLGVSSRRMLEALIAGERDPEVLAEMALGRMRPKIEVLREALVGRFDDHHALLLRMHLDHIDELLGMETRLDGDVDRLMAPFDEAATRLLSIPGVGKRVAEVIVAEIGIDMSRFPTDKHLASWAGLCPGHHESAGKRRSGKARKGNPALRTAMCEAAWAASHGKDTYLVAQIRRFKRRFGTRSDTKAIFAVAHTMIVIVWHVLHDNATYEELGADFFDRRTDTEARQRQLVRQLEALGNKVTLEPAA

SEQ ID NO: 322008 - protein, 363 aa, unidentified
MAVKATTIVGLDVHARQTHAAALDLDSGEVRVTKLVMAPHEVVSFLEGFAGRMVAVYEAGATGFGLARMGRERGIDVRVIAPGLIPRSPGDRVKTDRRDAIRLARLAAAGELRFAFVPSVADEHFRDLIRAIDDSRGDLMRSRHRLGKFLLRHGERFEGRGGNWNPNHIAWLRAHRFEDPCSMATFLDYLTATEMLAVRRAGMLEALERAVPGSSHAPVIARLRCFRGIDTLTAAGICAEIGSFERFAKPSLLSGFLGIVPSERTSDTNRRLGSITKAGPPHARRLLVEASHHYRHAPSIGITVARRQAGQDPRVIEIAWRAQRRLYARWQHLRITRRKPAGVVVIAVARELASFLWEAATLD

SEQ ID NO: 322009 - protein, 349 aa, unidentified
MDHIGIDVHKRESQIYILAEDGEIIERRIRTEPERFAAVLGGRPRARILLEASTDSEWVARCLETLGHEVVVADPNFAPMYATRSRKVKTDRRDARALAEACVLGAYRPAHRLSDPQRHVRGRLLVRDAVVRTRTRYISLIRALLRQHGYRVPSGSAESFVRRVQGLPLPGRLLSVVAPLLALMRPLNRQLAYSDETIEHLAIQDPRVPRLRSVPCVGPVTAAAFLAAIDDAQRFRHAHQLEAYLGLVPREYSSGETQRRGPITKAGHSRTRWLLIQAAVSILRRRPPQAEELRIWALRIAARRGKQVAVVALARRLAGILYALLRDGSVFEPQRVRTPRPIPAALVAL

SEQ ID NO: 322010 - protein, 403 aa, unidentified
MNSVGIDISKGRSTIAVMRPFGEVVISPFEVRHTDSELSELARQLKILDGETRVVMEATGNYHAPVAKLLHDAGLYVSVVNAKLVHGYGNNDLRRVKTDKKDSVKLANYGLDRWLTLTRYVPEEDTRLLLKNCYRQYRQYSKVQTVLKNNLISLLDTVFPNANRLFSSPIRGDGSEKWVDFVAEFWHCRCASEKSERAFTSKYLRWCRKHGYNFREAKAHTIYAEASGHIGVMPKSETTKLLVKQAVSQLRATSTALAALKQEMQSLASVLPEYPVVMDLFDVGPTLGPQLIAEIGDVRRFYSKKALVAYAGLDAPPNDSGDVTGRHKSMSKIGASSLRRTLFLVMSVYLQTAPLDEPVYQFMDRKRAEGKPYRVYMMASANKFLRIYYATVKAYLESLEHTA

SEQ ID NO: 322011 - protein, 353 aa, unidentified
MKNIRYVGMDVHKSVTVIAVINEQGQVESLTKIKTKAENFRDYFRGLSGATHVVFEEGGWSAWLYKLLKPLVSSVTVCETRHNKLIGAGNKSDEEDAEILARLLRLGELKAVYKGDDQQQQLRELFRAYDNLVEDATRVQNRLKAIYRGRAIDCDGHRLFRLDQRSDWLAKLPEQAARFRAETLLKELDTLQDLRKEAKTKLLSESKQSPDYSLLLKLPGIGPVRAASLLAIVGRPERFRTKRQFWPYCGFAVITHTSADYLEIGGRIIKQQKKASTRGLNRNHHPRLKAVFKGAALTALQHETWRAYYDGLVKKGTKPELARISVARKLAAVTLAVWQRREEYDQNKVFAKA

SEQ ID NO: 322012 - protein, 482 aa, unidentified
MAKRKMSTFERLRSGKMNREERKEWQQRLYAEDAGLEVVHPDAAGIDVGNASHFVAVPPDRDERPVREFGSWTADLRRMAEWLKQCGIRTVAMQSTGVYWVAMQEVLEGEGFEVYLVNARGTKNLPGRKSDVQECQWLMKLHSYGLLRNSFHPPEQIRAVRTIWRQRDRLVKEAGREVQQMQKALTTMNVQLANAISDLSGVTGQAIIRAILQGQRDPHQLAKLRDRRIAASETEIAHSLEGNWREDILFELQQVVDAYDFHQQQIAACDVQLQTYLSALPMRSRPGGGEPSRAEATSEKSKKPRKHKLPKNQPVFDLAAELQRTMGVDMTAIDGIDVMTTQVILSELGPDLSASFPSEDHFASWLELAPRRDVSGGKVIRHISRKSNNRVANALRMAAQSLWRSHTYLGARYRHLRARLGGQKAVKAMARYLACLVYRLLTKGRAYVDRGAAHFENKRTERELLALQRKAAEFGMQLTAVS

SEQ ID NO: 322013 - protein, 363 aa, unidentified
MNATAALPVVAVDVAKSVFQLAIADHTWRLVEQHRLSRTQFERWFINRAVGLVVMEACGSAHHWARWLSGLGVEVRLLPAAYIRAYVKRNKTDAADARALLEAARCAEITPVKIKSIEQQALQGVHRTRSLWMATRTSRINALRGFCREFGIVIAQGSRLGVEQIGRVLADPRSCVPLLIRGTMTLLVEEIRLLEVRIAQLERELTTLARQSPACTTLLSIPGVGLLTATAMVAATSGEVSHFRDARHFASWFGLTPKEHSSGSTRHLGRISKRGDRYLRMLLTHGARSVLRAASVAVRAGKTVDRLRQWALGVQHRSNHNKAACALANKLARICYATLRDHEPYSAARLNKKIARTAFALPA

SEQ ID NO: 322014 - protein, 455 aa, unidentified
MSRSKSAKGGDMPMVVPGAAAIDIGSTMHMAAVNSDADDRPVRAFGTFTGDLHDMARWFKACGVTSVAMESTGVYWIPAFEVLEEHGFHVILVNARYAKNVPGRKTDVNDAAWLQRLHSYGLLRGSFRPKAGVATLRAYMRQRERLIEYSASHIQYMQKALMEMNVQLHHVVSDITGATGMRIIRAIVAGERNPATLAEMRDVRCHATVATICSALTGNWRDEHIFALSQSLALFDFYQTKILECDRKLENTLRHLECGNGHDTARLPKVRTKTKQVNAPDFEVRSALYRVLGVDLTQIHGIGPSLALKLVGECGTDLAAWPSSKHFTSWLCLAPGNKISGGKLLSSKTRRSSSRAAALLRLAATTIGRTDTALGAFYRRLSARAGKAKAVTATARKLAVLFYNALRHGMAYHDPGAAQYEERHRSRVIGNLQRRAKAFGFALHELPAEPEMAVS

SEQ ID NO: 322015 - protein, 400 aa, unidentified
MRTVFGIDVSKASSEVAILVNGERVHGYTMPNDIIGFSRLMEDLKTVSNPEIIFEATGVYSRRLQAFLEENSYDYTRLNPLEAKKQLDGLRVRKTDKIDAEKLASSQFVLNRKPTYVQEEVYQNLHDLSRFYQNLTEDIVRTKNRLHKVLQVAFPEIENLLSTPTGEQYWNLVSIFPTKHWVLELSEVELKEAIRNSTSKRISENRVGNLTEKLVGLAKQSYAGISKTSPMVEEVKYDAQELIRLTNRREQVLQQLIALAEPLPEYKILLSIPGIAETTATSIIGELGDIRRFKSANQINAFIGIDLKHYESGDFLGQEHITKRGNPYARKILYKCIHNIASASHTNPCHIADFYEKRKRQSQITSTKPHTIASIHRLIRTMYYLIMHNKLYDYSLAQSH

SEQ ID NO: 322016 - protein, 475 aa, unidentified
MLVKGTYLRMYNQRYFLQESLAIVKFITVTARGHASGDACGSLCNCEHLPCVVPPAIVGLQDICQPNSRFDSTSPVNALLRWDEKAGLHGMRYAPNNRRARSTRERRPAVKKISTVAKRGNEIFEEPKLTIGLDLGDRTSHYGILDEAGNVILEHNLPTTPKGIQQVFSRIPRSRIALETGTHSSWVSRQLTELGHEVIMAHARNVRLGGESSRKDDQFDARTLARLARIDPDLLGPVRHRSAKAQIHLTVIRARAGLVSARTALVNTARGLAKSYGERLRKCGTGQVGRALAGGLSAALRDALDPLLQGIESLNERIAEYHRRIEQIAKEVYPEVALLKQVKGVGTLIALTYVLTLDDPHRLRRSRDAGCFLGLRPGRRNSGMSEPQMHISKEGDRYLRTLMVQGAHYILGPFGEDSDLRRWGLKLAERGGKNAKKRAVIAVARKLAVLLHKLWVSGEVYEPLRNNHKVVSAVA

SEQ ID NO: 322017 - protein, 469 aa, unidentified
MRIIGLDLAITSAHKAVVAEETGKFLTPVFTVATWPKDLAAMLCRARQGAAADLPLTVVMEPTGLAWLPVAVYLLLQQVTVYLVNSQQVADLRRYYKKHAKSDRIDARVLAKLPVVSPEKLHPLVLPSADLFALQRACKQVDWLITHITALHNQIVALDRVVWLGGWEALVFGNPFSPAARWCREHYYNPMTVLSAGTPTIRQAWRASNLDPTDAGAWAKLLVALAKQVVALYGNPSSHVDFGALQAEINLKQKWMAQFEADRDHWRLEVVRPLYRRLHPSRNLETLKGVGQDSAAIFLSFIGDPKRFANGRVFRGWSGLVPRSAQSAESEAKGLHISQAGPDLPKKYAFLDGDVGRRWDPQLAKIYYDQMVHYGKHHTQAVVAVATHLLDRILVVLQEDRPYELRDVDGTPVTVEQAQHIIAEKYTVPDDVRQRNNRRARRARTEAQAERQHARREKQKGKSASFVRG

SEQ ID NO: 322018 - protein, 347 aa, unidentified
MRFYTKQHQYYCGIDLHTKKMYVCILNRIGEIVAHRNLDTDPGAFLRFIAPYREDVVVAAECMFTWYWVADLCAREGIPFVLGHALYMKAIHGGKSKNDKIDSHKIAVLLRGGTLAQAYVYPAKMRATRDLLRRRNHLVRKRAELFGHIQNTRSQYNLPDPLGRIAKPKNREGLVERFDEPSAQRNIAVDLEMIEAYDCILVRLEKEIIKTANKHNALSYNLLKTFPGVGKILAMVMLYEIETIERFPSAGDFVSYARLVKCAKLSNGKKAGTGGNKIGNAHLKWAFSEAAVLFIKGNEPAKKYLDQLAQKHNKGKALSILAHKLGRAAYFMLKNKVAFEQDKFLSH

SEQ ID NO: 322019 - protein, 391 aa, unidentified
MFYVGIDIAKKNHEASIIDSSGKLVSESISFSNSVKGFEKLKNYISSFNIDCDNSIIGMEATGHYWLSLYSALIDSEFRVVVINPIQSDAFRKMYIRQTKNDSVDSFIIAQIMRFGEFSESSFSDEDTFALRNLSRYRFSLVDECSDWKRKLVAILDQVFPEYSTLFSDIYGVTSRNLLSKYPLPEDMLSVRTSYLAEMLSKCSKGRFGMDKAKEIKEAASKSFGIKFALKSFSFQIKQIINQISFLEEQIKEIEIEISSLISEMCPVITTITGIGDVLGAAIFSEIGDISRFERASQLVAYAGLDVSVKQSGEFVGTHTKISKRGSPYLRRAIWLAATVAAFKDPALSKYYQGLRNRGKAHGTAVGAVARKLTNIIFAVLRDNKAYIPNI

SEQ ID NO: 322020 - protein, 340 aa, unidentified
MSVMIGIDPHKGSHAAAAVDIGEEVLGELEVRATKRQTHQLLAWAERFPLRCWAIESANGHGYLLAQQLVAAGEQVVDVPSMQAARVRVLDSTRSQRNDANDARSVAIVALRNPGLRVVAAEDHVAVLRMLAMRHKQLSSLKTQAAARLHAVLATLVPGGLSSEMTPNKASRLLRRVRPASMVETERKRIAHDLLREVRRLNKERKESKARLAIAVEASGTSLTQINGVGPVVAALLIGHSGDMDRFPTRHHYAAYNGTAPIEASSGARKRHRLNPRGNRMLNHAIHTIAICQLRFSHTEGRAFYERKREEGKTPKEAIRALKRRLSDVVYRHLVADQQR

SEQ ID NO: 322021 - protein, 390 aa, unidentified
MTITNSTEDFVRLIAILRDYGMPVRIGFEATGNYHRVLIYHLGVAGFDLKLVFSVALARTREALHNSWDKNDPKDAQVILHMLQIGAVQIFQDPMVAGTNDIQELSKTHDAVSRTKTELWHRVLTHYLPLYFPEADRFHRSSRTDWFLAFLEMFPSPHMISAMTKEDFIKAAWEVVGRKVEKSLLLSDIYETAKASAGFPVAPDSDAIRMFRLMLAEGRSLIRQRNAIEDRAVELLADRPDYLLLRTIPGIGPINALTILAETGDLRRFRHHRQFLKFCGMDLATVQSGMFCGRSKISKYGNARLRRTLWLAGQTAVMKKANSFRDKFERYIAQDRHNPDLRRKAYTAIAAKMARTIHAVVKSGEPYRPFFEGVSPGGRTPLCRAVEAGS

SEQ ID NO: 322022 - protein, 312 aa, unidentified
MPAIAEPHYVGLDISKDQLDYSLSDTEEGKFPNTVADRAQFIKKLHALHTARVVCEASGGYEKVIVAELLAAGLEVCLVHPGRVRAFAHAEGLLAKTDRLDRCLLRRYGQKMAPRLAVPTDPVVATLRELLEHRRALTTQLSEVKGRLPLAGATLRQLLDAQKTFLEEQIAQVETMIEKHIDSDPGLHAKSERLQQIKGVGEVLSATMLAYVPELGKLESAQLVALIGVAPHPKESGASRAPRHVRGGRSQVRHVLYMAAVCAAWANPILAAFYQRLLAKGKPPKVCLVAVMRKMVCLMNRLIQDPNFVLAK

SEQ ID NO: 322023 - protein, 355 aa, unidentified
MSHEKYIGMDVHQATISAAVMDAHGKLLMECLLETKASTIVDFIQGLHGTLSLTFEEGTSAAWLHDLLKPHVSRLVVCDPRKAALLKEGNKSDRIDARKLAELLRTNQLKAVYHEEHGIRALKELGRSYLTITKDVTRVMNRIKALYRSWGIPCSGTSVYAPRHRAEWLAKIVEPGVRVRAEHSYQQLDSLQPLRLQARRELLRESSQHPAVKLLRQIPSIGPIRAALLVALLQTPHRFRTKRQLWVYSGFAVETHDSGEYRYVRGKRQRNRERISVRGLNDNHNQDVKNLFKSAAISASTRPGPLHDCYVARVEKGMRPTMARLTLARKIATITLTIWKKGVSFDPKHLHRQAA

SEQ ID NO: 322024 - protein, 470 aa, unidentified
MGGRNAIGIDPDSKGFVCASVKLSETKVTTRGYMATEADLGRFLKWVKDQGDVIVGIEGSNGLSKPIEKALREAGVIFYSFKPADTDMFRKTVVGQNKNNKKDAESVARYAMALESQGKLDRYRRVWFTDTELQILTRGYERNSEAMTAEVNRLWKLLRLASPDLYLALGGNNPEVELRQNMLQSQGVLALLGEKPNVGEWKNLSDEEFFSAMGGNSKGRHALIQELRKVAANVKPVTPGMALMIQSSAGQIDRFKREQRDITKMLDELTKEWPEVQRLKEMRGIGTITATTMIAEIIDIRRFVREDNLASYSGLGRREHSTGENTRMVSTRSFNHRLKDIFMTAARNYVLYNPDSHLAGYYRNLVKAGMDPMEATKRVARALVRVIFRMLSSLVEKADGEQLSEQNRKAGESDMASGSLRSDRSHESNISLSSLRGSKAGKAKRVKGAVTRTRTSKMSKKKKAVSKKIA

SEQ ID NO: 322025 - protein, 349 aa, unidentified
MWIIGCDYHPRFQQIAFVNTEGGEYGQRRLEHVGEAEQFYRPLAGAEVRVGMEASGHARWFERLLAELGYELWIGNPAAIRAAAPRKQKTDARDAEHLLRLLCEGRFEGMRIWVPTAQDRDVRQLVLHRHRLVQMRTRVKNQLKAVALNEGMERKPGLWSRRGREQFEQLSLPAWTARRRQDNLELLDELVSRTEPLDGAVEQEAQRRPEAMLLMTHPGVGAVTALAFVLTIGNPARFARGKQVASYLGLIPAEDSSGGRQRLGHLTKQGNALLRGLLIEAAHIAVLRDPQLGRCYRRLAMKKNRAIAAVAVARKLAIRLWWMWIRGFNYEQFRERGSHAGKPGLAGGV

SEQ ID NO: 322026 - protein, 340 aa, unidentified
MGYYVGLDVSLKTTHICIVDADRRVVWHGVSDTHVEMISAKLKRWQGDIVRIGLETGSLTPWLYHGLVGQGLPVVCMDARRASDALKARSEKTDKADARALAQMLASGWYSAVHVKSLDSHRLKALLGARDQLVRVKRQLYGQVRGLLRPFGIKIASRAGAKRFDADVRVACNKEDVLYIAVSALLDALAGVESQIATLDRQVRHLVTKDKACWHLMSVPGVGPITALAFRATIEDPHRFGSNRSVAAYLGLTPKRYQSGDRDVTSSISRTGDEMLRHYLYEAANCLLTTVTGTSALKSWGLKLAKRCGAKKARTAVARKLAVLLLGLWKRETHFEAQPA

SEQ ID NO: 322027 - protein, 309 aa, unidentified
MKEELVYLGVDIAKAYLDAAIGNEKSRFSNDALGHRQLINWIKQMPASVQVICEPSGGYERAFVRALVGAQLKISLVPANRVRQFARAKGILAKTDRIDAKLLCSFGEAMQPGTISASQLEQQHLRELESQRRHLTHLLVMEQNRAARMSDLCVCKMNRRLITQIKKQIEQLDRLIKGHIDQSHELSAKAAKLTAISGVGARTAALLLAQLPELGELNRREIAALVGVAPFNRDSGRMRGKRAIYGGRKPVRHGLYMAALVAAHHNPILRNFYLRLRAAGKPAKLALTATMRKLLIVLNSALKPDLSYA

SEQ ID NO: 322028 - protein, 320 aa, unidentified
MMAQNDLVVVGIDVAKDKVDACIRALSLRQTFPSTAEGRRKLISWVRKHKVTAAVMEASGGYEREWAKALREKAVEVRIVDPKRVRNFARSAGRLAKNDAIDAEMIAWFGETFGEASSQAHDAAREKLVQTVNARCALIDLQTKLQNREEHPAPEPVQKMQARLLRQLAREIAGLEAAIAAMIKATAHFAELAEIIESVPGLAEITSAGLIAAMPELGQVSNQAISALLGVAPYDDDSGKRRGERQIKGGRRKVRNLFYMACLGAATRHNPVLKAFYDRLIAKGKERKVALVACMRKLIVILNTMIARREKWDASRYAVS

SEQ ID NO: 322029 - protein, 340 aa, unidentified
MRIIGCDLHAAQQTIAMLDGDTGEVVERTLAHDGDTVREFYASIPGPVVVGLEATGSMGWFLRLLEELAIPCRVGHPAAVRKAETRRQKHDRRDADLLLKLLVEDRFPAIWMPSTEQRDLRALLLHRHQWVRMRTRVQQALQAMALSHGLRRGPTLWSRDGQAALAALPLPPHAAHRRRELVALYQHLAAQVDQLDARVAEAVLPRSAATRLMTHPGVGPVTALATEVFLGDPGRFADGKALASYVGLIPSEYSSGARQRLGALSKQGNPLLRFLWGEAAMHAVRRDPELQRFYRRKLAQKGLGKARIAAARKLGIRLWIMLRDRIGYEEFCRRSPRRPS

SEQ ID NO: 322030 - protein, 341 aa, unidentified
MQNDTRIAVDLAKAVFEIAVSNRPGRVSRRERLPRAQFLNFFALQPRATVVMEACGSARYWGRRIEGLGHHVVLLPPHHVRPYVRRNKTDRTDAKGILEASRNEEIRAVPVKTVAQQALTSLHRLRSGWMKERTARINTLRGLLREFGIFIPVGSRQVVPAVWAFIEDAEADVPDVLRPFFAELCREIRELEARILQVERQLTAMSKQLPLVGQLLTIPGIGLLTATALVAFIGDIRRFPSARHLGSYLGLTPREYSSGLKRRLGRISKRGDGYLRTLLIHGARSVLLHARTSRPDRLREWAHGLSETHVHNKAAVAVANKMARIVWAVWTRSQPYQPAAA

SEQ ID NO: 322031 - protein, 412 aa, unidentified
MTAINQFAVHVGLDWADKKHDVCVQFKNGERTFHVIEHTPEALDVWLTELHQKVKGRIAIAVELKKGPVVYALQKYPFITVFPVHALSLARYRQAFSPSGAKDDPQDAELALDLMLRYPQKIKAIEPDNADIRLLQQLVEQRRQLVEDKRRFVNRLINTLKQYYPQPLEWFSHRGSLLLCELIIRWPSLQQLKRARRDTIRNFLNAKGGRAMALTEQRVVSIDNSIPLTTDPSVIEANALMATALATQIKVVSEIIKTYDERIEALFDTLPDAELFKSLPGMGPCMGPRMLAALGDNRGRFNSAEEIQNYAGIAPVTERSGQKSWVHWRWQCAKFVRQTFVEWAAKTVNSSYWAKLYYQGLREKGKSHQSAIRALAFKWIRIIYRCWKARTQYDEAKYLLALEARHSPLLKP

SEQ ID NO: 322032 - protein, 358 aa, unidentified
MAGKVTETAVVGGVDTHKDLHVAAVVDQNNKVLGTQFFSTIRQGYRQMLAWMTSFGALKRIGVECTGTYGSGLLRYLQNAGLDVLEVTAPDRMERRKRGKSDTIDAECAAHAAFSRIRTVTPKTRNGMIESLQVLKTCRKTAISARRVALQIIHSNIISAPDELREQLRNMTRMQLIRTLGSWRPDASEYRNVTNVYRISLKSLARRYLELHDEIADLDVMIAAIVDELAPELIKRNAIGYESASQLLITAGDNPQRLRSESGFAALCGVSPVPVSSGKTNRYRLNRGGDRAANSALHIIAIGRLRTDDKTKEYVARRVAEGHTKMEAIRCLKRYISREVYTLLRNQNRQLNSIPITA

SEQ ID NO: 322033 - protein, 462 aa, unidentified
MAAPATCPVALRARIRRCRFAHPLPTSESSVTEGEVAMSEQSRRRCIGLDVHRDFAQVAIWQGGVVSEAGRFATTPEGVRAFAADLGPADEVALEATGNSWAIAALLASRAGRVVVSNPVKTRAIAEANVKTDKVDAQILAQLLAADFLPPVWRPDAQTAALRRQVLRRAHLVRQRTRLKNQVHAILHRNLIPRCPASDLFGIKGRAWLADQQLPPDERTTASALLRQLDFQDHELALIDSDLARVALGRDDVHRLMSIPGVDAIVALSIVAAIGEATRFRSPDKLVCYFGLNPRVRQSGGHTASHGRITKAGPGHARGMLVEAAWAASRTPGPLRAFYQRVRARHGMQIAVVATARKLAVLCWHLLIKGEDYAFTQPSLRAHKHRRLELRAGLPPANGRKGKSTAYSLKAVRATERDLAAQGEAAYRTMVAAWQPRRDASTSTPPRNKQAAGADASNGTRL

SEQ ID NO: 322034 - protein, 281 aa, unidentified
MEVTTIGLDLAKSIFRVHGVDTTGEVVVRRPLRRAQMLPFFARLPSCLVGMEACGTSHYWARELIKLGHEVRLMPPAYVKPYVKRGKTDAADAEAVCEAVRRPTMRFVPVKSPEQQAVLSMHRARDLLVKQRTQLVNMIRSLLAEFGLNIPKGLERALLMARRIVDGKAPDVPMEVAKIVSTLSQQALDIHVRLRQIDRDLLVWQRGNDVARRLMTIPGIGPVGATALAASVTDPRQFRSGRQFAAWLGLTPLQKSSGGKERLGRITKMGDSTCASSSLSA

SEQ ID NO: 322035 - protein, 434 aa, unidentified
MSNLSKIFPNSAGIDIGSNKVYVGIEDQPVKNFRTFTASYRELGAYLKEHKITHVAMEATGIYWVTLYDILEEMGFDVTLVNPSDSKNLPGRKTDVQDSQWIQQLFSYGLLRKSFVPQEIVRKLRVYTRMREDKLQMSSSHIQHMQKALIQMNIRIPEVLSQTHGASGMAMIKAILSGERDANVLLSYCTSDLRKRKGADILLALEGNYKQEYLFELQQAYDGYMFYIEQVQKCDSEAEKILQEYNRNTNKDYQDNNPIKPIRHNKPNIKNLHELLLGIQGANPTILPGLTDYSMMRLTAELGNDIKQWPNVKCFVSWLGLAPGKNQSGKMNKRSKKKSVTRAGRIFKQAAQSILISKQPGLGAFARRIKARRGAGIAIKATARKLAELYYKMFSEGMQYVEQGVKIYQERLERQQLKFLIKKANQLNMQLVSA

SEQ ID NO: 322036 - protein, 412 aa, unidentified
MSIPESPGVRVTAGVDWAKDDHVVCVVGEQGEVIKRFTVANDAAGLKQMTRRLLRAGVEQVGIERGDGPVVAALLLAALTIFVIPPSQVKNLRSRYGSAGNKDDRFDAYVLADVVRTDARRLRPMVFDSEQTTTLRASVRARRDLVAHRVATGNQLTAHLQSVFPAAATLFSAVHKGVALSFLERFTTQQAADWLSAKRLATWLQSVSYRGGVEPDVLHARLLAASRGTVGPHADVHAVTTRALVAVLRTLNVQIQALADSIGAQLDAHPDSAIFTSLPRSGTVRAARLLAEIGDARGRFPTADSLACLAGVAPSTRQSGKVKAVIFRWGADKQLRDALCDFAADTRHVNPWAARLYEQARTRGHDHPHAVRILARAWVGVIWRCWQDNTPYDPAVHGALQHLLHQDQQKAA

SEQ ID NO: 322037 - protein, 370 aa, unidentified
MPSITQSAAPCHIPADTDEEILLGVDTHKDFHAAAVINVLGAALDGRTFPTTTEGYRQLVAWAHSFGALRRAGVECTGSYGAALARHLRAEGIEVTEVNQPDKAAHRRRGKTDAVDAEAAARAVLSGRATATAKTSDGPIEALRLLKLAKGSAIKSRTQAINQLKSVLISADAALRESLAGLSNPHLFKRCAELDNSRGDGPADTARLVLKLLADRIQHLTGEIDNLNKRIAAGVKAHFPGLLDTHGVGPDSAAALLISAGDNPDRLSSEASFAALCGTSPVEASSGKTQRRRLNRGGDRQANAALYRIVLSRLRWDDRTQDYLRRRLSEGKTRREIIRCLKRYGAREIYRFIAAVSTAVCHADPDRTAS

SEQ ID NO: 322038 - protein, 389 aa, unidentified
MKIFVGIDIAKLNHFAAAISSDGEIILEPFKFTNDADGFQLLVSKLESFDKNSIIIGLESTAHYGDNLVRYLVTELYQVCVLNPIKTCQMRKNNVRKTKTDKVDTYVIAKTLMMQDNLRFVSFFDLDMMDLKALGRFRQKTIKQRTRLKIQLTTYVDQVFPEIQYFFKSGLHQNAVYALLKEAPSPKEIASMHMTHLANLLKVNSHGHFTKEQAKELRVLAQKSVGANDSAISIQITQTIQQIELLDSQLEKIEAEMTDIMKFNDSVIMTIPGIGYINGGMILGEIGDIHRFSNPNKLLAFAGLDPSVYQSGNFQAKTTRMSKRGSRVLRYALVNAAWNVVRNNATFKAYYDAKRAEGRSHYNALGHCAGKLVRVIWKMLTDEVKFNLE

SEQ ID NO: 322039 - protein, 318 aa, unidentified
MSQNNTITTVYAGIDVSKAKLDLSIAGARHCVNNDNQGHETLLDIITRSAAPVHAIIEATGGYEAALVGCLHSAQVLLSVVQPARVRYFARACNQFAKTDPIDADVLAAFGNAVRPAPAMPVRPEIQRLAELVTRRSQLVSSKVQHSNQAEHYTDKLARKQSRQMEALLERQILECDKAIASQIAQDEELSARNQRMQQVKGIGAVSASTLIAYMPELGSLSAEAAAALAGVAPYNNDSGPRKGSRSIRGGRKEVRTALYMAAMSAIRNDSVLRGFYLRLRAAGKKPIVALTAAMRKLIVLLNHMLKHPQFQLAQPAK

SEQ ID NO: 322040 - protein, 423 aa, unidentified
MEVLHECVAGLDVHKDNVVACVRTVSGDKTTREHRTFDATTDGLLALLEWLTSCRCELVAMEATGVYWMPVWRILSDGAFKLIVVNAAHIKAVPGRKTDMKDSTWLADLAAFGLLKASFVPDEEQHELRALMRTRKQLVREQTRHVQRIQKTLTEANIKLDSVISDIMGRNGRRMIEAMITGVRDPRKLAALADQRLKATPKQLYDALHGRLTDHHRFLLQLHLGQWDTLDATIKGVDREVATRVFRMDTEGTAAKANFSDLIDQLVTIPGVSRLSALTILSEIGTDMSRFATAGHLVAWAGMCPGQNESAGKRKRTRLRKGAPWLKTMLVQCAWAAKRKKDSYYKAQFFRLQSRRGPQKAICAVAASLLTAIYHMLKDGTIHQDLGSGYFDQRPPEIKVKRLVNQIAKLGFEVTLQPIAKAA

SEQ ID NO: 322041 - protein, 318 aa, unidentified
MTHDVAPYVGIDVGQSRLDVAVGKTGDEWATSNDAAGIPDTVARLTQLNPALIVFEATGGLEVPLMVELAKAHLPFALVHPARVRDFARAIGQLAKTDKLDARLLAHFAQAVQPPVTQLPGEQAQELNALVVRRRQLLDILVAEQNHLKTTPLAQQTSVAEHLTWLETKLAELDQALEALIAQTPEFQAKQTILRSAKGVGPVLCAKLLSGLPELGKFTRQEMAALVGVAPFNQDSGQHRGKRRIQGGRADVRQVLYMATVSAIRCNPRIKPFYQHLKAQGKHGKVALVACMRKFLTILNAMLRDMQPFQDPTVSSSS

SEQ ID NO: 322042 - protein, 345 aa, unidentified
MQVTTIGLDIAKNVFQVHGIDVDEKVVVRKQLRRSQVLEFFKALPPCLVGMEACATAHYWARELTRLGHQVRLMPAKDVKAYVKRNKNDAADAEAICEAVRRPTMRFVQIKSAEQQGRLMLHRTRDLLMRQRTQLINALRAHMAELGVVAAQGNAGLKELLKIIAGERDVRLPLDAHASLVVLAAGLHAVQTMIRSIDKRIIVEHRSNEAGKRLRSIPGIGVVGASAIVATVQDPKVFRSGRDFAAWIGLVPREDSTGGKQKLGPISKQGDRYLRRILVVGAHAVLKLARQKPEKYPWLTQLLARRPFRVVAVALANKMARVAWALLAKGGTYSRARALVAPAAA

SEQ ID NO: 322043 - protein, 278 aa, unidentified
MHPSFPERTLKDPQSGKLGARHSTTRAGYRALLRWMRTFEDVRRIGIEGTGSYGAGLLRHLLEAGIEVVEVNRPDRTDRRLRGKNDTLDAQNAALAALSGKRTTTPKTRAGMVEALRVLRLTRSTAVKSRRAALQLLRNYIVAAPEELRAQVCNLTRMQLIRTCAAWRPDATAFRDPTAATRIALKSLARRILELNDEIAELDRLIKPLVTELAPVLLQAPCIGVEIAGQLLVTAGDNPERMRSETGFAMLCGTAPLPASSGKTQRHQLSLDNEVSRP

SEQ ID NO: 322044 - protein, 340 aa, unidentified
MEKRYIGIDLHRNRFTCCIRLENQRTYVTEWELEDLGRFVKKLRANDEIAVEITGNTRLFCDAVVPHVARVVVVNTNQFKVICQSVKKTDPHDARALALYLSKDMLPEVRMKDREHGQLASLTQTRDALVKLRTALKNKINNILSARGLNLAKEALSSEKKLDEVLSLPFDQIVRIELRVIVEQIRSLNKSIVELEKTIGEEGSKLEGHKGLSSIKGIGKITGAILLSVIGDVNDFADEGRLASYFGIVPRVSNSNGTERSGGIHKRGTKLGRTALVQSALIAANYSPYLKRFYEQVKARRGAGKAIIALARKFLGIIYRTLKNKWVFQDFPNFVLAEAS

SEQ ID NO: 322045 - protein, 369 aa, unidentified
MGWTPRRRHRCAKVEVLSTTLREASVSEVSIIGLDIAKHVFHAHGADERGRVIFSKRIGRGKLLDFFAAQPSCTVALEACGGAHHWARQLTQLGHDVRLIPPAYVKAFVKRQKNDAIDAEAICEAAQRPSMRFVAVKSEEQQAAGLVFRTRDLLVRQRTQLINAIRGHLTEYGWIAPKGPSHVAMLADLIEEDEMANALPEAAHAMFRLMLDLLAGLNGKIADLDKEIARRAREDEVSRRLMTVPGIGPISATAIAALAPPVETFAKGRDFAAWLGLTPLQRSTGGKQKLGATSKMGERTLRRLLIIGSSAVVQQASKRGAPKGSWLEQMLARKPRMLVTVALANKMARIVWALLVKQENYRAPVAAKA

SEQ ID NO: 322046 - protein, 388 aa, unidentified
MNKIIYIGKDVHSTNFTLCSFEPGYGFEADKIFGQTQIKEDIFNSTVKYINKLKSMRPDVDVVCGYEAGCLGYSLHRKLKAKEIESVILAPTTMAVARNSSKKKNDYRDAITIAKCLASSAYKAVYLPDEKDEDVRDFIRMRDDHKTALKQIKQQLNAFCLRHGHHYDKTKWTGLLLNWLRKLELSKVQREAVEEYLATYETLTSKIAALDVRIEDIASEERYSEKVNKLKCIKGIQTHTALSFVCEIGDFNRFKSADKFAGFIGLVPGECSSGNTERMLGITKAGNRHLRRLVVEISNTYRRGAVGRKSVALRERQKDMPKDVVAYADKATNRCQRKYQRMMFKGKNSNQAVAAVARELCCFIFGMMTGHYSRTAQAEASVYRSELD

SEQ ID NO: 322047 - protein, 324 aa, unidentified
MTTQSIGVDVGKTELVASLRRSDGKTDVPTLFANSNVGLKQFLVYLKTNKTSSDDPILFESTGPYHWMAARTLADEGYFVKVANPLHTKQIARLSIRKRKTDKIDSQNLAFLASQNYGYRFVETEEMARKKALIRHYWKLRQSATDHLRHSQYLKNYRGIKDESVTKFMIKKCEALKKEIVKDWSKGNDIKYLDSITGITPFLGVTILSELLPLERFKTIDQIVAFSGLDPSIKQTGGKAGHHGHISKRGSPTLRETLFLAAFGSFQREPMKSIYVRYKARGLHHNTVLCILGRKILRIAVSLLKKRVVFDPKKLSTIERLTGT

SEQ ID NO: 322048 - protein, 418 aa, unidentified
MRSMEITAVGIDVSKSKSTVAIRRPGGVIVARPFDISHSNHDLEKLVSILKTTGGDIRVVMEHTSNYWKPIALTLKEAGFYVSVVNAMLIHDFSDNSIRKLKTDRADSLKIANYALTFWNELPPFNDEDETRLVLREQSRMYERLASTATSLRNGLIALADQTFPSIDQAFGHAIKNADGHEKWVDFFSIYWHRDCVLRLSIEKFTESYRKWCLRRNYKFRTNTAHKLYALAQDAVPTLPKNNGTKALVLQACKSLNAVCEAKQSTQEEMNRLASLLPEYEVVMQMEGTGPIIGPALMAEIGDVRRFKNKKALVAFAGIDAPPFQSGNFESKSRHVSKRGSPHLRRAVFLVANIILTLSHKDNSVFCFMDKKRAEGKHYYVYTIAGSAKFLRIYYARVTEYLRTQEIPVAASCLNGNS

SEQ ID NO: 322049 - protein, 353 aa, unidentified
MTDIATHNDRIATIGMDLGKRSFHLIGMDSRGKVIMRQQLSRGRFERHMANLQPCLVGVEACAGAHHIGRRLSAFGHNVRLIPAQYVKPFRKGQKNDYRDAEAIAEAVQRPTMRFVPIKSAEQLDLQALHRIRSRLVGHRTAVINQLRGFLLECGVIVPQGPAMLRKILPSVLAQRTDVLSPRMVRLIEELADDWRRLDDRVDAVTGEVQALARQDEGCRRLMSVPGIGALTASAVVATIGNGAAFTKGRDFGAWLGLVPKQLSTGDRTILGRLSKRGNKYMRTLFIIGARAVLAKPGSWAKFGLEGWLAAAAKRLHHNVLAAALANKLARIAWSVLYHGRSFARDFEPQSVS

SEQ ID NO: 322050 - protein, 336 aa, unidentified
MNTVDVNKATFFGIDAHPTTHTALAINRFEEEKGILTFDNTKAGIETFLSWIPTIDSNQDNSIIGIEGGGNSRHSLISHLLKDYHHIYEVNPLYTKHRRMFGTKADKSDPRDAKLIAEVLTRKLSELPKITKHDLSAHMLVLKKTVWFYEQTTAQGVSIQNQLHQLKREFLLSLDQTEKKTLRMMITELDKQLKSVRKTQKKCQEQLDLLLEKQGRNLTTIKGIKTILSAKIVAHSGGIARFTNLDSFIQYAGIAPREKSSGKTKRHSKSKTGSRKLNHTFYLAAMVQLRWSQKAKDYFEKKIKEGKTKKHALKCLMKRTACIVYGMLRTGEDYRE

SEQ ID NO: 322051 - protein, 365 aa, unidentified
MRIDVGVDLHKTQMTVYVRTGKDEGESSQYSVTTEGYREFLKALGKWRSKGADIRVAVESTGNTRYFMHQLEARGYPVVVINTMKFKVITQSVKKTDRHDAYTIAEFLSKDMLPESKLCSEKSEEVRRLLKVRSMLVRTRVSIKNQIHGLLVSRGMEDTRACLQSKRGRQEIQDTLAEAGNGLVVQPLFDTIEALGEEIKAIEAEIEKLMAADKAVKLLQTIPGCGPVTAWTIRAYTDDIRRFARYKQYSSYAGLVPWVECSNETVHYGKITKRGPEELRTAFVQLVMGIRRSRSTLSWRLMVQYESMKRQKGTGKSIIATARKMSKIVWYMLMREEEFKTSLMVDTKLDSVIQSMREKALCESA

SEQ ID NO: 322052 - protein, 325 aa, unidentified
MGIPTVQQNSIAECWVGIDVAKDWIDVVVLVAENKVEQFRCDRVPEPLAELARKLLPYGPQGIVLEATGGLEGAVIAALDAAGLRVMRMNPKRVRDFAGAHGLLAKTDALDAYVLALFGARMRPPLRAWPEAERLQLAAWVAREQQLVVERATERTRLQQASEPALRKSVERVIAFLGKEIERLEKQLAAWVAGSETWAEQEALLRTAPGVGPKTARVLLAQLPELGRVNRGQIAALVGVAPFAADSGKWRGRRSIRGGRAGVRSALYLASWSAVRSGPLGDFYRRLVKAGKPKQVAMIAVLRKLLLALNEMMRSGEPWRTKTSA

SEQ ID NO: 322053 - protein, 412 aa, unidentified
MKDLLEISCGLDVHKEKIVACILTGPLGKPTRSEIREFSTLIPDMIALRNWIVSKNCHHVAMESTGIYWMPIYEILEDAFYGDITLLVVNARHMKNVPGKKTDMRDSEWISTLLRAGLLNGSFIPEKRIREFRDLNRYRKSVIRDITSQKNRIEKFLQSSGFRLSSFISDIFGASGRNIILHLMEHGQIDKTALDSCLKTKTRNRIDEILMSVNGTLSEHQKTFLKILMTHYDSLKKHLAEIETSLEEDMAPFTLQVEQLNSIYGISTTASCAIIAEIGIDMKPFKTAEHICSWAGLCPGNNESAGKRKSASVTKGNPYIKSMLCEIAWVIAGKRNTYLSAWYWRIKQKKGAKKAIVALARKLLVIIYTMLKQGTLFDESCFETRRKHCEQKQLSRYIRELEKHGYHVEAQS

SEQ ID NO: 322054 - protein, 408 aa, unidentified
MKTLHKRCAGVDVHKTEVVVCLRLVTHGKVEREVRRFPTTTHGLLELAEWLESARCTHVAMEATGVYWKPVWHILDGRFALILANAAHVKTVPGRKSDVNDASWLADLLAHGLIRPSFVPPAAIQDLRDLTRTRKQLTREIAQHSQRIQAVLEEANVKLCSVITDILGASGRRMLKAMIAGEIHAHKLAALGSERLGCAPETLIDALTGHMREHHRFLLAQHLQTIEQLEKTIAAFDTRIEEKLMPFRDTVERLKEVPGLGSTATEVILAEIGPDMSLFPSAGHLLSWAGFVPRLDESAGKSRSTRIRKGAPWLKPVLVQAAWGATRKKNSYFQAQFLRLKARHGAKKAAIAVAASILTTVYHMLRDGTCYQDLGPEYFTRRNPAKAAARLANRIRNLGYHVEIRPAA

SEQ ID NO: 322055 - protein, 420 aa, unidentified
MRNAGIHANSLLEVRRMYNAVGIDVSKGKSTIAVLQPGGTVIRKPFDVSHTSQNLNELADYLSSLDGTTKIVMECTGRYHEPMVKALSEAGLFVSIVNPHLIKNFGNNSLRKVKSDPADARKIARYTLDNWTELRQYSGMDNTRTQLKTLNSQFSFFMKQKVAAKANLIALLDNTYPGVNKLFDSPTREDGSEKWVDYAYSFWHADCVRKIGLKAFTERYKSFCKKHHYIFQQDKPEKLFNASKELVAVFPKEKTYKLLIQQSIQQLNLASEHVERLRREMNELASTLPEYSTVMGIYGVGKTYGPQLIAEIGDVSRFTHREALTAFAGVDPGVDESGQHKSKSNRASKVGSARLRKTLFQIMTTLLQNAPEADPVYRFLDKKRSQGKPYYVYMTAGANKFLRIYYGKVKECLRNLEQTE

SEQ ID NO: 322056 - protein, 412 aa, unidentified
MSKNEITAVGIDVSKGKSTVAVRRPGGEIVMMPFVVLHTAEDLAELTNTLRSIGGEIRVVMEHTGMYWRPIALALKEAGFFVSVVNAMLIHDFSDNSIRKIKTDRADSLKIANYALTFWQELRDYSVEDETRQMLKIQSRLYERTLNSSVALRNGLISLLDQTFPGANKLFDEQRTKAGHIKWVDFVRRFWHKDCVAASSFSPFADTFQKWCKRTGYHYSLSDAKRIHGIARNSVATLAKNDSTKLLITQAVDSLNAVYDTLQILRSEMQRLASLLPEYEIVMGMQGAGPITGPQLMAEIGDVRRFTSKGALVAFAGVDAPPFQSGSFNSKSRHVSKRGSPHLRRVLFTICSVILQHSDPENAVFQFMDKKRAEGKHFYVYTVAGGAKFLRIYYAKVKEYLNTLDSQTGCVA

SEQ ID NO: 322057 - protein, 376 aa, unidentified
MSKVRFVGLDVHADTIAVAVAEPGGEVRAHGVIPNRLESVRKLIGKLGPAKEIRACYEAGPTGYVLYWQLTQLGVACEVIAPSLVPTKAGDRVKTDRRDAEKLARCYRAGELTAVWVPDAAHEALRDLVRAREAAKKDQLKARHRLGKFLLRHGKRPEGMKAWTKQHLEWIGTHVKFDQPALEATLQDYLDEVKHVAERIVKLEKAIDEAVRQAPPQIRAVVEALQALRGVAQTTAATIVSELGSLSRFASPRQLMGYSGLVAREHSSGNRVQRGSITKTGNAHLRRVLVEAAWAYQHRPNVTGFLLRRQKSLAISDEVKQIAWKAQHRLNKRYKAMSARGKNKNQIVTAVGRELLGFIWAIATNVEQQQAHAAAA

SEQ ID NO: 322058 - protein, 463 aa, unidentified
MARNDKGKKHKKPVRSLKTIQPDAAGIDLGSREHWVAGPALQDNTPNVQRFGTTTPELLRLADWLKEQKVNTVAMESTGVYWIPLFEILDSLGFEVILANARQVSHVPGRKTDMLDCQWLQLLHACGLLRGSFRPSDDICRLRTLLRERNTMIDQRSDWVRRIQKSLDQMNVCVHHAVSDITGVTGMAMIRAIVNGERDPRTLAQMRDRRCQKSEEQIANELTGNWRAQHLFNLRQALKMYDQFCEVVAEYDAEILAYIKSLQPGVDDDGSLPPPASKSKARNIAKKAQEPMRQALYQLTGFDLTTIDGIGVDTAAEVISELGADFSSFPDEAHFVSYLRLAPNLSISAGKKVPSKLKGTTTSRVAAALRMSALAVRNSKTALGAFYRRISRRKGASVAVFATARKLAQIIYRLVCHGQAYINIGAKAYEAQFNNRRIKYYTKALKDLGYKVKPLAVAESLTA

SEQ ID NO: 322059 - protein, 406 aa, unidentified
MKRPKEDSFKAQETKSKRRRRNKGMCLEDRPVLEPNAAGIDVGAREMFVAVPAERDENPVRVFTTFTEDLHRLADWLVQCGITTAVMESTGVYWIPLFEILEQRGIRPCLVNARHMKNVPGRRTDWHECQWLQFLHSVGLLRAAFRPEQQICAVRSVLRHRNELLQAASQHVLHMHKALTQMNLQIHPVISDITGVTGLAIVDAILAGQRDAAELAQLRDPRMKVNTETIRKSLEGNWRSEHLFTLGQSRDLYRIYQQQVVKCDLEIEEMLQQFEPRTNPAEKPLPPDRKQNRDGRKKRKKNGHPHPEFDLRTETYKLFGVDVTQIPGLDENALALFSEVGRDMSRWPTAAHFVSWLALCPDNDISGGKVLWRGARRSKTGPAIYSAWQRFPSITALRRWATICAE

SEQ ID NO: 322060 - protein, 341 aa, unidentified
MCTRQVVVLDATGKLVLETIIATEAAALIRFLQSLSGPLHVTVEESTPAAWLYDVMRGFVAEVIVCDPRRNKLLTEGSKGDKPDARKLAELLRVGMLRPVYHGHQATRALKEVVRGYETVSSDVQRTMTRIKAMFRGSGIPTSGRCVYQPQQRQQWLELLTEPGRRQRVQWLYEQLDQLRPLRRQVKQTMLQEARKHRAVGLLRSIPQLGPVRATLIVATLDTPYRFRTRHQLWSYSGLAVVTHTSAEYEMKEGRLVRSRKPIATRGLNRNCNRRMKEVFIGAATGGSQTEPYRSYMQALQSRGIRKEMARLTLARKIAAIALVIWKKGEKFDLQKLNWTT

SEQ ID NO: 322061 - protein, 400 aa, unidentified
MLSIGIDVSKGKSTVCGMKPGGEIVYAPFEVQHTREGMSELVSLLHNSGEEVRAVLESTGSYHCPVVAALLENGIFVSVVNSLRMKRFCSQSIRKVKTDRIDAMQIALYGLAYWQELQPARLPEDTYRELQLLARQYYQMTSMLIKAKVDFNAICDQVLPGMQELMNDHAGRHKLSDFVLRYCHTTHILEMGETRFRKDYCKWAEKKGYRNCERMAVLIFATAQNGIPVLPNAPSTQIVITEAIRVLHTVEASRDAILTQMQALAKTLPEYSLVREMPCIGDTLAPRLIAEIGDVRRFHSKRALIAYAGIDAPPYQSGKFCANNRHISKRGNRYLRKTGYEVMQSYVMHKPANDPIFTFIEKKRGEGKSGKLAMVAGLNKFLRVYYGKVTELYRSLPAIE

SEQ ID NO: 322062 - protein, 459 aa, unidentified
MPKKAQNHKNRKKKISVDQAWPLINPNAAGVDLGSREHWVAVPEDRDKQNVRCFGTFTSDLEALADWLKECRVTSVAMEATGVYWIPLFQLLERRGFEVLLVNARQIKNVSGRKSDVLDCQWIQRLHTYGLLGASFRPADPYCVVRSYLRYRDELVAGRSTQTQHMQKALQQMNVQLTQVLSDINGLSGLTLIEAILKGERHPLKLAGMVDRRVKCSQSQIAKALIGDYRAEHLFELKTAFELYHTYEAKISACDEELARELEKLPDRVDVKVKPLPAKTSNKAIDENLRLGLYLKLGVDLTAIEGIGALVALTTLTEVGPDLSRFKTEKHFTSWLGLCPDNRISGGKVLSCRTRRVINRLSDALRLAATTLERSQTALGAYYRRMRAKLGAAEGITATAHKLARILYRLLKHGEAYVREGMAEYEKKHQERKLKSLQMAAKSMGLELVQKESVAAGVS

SEQ ID NO: 322063 - protein, 392 aa, unidentified
MEEKAWAGVDVGKGFHWAHVVDASGTELLSRRVDNDEADFLALIDEALSLAEDVAWAVDQPGGGAALLLALLWERGQGVSYVPGLSVDRARDGYRGESKTDRKDARVIADQARMRGDLGQLEPGDDALAELQLLLARRRDLVADRTRAVTRLRETLLALLPALERAFDFNTRGPLELVARYQSSGAIRRAGRRRIAAYLNKRGVAKAEALAEKAVAAAKSQSATLPARDVAARIVAELAESVLVLKERVDALDRDLGRRFCARPEAPILSSFPGMGPILGAEFLVAVGDICAFGSADHLAAYAGLVPAAHDSGKRVGNHRKGRGGNKVLKRVFYQSAFSSMRVVPESRVYYDRKRAEGKRHTQAVIALARRRVNVLWAMLRDETTFETRSTA

SEQ ID NO: 322064 - protein, 357 aa, unidentified
MRERSTGQIEVVGGMDLGDKKSQLCVLDTESGEIVEETRLATTEACLRRRFQGVGRMRIALEVGTHSPWVSRLLEELGHEVYVANARKLRLIYENRQKDDRVDAEYLARLARVDPRLLSPIRHRGAAAQADLARVRSRAALVQARTALIGHCRGAVKSWGQRLPSCDARCFAAQASQAMPEALREALEPVLEQIAQLTQTIRRMDREIETLAAERYPETQGLRKIRGVGALTALSFVLTLDDPHRFPTSRTVGAYLGLVPARADSGESRPQLRISKEGDRYLRSLLVQCAHYMLGPFGEDCDLRRFGHRLIDRGGKAAKKRAAVAVARKLAVVLHRLWVTADDYDPFHALNTDSQAA

SEQ ID NO: 322065 - protein, 341 aa, unidentified
MRQYVGLDVAMDETKVHVLDGDGNRMWRGKCHSHPDDIEAVLRQRAPQAERIGLETGPLTTWLWTELTGRGLPMVCLDARHAKRALDMRPNKTDANDAEGLAHIVRSGWYREVRVKGSEAMLSKALAGARGQLTTMVTDLSNQIRGIMKTFGLVVPKGSGGVFERNVHALLDGAEAIATVVTPLLDVWRLARQRAAALDRRLLAAARESSECRLLMTMPSIGAVTAASFVAAIERPESFTRSRNVGAWLGLTPRRYQSGEIDYQGHISRRGDSRLRALLYEAAMRLLTRVRADSALRRWGLALKKRLGFKRAAVAVARKMAVALHAMWRSGVAFDPAPLPG

SEQ ID NO: 322066 - protein, 415 aa, unidentified
MEDMLKVTCGIDWAEKHHDIALVDENGTLVAKARITESVEGLQTLLAMLADVGDSSGCLIPVAIETPRGLLVAALRATGRPVYPINPMAVARYRERYSASGKKSDHADAVVLANILRTDMHVHRPLPADTELARTIAVLARACQDATWRRTRAGNELRSLLREYYPAMLEAAANRSGNLATPLTRALLELAPTPAAAATLSKARIAARLRRAGRSRNIDEVAAELHAILRRPQLRQDPLVEHAMGVQALRLLATLTTECASIEHLAAAVETAFQQHPDYEIITSFPGIAAQAGARLLGEIGDDRARFADARSLKAFAGAAPVTRASGRSLVVSQRRIKNDRLAAVGFTWGLSALNLSPGARAHYDRRRITGDGHAAAFRHLFNRFLGCLHHCLKTRERYRETTAFPTPAEAPAAT

SEQ ID NO: 322067 - protein, 363 aa, unidentified
MNTTTAASLVGVDLAKNVFELAVADGDWRITERARLSRAQFQRWFQNRQVGLVVMEACGSAHHWARWLAGLGIAVKLLPARYVRAYVKRNKTDAADAAALLEAARCAEIVPVRVKSLEQQGLQALHRTRSLWMATRTSRINALRGFCREFGIGIAEGSRVGVEQIGRVLADPQTAIPGLLRGTMTLLVEEIRLLEARISQLERELTNAAKQSPACATLLSVPGIGLLTATAMVAATGGSVGHFKDARHFASWFGLTPKEHSSGGTRHLGRISKRGDRYLRMLLTHGARSVLRAASVATTAGKPVDALRQWAVGVQRRSNHNKATCALANKLARICYATLRDQEPYGAARLSRKLERVAFAMPA

SEQ ID NO: 322068 - protein, 322 aa, unidentified
MSLPGPLCVGIDVSKATLDIAASSTIEPFSIANDADGFDSIIVELRKHSVALVLMEATGGLEAAVACALQAEGFELAVVNPRQARDFARAMGYLAKTDRIDARVLAQMAEVINRHPERNRFIRALPDAERQVLNAMVVRRRQLIAMLVAERNRLHPAHPQSRKSINTIIKALEDELARIDDDMNNHIRSHFKELSERLSSIKGVGAITVAALLAEVPELGRLSRREISALVGVAPVNRDSGTMRGRRTIFGGRAGVRTALYMAALVATRFNPVIKAFYTRLVAAGKPKKVALVACMRKLLTILNAMLRKNEEWNESYHHVVP

SEQ ID NO: 322069 - protein, 343 aa, unidentified
MKLHVLGIDLGKTVFHLVGLDSTGKVVIRKKCSRTQLLAFTANLQVQLIGMESCSGSHFLGRALRQQGHEVRLMPAQYVKPYVQTNKSDFLDAEAIAEAVQRPRMRFVPIKTEEQLDLQALHRVRERWVMRRTAVVNQIRSLLLERGLTLPKGRSYVDRQLPRILEDAELRLSGCFRVLLAQLKLELEQLTARIEEMDRVIQRTAKENEDCQRLTEIPGVGPVTATALIAAVGNASAFEKGRNLAAWMGIVPREYTTGGKQKLLGISKRGNKYLRTLFIQGARSVVQQRHKQSPGLSHWLAQLLGRTHQNVVIVALANKLVRMAWAVLCKNERYRAPVLTVTT

SEQ ID NO: 322070 - protein, 351 aa, unidentified
MSNSVVAFAPCGIEVSHLTLVVALRGPAHDEPLREFPNTGEGHQGLLRFLERGARPVRVAMESTGLYGLDLALTLHQAGVAVMVANPRAVRHFAQALLQRSKNDQRDAVVLREFAARMPFQPWRPPSAAALKLVAVARRLEALTDMLAAEKNRLHAASLSEALPALIRRDIQRSIQTQQRAIDRLTRTAQEFILADPELARRYELLLSIPGFGATSAVHTLAELTLLPADLDVRQWVAYAGLDPREYTSGTSVHKKVRISKAGNKHLRRALYMPALVAVQHQPQVRAYYDHLLARGKTKMQALVATMRKLLHAIYGMFKHDQLFDGQKVYTLTSPALAPALSNSEVVCAQT

SEQ ID NO: 322071 - protein, 385 aa, unidentified
MAEQIFKYSVGCDISKDAFNVCILEVSQDMQSKVKASHKFKNETKGFKEFDAWVKKHKRHDVPTGFYMEATGVYYENLAWYLFEQEYNIFVLLPYKTKHYLKSIGIKSKNDKIDAQGLAQMGSEQKHNPWRPHSKSIYALRALTRQHENVTKLKTSLQNQLHANEHSAVRNATVKKQLNATIRLLEKQLDELAGEISNLIDADEKLNQKYCQIESIRGISKLSWATIIAETSGFETFENQRQLVSYAGYDVVENQSGKHVGKTKISKKGNSRIRRILYMPSLVSVRLKEPALFNLYQRVHERTGIKMKGYVAVQKKLLVLVYHIWKNDKAFQSDYSKIFGEEESKDLFPFGFEETIKESSPDKRATQDEHSYELSSKVLFPLAQI

SEQ ID NO: 322072 - protein, 355 aa, unidentified
MTSSKYIGMDVHKESISIAVRNAAGKIAMESVIQTKASVILEFIDGLRGEVNVTFEEGTWSAWLYDLLKPHVTKLVVCDPRRNALLQEGNKNDRVDARKLAELLQNNQLRPVYHGDHGLRALKELVRSYLTINKDLSRVMTRVKAIYRSWGISCSGTQVYSSSHRAEWLEKICEPGVRRRAEHYYQQLDALRLLRLEVRKDLLAESKKYHVWKRLRGVPSIGPIRAAVLLGIMQTAHRFRTKRQLWTYSGFGVEGRSSANHQVVNGQLQRKKKSIEIRGLNKNFNHHLKNLFNGAAVTASAKPGPFQEFYAALVAKGMRPEMARLTLARKIATIVLIVWKRGVCFDANHLKSQTA

SEQ ID NO: 322073 - protein, 376 aa, unidentified
MTKILYVGMDVHAETIAVAVAEQDGEVRSHGVVPNGVESIRKLVGKLGGAKRLRVCYEAGPTGYALYWQLAALGVACEVIAPSLIPRKPGERVKTDRRDAEKLARCYRADELTAVWVPDADHEALRDLVRAREAAKKDQLKARHRLSKFLLRHAQRPPQGVKAWTKKHLEWVHAKVRFEQPALEATLADYLHEVEHAAERIVRLEKAIDEAVAQAPARMRAVIEALQALRGVAQTTAATIVAELGSLSRFPSPKQLMSYAGLTPSEHSSGNRIQRGPITKSGNAHLRRVLVEAAWAYQHRPNVSGFLLRRQKKLALSDEVKRIAWKAQLRLSGRYKKLTARGKNKNETVTAIGRELLGFVWAIAVETEAPNAAIAA

SEQ ID NO: 322074 - protein, 503 aa, unidentified
MAKTKTTSKAPGGRVTLGSPIKAGTKKRKPAGKAKRGHRKRRMPKQANMENRPLLEPNAAGIDIGAREMYVAVPPDRDEHPVRVFDTFTADLNELADWLAACGITTVAMESTGVYWIPIAEILEARGMRPCVVDARHMKNVPGRRTDWHECQWIQFLHSVGLLRPAFRPEAQVCALRAVMRHRGELVQMAGQHVQHMHKALTQMNLQIQHVISDMTGVTGLAIIDAILAGERDPVALAKWRDPRIKARPEIVEKSLVGNWQPEHLFTLKQSRRLYAEYQQQLAECDAEIERLVGEFAPRVDPEVKPLPPDSKKSRNHAKKRKKRAKKQPGTREFDLRTEVYKLFGVDVTQIPGLEFLALLLFSEVGRDMSRWKSAACFVSWLALCPDNDISGGRVLWRGARKAHNRAGQLFRMAAYSLDRSATPLGDYLRRMKAKIGPQGAHTATAHKIAVIFYAMVKNQVEYDQTIWEKRNEQRREKHTAALKRQAQRLGYQLIPIQEENAA

SEQ ID NO: 322075 - protein, 470 aa, unidentified
MGFEPGSFRWPPLRLARLCREHVSVVVVSPLLLQWFTQSEEDEVRSAGRAIGLDVHRDFCEVAIAQDGEVSSSGRVDTTPEQLELFGGSLDPRDRVALEVSGSAWEVARILERHVARVIVVSPADTGIRQARAKTDRLDARTLARLLAAGELDGVFSPDERCRVMRRRLSRREQLVRSRSRAKNEIHAVLVRRLVGRPPVTDLFGAKGRRWLSELELPLEETETIGACLRHIEFLDSEIAAVERQIASEALDSAEIRRLMTVPGVNVICAASFMAAVGEIRRFQNPRALVAYLGLDPRVYQSGSAPATGGHISKQGSASARWALVEAAWSAVRQPGPQHAFYQRVRARRGHGIAIVASARKLCCLFWFLLTREEDYAHQQPSLTAKKLRLLEIRAGAPTVKGTPTGVWATRQAMRAAERRLAEQAEASYKRMVSDWQAATPKKKAGASVTPGRASQKPSKGKVARQTTSP

SEQ ID NO: 322076 - protein, 291 aa, unidentified
MTHKGIGLFVGIDVSQDKLAVALADAGAQGDALYPGVFENTPVGVEKRLKKLSGYGGVSACYEAGPTGYGLYRQIHAHGFECCVVAPSLIPSRADGRVKTDRLDAMRLARLLRAGELAPIWVPDVTHEAMRDLVRTRERAAEDHRHKRQLITAFLLRHGQSCPRTRAWTMRYLRWLQTLSFGHPAHQIALQEMLQAERHANERLERLTRHIEARVPEWDLAPAVNALQALRGVALISAVTFMAEVGEGRRFEIPLRLMAYLGLVPSEYSTGKSTRRGGIPRAGNARVHHMY

SEQ ID NO: 322077 - protein, 443 aa, unidentified
MKELSLEIFNPHCAGIDVGSRFHQVAIGQKKEHIRRFGIYTEDHRLLIEWFKEKGITSVAMESTGSYWQTLFDALQNAGFEVILVNGNQIKNVKGKKTDVLDCMWIQKLHSLGLLSASFLPNSELQKLRTYYNHRQYLVAQTSKYSNKMQKAMRLMNIRLDVALNDIMGKSGRNIVQAILSGERDPRKLSLLADYRVKKSKEEIAKSLEGNWREDLLYELKECFFLYDVYSNKIRECDQHINDRMSSLSNQYPEVNFNEKKKKPASKFSPEFDIEGIAQRYFGVNLFEIPGVSHNTVLCFLTHMGHDIYKFPSNKHFCSWLRLSPNNRISGGKILSSRTPKGRNKVALALRQAANSVGNQKKHPMTSFFRKIAFKKGRGAAVTATARKLAVIFYNMVTKKESYKPFDHQNESENFKTKQIKKIKMKLFAMKLGAEELKNIFEV

SEQ ID NO: 322078 - protein, 340 aa, unidentified
MGNITTIGLDLAKNVFQAHAADAAGSVVMRKRLRRGQVVAFFSGLPACLVGMEACAAAHYWARELRALGHEVRLMPPQYVKAYVERNKNDAADAEAICEAVKRPSMRFVPVKTAEQQSALLMHRGRELLVRQRTMLANARRGHLAEFGLIAAQGLHKLAELIAIVRDVKDERVPDMARQVLRLIAEQIAELDTRIAAIETQIMAWHKSNPMSQRLATIPGIGPIIATAIAATVVGPGEFHSGREFAAWLGLVPRQNSTGGKTSLGGISKRGDSYLRRLLVNGAHAVLLRSKAGKTDPWLMALRGRRPRLVVAVALANKTARIAWAIMSKQDSYRFAAAAA

SEQ ID NO: 322079 - protein, 295 aa, unidentified
MDLSLAGQPPCRHTNDAAGIAALIKSLKKLPQPVQVVCEPSGGYERDLLEALWAAGLAVSLVHAARVRAFARAQGLLAKTDPIDAVVLREFGELLHPATLAAPSPQRERLAALVQRREQLVNLLSMEDQRLAQTRDAVVKKLSARLLRELGQQIEQLDALIEAQIAADATLKGQSERMQQVKSIGPVTASTLLAELPELGKLSGNEIGALAGVAPYNRDSGAHRGRRTIRGGRVRVRRVLYMAAVVATRFNPILKAFYDRLVNAGKPKKVALTAVMRKLVILLNHLIKHPEFTLA

SEQ ID NO: 322080 - protein, 355 aa, unidentified
MDSKKYIGMDVHKESISIAVRNGAGKIVMECVIETKASVILQFFDGLRGDLEVTFEEGTSAAWLYDLLKPHVTKVVVCDPRKNTSMKEGNKSDKIDARRLAELLRLNHLNPVYHGEHGLRSLKELVRSYLTITKDLGRVMTRVKAIYRSWAIPCTGKQVYAPRHRAEWLGKITEPGVRRRAEFYYQQLDALRTVRQEVRRELLAEGKRYQTWKRLCQIPSIGPIRAAVLLGILQTPHRFRTKRQLWTYSGFGIETHSSADHHSVDGQLQRAKKPISIRGLNRNCNHDLKNLFKGAAIVASSKPGPFQEFYAALLTKGLRPEMARLTLARKIATIVLIVWKRGVCFDAQHLKPQTA

SEQ ID NO: 322081 - protein, 345 aa, unidentified
MWIIGCDFHPGFQQVAIFDNQTGEIKEKKLSHPAQAMEFYRGLEGEVRVGLEAGAPCQWFRRLLQECGHQLWVGDAARIRAAETRSQKTDRRDAELILKLMLEGRFPRIWVPTEAERDVRQLLMDRHHRMRMRTKVKNQLQALAMNQGLQKGRRLWSIEGVRQLRELPMMEHAGRRRDQLLQTMASLDQQIAALDVVVRREAEAREEARRLMTHPGVGPQTALAMVLTLGEVSRFASSKQVASYLGLTPREHSSGGKQRLGHISKQGSSFMRFLLVEAGQTAVRGDAQLQRAYRRLATRKNNRALAKVMVARRLAVRLYWMLRNQWSYAELARHAGKPGSFCGEQ

SEQ ID NO: 322082 - protein, 359 aa, unidentified
MSIVAHTYPFVVGADTHSRNHALAILAPTGEVIDEQIFPTTKTGLARAVDWACRRTGGDLDALWVIEGIGTYGAQLAQAVVDAGYSPAEAPRMNARARRGTGKSDPLDARRIAAAALPLNTTQLRRPREQDGTRAAIRVLIGARDHMSTERTATINALIALVRTIDLGIDARNGLAASRITIIAAWRTRTEPLAMTTARAEAVRLARRIDALDKELHTNRNTLTTLISDTPAAGLLELPGIGPVTAAVVLAAWSHPGRIRSEAAFANLAGVSPIPASSGNTVRHRLNYGGDRRLNRALHMAIVTRIRMDPTTRAYIEKRTAQGRTSKEIRRCLKRYLARQLYRHLATAYKMPNPALDNT

SEQ ID NO: 322083 - protein, 435 aa, unidentified
MKKLEEKELERGIRAWIGIDWADEKHDVSVYDVASGKQEALVIRQTPEALQEWFGQLRSRYTDGYVAVVLEQGRGGLLNALMGCEFLVLYIINPKSLSSFREAFYGSGATSDPVDAELMRDMVRQNPSRFRAWRPDDVLTRSLRLLTEGRRDLVNQSTALTNQLTALLKGYYPQALTWIEALDTTWACAFLEQWPTLQNLQASSRRQIRRFYQQHARTSVDLNQQLKQIQEARALTQDEAVLESSALMVHALVRQLRPVLASIADFDRKIAAIFRKHPDRLIFESFPGAGAALAPRLTAAFGTDRDRFQAATEMQELAGIAPVTEKSGKKSFVHWRYACPKFIRQTFQEFANHSRRWCHWAKAHYELLRRRGKSHNAAVRALAYKWIRILFRCWKDRQPYQDKVYTQSLFKHGSPLAQLLAKSVENPRTDCEIRC

SEQ ID NO: 322084 - protein, 473 aa, unidentified
MANKKQQKKQTTSRRKNKASATQHRINTGTNPHAAGIDIGAEELVVAIPPDRCVENVRTFRSFTADIYQLRDWLLEHKITTVAMESTGNYWVNCYDLLAEAGIDCYLVNARHVKGVPGKKTDVCDAQWLQQLHAAGLLKKSFRPDQDILPLRYLHRYRDGLIRNAGDQLRRMQKVLVEMNLKLHHVFSDIDGTSAQAIINAILAGERDPKTLAALRDGRCKSSESDILAALQGQYRPELLFVLAQLQKNWLEQQKHIRDLDDEIFKLLQKIAPAQTPAENQNPPATNKTKPAKKTYQLGKNSVLLDYRRESLNYYGVDLTAIDGVGPSVLLNLLSEIGNREQLLGTFKTPDSFCAWLTLCPCNAISGGKVLRSATRKTQNPLSKALRLAAFGISNARSKLGEYCRRMKGRLGKAEGITATAHKIARILYALIQKGGNYDEATAFPPKPENRKKQLKQLEILAQKLGIQLPETL

SEQ ID NO: 322085 - protein, 397 aa, unidentified
MIAVGIDISKAKSTVAVIDSDGTVLASPFTMAHTQPEMEAFVTYLKGLGEPTTILMEYTGHYHYPVLKKLQDEGFPVCIVNPYQMKKYGDVEIHKAKTDKKDALRIAAYALEKSYKLVPYSSMEQKYEDLKFLSRQYSQRITYVAKLKVQLIALLDQTMPGITRILPLNSRNPEKCALLLFIKRFKSFDEIQRIGKARFLASYDVLAKKASERSASSKGLSIYELAVDSITTRGEDPYIWLSQNQCVDLLSATQNAADEIISQMRNIAETIPEYKVLRAMRGVGDRLGPIILAEIGDIRRFHSGKALNSYAGNDAPPYQSGQFESRNRHISKRGSSTLRKACYEVMQALKLTKPQDDPVYLFMLKKEQEGKPFNVAKMAGVNKFLRIYYARAMELYK

SEQ ID NO: 322086 - protein, 488 aa, unidentified
MKGEREDNMAAQHEAVTEAKPAQPNRKQRREQKRKIWTDDPGLDVVHPHAAGIDVGNSEHYVAIAPDKSVEAVRRFGCFTADLRNLAQFLKVHGIVSVAMQSTGVYWIPLYDVLEEAGFEVYLVNARDTKNLPGRKSDVQESQWLLKLHTYGLLRNSFRPASEIRVLRTYWRQRSEQIHTAAECVQRMQKALTQMNLQLANVITDIMGLTGQKILRAILAGERDADKLAEMRNWRIQASHEEIVASLTGNWRPELLFTLKQEVDRYDFCQRQMGECDQEIEKQLNALPSRPRETVPPVESVAPPKKRKKAQGNSPEFDLGQELVRIAGVDFTRIDGINVMTAQTIISEVGLDMERWKSEAHFASWLGLCPYNAVSGGKVLRRGTRKVVNRAATALRIAAFTLRRSDSYLGAQYRRFRRKLGAPKAITAMAHKLAVLFYRMLRFGQEYVDRGQQFYEDKYRQQQISMLNKKAAQLGFSIIPAVNHPTTT

SEQ ID NO: 322087 - protein, 386 aa, unidentified
MLYLAIDQHRKQLTVNIRNEAGDVVLRRQVSTQWEKVRKFFGDLRADSEATGGFVAILELCGFNHWLLMMLNEFGCRQTVLIRATKRSSKKTDHRDANALGEVLWTNRKRLLEGKKVQNVQRIVLPTPEDEENRQLTALRQRVGALRTRTINKVQRILLKHNLQQECPSKRLQTKKARRWLEQLSLGEVDCLEMNHLLAQWDLWDSQLLELEKKIMDRQRKHPVAAIVATMPGAGAYSSLALACRIGSIERFPRPQSLANYWGLTPRCRNSGEATDRLGSITKEGSAVARFLLAQMILHVLRRDGAMRQWYREIKKRRGSKIARVAVMRRSTTILWHMVKHNQAYVVGGPPQNRLATAGPINRTSVRAPTKGAAPIASAITSAQSG

SEQ ID NO: 322088 - protein, 343 aa, unidentified
MQISRVGIDLAKDVFQLHGVDRHEKAVWHRRLKRNNWLKVLLKTVEPGCEIGMEACAGAHHWARLLMQKGFTVKLIAPQFVKPYVKSNKNDAKDAEAICEAMSRPSMRFVSVKTVEQQDIQAAHRIRSELVSQRTAKGNQIRGLISEYGLVAPQRMNHLRAAIPMWLEDAENGLTDRFRCLLHGLWHDLKTLDNRVEELNCEINRIAESDPAAIRLQQLRGVGPMIATALVAAVGNAQQFANGRQMSASLGLTPRQHSSGNKDRLLGISKRGDSYLRCLLIHGARSAVYAAKGKEDRLSQWVTDLAARRHTNVAAVALANKTARIAWAMLTQGTDYKPDLMVA

SEQ ID NO: 322089 - protein, 347 aa, unidentified
MQILKQVLGVDVAQKELVVTLGRLKSDLSIDLYSRSIFRNTTPGIASLIKWVKKLTQVDIPVQYVMEATGVYHQKFAYYLDENGFEVSIVMPKKISSYMRTLENKTTTDKTSSDAIAQFGLERKMDHWHRPDGIYKKLQQLTRERDQIVSERVMVKNMLHAEKSEAEPNPSSLSRLKARIQFLNKQEYQVKKDIELIVKSESGLNKDIQNICSIPGVGMLTAVTVLAETNGFNLIRNKKQLTSYAGLDVKEKQSGTSVNKKPRISKMGNKAIRKSMHLPSLSAIKHDEKFKEVYARLVSKHGVKMKAIVAVQRKILELMYLLYKNNTVYQKDYESRKRVQLELADTL

SEQ ID NO: 322090 - protein, 353 aa, unidentified
MSQVTTIGLDIAKSIFQVHGVDAAGRSVLRQRLSRRRVLEFFGKLPRCLVGLEACASSHYWARELMALGHEVKLMPAQYVKPYVKRGKNDVADAEAICEAVTRPTMRFVAVKTPEQQSIMMLHRVRLILMRQRTQLSNALRSHLAEFGIVSPIGREGLDRLLTIVADTDDGRVPAEARASLEMLAVQLAGVKAQILANDRRVIASARATEVGRRLLEVPGIGPVLASAFVASVADPATFKSGRDLAAWIGLVPRQNSSGGKERLGRITKAGNRYLRQMLMVGAIAVIRYAQRNSARRPWLAQLMGRRPTKVAAIALANKTARTVWALMSSGERYRDPQAIQAAVLANGIETPH

SEQ ID NO: 322091 - protein, 338 aa, unidentified
MIVIGLDVHKRTVTAVAVDGAGRRLEEKLIEVGSDELVGWAAALDSERLWAIEDCRQLTRWLEQQLLSVGEALVRVPPKLTVPERRAGRTRGKSDPIDALAIARAALREPNPSRPRPDERVYRELKLLVDHREDLVDQRRRTQQRLRWHLHQLDPTYQVPLRMLSRGAHLERVARWLGRREQELQVRLARELVATIRQLNRAIAELDQELEQRTTAVAPALLELPGCATVTAAKLLAEIGPVDRFKSDAQLARHSGVAPLEASSGRTHRHRLDRGGNRQLNAALYRIAITQARYHAPARNYLERKRSEGKSRREALRCLKRLLVRVVFNTLKASPALT

SEQ ID NO: 322092 - protein, 335 aa, unidentified
MKHYAGIDLSMETSHVCVVDADGRKVGMQCVDSAPEAIAAVLERHGPIERAVIETGRMSPSVALGLRELGIAIVCIDARQAHQSLKAMKANKTDPHDAAGLAQLARTGFYKEVHVKSPAAHGVRSVITARGDLVEARVRLDNTIRGLCATFGIRLGAGQGERFIARMRAAASIPGLGEAVASLLRARERLVEEIGQMDRQLKAISTASPACQALMSIPGVGVQTSAAFAAAIDDASRFKRSRTAGAYFGLVPRRHQSGELDWTGRITKQGDGTVRKLLYEAANSILTRTRQSFALKTWALKIAKRRGLRKARVALARRLAVIMHAMLRDGTLFEA

SEQ ID NO: 322093 - protein, 350 aa, unidentified
MDILGGFDVHRKQITFDYMEMDSGEVHRGKIRPADRESLREWLESFTEQFPEHEAAIAVEATTGWRYVVEELRRAGVEPHLAEPAETQSLQGRKKRRAKTDRLDAGHLRDLMAIDRLPESWIPPDHVQEIRTLTRLRHNLIEERTTHKQRIHAQLFHNGHPQQKNLDSMEGRAQLEEVELPAAARQVVDLSLQMIDHINEGLEPVEARLRDYARVQAGCQALMEHHGVGELTSVALFSELGDTRRFSSSKKAVRYAGLDVTVHSSDDKRAAGKLSRQGPPVLRWAAFEAAKGAWRKNSPDHEYYLRNKERIGANRASLSVARKLIRRAHHTLRELGEEAMSEPVFASSRA

SEQ ID NO: 322094 - protein, 346 aa, unidentified
MIPVASDVHKGRCWMAMIPPGEELKMLEPIECTREAWRQRLAELPPEAEIALEVSTSGYFVMTVLEEAGWRERAHWVHTAGIDSLRKQKSDRLDTRRLVKKLAVHAVEPLPEAWFPPAPIRALRLLARQRCGIARLRAQTKNRVHSLLEMHGLRPQRCVFTAKGRAWIQQQALSSAAQLCFDRFFRRYDFLSAERESSEGELGAAAAAFPQVARLQTIPGLGHMLAAVIWSEIGDLARFDSADARVNHTGLVPSSYDSGEVSIHGPITRQGPGWLRWALITAANALTRSKSPLGQRYWHLRRCHKHPNAAKAAVAGSVARCAYGVLKHGAPFQAERWGRRAGKLGQ

SEQ ID NO: 322095 - protein, 388 aa, unidentified
MNVGADKSEPPTAIHTDLGAIFVSLELSRSSWLITSLSPGGGAKMSKHSVPGGDFAGLMERFAQLQGKAKLRTGQSFRIIVVQEAGLDGFWIHRALQNEGIESHVVDAASIATSRRRRRAKTDKIDGETLVRVLLAYKRGEPRVCAMVKAPTPDEEDRRHLCRERKALIAERVRHVNRIKGFLFSQGISRYQPLRRDRRQRLEELQTSDGRAFPQHLKALINRELDRLELLLKQIKTVEAARDALLAVGQTAMPAPAAMLLDIRGIGPEFAAILWSEGLFRHFENRRQIAAYAGLAPTPWQSGAVDREQGVSKAGNPRLRTTLIQLAWLWLRNQPRSALSIWFHQRVSRNGGRLRKTTIVALARKLLVALWKYVTAGVVIEGVTMKVA

SEQ ID NO: 322096 - protein, 351 aa, unidentified
MKITTIGIDLAKRVFQVHGVDEHGKAVLRKQLKRKDVLAFFANLQPCRIGMEACGSAHYWGRKLKALGHEVRLMAPQFVKPYVKTNKNDRNDAEAICEAVSRPNMRFVPVKTAEQQGLLSVHRARQGFVKARTAQANQIRGLLAEFGIVIPKGISHIAEHLPDILEDGENGLPGAMRQLIQRLGEHLKVLDEQAGELERQIKHWHCENEQSSQIEAIAGIGPLTASAFVATVGDAKSFDNGRQVTAWLGIVPRQQGTGGKVTLGRISKRGDVYLRTLLIHGARAVVKQAERKPEQADPWLRRLMERRNKNVAAVALAAKNARVAWALLAHGRSYQKGYVSKPPRQEMAAAA

SEQ ID NO: 322097 - protein, 340 aa, unidentified
MDEYIGLDVSLKETAVSIRRGGKRVWRGKCASDPQLLAALIRKRAPAAKRVVFETGPLSVWFFHALIAQGVPAICIDARHAKAGLDMAANKTDANDADGLAHLAEVGFYKAVRVKSFDSMLARTLVAARTRLVRIGTELSNQIRGLMKTFGLVVPSVSGGKFERQVEGLLADNTDLGQIIRPLIEAWRAVRLRAADLSGKLLADARRSDACQLLMSIPGVGVVTATSFIAAIEEPANFRRSRSVGAWVGLTTRRYQSGAVDYDGHISRRGDSHLRGLLYEAATSLLTRSRAQSDLRTWGLQLRERLGFKRAAVAVARKLAVIMHTMLTTGEPFRSTQATA

SEQ ID NO: 322098 - protein, 358 aa, unidentified
MVQRKELNFEGQNIYIGIDVHLKTWHVSILTESGCLKKHSQQSSAQALFEHLKKHYPNGNYLSAYEAGFSGFSTYYSLLDFGIECLPVHAADIPTGQYESVMKTDAIDSTKIARALKSGLLRGIYIPKKEVLDDRNVMRLRITLKRQLSGYKSRVKHLLYNNGVIYPECFQNSKSHWSKRYLKWVHEDVQLLSESRNSLDLLLRQVELFRKSLLEITRLVRTLSRNGRYGEAYENIVSIPGIGMITGMCLLTEIGDIHRFRNERQFASYLGLVPTSHSSGEKTSHGEMTFRGNKRLGPLLVESALVAIRQDRALAAAYREYCKRMLPQEAIIRITRKLSNRILIILKSGKKYEHDRCY

SEQ ID NO: 322099 - protein, 470 aa, unidentified
MNENKSSTRELSRKYRQRRGKRLPKRLELVHPHAAAIDVGSTEHYVSVRDDADPEPVQRFGCFTPELERMAQWLKQCRVTTVALESTGVYWIPVFRVLEAHGLEVVLVNPRHVKHVPGRKSDVADCQWLQQLHTFGLLRGAFVPPQEVAAMRTYARHRAGLVQRAAEEIQHMQKALTQMNLQLHTVLSDITGLSGMKIIRAIIAGERDPETLARLAHPQVKSSRQAIAQALSGHYTEDHLFVLKQAVESFDFLHSKIQDCDEQLHRYVSRFESKATPEALAKTSERPNPKRRKNQPHFDLRTELHRLTGVDLTRIDSIETLTAYTVVSEIGFDVSAFPTESHFVSWIGSICPNNTITGGKVIRRGTKRVHNRVANALRIAAQSLWHSKSYLGAYFRRMRARHGPAKAITILAHKLARIIYRMLKHGEEYVDKGEQHLEKQHRERSLKSLIRHAKELGYTLVDPATGECLA

SEQ ID NO: 322100 - protein, 373 aa, unidentified
MVSSLSLYGVVMRLRIDAKHLLRSERRQEETMNKSMTVGIDLAKAIFFVVVLDPSGKQVHRKKLRRQQVLAFLANYPQAVVAMEACSGSHYWAREIEAAGHQVKLLPPQHIKAYLRRQKNDYNDAEAIAEAAQYGRVRAVAVKTVEQQLDQSLQRMRQALLADQIGLINRTRALLAEHGIVMPEGKANFRKTVVALLEDPENGLPWRLRELVNRQYQQYCIWEQELEWYTQQIEIRANQDEVCQNLMSIPGYGEIVSSAFRCWIGDGHQFKNGRDASAAMGLVPKQYSTGGKIILGRISKCGDKRMRALLVHGARAFARVASKRNDRLSRWVCNLIERRGYNKAVIALANKLVRIGWAVVTRCEPYRAINISQ

SEQ ID NO: 322101 - protein, 350 aa, unidentified
MDTNTPALASIGIDIGKEVFHIVGFGTNGKIAFRRKIKRLALVDTFKGLPSCVVGMEACLSAHFVSRALRQLGHQPRIIPSIYVKPFVKGQKNDYNDAEAIAEAALRPNLRTVREKTQDQLDLQALHRVRSRLVSRRTATINQIRAFLIEQGIAVRTGARALRNSLMAILENRQDEISPRMRGLIADLYEDWVGLDERIETIAGEIETIGEKEANCQRLMSVPGIGPLISTAVVAAIGTGEAFERGRDFGAWLGLVPRQYSTGGRSILGRISKRGSKYLRTLFIQAAKVILMRPHNWERFSFGAWLLNATPRLHRNKLATALANKLARIAWSILRNEKVFDVPRREAMAI

SEQ ID NO: 322102 - protein, 387 aa, unidentified
MQASTMDTPTAGHCGTIFVAIELSQRSWLVTLRSPDKDKMSRHKLEGGDHAELLALVGRVRERAARALGAVPAVVSCYEAGYDGFWLHRLLLAAGITNYVFDPASIAVDQRARRVKTDRIDGEKMLRTLMAYLRGEPQVVRIVRVPAPEQEDARRASRERGRLIKEQTAHTTRIKALLRLLGMAVGNPRRRDWLNWLAAQRDWQGQAVPPQMLAEIKYEHARLMLVREQLEGLAQASAQADPAPAAAQMTERSELLLRLKCLGPAFATTLASEVFYKDFRNRREVASYFGLTPSPWQSGGIDRDQGISKAGNPRARCAAIELSWLWLRHQPESALTRWFPSRTLNNASKRNKRIAIVALARKLMVALWRYLTTGLVPEGALLKAIKA

SEQ ID NO: 322103 - protein, 356 aa, unidentified
MSRDIKYIGMDVHKEAIVIAVLNGSGKLVMESVVETKASSILQFIHGLRGELHVTWEEGTWAAWLHDLLQPQVAQVLVCNPRRNALLKEGSKSDKVDARKLADLLRTGMLRPVYHGEHGLRTLRELGRSYQTISRDLNRVMNRIKALYRGWGIACGGIQVYAPRFREEWLQKIPHPGVRRRAELLYQQLDGLQTLRRNLRPELLAESRKHKAAKLLRQIPCIGPIRAARLIALMQTPHRFRSKRQLWTYSGLGIETHDSAQYRYVRGQLQRAKKPQQIRGLNQNHNHEMKEIFKGAATRGSCGVGPLRNFYVALLDKGMKPEMARLTWARKIAAIALTLWKKEERFDAEQLKPQAA

SEQ ID NO: 322104 - protein, 391 aa, unidentified
MVCVGIDVAKDKHDCCILDSEGTTLVDCFTIPNNMDGFKSLLQTIQDCSQKSDKIKVGLEATGHYSYNILGFLLDNDLPIYVMNPLHTNLYRKSLSLRKTKTDRVDAKTIATMLLSDVDLKSYTDTAYHNEELKSLTRYRFDKVQERAKLKQSVSRLVTILFPELEQLVSSIHGTSIYALLREYPGAKQISEAHLTRLANILVKTSRGHYRKDKATHIRDAARTSIGSVMPAKSLELKHTIKLIQELTSEINEIEDAIRKIMDELKPPILSIPGMGFHSAAMILAEVGDFSNFNSPDKVLAYAGCSPSTYQSGKLTNCYAHMEKRGSRYLRYALYTATKYVCYWNPVFTEYLTKKQAEGKHYNVALSHATKKLVRLIYALQKSGKAYLAVT

SEQ ID NO: 322105 - protein, 370 aa, unidentified
MNKCHSNTELSSHEGTRCQFNGGKADIKLGIDVHQDFYVVVEQVGGTNPKPPQRFAKQAFLHWAAKLKQSAVEVYAVYEACGFGFSLQRQLSALGINCYVVCPQKLDERNKRVKTDGLDAKALCLKLDRFVQGNRDALALVRVPTEEEERSRAIHRQREQLVGARKRLEAQGRSLMVNHGIEPVQNWWKPRTFAALPVPQWMRELLLNSQPILLALQQKIAALTLQLQSAAAPNQPRGLGKMTSVLIDREIGDWHRFNNRRQIASYTGLCPGEYSSGNTRLQSCVTKHGNPRLRAALVELAWRLVRFQPNYKPVVKWRQILAKGGANRTGPIATGAVRKKAIVAVARQLAVDLWRVRTGRCKPEALGLVI

SEQ ID NO: 322106 - protein, 368 aa, unidentified
MNKNIVEAVPTASTEELKSEKSAKAKRILMGVDVHLRGYQSARKVDNGVIGAVDTSRSEVELLLHVQKQRQRAEQVVVVYEAGPLGYTLYRKLTAAGVLCYVCAPDSADQRRKRVKNNKIDARSLTSKLFNYLNGDQNAIQLARVPSEAQEQQRLASRQHDQLVEERKRLGAKGNAMLLSQGLGSWSNWWRPKAWSQLSAVAPPWLLERLQIWVDVLKILDEKIGQAKAALARGCSGPRPKGVGALSLFQLQSEVLDWSLYPNRRKIACLGGMVPSEWSTGDKEWRGSITKVGVPALRRIIIEMVWRIILFQPQYKPVQKWREVLQGTNPALRKKAVVAIGRQLMVDLWRLQTGRVTAQGLNLVMIDA

SEQ ID NO: 322107 - protein, 342 aa, unidentified
MTIQTIGLDLAKHIFHVHGIDAHGQVIVSRTLKRAEVGRYFANLPPCLVGMEACSSAHYWARTLMGLGHEVRLISPQFVTPYVKTNKSDKNDAEAICEAVSRPSMRFVPVKTNEQLDILAIHRVRHRLVVNKIALVNQIRGLLAERGLIMAREVASLRRRLPEILETADNGLSDGFRALLAELYRQLQELEHQILQYDQTIRRVYQQHEACQRLGAIEGIGPLTATALYAAAGDARVFKNGRQFAAWLGLVPKQHSSGGKPRLLGISKRGDAYLRTLLIHGGRSAVFRAGRKTDPRSRWLCALRARHHQNVAAVALANKNARIAWALLARGETYRPASPMAA

SEQ ID NO: 322108 - protein, 340 aa, unidentified
MNIKTLGVDLGKSGCHVVGQDEYGKEVVRKNFTRKAFAEYLANLPSCRVVFEACGGAHYWARKAKELGHDSALIPAQFVKPFVKSNKNDWIDAEAICEADQRPNMRYAHIRSPEQQALGSLLKLREAFVSERTACINRGHAFLLEFGINIERGRGFMGKLGKMVSDPESPIPVMMRQVLNEVHTQYKSLQEQIERLEALLGAVAKSNETMRRIMSIPGIGVMTACSVVAWAGDGKQFVSAREFAAWIGLVPRQYSTGGKTKLLGISKRGNSHLRHCLIHGARSAIQWKVDVPSAWSGWVKNLLARKPKTVAIVAMANKLARILWAVLTGNDGYQTRAAVA

SEQ ID NO: 322109 - protein, 335 aa, unidentified
MQVYGIDLSKEKFDVSFIDAKGKEKNREVKNAVVSISRFLSSVSEDSILCAEHTGVYGDILVYLCNQMNISIALVPGYTIKHSLGLLKGKSDPLDSKRIREYGERFSDKLEYAEYAEENIAEIKQLYTLRNQLVKQRRALRTVDTGRGHLPMQSISVHNHIHAVFSSLDNEITSIEDEIEALIKANQDLNENYELAKSVFGIGPVIATDLLIKTGNFKTIDTHRKAASYAGVCPFPNKSGKMVGKSKTSPHADKKLKSLLYMGAKAVVKNNKEFRLYYQKKQLEGKPHYLIMNNVSNKLLRIVFSVVRNKTPYTSDHVCLDPREKNNNSSTKKVA

SEQ ID NO: 322110 - protein, 457 aa, unidentified
MPARRKKPRPGAASPAHTIDPNSAGIDIGATEIYIAVPADRDPHPVRKFATFTEDLLAAADWLKQCGIKTVAMESTGVYWIPLFQILEAGGMKVCLVNARHVKNVPGRKSDVCDCQWLQHLHSAGLLRASFRPEQQICAVRSLVRYRDSLVQLSAMHLQHMQKALDQMNLQLHHVISDLGGKTGMAIVEAILAGERDPHQLATLRDPRTKASKDTIAKSLVGDYRREHLFTLRQSLTGFRQNGQLIADCDVEIESLLKEFSSGDGPGAEAVPEPQAELKRKPRRNEMSFDLRTQLHRIFAVDLTEIPGINTLTAHALFTEVGRDLSKFANVAAFTSWMGLCPDNRVSGGKILHARTRKVNNRVAKALRMAAQALSRSHGWLGQYYRRMRAKLGGPKAITATAHKLARIVYHLLTTGQAYDETIFAQQEAQNKQRNESRLRHQARKLGYELTLIPTEV

SEQ ID NO: 322111 - protein, 346 aa, unidentified
MLADQLDYVIGVDTHRDQHSLAVVAAASGGVVLVEPALSACPRGYQRALALAQAHAAGARAFAIEGTGSYGAGLARFLTEQGERVLEVERPVRARAPRGKSDALDAVRAARGLLGQDKLAQPRAGGRRAALQALLRVREGALTARRAALCQLRALIVTAPPPLREELRSLTRARLLRRCAALRAGGVLEERGTRLALRLLARRIELLDAEERALKREIAALVEQLAPSLLAEAGIGPISAAQVTVAWSHHGRLRSEAAFARLAGAPPIPASSGLIVRHRLDRGGDRQLNRALHTVIVSRRKHHQPTIAYIERRLSEGKSPREAVRCLKRFLARQLFRMLEAMPQAA

SEQ ID NO: 322112 - protein, 435 aa, unidentified
MAPLLNQQFKAFVGLDWADTKHDVCLQPAGEDRREFDCIPHQVVRIDEWATALHKRFGGPIAIALELSRGPIVSALQKHAFLTLFPINPSMLAKYREALKPSRAKDDPTDAKLALDLLLRHPERFSALRPQSAGMRSLLSLIEQRRDMVGDKTRFANRLINALKQYYPQALEWFEDIDTILFCDFLTRWPTLPAVKRARRKTLEDFFHVHNCRRAQLIEGRLESIRCAVSLTDDPGIVAPHRLLALMLVTQLRTALAAIDVFDKEIAAVARTQPDFDLFDSLPGAGPHLTPRLLAAFGEQRDRFKGADELQKYSGIAPVTERSGKKCWVHWRWQCPTFLRQTFVEWAGQTINKSFWAGAYYRQQRAKGSSYQAAVRALAFKWIRILYRCWQTGTRYDESIYLNALRKRGSPLLTNLSQVPGQAFRGWDRSAASSH

SEQ ID NO: 322113 - protein, 407 aa, unidentified
MTISCGIDWAEAHHDLALVDHDGKVVARERIGTGVAGFTRVGELIAEHGGSPADTPVAIETDKNLLVVALAGAGFTVYPINPRAVARYRERHSQAGGKSDPGDAAVLANILRTDRHMHRSLPVISEQGLAIKALARQHQEAIWAMNQTISRLRSVLLEFYPQAVKAFPHLKHHAATTVLAAASTPGAGQKLTRRKVEALLHRCGRRNDPRLVDQILSDLKVPALRQPGRVQSALGLTVEGLVATITAMRSSVEQLEAELGREFETHPLAPVLRSAPGLGPILAARVLAEVGDDPDRFTSANGLRAFAGTAPVTRASGRSRYVKARKVRNKRLGDACHWWAFAALTWSPGARSHYDQRRAAGEHHNAALRNLANKLIARMWWCIANDQPWDEHAAWPAFNNEEKSAAA

SEQ ID NO: 322114 - protein, 345 aa, unidentified
MVTIGIDAHKRSHTAVLVDEHGRELAQRTIGSRSSDHLELIAWARRQARERLWAVEDCRHLSRRLERDLIRSGERIVRVPPKLMAKTRTSARSYGKSDPIDAHTVARAALREPALPAARLDGEERELRLLVDHREDLVGERTRTLNRLRWHLHELDPDLEQAARSLTRVRSLDTLAASLEGLQGTVARLARELAGRCRELTLEIRALEREIAALAVRLAPSLLAIVGCGPLTAAKIVGETAGIERFRSPDAYARHNGTAPLPVWSSNRARHRLSRSGNRQLNAALHRIALTQAHWHPGARALLARRKAQGDGGLEALRVLKRRLSDVVYRALKEDAARSEQALVA

SEQ ID NO: 322115 - protein, 367 aa, unidentified
MAEVTRGAVARVGVDLSKRVFQVHAVDSSGRVVTAKPMAPERFFAWCAELPAGCLVGMEACGGAHHAARRLRLLGLDARLIAGHFVTSYRMAAGHKGGKNDVNDAAAICEAAGRPHMRFVPVKTAEQQGQLSVHRLREGYKAERTALINRIRGVLAEFGLAFPQSPEVLRRVRAEVLEDASNELTGIARLVLQRVHLHWIDLDLQMKWCDERISAHVRSDERAAKAAALQGVGPIGASALVASVSHFSQFASAKQFGAWLGLVPSQNTTGGKARLGRITKRGDDYLRTLLIQGAKSAVMTAGKRSDLISQWLVQLKERVGWQKAVVALANKNARILWAVLTRNGRFDPNHVPEAPAPHCALGQRPAI

SEQ ID NO: 322116 - protein, 361 aa, unidentified
MKKPTQHLIVEAPRKRGQVELTIGIDLGDVWSHYCTLNQHGEVIDRGRFRTTPKAIDRWFTDVPHARVAMEAGVHSIWISEQLEHLGHEVIVANVRELRAISHSDRKSDDVDAAKLARYARLDPEILRPISHRTVEQQEALTLIRARELLVRLRTAAVNAVRGLTKACGHRMPASSTKCFAQRGQAAMPPGLKLALGPILAQIADMTIKIKHYDREIQRLTQTQYAETQAMMTIHGVGHITALTFVLTLGDKARFRCSRDVGCYLGLRPKRSQSGERDPQLGITKAGNAYLRSLLIECANHILRPHGRNSALRQWGLHLAARGGKQAKNKSVVAVARKLAVLLHHLWTTQEPYVPFYQQAA

SEQ ID NO: 322117 - protein, 338 aa, unidentified
MPMQSTPECRPAQSSPLKISGKAYVGIDIGAYRLDVCFRPEDGSPGYFFSVSNDTCGFKKIRRLLTKLSVACIVCEATGKLERPLIRYLGQQGFCVAVLNPVQSVNFRKVCGKLAKTDRLDAALLARFGQVMQPTAKPLPDEHVLTLRDLVVRRRQTVGMRTAESNRSLRTDSPLAKKFIAENLRRFDRQIEKLDKNIKDYAAACPALQAKIDLLRSIPGIGPVAALTLVAEMPELGSVSDAALAALAGLAPMNNDSGLLNRRAKCKGGRKAVRSTLYLAAMAARRFNKPVALFYERLVAKGKPKLVALNAAMRKLLIIANHILASGQPWKNPLPIAS

SEQ ID NO: 322118 - protein, 483 aa, unidentified
MQRRLVGIDLGIASAHTVRVLDEAGREVCRRRCEPMVDSLTAIETAALVRTQPGTRLEVVIEPTGPAWLPIAVFFTVRGHLVFRVSSAKAADLRRFLSRHAKSNGIDADTLARLPLIDPDGLHLLELPGAEAAALDRRVRACDRLTMAAAQHKVRIKDLVRQVMPCTPLTGDLGKADLAVLERYADPRALLRLGRARLTALIGKASHNHQGQQRAEQWLTAARQALDLYGDHPAVAFTDLAAEIATEVRLLRAIDTELAGHEQERESCYRWVDPAQLARSLPGLARVGGPAMTAVIADPARLPSAAHFKSYLGLAPRASETGNTDRKGQPMSKAGSRLARATLIRAADWARKQDPQLARVYHQQMVERGAEHLKANCVVVARLAERLWAVMRRRMPYVICDVDGNPVTPEHAKQIIAEQWTVTEEVRSRRRSNKSRAGKAPHQVRTGHDQDARSVTRRPSPRRSSAKPSQIVKSTNHLTTDPR

SEQ ID NO: 322119 - protein, 316 aa, unidentified
MLIACGIDVSKNTLDVCLLINGTPIYSIYPNDDLGFSGIVQLLHSNKISLTGFESTGVYHKKLQSYLVGNGYEPFIIAPLSISYFRKSLKIQGKTDKTDSYAIAYYLLKGDNLNSLVYPVRDYFKPFTTSIVQLDKQSRQLSNLIHSLEYGKDTDSLILELTKAIVVIKDTRKVLFDHSVNLLRDRCPEFDLVKNDIKGVGDTLMLFILPFLYDHFDKFNVRQITSFFGLNPVSFQSGTSVKRRDKISKRGDKQVLKMLYMASVASVRSNPIIKEKYLKQKLAGKHPKVALMAVMSHLLRAIVSRLSHHTGRPIKK

SEQ ID NO: 322120 - protein, 435 aa, unidentified
MEEVEDEPLFCDRVAGIDIGKATVMVTVRVPSETRKGGRQQETREFGTTRRELLALADWLRCWQVEKAGMESTSDYWKPAYFLLEREGFDCLLYHASQVKALPGRPKTDKLDSAWLAKVTERGSLAGSFVPPEEIRRLRTHTRYRRRLVQMRTAQKERCEKLLEDAHLKLSSVISDIHGVSGRDMLRAIAAGERNPRVLAEMARGVMRGKIRRLEEALDCSFFTGEHAFILTMMLDSIDQLTAQVAVLDEKIAEMCEPYERQIAQLDAIPGFGVTTAQDLIAEIGTGMSVFPTAGHLASWARQAPRVAESAGKRKGKNATGRGNPYIGGALGEASVSVGRTQTFLGAKYRRLNTHMPKKKAQVAIMRTQLVIAHALLSDPAAEYQDLGPDYYERRADARRRARGHARALERLGYKVTLQAPDPETGEYLPIATAS

SEQ ID NO: 322121 - protein, 378 aa, unidentified
MTAVLQNKDSANDTTLYMALELSNKKWKLGFSNGEKNRHTTIVAGDWIDLHKQMDLAKQKLRLQEDCRIVSCYEAGRDGFWIHRGLEAEGIENHVVDSSSIEVNRRKRRAKTDKVDVKALLRLLQRYWHGDREAMSVVRVPTVEEEDQRRLHRERIRLIKERGGHSARIKSLLVAHGIRLEIRTDFLERLEAAKGGSTGYELGSDLKAELRREYERYRMVHQQIKALEGEQQLRAEEEETEAMKQINQLLKLKGVGWQSSWILVMEFFSWRDFRNQRQLGACAGLTPTPYASGDSEREQGISKAGNRQVRSLMIELSWLWLRYQPNSTLTQWFQQRFAGGGKRMRRIGIVAMARKLLIALWRYVKEGLVPEGAVFKVA

SEQ ID NO: 322122 - protein, 399 aa, unidentified
MNRNRTVAGLDVHKDSIYLCIMGHDGTIIFEKTYGVLTPNLRQMCQEMVERGVTEAAMESTAVYWVPVWNELCESMELKLVNPYFIKQLPGRKSDVKDAQWIAECLLKNLIRGSFVPEPIVQDMRKLNRRIFDLQEDITYYTNKLDAVLHRCGFRLSNYVCKITGKSYRKSVASIAEGKTDPETILKCIHGRVLNKHGRNTLLSAVTASFSETDITVIRQYWELIAVYLRQSEECQSELTTLCERSFPIEYKRLQTIPGVKERAATAIIAETGVDMKMFATAAALVGWCGLKPRNDVSNGRYKSRKITHGNKYLRKILIEISWTASRTRNCFFSNFSYIQVTQKHKSKMKIQVAIARKILVAVWHMLSKEEDFIDIYLKRLKEQKLMEEKLKSLESKMG

SEQ ID NO: 322123 - protein, 317 aa, unidentified
MAVVNHEKQAIQTGHFDNSEAGMKSFAKWLKSNKVTMDENSLLVIENTGIYHRLLWAFCSQKGLPIHIGNAAHIKKSFGIARGKNDKIDSIRLCQYACRNADELMVTGLLDPVLMKLKDLTTARARLISQRNGTKTFIRELRNINDKSLQKVMEQSHKHAIEGMSKSIAKVEAEIKKTIEGNEAIKKNHDLVITVPGIGPVTAVYLICCTANFAGNRSGKELACYAGVVPFGNTSGVSIKGKERVHPMANKDLKKLLFLCAMSAIQFAPEFKKYYERKVESGKHPMSVLNAIKNKILLRVAAVVKNQKPYVDYFQAA

SEQ ID NO: 322124 - protein, 412 aa, unidentified
MPKIVYPVCCGIDVHKSFVVACIATTNEQLVTTYSHYKRFSTFTGDLRRLAKWLADNNCRDVCMESTGKYWIPVWNILEPTCNLVLAHPKYLKAIKGKKTDKRDAKWIADIFKHDLLNGSLILPADIRPLRDLVRYHIKLTSYTTGEKNRAQNCLTVSNIKLDDVFTDVFGKSAAAITSQLLEHPGEAFDVAPFVDRRCKTPIEEIQAAVDGVICANQTEKLRIIRSHMENLELCKANLESQILSVAEKFLPQVNLVLTVPGIQSFSAIAIIGEIGVDMSVFETSRHLCSWAGLAPQNDQSAGKKKTTRVSRAGVYIKPILVQCALCAIRSKKHPEIASRYNAIKKRRGHKKAIIAIARMLLTAIYNILKKNEPYNAELYRQSDKPPVQREVTVEQAIYILQRQGYLVTATT

SEQ ID NO: 322125 - protein, 417 aa, unidentified
MKVVYQICCGVDVHKSFLVATIIKSEGLMPKYTKKRFSTFNNDILRFKQWLLENNCRDVCMESTGKYWIPVYNLLEDEINVVVASPKWVKAVKGNKDDTKDSKWIGDLFRLGLVPGSFIPPKPIRVLREYTRYRYKLVSCKSSEKNRFQNSMTVCNVALDSVVSDMFGVSASKITDYLIESDDFDPEHVKSLLHGRMLSKADAIVESIQGYQLSKAQKYRMSVINSHLDFVEKSIGNLDSKLDSLVEPYESHIALLCTIPGIKRQSAITIISEIGVDMSTFSNSKKFCCWAGLTPGNNESAGKKKSVRITRAGVYLKPALVQVAHAAVKSKDSPYYKNKYERISKRRGKKRAIIAVARMILTAIYHMLATGELWNPSDLFKVDMPCALQERQKKKAIKNALILLQREGIIEAEDIPA

SEQ ID NO: 322126 - protein, 455 aa, unidentified
MPKQKRTRNARTLPVARVLEPNAAGIDIAATEVYVAVPTGRDPQPVRRFSTFTDDLHRLADWLQACRVQSVAMESTGVFWIPLFQILEDHGFRVCLVNARHVKNVPGRKTDVSDCQWLQYLHSVGLLRASHRPTQTICAVRSIWRHRESLVQMAAVHIQHMQKALDQMNLQLHHVISDITGTTGLAIISAVLGGERNPENLATLRDPRIVASRETIARALVGDYRVEHLFTLRQSLQAYRQYQQWIAACDSEIERQLQVLPSNLPDDPKPLSKPRDHHKPRRNEPRFDLRSQLYRVFGVDLTAVPGVSSLTAHTLLTEVGPDLRRFPNAAAFASWLGLCPDNRISGGRVLSVVTRKVKNRLTIALRMAAQSLHRSQSYLGQYFRRMRIRLGTPPAITAAAHKLARVLYHLITTRQPYEESTFAAMEERARQRQLLRLTKQAARFGFQLVPGRSVP

SEQ ID NO: 322127 - protein, 354 aa, unidentified
MKCTTLREPSMGEVITIGLDIAKSVFQAHGVDEAGAVVVRKRVSRAKLLEFFASLQPCLVGIEACPAAHHWGRELQALGHTVKLMPPSYVKAYLKRSKNDANDAAAICEAVTRPSMRFVPIKTKEQQAALMLHRARQLLVRQRTMLSNAIRGHLAELGIVSAKGRKGTGALLEIIADAEDGRVPPAARGILDVLARQYSALGAEIGSIDRSIVAWHRSCEASRRLEEIPGIGPIVATALVAEIGDWKAFGSGRNLAAWIGLVPKQQSTGGKDKLGSITKQGNRYLRWLLVAGAMAVIRYAQKHGTLKRPWLGRLMARRPTKLAAVALANKIARMAWAIIVHGDRYREPKPLLAA

SEQ ID NO: 322128 - protein, 443 aa, unidentified
MKEKKNGLPVIQADAAGIDISSKEHYVAVNPERDDKPIRCFGAYTEDLHALRDWLKECKVQTVAMEATGIYWVSLFLVLEEAGFEVLLVNARHVKNVRGKKTDMSDAEWIRQLHSCGLLKASFQPDEFTRTLRTYIRHRKNLLEMAATHIRMMHKAMEQMNIKLQHVIADITGKSGMAIIQAILQGERDPENLVRLLDGRIKANKEDVKRSLQGVWKEENIFELEQSFEMYHLYRSKITDCDKRIENIILQKTGPQPNVNEPKKQYVKNNKNNLNFDATGMLQQITGTDVTEIFGINDSNALEILCETGFDMNKWPTEKHFTAWLNLAPNNKISGGKILSSRIAKKKNQAGQVFRLAAYAIQRSKNWLALFYHRIKSRSGTKTAITATARKIAVIFYKMLKDKVMFNPVSINEYADSFKQRQLKKLDRQARSFGLKLTPRLTS

SEQ ID NO: 322129 - protein, 345 aa, unidentified
MEHYAGIDVSLESAGLCIVDATGRIIREAKVASEPGVLIDWFRGLGLAVTRIGLEAGPLSQWLYAGMREAGLPVELLETRHVRDAFKAMPVKTDRKDARGIAQLMRLGWFRPVHCKSLPAQEVRALLTARKLLQTKNHDVEMSLRGVLRGFGLKVGPTTPRTFAARIRELVAGHPTLSTVAEALLAARSTLFEQWQQLEKRLRSLAREDRRVRLLMTAPGVGAIVGLTYVSAIDDHSRFRSSKAVGAHFGLTPKKYQSGETDVTGRISKIGDGSVRTALYEAANVILTRPVKGSTLKSWGMRLAARAGMRKAKVALARKLAVLLHRMLADGTEFRADKAAAAEAR

SEQ ID NO: 322130 - protein, 457 aa, unidentified
MGRKGKRTEGLEESHPFSGMSQVNPKAAGADIGAVEIVVCVSGDENTQIVRAFGNYTVDLQAIGRWLKEYQVETVAMESTGVYWIPLFEELERQGFECLLISSRSLRRVAGRKSDITDAQWIQTLHSYGLLESSFRPQAELIALRTLLRHRNQLVEHRSPHILHMQKALLQMNVQLSQAVTDITGVTGQTILRAILAGERDPQELSSMREPGCKKSAEEIGKALTGTWREEHLFILKQSVEMFDFYTGQIRSCDEEIERVYGLTRPDWEAGEVKPLGERKRNAHSKNRPQHPEEIRKHLKRISGVDLSVVDGFGVSLAQTVIMEVGTDMRKFPSEKHFCSWLGLAPKHEISGGKVLKNKTLKTKNRAGQAFRMAAQSVKQADCVFGVTYRRLKARLGPAQATVATAHAIARVVYRMLKYKVEYETISVEEYEKKYQAQQLKYMNKKAAKMGYRLVPA

SEQ ID NO: 322131 - protein, 319 aa, unidentified
MTTTSYTLGLDTSKAWLDAALRPGGQTWREANDEAGFDRILARLATLGEPATIRVVIEASGGYERPAHKALTLAGYAVAIVNPQRVRDYARSRGRFAKTDRIDADTIAAFGETNRPRLTPLAQPQRIRLAELLAYRQQILEEITQRSLQAKRFADSQLRRRAELHLDRLRQDRDDITAEIRNTLQDTPDFAPLARILTSFKGVGPILAATLIAHLPELGFLNDKQIASLVGLAPFARDSGNLRGKRMIQGGRAKIRCVLYVAALAAIRHNPAIQAFRQRLGLRNKPGKVVVVACMRKIIVILNAMAKSMTPWIYPNPAL

SEQ ID NO: 322132 - protein, 390 aa, unidentified
MDILYESCAGIDVHQANIVVCILHGPLTSTRPKREMATFDTTTKGLRACHDFLSQFHVEAVGMESTGVYWRPVWHALCNDFELILANPAHMKAIPGQKTDKKDAHWIAKLTRIGLLPRSFVPDETIQELRELTRQRKHYVESRNKETNRTHKILQSGGIKLTTYIEDIMGASGRNLLQLLIDKTPITARIVHQSVYTSLKKKVPQLLEALDGYFSDHHRFMLTQSLEFYDFYQKQIELLEERINSYLSQYEKQVDILDSIPGIDWITASVIISEVGVDMSQFPTAGHLASWVGLCPGNHESAGKKRSTKIRHGNSYLKKCLCQAAFAVKRQKGSPLAERYYQIQSRRGPQKATIALAHQLLKIAYILLKEQVTYPAFLAQKKTTRDELAA

SEQ ID NO: 322133 - protein, 360 aa, unidentified
MEVGQTVADHGVVGGVDTHKDLHVAAVVDALDRVLESRCFATTRHGYQQMLTWMRSFGQLRRIGVEATGTYGAGLLRYMQNAGVEVLEVTTPDTHDRRKRGKNDDLDAQNAAHAAFAGRRTVTPKSRDGMVESLRVLKACRKTAVAARRVALQMIHNTIVCAPDELRETLRRMTRMQLIRTLAAWRPDLTDYRSVVSAYRITLKSLGRRYLELHDEIADLDTMIVAIVDELAPALVARNSIGHGSAAQLLVTAGDNAERLQSEASFAALCGASPVPASSGKTTRHRLNRGGDRAANSALHIIAIGRLRTDPRTKAYIAKRVAEGHSKLEAIRCLKRYIAREVFSLISQRKREINQGRNAA

SEQ ID NO: 322134 - protein, 437 aa, unidentified
MSDKKSVELRVSVDVGYRRQSVAIGLPSGEVLEEFEIAHRPEGFAEFFSRIETHQKVRDCEVAVAMEGFNGCARPLDAMVRRHGYRLYNINNLKLARFKEIFPGAAKSDRIDARKGLELFQLSDHLPLAKEVLQEVKGTPRENEVLKRLTRRRRRLVDEQIRVISNLQTDLQAVCPGLLEITKNAGNQWFLNFLVSAPTLPQLARLRPATLLKVPAVGRKYARLIEDWQKRAHFSEEVEWVSEMIQEDAQRCLDLDEKIKALRAKIKEVAKDSTIVKVLLSIPGFGTICTAELAGEIGTLERFSKEGSLALYIGMSTLDNSSGKYQGSKQPKHVNTRAKAAMMVALDRHRKFVPESQRYYEKKRSEGKKHNQAIRALGRHLCRIIYKLLKEEREYEIRLEKGNTKGKVSPRSLIKTQIRKAKISTKGTNNKIYQQST

SEQ ID NO: 322135 - protein, 389 aa, unidentified
MKIYVGIDIAKLNHFAAAISSDGEIIIEPFKFTNDADGFQLLVSKLESFDKNSLIIGLESTAHYGDNLVRYLVAEFYQVCVLNPIKTCQMRKNNVRKTKTDKVDTFVIAKTLMMQDDLRFITFFDLDMMDLKALGRFRQKTIKQRTRLKIQLTTYVDQVFPEIQYFFKSGLHQHAVYALLKEAPSPKEIASMHMTHLANLLKVNSHGHFTKEQAKELRVLAQKSVGANDSAISIQITQTIQQIELLDSQLEKIEAEMTDIMKFNDSVIMTIPGIGYINGGMILGEIGDIHRFSNPNKLLAFAGLDPSVYQSGNFQAKTTRMSKRGSRVLRYALVNAAWNVVRNNATFKAYYDAKRAEGRSHYNALGHCSGKLVRVIWKMLTDNVEFNLK

SEQ ID NO: 322136 - protein, 393 aa, unidentified
MQDESGRRLARRRLPEGVAGIAGLHALLAEHLPVQAGPGEVVVGIETDRGPWVGALVAAGYQVFAVNPLSAARYRERHVTSGAKSDPGDAKVLADLVRTDRHNHRPVAGDSELAEAVKVLARAHQGLIWTRQRQTNTLRSTLREFYPAALAAFDDLAGRDALAVLGKAPTPERGRALRLTQITAALRAGGRQRNVTARAQEITAALRSEQLAAPPLVAEAFGATVTALVAVIAELLRQIELVQDRLESSFNTHPDAEILRSLPGLGPVLSARVLAEFGDDPHRYTDAKARKNYAGTAPITRASGTRRIVLARIARNRRLADALYLWAFTALTSSPGARTHYDTQRARGATHHQALRALANRLVGILHGCLRHHTRYNETTAWPNTTADNAHAA

SEQ ID NO: 322137 - protein, 570 aa, unidentified
MVVVGTDAHKYSHTFVATDEVGRQLGEKTVKATTAGHATAIMWAREQFGLELIWGIEDCRNMSARLERDLLAAGQQVVRVPTKLMAQTRKSARSRGKSDPIDALAVARAVMRETDLPLATHDETSRELKLLTDRRDVLVAQRTSAINRLRWLVHELDPERAPAARSLDAAKHQQALRTWLDTQPGLVAELARAELTDIIRLTGEINTLAQRISARVHQVAPALLEIPGCAELTAAKIVGEAAGVTRLKSEAAFACHAAVAPIPVWSGNTAGQMRLSRSGNRQLNAALHRIALTQIRMTDSRGQAYYQRLQDAGKTKRAALRCLKRRLARTVFQALRTVHQPSSEHTQPAAACHRSYCSSHLGEPPRLTDMTQKTRIQPLPPKRAGLLIRALYRIAKRRFGEVPEPFTVTAHHRRLLIANVVHEALLQRASRKLPPSVRELAVFWTARSIGCSWCVDFGAMLQRLDGLDVDRLTDIDNYATSSKFSDDERAAIAYAEAMTADPHSVTDEQVADLRARFGEAGVIELTYQIGVENMRARMNSALGITEQGFNSGDACRVPWAAPDVPSAESR

SEQ ID NO: 322138 - protein, 417 aa, unidentified
MTDDVQWFAGIDWASQTHQACLLDAGGEIIGERAFAHDGAGLAELCAWLLATTGAEPATIAVAIEVPHGPIVEMLLERGFQVYAINPKQLDRFRDRFTVAGAKDDRRDARVLGDSLRTDRHCFRHLAAEDAVVVELREWSRMTEELQQERNRLANRIREQLWRYYPQALAISDDLAANWFLELWAAAPTPGKAARLRESTVERLLKTHRIRRIAAAEVLRLLRQPALRVAPGTAEAASAHIRAVVARLKLVNRQIRDAHQRLDALCARLAGDDGEPRPGQEPEQRDVTILRSLPGVGRIVLATLLAEAAEPLRRRDYHALRTLSGVAPVTKRSGKRCIVVRRQACQLRLREAVYHWARVATRLDTLSRRRYAVLRQRGHSHGRALRSVADRLLAVACAMLARQTPFDPAYTGKRAAA

SEQ ID NO: 322139 - protein, 367 aa, unidentified
MKKVSTTAAKQRKNFREHKLTIGLDLGDRSSWYCVLDEAGSVLLEQRLSTTPKAMGEGFGAMPRCRIALETGMHSPWVSRLLGELGHEVIVAHARNVRLIGESRKKDDRLDARMLARLARIDPQLLAPVRHRSARAQADLTVIRARAGLVRARTALINTARGLAKSYGERLRGCSPRNVNPEKAQGLSPELQTALEPLLAAVESVSERIREYKERIEQLAQQSYPQVALLKQVKGVGTLIALTYLLTLEDPHRFRKSRDVGCYLGLQPGRRNSGQSEPQLHISKEGDPYLRTLLVQGAHHILGPFGADSDLRRWGLKLAERGGKNGKKRAVIATARKLAVLLHRLWVSGEVYEPLRNSSQAPVPAAA

SEQ ID NO: 322140 - protein, 344 aa, unidentified
MNEVITIGVDLAKNIFQVHGVDAEGGVVVRRQLRRGQMLAFFKKLPPCLVGMEACATAHHWARQLIGLGHEVRLMPPHYVKPYVKRSKNDATDAAAICEAVTRPTMRFVSIKSMDQQSVLMLHRTRELLVRQRTMLINAIRAHMAEFGIVAPTGVPRIKELLTVIADEEDLRLPSLARTCLESLVRQYLSLNDEIIAAEQRITRWHRSNEVSQRLETIPGIGQIIASALAATVTDPEVFKSGRELAAWIGLVPRQNSTGGKQRLGKISKQGDQYLRWLLVAGAMSVVRHAKRRGRTDLPWLADIIDRKPTKVAAVALANKNARIVWALLRHGGTYKNPSSVSAE

SEQ ID NO: 322141 - protein, 501 aa, unidentified
MKTKRRKAKLQAGIRSISVTSNEAEQKLEIMRPDAAGIDCGAQEHYVAVLVDRVSAGQPTVRSFSAFTEGLDAAVDWLKECRVTTVAMESTGVYWIPLHQKLEAAGIEVYLVNARPVRCVPGRKTDVKDSQWLRQLHRFGLLNASFRPEDITCRLRSLHRHRDNLVSSSASEIQHMQKALQQMNLHLHHVVSDITGLTGLRIIDAILSGQRDPQELIKLRDKRVSKSTPQQMQAALVGDYRAEHLFVLSQSLQAYRFHQARIEECDRQTEPLLEKLAQQVEAASARLKPLKGAPQEERLPVPRNELKTGTSASGQPNKAKRKHKPIANEPKIELAGLLERICGIDLTQVVGLNVLSVLLIVSEIGIDMSKWRSAKAFCSWLGLCPGNKISGGKVLDSRTRQVVNRVADALRLAAQSAGRTETCLGIFYRRKQAHLGAPKATTATARKLACLIYHLLKYKQPYQKLDPAIYQLRLQKSALRKLQNQAITLGYKLIPTANVPA

SEQ ID NO: 322142 - protein, 341 aa, unidentified
MTYYAGLDVSLRSVNICVIDDQGELIAETKLASDVQDIVAYLDALELYIESVGFEAGTLTQYLTYGLQSAGFEVICMEARQVKGALSAMRNKTDKHDARGIAQILRSGWYSRVHVKSIESHHIRMLLSSRRAVLSKCVDLENEVRGLFKIFGLKLPPKLGHGPFDDTVRDIIEADEALSLALLPLLEARLALYRSFRELDNRTRKMANADPVCQRFMTVPGVGFITALTFKAGVDDPSRFKHSRTVGAHFGLTPRRSQSGEMDNSGHISRADVRSALYTAANAMLTRSSRWSSLKAWGMKVAKTRGHRRAVIAVARKLAVILHRMWIDDTQFRWGTEGARS

SEQ ID NO: 322143 - protein, 403 aa, unidentified
MNNVAGIDVSKGKSMVSVLRPFGEVVAKPFSVGHTGSELKELADYLKSLDGETRVVMEHTGRYYEPVARFLHDEGVFVSAVNPKLIKDYGNNTLRKVKTDKADSRKIARYGLDNWAELRQHTPMDTIRMQLKTLNRQQSLYAKTKTMMKNNLIALLDQTYPGVNALFDSPVREDGSQKWVDFATAFWHVDCVRNMSLTAFAERYRKWCKRHGYNFSQSKAVEVHAGAQDLIAMLPKDALTKTMVRQAIDALNAVSASLERLKAEMQALAAQLPEYPVVMTMHGVGDSLGPQLMAELGDVARFTHRNAITAFAGVDPGADQSGTHEAKSTRVSKSGPPELRRALFLVMDCLLKTQPQDDPVYRFMDKKRAEGKPYLVYMTAGANKFLRIYYGRVKEYLASLEEN

SEQ ID NO: 322144 - protein, 977 aa, unidentified
MSVPYAELQVTSYFSFLRGASSPIELFEQAKALGIEALGICDRNSLAGMVQAHVAAKETGIRLVVGCRLDLADFAPVLVYPTDRAAYGRLCRLLSLGKARAGKGKCRLLWEDLVAWGEGLLVILLPDTADDACALQLRKLKDVFADRAYMALTLRRRPNDQMRLYELANLAHQARVPAVVTNDVLFHTHDRRILQDVVTCIRNHTTIDEAGFARERHADRYLKPPAEMARLFSRYPEAMARPMEIVARCRFSLDDLAYQYPDEVSVPGQTPQQALEALTWEGAATAYPEGIPPEVRKTLSHELALIGRMDYAPYFLTVHSIVRHARSQGILCQGRGSAANSAVCYVLGITAIDPARTSLLFERFVSEERREPPDIDVDFEHARREQVIQWIYGHYGRNHAALTAVVTRYRAKGALRDVGKVMGLPEDLIRTLSGQIWGWGRKLDEGALNETGIDLSDRRIRLTLDLARCLIGVPRHLSQHPGGFVLTHDRLDELVPIEPAAMDARQIIEWDKDDIDVLKFMKVDVLALGMLTCMKKGLDLLAEHKGQHYTLQTIPAEDPRTYAMIRKADTIGVFQIESRAQMSMLPRLRPRVFYDLVIEVAIVRPGPIQMGWTASMRHQCAMMRSEDHSEETARMKVTIIGLDIAKSVFQVHGTDASGKCLLKKKLGRSEVISFFEKLERCLVVLEACSTSHHWARVIRDTGHEVKLIPPEMVKPFVKRGKKNDAVDAAAICLAAIHPDTRFVPIKNREQQSLLSLHSTRTLLVKQQTMLVNALRALAAEFGLIVPLGNARLPELLAKIETSSNLPDALKQTTMLLFEQYGRLNESIENLEGGIRTHAKQDEDARRLLTIPGIGPVTASLIVASVTDIGAFDTARHFAAWLGLVPRQHSSGGKTRLGRITKTGNREIRKMLVLGATSMLYRAQKWDSAAGVWLCKLLERRPGRLATVALANKLARIIWVLLSRKEIYRPAGRSVAIV

SEQ ID NO: 322145 - protein, 365 aa, unidentified
MLYLGIDQHKRQLTVNLRNEDGTVILQRQVSTEWEKVRAFFADLAEKAKPEGGFLAILEVCGMNPWLLDMLKEYGCQETVVIQPTERSKQKTDRRDAGKLGHLLWVHRQQFLEGKHPLGLRRIQPPTPQEADDRQLTMLRARLTKKRTAVLNGLHRILRKHNLEQARPTKLFQTKKVRRWLTELELPAIERLEIDILLPQWELLDEQLELAEAKIVERASEDERVNLLETIPGIGHYSAVAIASRIGDINRFKHADSLANFFGLTPGCRNSGEVTQRLGSITKQGSRMVRFLLNQAVVKVLRFDAEMRAWFKRIKKRRGAKIARVAVMRRLVTIIWHMLKKKQKYRYDSPIKKHQEFEAFEGSAA

SEQ ID NO: 322146 - protein, 355 aa, unidentified
MSQEKYIGMDVHQATISVAVMDARGKLIMECLLETKAATILECIQGLRGTLALTFEEGTSAAWLHDLLKPHVSRLVVCDPRKNALLKDGNKSDRVDARKLAELLRTNQVKPVYHGKHGTRALKELGRSYLTITKDVTRVMNRIKAVYRSWAIPCAGTSVYTPRHRAEWLAKLVEPGVRIRAEHLYQQLDSLEPVRLEARRELLLESRKHAAVKLLRQIPSIGPIRAALLVALLQTPHRFRTKRQLWAYSGFAVEIHDSGEYRSVRGKLQRNRERITVRGLNDNHNKDVKSLFKSAAISASTRPGPLHDFYVTRVESGMRPTMARLTLARKIAAITLTMWKKGVSFDPKQLQRQAA

SEQ ID NO: 322147 - protein, 335 aa, unidentified
MLIIGCDLHTRFQQIAYMDMTTGEIVTRPLEHENCEARKFYAGLPEKARVGIEATGCTQWFERLLAELGHELWVGDAGKIRAGVVRRQKTDTRDAEHLLDLLLTNRFPRLWIPTPEERDVRQLLQHRSKLVSMRTSVKNQLHYLAMNQGVCRKRQLWTKRGRAELLALNLGPWASRRRQELLELLDRLDPRIEELDEVVKAEAERRPEVVNLMQQKGVGPVVGLAFALTLGPVERFANSRKVVSYLGLNPREYPSGGHQRLGPISKQGNEMLRWLLVEAGQSAAQYDPELRRKYQRLKFRRGANVAKVAMARQLAVRLYWRLRSAGCGTAGSHAK

SEQ ID NO: 322148 - protein, 438 aa, unidentified
MTHSYARLLDPALEDDSDPFAGYNARREPLEDRLYLPCGVDPHGDICGVVFTHPYPQQTQVLSQRIVRNNNLQDMLWMIETGDRLAARFQAMPIYVFESTNVFWRAQRNFLHRAGYATATICGRQTKHARSTVTRKTHNDLKDAYNIAKVFKQGDSHATRILPEPLASLREYCRLHQFLVSYSVAIQNRMFCIRYQTHPEFDDHFSKHVCPTTLALMDAELVHPLHLLDCDLDYLTHVIRTASRGKLGRKRAEELRLSAQSTFPPPYAVEGLSFGLKILAQAYRHLHTHLLPPLVQRIQATLDADDFPFTHHLDQIPYFGPIVTGNFLGELGLPSWFSTVDSVVAWFGLDPSVAESANKPTGQTHLTKRGTKYGRRIMWLVGRNWSRFMPQGRRLYLKERNQHKRAYDAAVCVVAAKLVRIAFAMVRDGSHFDIDKAF

SEQ ID NO: 322149 - protein, 432 aa, unidentified
MAVSRSTCGVAVAFWWQEAMMRVIVERCCGLDVHQETVVACLLIGAPGDRPTKETRTFRTVTRDLEALRDWLAAAGVTHVGMESTGVYWRPVYAVLEGHFDLIVGNARHIRNVPGRKTDVKDAEWIADLVRHGLIAKSFVPPRPLREMRELLRYRRKLTESQAAERNRLLKLLETANIKLASIMSDVFGVSGRAMLRALIDGQASVEAMADLARGQLRRKRSDLILALEGRMEEHHRFLLATQLRRLEAIEQDIAALDLRINERLEPYRMPHALLTQIPGVDWLVAAVIIAEIGVDMSVFLSVYHLSAWAGVCPGSHESAGRQKSGRARKGNVHLRTMLVGAAISAARKRGSYLKDKFHRLKARRGAMRAALAIAHKILVSAYHMLAKGLAYHDLGEAYLDQIGQSRTVANLKRRLERLGYHVTLERTTQAA

SEQ ID NO: 322150 - protein, 347 aa, unidentified
MDTIGIDLHKRESQLCIGHEDGTITEQRIVTSRERFTAVLGPRPRARMLLEASTESEWVAQHLEALGHEVIVADPNYAPMYATRTRRVKTDQRDARTLMEACRAGTYRLAHRLSAARRHVRAELAVREAVVRTRTRYVALAKALVRRDGLRVPSSAAERVAVHLQALPLGPTLAAELAPLLTLLPALNTVIAAADHELAVLEQTDPSVALLMTAPGIGAVTASALVATIDDVTRFGSAHQFEAYLGLVPGERSSGEVRRIGPITKAGNARARWLLVEAAWRILRSKEPAGAPLRAWARPIAARRGSRIAVVAVARRLAGILFAMWRDGARYDPDKIRRPCRRRVVAG

SEQ ID NO: 322151 - protein, 343 aa, unidentified
MQAITTIGLDIAKSVFQVHGVDANGHLVIRRQLKRRHVLAFFQKLPRCLIGIEACATSHYWSRQLQALGHTVRLMPPAYVKPYVKRQKNDAADAEAICEAVTRANMRFVATKTAEQQSCLTLHRTRHLFIRQQTSVINAIRAHLAEFGIVAPVGRNGIEELLHVVADPNDKRVPEITRACVAALGAQLHRLREQILAFDRMIMAWHRSSATSKRLDEIPGVGPALATALVASIADPKAFRSGRDFSAWIGLVPKQHSSGGKEKLGSISKQGDRYLRCLFTTGALAVIRYAKIYGTKHRPWLTALLARRPTKVAAIALANKIARMAWAMMTKGERYKEPIALAV

SEQ ID NO: 322152 - protein, 349 aa, unidentified
MTIVGGFDVHRAQITFDYVDTDTGEVSCGQVRPATRAVLQKWLSQRFAGRGDVAFAVEGCTGWRFVVEELARAGVQPHLAEPADTASARGRKKRAKTDRADARLMRELLAGQRLPESWIPPAHVLEVRTLGRLYVALMDERRAWQQRIHAQLFHQGVPPIKGLLTADSRAELCTVELSPAGRQMVDTALVAIDALTAQIKPLRRQLCAVACRQPGARALQSHYGIGPLSAAIIWAELGDCRRFSSSDQAVRFAGLDITVYSSDGKRSPGRLARQGSPELRWALYEAAKCAARPSSPDYNYYQAVRERLGGKRPALSVARKLVRRCHHTLRELGDQAWAEFDPPVQDQAA

SEQ ID NO: 322153 - protein, 350 aa, unidentified
MNVTHYIGFDVHKKSVSYCVKSADGKIVEEDKLRATHQALREWAGKRTEPWHGAMEATLFSGWIYDTLKPFAAKLEMGHPAMMKAIGASKKKNDRLDARKTADLVRCNLLPVCYVAPAETRELRRMLRYRNMVVAQAVQMKNKMSGLLMEVGAEYNKERLHRKKYFAGLLDNLEEVPESVKDLLRLSRGSLGIFEAIQQKLLTRLQKEASLVKRLTVLKSIRGVGDVTALTWALEICDPNRFSSIADAVSYCGLTSALVSSADRQQRGPISKQRNAHLQTVLIEAAKLAPRWNPQLAAVHERELARGHRNRATLEVARKLVAYLLAVDKSGKPFEIRAAAAVGQEAATTM

SEQ ID NO: 322154 - protein, 333 aa, unidentified
MIDPIGRHLATQAFPTTPDGYHRLLGWLCSHGEVIAVGVEGTGAYGSELARYLQDSQITVIEVDRPDRRARRAGGKSDPIDAYAAATAVLTGRAGGIPKARDGIVEAIRTLRVVRRSAVKARTQIINQIRSLIITAPGEVREQLRTLPPAQLIKHLARSRPGTQTSEPACAAKIALRRLARRHQYLTAEINDADAELQTLMTEAAPELVALPGVGIETAAQLLITASDNPERLASEASFAHLCAAAPVPASSGRTNRHRLNRGGDRRANHALHMIALVRMRYDQRTQAYVARRTAEGMSKKDILRCLKRFIAREVYKYLTYQHTPSKPLIPTA

SEQ ID NO: 322155 - protein, 369 aa, unidentified
MEKSIKVFVGMDVHKESIDITLAEQGGEVRRLGQIGGDRASLLKMVRRQQSRGGERVFVYEAGPCGFWIYREIAALGERCMVVSPALVPRRAGDHVKTDRRDSERLASLARAGELTAIHVPDIRDEAIRDLVRGRDDAVIAQRRVRQQLKALLLRNDVRYVGRTSWTGAHRRWLSELKLPEPAQQIVFEEYVDAIVVATARIERLTRAIGTEVATWRFAPVVAGLQAMRGIQFVHAVTLIAELGDLTRFGSARSLMGYLGLVPREDSSGEHRRQGSITKAGNSYARRALIEAAWAYRHPARVTRIIAARQTGLPKAACDIAWRAQLRLSAKYRRLAARHLNHNKIVVALARELSGFVWAIGQSVRPQSS

SEQ ID NO: 322156 - protein, 445 aa, unidentified
MYSLFFMEPYRKEHIMHNKNYISVGIDVGSAFSFMTILAPDETVILKPFKITHNNKDSLERAVSEIKKAEELYSLESRTFLESTGIYHFPLFCYLVDCGFNASIINPIITHSTKNGNIRKVKNDKIDSKGIAKLGLSKDIPVSQFPAKLVLELRSLTRKYYDLTDERSAHINKLKGDLHTVFPQYLDVFCDVTGKTSTMILRQYGTPDKILRGHKKTMIEKISKASRKGLAKASERYEKLCAAANAAKTFGCQIDSIYFNIFLTLDLVEKLDSALDSILNRIRQLITFNKNEKFIQQIKLLNTIPGVGFLTAVTIMCEIGDFSAFRNPKQLFAYFGLDPEVNESGKFVGTQLHMSKRGSRIARRAIFAVALASIRTKRNGEGINPYLRKYYELKSGQKPKMVAIGAVMHKVCNIVFAVLRDEKAFELRSPEEHCKQYQRPALAAA

SEQ ID NO: 322157 - protein, 314 aa, unidentified
MSTSYRRCCGIDVHKKSVTVHVLPPQGQLEVKPLEREFRTFSRELRRLRGWLKRYQVSEVVMESTGQYWRAVWNVLEGEMPRLVLVNPQHVKALAGRKTDRIDSRRLARYLENHDLQGSFVPAREIRELRDLTRSRVHLLEEVNRVKNRIGQLCEAGNIKVSSVASDLFGVSGRRMLEAVAEGKRDAGWMADYARGTLRGKKKQLEQALEGSFTEHQRWMLREALSHLESLEAQIARVESEIERRIEPYEEHIRRRLTIPGVDRITSWTMLAELGPDMNVFPDARHAASWAGICPGNRESGGKRLNGRTRKAKP

SEQ ID NO: 322158 - protein, 444 aa, unidentified
MCFAPAFGDEEESMGKINERCGGIDVGKRFLLCCVLTGAAHEEPRSQTRRFDATVSELVRMREWLTAERITHVVMESTGSYWVPVFNILEGHFIIVLANPEEVKNRKGHKTDHKDAEHLADLLRHDHIRASFIPPKPIRDLRDLTRRRLQLIQDATRERNRVEKLLEHVNVKIGNVLSDVFGVSGQSMLLALLDGKTTPEQIAHLARGQAKRKIPQLTEALEGHGMRDHERFLIRSCLRHLACLEEEVEQMDCEILQRMQEPPFQGAFQRLQTIPGVGQLAAASILAETGVDLTTFPTAEKMASWAGLCPGNRESAGIKKGSQTTQGNSYLRTTLVQCAWSATRKTGCIFQTRFRELAPRRGQKRAIVAIAHQMLTVLHFMLKNDVPFIGAANAPTQRRRQRRAHHHLRCLRRLGLYCSGSPGLPNSAISRRIPASRFSLELKS

SEQ ID NO: 322159 - protein, 349 aa, unidentified
MDRTTYGLDIAKNVMQLHWVEAETGEIGRKKLARSKLAEYFAQRLPVRVVMEACGSAHHWARVLGKLGHEVELLPAAQVRPFVRSNKDDAADARAIWLAAQQSDIRRVPLKSTEQQAVLALHRTRSHWISVRTATVNALRGLLYEFGVILRGGRKAGLKALAEQRAQIDEQVPQIMRGLVDGQLQALAQVQQRIDQLEHDIAAVQKQLTKAVELRQVPGIGVLGSTALAATLGDGKAWRSGREFSASLGLVPAHSGTGGKVRTGHISKRGDPYLRTLLIHGARAVIEHAKGKPKWLQQMLARRPPNVVVVALANKMARTAWALVAHGRAYQRDWQSAKPGCSTAQAASA

SEQ ID NO: 322160 - protein, 418 aa, unidentified
MLVAGIDIGAESHHVAVVDRAEAVVVKATAFAENAAGYQELFALLARAGARGGADLPLAAASAEQERTLVVMEATGHYWQNLFAALVAQGYAVALVNPLRTHRFAGEELARTKTDSIDCLQLARFGAQKRPAVTCLPEAAVGELRELVRLRARLMQDVVDRVNQLHRLVDLGFPEFTRYLKNLNTQLATAILRQYPTAAAFRGLSYKRLARLSYDGRHRVGEELARQLIAAAAVSVGSQHTTAHQTGVRYACEDLETLRQRLKRLDGDITAGLQQHQVGKLLTTIAGIGDNTAAMLIAELGDPARFHSAASLAAYVGLCPGHRHSGKHQPKSSSLTPIGNRRIRQALWMPTLSAATCSNAWLMAFYRRLIERGKPHKLALIAAMRKLLAAIYSVAKHRRPFVPFLHSQPLDNEVPAPL

SEQ ID NO: 322161 - protein, 410 aa, unidentified
MVERFVGIDVALREHRIAVLDRDGEAVGPSFTIAASKDGVATLLRTLDARGATAAQTLIGLEASGHLWENLEAALIGAGYRVIVLNPRQTRRYRDVVRRQAKTDDIDAHVIAGLLRSGAAQASYVPDEQIQSLRELARLRARLMADRQDYLRQLVAQLDVVLPEHHAVLGDLLTARARGILAPFPTAQHLAHANPRAIRRAAAEAGARGFSLDDATGVRDSARRSLYSGKAAAARAHVVRTLVSQLERLTRAIDEVDCAATTLLPPSEPGTGPSDAELLQTIPGIGPQTAATLLGELGALTRFTDARALGAYVGFYPVINESGGRAATPHLSPVGSRIARHSLYLAAVNAVRRSGEWRTIYLRTKAQGKTAKQALIVVAVKLLHAVYAMLKHRQPYNPSRLLVAPATIGS

SEQ ID NO: 322162 - protein, 356 aa, unidentified
MPETNPAEVIIGVDTHKHTHAAVALTALGARLGTITVPASRRGYQELETWAGSFGPVRAYGVEGSGSYGAGLSRFLQAGGHTVLEVNRPNRQLRYQHGKSDPLDAEGAARAVLSGQADARAKPGTHAVEMIRHLKVARDTAVKSRTQAMITLKALIVSAPAALREQLEGLAGKMALIRHLAALRPGTLTSPTASAKAALRALAQRWLALDAEIKAHEAHLDALTAACTPILRTAYGMSTGTAAEMLILVGDHPDRIRSEAAFAKLCGACPIPASSGKIIRHRLNRGGNRQANAALYRVVIVRMRSHPPTLAYVRRRMGEGKTKLEIIRCLKRFVAREIFGYLCGAKTLPTAPMTAS

SEQ ID NO: 322163 - protein, 344 aa, unidentified
MDHFAGLDVSVKETSVCIVDDTGKIVREVKVASEPEDLLQILSNPAYHFKRIGLEAGPLSQWLFSALAEAGLPVICVETRHMRAVLKAQINKTDRNDARGMAQMMRAGLYRPVHVKTLRSQKLRMLLTHRKLLQSKAIAIDNDLRGTLRNFGLKVGVVRTVKFEARIRELVANFPDIAAMVEPLLIVRRTLREQFCVLHRRLLAIVRDDEVCRRLMTTPGVGPVVSLTYRATVDVPARFRHSKSVGAVFGLTCAKYQSGEAEWSGRISRCGDEMMRVMLYEAAQSMLRSKKWSWLKAWAMQIARRRGMKKAIVALARRLAVIMHRIWVDGTEFRWTREQAAAAA

SEQ ID NO: 322164 - protein, 407 aa, unidentified
MRSIALDVHRDFCEVAIKEEGGEVRSAGRVRTSVEQLELFARSLGADDQVALEATGPANAIAGIIEPHVARVVVANTRRVRAIAEARVKSDKVDASTLCELLDAGFLPAVWSPDDATRALRGLLGRRDRLVRSRTRAKNAVHAALQRELKGRPPMSDVFGRAGRRWLARLELPAHERQIVESCLRELDFLSQESAALESELARLALSSEQVKRLMSVPGVSLVSAATFVAVVGDISRFETPKKLVGYVGLDPKVRQSGEQAARHGRISKQGSSAARHMLCEAAWIAVRTPGPLRAFYERLRARRGTQIALVATARKLCVLFWHLLTREQDYAFGRPSLTRHKLRRLELMAGDPPRRGQRSGSPASKREQHHERELSEQFEAAYRRLVADWQQKPTKSGAGATPGRAS

SEQ ID NO: 322165 - protein, 546 aa, unidentified
MAVSTKKRKNRRSKSQTSTRPKKRFIGKPSGQIQSRVQHAGPQHFGVISVDCAKRRSRWMITDFYGKVIVEPTIVEHQAGALRAMTDYVRTVCDDNDIRDCIVAVEMTGIYHRPPQRAFRKAGFDTRVVHPFASSHYRRPLHPDAKTDDNDLEAIFHAAINGYGLATLEVDPVYQQLQAASRHRHNLVKQRARLQVQIRRLMHLAMPGYADLFPEDKLFNKSIALPVAERFSSAQSIAVASVDGVAMHLSKNKIRFQIRTIEKIVAWSKRAADASELAEMHTRQWKQLNELRMMLSRQVLGVEAELAGFLAKTPYILLLSVTGINVVSAARLAGEAGPIRHYASARAINGRAGLYPSRYQSDEVDHADGSLARQANRKLRGAAMLVAENLIKCHPYYRGLSALWAQQKVDPRDRRCRIANRAMRMVFQLVSGRQLWRGKGVDREYLLFKLREFHRVHQTPLEQCIADLHEAFKWLPKSSHASEAKPLLELTGRKRRGVVSIGELLVPLLIRLGVVPESEKENHATETGDASESRLESNTSEARDSD

SEQ ID NO: 322166 - protein, 388 aa, unidentified
MFQTIDQSKRALSAFEQDSTLVVIVELSQKSWLVAGVVPGVDRHPLKKFDADENRLFALIERWKQEAIKAGCEIKRIVVTFEAGRDGFWLARWLRARGIEAHMIHPTSVSVSREHRRAKTDRLDTELLKRATLGWLRGEPDHCRMVAIPTLEQEDAKRSNREHQYLVGERTRVINRLKAALARLGVRNFNPKLRKASERLRALVTPEGKSLPPNTLAEMERDMQRLQFVRQQIKAIEQTRFERLKKDPNTRLNMMALLVARVFGMGIETADMLVHEVLSRDLRDRRAVARYAGLTGSPDESGARRREKGLARAGNARVRRGMIEFAWRFVRFQKDSTLAQWFRARTADARGPTRKTMIVALARKLLIALWRLVTTGEIPTSLTLRPAA

SEQ ID NO: 322167 - protein, 338 aa, unidentified
MKLYGAIDLHSTNNMTVVTDEQDRVVYEKRLPNDLDLIVNQLAIYRDSLQGIVVESTYNWYWLVDGLMDEGHKVHLANTSAIQQYEGLKYTDDQDDARWLAHLLRLGVLPQGHIYPKQQRPVRDLLRKRGQMVRQRTMNLLSIQNLFSRNTGGSISANRVKRLNRQEVENLFPDTDLALAIQANLAMLLCADEQIERLEKTIVERVKLKPEYKLLKTVPGIGHILALTIMLETGDITRFPTVGDYASYCRCVGSQKISNGKKKGSGNTKNGNKYLGWAYVEAANFAIRFSGKIKSFYQRKQSKSKRVVALKAVAHKLCRACYYIIRDQVAFDINKAFA

SEQ ID NO: 322168 - protein, 339 aa, unidentified
MELYSAIDLHSNNSHVAIIDDQQNRVFYRKLANDAKLIANAFAPYRERLKGIVIESTLNWYWLADLLIEKGYSVHLANPCGIQKYSGLKHADDKHDAFWLAQMLALNILPEGYIYPKEDRPLRDLLRKRAHLVRVRTSLILSLQNIVMRNHGIKIRSNDLKKLTQDPVAELLKDQEELALAGRASKETIDFLTRQIQRIETAVRSKALLKEPFSKLLTLPGVGDILGMTILLETGPIERFKAVGHYVSYCRKVSSRWTSNEKTKGKGNTKNGNRYLSWAFSEAADHARQTHEPSRNFYNRKLNQTNASVAHNALAHKLARAAYFIMRDHVEFKEDKMFR

SEQ ID NO: 322169 - protein, 347 aa, unidentified
MVIVDSSRLIVGGVDTHRDVNVAAVVDMNGGLLGVESFPTTGDGHKMLASWMAGFGTIERVGVEGTGAYGAGLARHLARSSVVVIEVDRPNRQKRRQRGKSDRIDAVEAARGALSGRCEGIAKSGDGAAEALRALLVAKRSARSTRIRTIVQLRYLMFTAPDELRARLGGLSAALLVSEAAKLRPRAGGDIVMHGVKTTASILARRVQALDVELAVIDAQIAPLVKAAAPDLLNVFGVGIDTAAVLLVTAGDNPERITTEAKWAMLCGIAPIPATSGLIDGRYRLNSGGDRHANNAIWRIVITRLGQHEPRTVAYMERRREEGKSKRYIIRCLKRYVAREVFQALPR

SEQ ID NO: 322170 - protein, 317 aa, unidentified
MEKTQETFIGIDVSKAHLDVHSLPSSEAWQADNTPAGIIALVDKLLLCKPRLVVMEATGGLEIPLACALMEAGLPVAVVNPRQARDFSKAMGKLAKTDKVDARLLALFGERIRPEVRPLKDAEQQLFSQLLARRRQLVDMRVAEQNRWFMAQGNVRGNIEQHLEWLKQHIDDVDKDLGQFVQASPAWKAKEDLLKSFKGVGRIASFTLLATLPELGMLDRKEIAALAGLAPFNRDSGTMRGKRAIWGGRAEVRNLLYMVALVASRSNETIKRFYEKLVQAGKPKKVALTACMRKILTILNAMVRDNQPWNPQREQHA

SEQ ID NO: 322171 - protein, 356 aa, unidentified
MSEKLNSKIAVIGIDIGKNSFHIVGQDRRGALVLRQKWSRGQVEARLANLPPCLIGMEACTGAHHLSRKLQALGHDVRLMPAKYVRPYCKGDKNDYRDAEAIAEAVQRPTMKFVATKTADQLDLQALHRVRERLVSQRTGIINQIRAFLLERGIAVRQGLRFLRAELPDILAKRTDVLSPRMLRIVEDLSRDWRRLDERIEGLSSEIEALARQDQGCARLMSVPGIGPLISTAIVAAIGTGDPFSKGRDFGAWLGLVPKQMSTGDRTILGNISRRGNRYLRTLFVQAAWVVLVKVGPKQWERYGLKSWIEAAKKRLHHNVLAIALANKLARIAWAVLHNGRPFEHVMTNATASRSA

SEQ ID NO: 322172 - protein, 338 aa, unidentified
MKLYCGIDLHSNNSVVSVINELDRVIYEKRLPNDLATIRNALQPHQDALAGVVVESTYNWYWLVDGLIDSGFDVRLANTVAMKQYNGLKYTDDKTDARYLAHLLRLGILPEGYVYPFDMRCVRDILRRRLLLVRQRVMQHLSVQSLIARHTGKQLTGPQIKKLQTNDLGKLLTHASAQLSAHIALELMRTVAEAIERIERNVAAFCQPTQGYGIITSVPGIGPIIGQSVLLESGPIERFPSVNDYASYARCVPSTKLSNGKKKGEGNRRNGNKYLGYAFMEAAHYAPIWEPKIKRYYQRKTARTHKMVAKKAVANKLAKACYHMLTRNEPFDVNRVFA

SEQ ID NO: 322173 - protein, 425 aa, unidentified
MRFIALDVHRDFCEVAIAEGGQVRRAGRVETMPATLELFAQSLAVDDQVVLEATGNALAIARIIEPHVGRVVLANPKAVKNATQTAKTDKLDARTLAKLLAAGFLPEVWTPDEQTRVLRRRISRRAQLVRQRTREKNQVHAILIRNLKERSPATDLFGAAGRRWLAAQELPADEREMVEACLRGIDFLDREVAAIDRALAELVLASNELRRLLTLPGVNFVTACALLAAVGDVRRFPTARHLVSYLGLDPRVRQSGSEPARHGRISKQGPGETRHVLVEAAWHAARTTGPLRAFHERVASRRGRNIATVAVARKLAVIAWHMLNRGEDYAFARPSLVREKLRRLELMTGAERRKGKRNPVRVFATREQHRLDKELAAQAERAYRRLVQDWQPAINRGTGAAPGRASCGPSSGQAARQETAPPPAL

SEQ ID NO: 322174 - protein, 342 aa, unidentified
MTYYAGIDVSLEYSSVCVVDGAGKIIREQRIASEPEALIAWFRGLGFGLERIGLEAGPMSQWLYAAMRAAGLAVELLETRHVRDAFKAMPVKSDRNDARGIAQLMRLGWFRPVHCKSMAAQEVRALLTARKLVQSKLLDVQMSLRGLLRGFGLKVGATTPSRFAGRIRDLVEGNATLEVIAAALLVVHETLRRELAGLEKRVRSIAGSDGRVRLLMSTPGVGAIVALTYVAAIDDPARFKSSKGVGAHFGLTPKKYQSGETDITGRISKIGDEGVRTALYEAGHIILTQPLKGCTALKSWAMRLAKRAGMKKAKVALARKLAVIMHRMLVDGTLFASAAVAA

SEQ ID NO: 322175 - protein, 354 aa, unidentified
MAKYSIKYYIGVDLGDINNEICVLDYNGDILEKATIENTISGFNTFFDRFDSPREVKVAIETGTHSPWISQLLESRGFSVLVGNTRKLRVIWDSDEKTDERDAEMLARILRFDPKLLHPIRHRSRSAHMDLAIIKGRDALVRCRTGLINFVRGSCKTAGERLPSCSAETFAKKIIDNIPEDLVAATIPCIDTIRELTQKIRQFDSQIEKLCKDVYPETMIFREIKGVGPITSLAYLLTLEDHSRFQKSRNVGPYLGLIPRRDQSGNTDKPLPITKAGNTYLRRLLVGSAQYILGPFGPDCELKRYGERISSRGGKVAKRKATVAVARKLAVLMHNLWKNGTVYEPFYSDYLKAA

SEQ ID NO: 322176 - protein, 411 aa, unidentified
MDVYCGIDWAEDHHDIAVVDRDGRLLARRRISDDAAGLAQLLALLAEHGDTPQDPVPVAIETPRGLLVACLRATGRKVYPINPMSVARYRDRHSVAGRKSDHGDSLVLAGVLRTDMHAHRPLPADTELAQAIAVLARAQQDAVWDRTTAHNRLRSHLREYFPAFLAAFAGARGGITRPEARAVLAAAPTPADAAKLTLTQLRGLLKKAGRSRGIDTEATRLRDAFRVPQMRQLPLVEQAMGRQALALLGQLDAACTAAADLEQAVTQSFNLHPDAGIITSFPGLGALTGARVLAEIGDDRSRFQDAKGLKAYAGAAPITRASGKTRSVTRRKVKNNRLNAAGYIWAFAALTASPGARAHYDRRKDAGDRHAAAQRNLFGRLLGCLHHCLLTGQHYDETIAFPTSTPLAAAA

SEQ ID NO: 322177 - protein, 391 aa, unidentified
MTKPKTKMVNDLSRCLDPLDMDATLIAVIEMSQSSWLVGGIVPGVERQPLKKLEVDERALLSLLNRWRAEAEKNGHRITRMAVAFEAGYDGFWLARWLAAQGLETHVIHASSVAVTREHRRAKTDRLDTELLKRGFLGWLRGERGHCKMVAVPTLAEEDAKRPSRERETLVGEATRIIARVKAAFVRLGIRGFNPKLKAAAARLKTLRTPEGEPIPPNTLAALRRDLERHWIVKKQIRELEQTRLDVLKHAPEKGPHAVVRLLARVIGIGIETADMLVQEVLSRHMRDRRAVGRYAGLTGAPDESGSKRREKGLARSGNARVRRGMVQLAWRFLRFQDDSALARWYRQRTADAPAMRKTLIVALARKLLIALWQFARDGVVPEGLRLRPVA

SEQ ID NO: 322178 - protein, 362 aa, unidentified
MQKVDRSKTLFVGIDVHKETHTIVGITPFGEKILELTIENTARDFNGLVEKVDTKAKKMGLTPCFGLEDVQSYGERLSSFLTERSLPVRSVAPVLVDHRRSKKTHPEKSDSLDAQGVAEVMIQKIDKLPVYTLTEKEKKAKQIRELSLEREMLVKERVRIKNQLHVLLYRIHNNDYREKFKDPFSLKAVRFFLRSMPRNIDTILKRRTKRALRRLLDLRKEIKETEEEIAMLLEENNYTLSTASGCSTVIAAEIIGEVKDISRFHSPGALAKYAGCAPREHSSGKTVRWRKTRSGNRRLNRAFHRMALSQISRSGNERAKSYFQRKVSEGKTKSQALVCLRRQLVNVVWMMMKYNAQYRLPC

SEQ ID NO: 322179 - protein, 316 aa, unidentified
MTSHTLAAGIDVGQRFLDIGLAPSGKTFRVPNVPEGIAAVVERLAKEDVGRVVLEAIGPYAQRLVSALAGAGFEVGLINPRRIKAFREFEGRRAKTDRLDARLIARFALAMTDAIRPLPTAEQLALRALSTRRRQLTEMIAMEKTRLKQAVEPMLLASHRNAIKSLSAECAAIEAELMRRVADDPQLASTFEILTSIPGIGERVATVLVTELPEIGRIDRKAIASLAGLAPHISQSGNAPPRAAISGGRPCVRAALYMAALVASRAHPEMKASYKALRDQGKPGKLALIAVARKLLVTANALVKNKTRYTPKTLDS

SEQ ID NO: 322180 - protein, 353 aa, unidentified
MIVIGVDTHKRTHALAAVEEATGRVRGQREIDANESGQLSAVRWARGLDSERVWAIEDCRQVSRRFEQALIAAGERVVRVAPHRMGASRRGERTPGKSDQIDSLAIARAVVKDGVAEFPVAYLDEAAMEIRLLSDHRSDLVAGRTQIQNRLRWHLVALCPELEASLPRGALSRVRALDQLARRLRSLPAGPRAAIARELVSQIRRLTLQANTLERTLRELISAHRPALLQETGCGALVAAVLIGRTAGAQRFKTDASFALHAGVAPIPCSSGQRRHYRLNRGGDRQLNRALHIIAITRGRLDPETRAYLQRKEAEGKSRIEAMRCLKRHLARHFYRQLTARGRHSASVAPMPF

SEQ ID NO: 322181 - protein, 333 aa, unidentified
MPRANSNLLDWDFMKSATTNEKIFVGVDVSKAALDVYRPDTKEGFKIDNSDEAIALLCSQLKKMKRKVMVVMEGTGGYEYLLLKHLAAHKLEAAVINPRRVRDFAKGIGLDAKTDPIDARVISKYAEVVVPQPMVTKSDHELKHGALVARRNQLLELVNQENNRLKQSWDDDAKQSIRDVLEMLKKQLKDIDSQLAKMIQADTENQRAIEVLQSVMGVGPVMISTVLAELPELGKLNRGEIAKLVGVAPINRDSGKKSGKRFIGGGRGQVRRVLYMATIVAIRHNPAIKAFYAHLKSKGKESKVAIVACMRKFITILNLLIKTDQLWEDKMSV

SEQ ID NO: 322182 - protein, 416 aa, unidentified
MNAVGIDVSSRKSTVAVLRPLGEVVCLPFDVSHDADGLASLAEKLKALDGETRVVMEHTGRYYEAVAKALHEAGFFVCAVNPLLIKEYGANSLRRVKTDKADAVKIARYALDNWADLRDFTPMDAIRYDLKTLNRQFQLASKQRTASANNLIALLEQSFPGIRKCFDSPVRSDGTQKWVDFAHSFWHVDCVRKQPFAAFCERYRKWCKRHAYLFKLSNAEEVYALAKRAVVLTPKSKVVKVLVQEAANQLISISRSVEVYRAEMDRLAAMLPEYPVVMAMYGVGKSYGPQLMAEIGDVRRFERKQALVAFAGIDPMPNQSGDKNVRSNKSSKRGSPYLRKTLFNVIRTYLQCAPQDEPVFQFLNRKRAEGKPFYVYMLAAANKFLRRYYAKLRDYFASLDTLQPVAPIPTILKATL

SEQ ID NO: 322183 - protein, 318 aa, unidentified
MFVGVDVSKDQLDVAVHGRSERWQFKRDERGLGSLVEHLRGLGEPVALVVLEATGSLERDVATALAAAKVPTAVINPRQVRDFARATGKLAKTDGIDASVLAHFAEAVKPSVQPIADELALALEARLTRRNQLIQMLVAEKNRRAMLVIQRTGSAKMVKSLEAHIGWLEKQIAELDDDIDHHIKNSPIWREKDDLLQSVPGVGPVTSRTLLSYLPELGTLDRKKVASLVGLAPFNHDSGQASGRRAIWGGRAEIRNVLYMAVVAALRCNPVLRAFHDRLKAAGKPSLVAITATMRKLLTALNAMVRDGVRWSPAALSP

SEQ ID NO: 322184 - protein, 341 aa, unidentified
MTITTMPSNGERFNRVIAFEVSKADLVVYCAPQDVSSTIPNTKSAVRRYLKKQTRTRPGPEVSDLLVVCEATGGYERFVLEAAAELGLACHRAHGSRVRAYARYRGTHAKSDAIDARLLADYGLHGENLKLYQPPSPAQDRLRALLGRRTELRRAMEAEQCRLDHALDKDIAHSIKALIAVLQRLLAGIEAKIVLLMKEDADLAEKARLLQGVKGIGPITAATLLGYVPELGSLSRGAAAALLGVAPFDRDSGKIKGKRHIFAGRGEARSCLYMAAISAMRYNPKFKEFATRLKQRGKPFKLVAAATMRKLATVVNAMLEPERQRPLKHSESIKGGEVDRF

SEQ ID NO: 322185 - protein, 424 aa, unidentified
MKRTQNEKILQIKNDTLVVGIDIGKNMHYARAFDCRGIELGKLLRFGNSAQGFSAFDAWLHEIQQKHEMTEAIVGFEPTGHYWFNLGDHLEACGHKLAIVNPYHVKCARELDDNSPSKSDRKDPKTIGMLVKDGRYRDVYIPDGDYQELRELVCERERLQERLGALSNQIIRWLDIYFPEFVTVFKDWRGKAAWIALRRFSTPKRMAEAGAQEILLAWREEMKRPSLKKAEALCSVANQSIGRAKGSTSAVRALQNVMTEYELLMMQIEQVEELMRDCLLKIPNAWKLLAIKGVGMVAVAIFVSEIGDIRRFKDPRQVIKYAGLNLRENSSGKHKGKTTISKRGRRRLRHALYQTMIPILATNEEFRSLHQRNLTRTENPLTKMQSLIALCGKLVRVIFALLTKGVEYDPERIKVGITEIAQAA

SEQ ID NO: 322186 - protein, 386 aa, unidentified
MQASTVATPTAGHIGTIFVAIELSQRSWRVALHSPDKDKISHHKLEGGDHAELLALVGRVRERAARTLGGVPAVASCYEAGYDGFWLHRLLLAAGITNYVFDPASIAVDQRARRVKTDRIDGERMLRTLMAYLRGEPRVVRIVRVPAAEQEDARRGSRERDRLIKEQTAHTNRIKALLRLRGMAVGNPRRRDWLSWLATQRDWQGQAVPPRMLSEIRHEHARLMLVRDRLDALAQEAAAAEPMPAEAEMTRRSELLRRLKCLGPAFATTLTSEVFYKDFRNRREVGSYFGLTPSPWRSGGIDRDQGISKAGNPRARCAAIELAWLWLRHQPDSKLTLEYRKRTLDAGKRIKRVAIVALARKLMVALWRYLTTGLVPEGAALKAVKI

SEQ ID NO: 322187 - protein, 331 aa, unidentified
MKKQNWVGVDVGSRELVVAVERNGKRGETLSFENTAEGHRKLIHFITKRGASARVVLEATGVYGLDLALALDRASRVEVMVANPRAISHFGRASLQRSKTDGLDAEVILEFAKRMPFEVWIAPAREILDLRAISRRMEALTKTATQEKNRLHASDQSAELSEVVREDLAFSIEHLASRVAQLRDQALELIASHAYLRDAFGHLTSVKGIADLAGIQILAELAILPKDMSVRQWVAHAGLDPRQFQSGTSVHKPARISKTGNAHLRRALFMPALVAVQHEPHVAAFYEKLLGRGKTKMQANVAVMRKLLHAIHGMLTHDQDFKGEKFYAIGA

SEQ ID NO: 322188 - protein, 354 aa, unidentified
MSEEKYIALDVHHATTVTSVVNAAGKELDGSIIATKARPILSYLEGFSGSLQVTFEEGTYAAWLYDLLEGRVAERLVCDPRHNALLKEGSKTDRNDARKLADLFRTGMLRAVYHGRQSLRPLQELVHSYEALGEDTTRAMNRIKALYRSRGIDCAGRGVYTQKQRASWLEKLPAGATRLRAELLHEQLDPTRSLRRQARKELLKESRQQQVSTRLREIPGFGPLRVARLIACIQTPHRFRTRRQFWSYVGLGLVTFDSGEYPLVEGRIVRRARPAKIRGLNRNHPPRLKEIFKSAALSAIRQPGLFKDYDDARLAQGRDPARLRLTVARKLAARVLNLGKKGGHYRALAVPAQA

SEQ ID NO: 322189 - protein, 411 aa, unidentified
MKFIGLDWKDKGYTTRIINKEGTDLSGSFEVEKNREGFSEFIYKVRKYCDGDSNVLFGIERERDPIVEYLLTLGYKVYLVCPNMMKSLRKRYSSTGKYNDEFDSYIIADTVRTDRNRLTQIEPRDDKIRKIEFLLRHRDKTVDDKRRLTNRLTCYLKEYFPAFLDFFSDITCPTALSLLKVYPTYEDTKELSKEDIKAFLRKHHYHKESGALRICKAIKEGQVKIDTTVIQERSRSAILLIKRIELLNEEIKEYENDLKETTENDKDAEIFKSLPGSGDTLSPGLMVIFGKKRSRYENAEEINSLSGIVPFTKQSGNWETHLFRFGCNHFYRNIITRLAYCSLTKSEWARGYYNEKRAEGKSHYHALRCLARIWIKVAFSLWKKREKYSEDKHMAAVQMHNIRNRLARKSA

SEQ ID NO: 322190 - protein, 403 aa, unidentified
MVTQIDNYDQVDVFVGLDVGKGEHHAVALDRTGKKLYDRALPNDERKLRAVLTDLQKHGIVLLIVDQPATIGALPIAVAQAAGALVGYLPGLAMRRIADLHPGEAKTDARDAAIIAETARTMPHTLRSIQVTDEQVAELTMLCGFDDDLAAQITQVGNRVRGLLTQIHPALERVIGPRLDHPAILDLLQRWPSPAELRAAGEKRIATRMLKLAPRKGREWAHEIVVALGEQTVVVTGTNAAALVVPRLAAQLTTLRRQRDDVAAEVERLVDAHPLQPVLTSMPGVGVRTAARLLTEVAGKHFPTPGHLAAYAGLAPVTRRSGSSIRGEYSSRRGNKVLKNAMFLSAFAALRDPESRAYYDRKTAQGKRHNQALLALARRRSDVLYAMLRDGTLYQSSPDRAVA

SEQ ID NO: 322191 - protein, 376 aa, unidentified
MTAVTRHAESTPHTLFMALELGSTTWKLAFSRAGDDHVRVRTMLARDVERLRDEIAKAKARFDLPTETPVRSCYEAGRDGFWVHRALLADGIQNVVVDPASIAVDRRARRAKTDRLDAIALVRQLINATGGDRRGWREVHVPSCQAEADRQLQREWDVCRADRTRVRNRIQGLLATQGLRLTLTGDFPERLARVRLWDDNPLAPELVARLTREWTQLRQIETRRAAIVRARRARLAAHTDTIAQQVTQLTQLRGIGVTGALTLSSELFAWRAFTNPRQIGACVGLTPTPYRSDQTIREQGISRSGNRRVRALSIELAWKWLQWQPDSALTRWFHDHFGRHHRARRIGIVAVARKLLIALWRYVETGQIPAGAIVRA

SEQ ID NO: 322192 - protein, 323 aa, unidentified
MNKGIKYFGIDISQLVFDVTDSDGNYYQFKNNGSGFKKFSKLLDMESHCVMESTGYYHYQLAYHLLETGVKVSVENPLAVKRFMQMKLSKIKTDKSDSRLICAYAKQVELKLWTGQSKTEQECLQITRALSCYTKQSTMLKNKLHGEAVLGEPSKGVVRSLKRSLKQVEKEIKTLEDMLLVLVKQSHQDLLTRLETIPGIGRKTALMLVVLTGGFERFTNAGELCSYAGLTPVVRQSGSSVNGRARISKIGNQKLRNLLFMCSFNACKYNKACRDLYERIVAKGKSKKLALIAVCNKLLKQAFAIAKSGLIYDAEYKSVLVKN

SEQ ID NO: 322193 - protein, 393 aa, unidentified
MKDYFICIDVGKNQHWARVTNPDGEIFVSPFPFSNDRKGYKVFYQAVDSYLKKDHLVGMEDTGHYGDNLRVSLLNHKATVAMINPISTDAMRKATLKSVKTDKEDTKNIGIVLQNPYLYRIIRMSDLDSHPMRELTRYHHNMQEACTRYKEQLQKDLDKVFPEYNSLFSASYGPVYMRILEMFQSAYTISHTDIRTLRSAIRPKGQKGRGPAFTAEQLKQLAKESVGEPNMIIEMEIRHLVGLIQKINEDLAECDKKIEEYSHELNSPILSIPGIAHFSCTSIVTEIGDINKFDNPYQLIRYAGVNPIVYQSGQYSAASTRISKKGSKYLRKTLYQIIQPVIENNDVFKSYYNKKIAEGKTHRCAQGHCVRKLLRIIFHLLKSSEKFDPTKLR

SEQ ID NO: 322194 - protein, 344 aa, unidentified
MSKVSTIGLDIAKSVFQVHGVNVAGAVVIRKRVSRAKVLEYFGELPPCLVGIEACPSAHHWGRELQALGHMVRLIPPSYVKAYLKRSKNDANDAAAICEAVTRPSMRFVPIKTKEQQTALMLHRTRQLLVRQRTMLSNALRGHLAELGIVSAKGRNGTAELLRIIADDGDSRIPAAVRDILDVLARQYGAIGIEIASIDKSIMALHRACEASRRLAEIPGIGPIGATALVAEIGDWKTFSSGRSLAAWIGLVPKQHTSGGKDRLGSITKQGNRYLRWLLVAGAMAVIRYARKHGTRKRPWLARLMERRPTKVAAVALANKIARMAWAIMVHGERYKEPKLLPAA

SEQ ID NO: 322195 - protein, 354 aa, unidentified
MGEVVVGMDLSDRTARWCAVDGGTGEIREGAVTLTKVELSAWLDGVEGWTVVVEAGTPSGWIARHLSELGHKVVIVRADALAGGKRRRKKNDKEDAYALCRLGQHPDERLVRSIWQRPAEYQADLSTVRARDGLVRARTLLVNQVRGTVKSFGERLEAKHSAESLPRYAEQELSAAVYAHVQPLLEAIEALNRGLAEYNERLHTNLARRPESARLLQVHGVGDVTASVYMGVVGDPKRFGRSRDVAAYLGLAPWQDQSGEHDPQLGISKAGDALCRRILVQCAQYILGAHGKDSSLRRWGLALAGDGKNKARKHKAVVAVARKLAVLLHRLWVSGETYDALRGARGEAEEAKAA

SEQ ID NO: 322196 - protein, 343 aa, unidentified
MVMIGIDAHKRSHTLVIVDERGRQLAQRTTGTSSSDHFELVAWAARHGEHVWAVEDCRHLSRRLERDFLAAGERIVRVPPKLMASARDSARSFGKSDPIDALAVARAALREPDLPLARLDGPEREVRLLVDHREDLVQERTRIINRLRWHLHELDPAGGPAPRTLNRLRNLDLLAKRLAGVEGIVARIARDLIERCRSLTIAITQLEREISQLIEKLTPTLLAICGCGPLTAAKILGETAGIERFKSPDAYARHNGTAPLPVWSSNRARHRLSRTGNRQLNAAIHRIALTQAHRHPPAKAMIVRRRADGDGGLEALRVLKRRLSDVVYRALRADLTATLTEAA

SEQ ID NO: 322197 - protein, 343 aa, unidentified
MQTITTVGLDIAKSVFQVHGVDAAGQVVVRRQLKRRYVLAFFQKLPPCLVSIEACASAHHWARELQVLGHTAKLMPPAYVKPYVKRHKNDAIDAEAICEAVTRANMRFVATKTPEQQSCLTLHRTRHLLMRQQTSVINAIRSHLAEFGIVAPVGRNGVEQLLGVVADPNDKRLPELARACVAALGAQLRVLKLQILEFDRMITAWHRSSEASKRLDQVPGVGPLLATALVASVAEPKAFRSGRDFSAWIGLVPKQNSSGGKERLGNISKRGDRYLRSLFTTGALAVIRYAKIHGTKHRPWLTALLARRPTKVAAIALANKLARMAWAMMARGERYKEPAALAA

SEQ ID NO: 322198 - protein, 422 aa, unidentified
MLEEAQDSQELIERVAALDIGKAELVCCARVPSPDRPGRRLQEVSTYPTMTRSLLVLADRLGALGVTRVVMEATSDYWKPVFYLLEAQGFEVWLVNAKDVKHLPGRPKTDRLDAVWLAKVAERQMLRPSFVPPPAIRRLRDLTRYRADLVVGRTAEKQRVEKLLEDAQIKLSVVASDIFGVSGRDMLAALVAGERDPKVLARMARTRLRAKTARLEEAFCGRFSDHHAFLLGRMLSRIDQASADIAAVEAHIEEAIAPFAQAVDQLDEICGVGRAAAQVIIAEIGTDMGRFPTPGHLVSWARFAPGVKESAGKPKGKATTGHGNPYLARVLGEAAVAAGRTNTFLGERYRRIARRRGAKRAIVAVGRSILIIVWHLLSDPTVRYQDLGPSFYDTRIDAERKKRNHIRQLEALGYRVTLQPAA

SEQ ID NO: 322199 - protein, 343 aa, unidentified
MDHFAGLDVSVKETSVCIVDDTGRIVREVKVASEPEALLAVLTNPAYHFKRIGLEAGPLSQWLFSALAEAGLPVICVETRHMRAVLKAQINKTDRNDARGIAQMMRVGLYRPVHVKTLRSQKQRMLLTHRKLMQSKAIAIENDLRATLRNFGLKVGVVGTVKFEARIKQLVENLPDLVVLVEPLLIVRRVLREQVGILHRRLLAIVRDDDVCRRLMTVPGVGPVVALTYRATVDVPSRFRNSKAVGAVFGLTPSKHQSGESNRTGGISRCGDEMMRMMLYEAAHIMLVRSAKWSWLKAWAMKIARHRGLKKAIVALARRLAVIMHRIWVDGTEFRWTREVAAA

SEQ ID NO: 322200 - protein, 433 aa, unidentified
MKVLYERVAGIDVHKDMIKVAIRSPGEKPWTRKTEILEYRTFYGVLQAMAAELRRRGVTHVVMEASGVYTEPVYYALCEQDFTEVAVTGPAHAKALKGHKTDAKDCARLAELFECGLLRGSYIPPAELKEVRDLTRYRMKTVQARTSEIQRLGKALESAGIKLGSVASSITGASATAMIEALIDGERRGGVLADLARGRMREAGKLADLSMALTGRFTGHHALLCRLHQDRIAGFDAAVAGLDERIAGKATRWQREAGLLTSVPGFGDVVAQAWLGEIGPAPHRHFTTHEKLASWVTLCPGNNISARKRKHSRTGDAGTYIKPMLVQAAWNAIRVRGRLQARYNRLVRRFGGDKNPGAKKKAIIAIAHTLLKIAYQVLKSGTPYQDLGADFYTRRESPEQKQAWLERQLQKLHPGCTITISISPTEAALTPGA

SEQ ID NO: 322201 - protein, 392 aa, unidentified
MYIVGIDIGKNHHEASIVSPEGKQIGRSLRFATTHKGADSLMSFIFKNIGNSPCVFGMEATGHYWYPIYSFLKAKGYTICVINPIQSDSLRKMYIRQTKNDSIDSFLIAEVIRFGQFGTTSMADENILAMRQLCRYRDSVISSRTEIKLRIGTIMEQIFPEYEKQFSSLWVSTSMGILEKYLTPENIENAPIDELFEIIKDKSHNKLTMKKAISIREAAADTFGIKIAQDAFSFQLKQLIDRMNFLDKQIEALDCQILEYYEKFDCYLHTIPGIGMIAAATILAEIGDINRFKSSSALVAFAGIDPTVRQSGEFSSTHNHMSKRGSPYLRHAIFLVATTCSFHNSPLNAYYKKKREQGKHHLTATGAVARKLTTVIYAVLRDGKPYEPKSFC

SEQ ID NO: 322202 - protein, 350 aa, unidentified
MLYVGVDQHKKFSQAAVVDETGAVVDMRRLYHNDKDEMRRYFRRWGQEAIVVLEATRNWYWLYDLLEEEVKEVKLCHPAKVRLIAEAKVKTDKIDATVLAQLVRTGYLPESYVPPQEIRESRELHRFRITVVRLQTRLKNRVHTVLDKLGIEHPWADLFGKKGREFLCSLKLPRVYQLELDTCLRLLDKVGEELKLMRKEIMAALSADSRSELLMSIPGVAELSAYLILYEVGEISRFASARKFASYCALTPSTHQSAERLWHGHIGKRGNLYLKWTLIEASHVAVRKDPALEAIYKCKSRAKGKGKAIVTVANKLSKAVYHILRSGQRYRYNHLTKRHLGKPLVVLGRR

SEQ ID NO: 322203 - protein, 427 aa, unidentified
MDEQDHNRIKLFRQFKKEIRGSKEYLIVGIDIGKSTHHGFLGTATGKVLRRIVIENSASGFEHLLTMVQFFSDREGLKRVVFGVEPTSVYHKPLSEFLIEEEFLVVYVTNEAIKKNRALLDGRWDKNDTKDAANVADLLSQGKCQYYDLPPMNVRDVRSLLLLRTRLMKQQHSARIRIRNNLVAQYFPELDQLWNKSESENLAIVRWCLSPHKIRQLPFEAFCRMVAPRQRGEKQYRRISKIWEMSPYSIGCRAGIAVEQEAKILVEGLTTIQTHIVEVEETIEDICRCFDEYTLLLTIPGFGPYISAVVLASIGNPYRFQSTKELIKFAGFDLNARRSGKKSKAAVPVISKKGKGSLRYALYQAALVATSSNTRFRAYFHRVLEGREREEGIRTKMRVKLAAKLLIIAWVMMKRKEPFNPDYLKVE

SEQ ID NO: 322204 - protein, 432 aa, unidentified
MIKSNYMSTLFVGIDVSSKSNVVYAMDFDENKYIASSFNNNQPGADELAAIISECMKKHSDLNTIVIALEATSVYSIHIANFLSTCEALMPYKPYVYCVNPKATANYRKSYVSMDKTDPMDAFLIADFARVGRTKKCEPWRGGQYLALKRLTRHRLHLAECITREKTYMVSNLYLKFSELQLLEGEEQPFSNTYGATASAVLTEFMSPQEIIDSSEEELLEFLAKKSRNRIADISRTSDLLKKAARDSYRLDKCMYEPLNVSLASSFNCIQTYQKEIKLIEQAIEKCINGMNPNAFIILKSIPGIGPVWAAGILSEIGDITAFHSSDALAKYSGLTWLKNDSGDFVSEDNRVSKAGNTYLRYYLGEAANSVRRHVSEYAEFYSRKYAEVTKHQHKRALALTSRKFVRLVFGLLVKNQLYTGEKLDAELNTES

SEQ ID NO: 322205 - protein, 371 aa, unidentified
MSSTVKYVGLDVHKSTIAVAVAEAGKRAEVREHGEIANTPAALTKLLAKLCGTDIELNICYEAGPCGYGIQRQVAAAGHHCVVVAPSLIPSRPGDRIKTDRRDAVKLARLHRAGELTSVWIPDGAHEAMRDLVRARLAAVRSLRYARQQLSGFLLRHGHHYHRPAWTQMHRRWLSGIRFPEDVHHIVLEDYIATIDAAQERRDRLTVQIEKRLADWTLAPVVEALQALRGMALIAAATIVAELGDIRRFSKAEQLMSYLGLVPSEDSSGKRRRQGGITKAGNGTARRMLVEAAWSYRFPARISRDQLLRQEQLSASIRAIAWKAQERLCLQYRKLSRAGKPITTVTTAIARQLAGFVWAIAHEVRMPKAVA

SEQ ID NO: 322206 - protein, 414 aa, unidentified
MTKFSVYIGIDWANDKHDVCVQVANSSARKFEVIKHSPKSVNEWITSLHKQYKGQIAVAIELSKGPIVYALQKFDFVTIHPVNTSMLAQYRKAFSPSGAKDDPTDAEIALDLMLRYPNKIKALKMESESVRKLTYLVEQRRKLVEDKRRFSNRLIITLKEYYPHLLDWFSHRGSGIFCDFITRWPNLQKLKRARADTLKKFFGSYPGRTAAYSVKRIQSISEAEPLTLDNAVIESHQLLAVALANQLLVAVKVIKVFDREISELFNALPDAELYKSLPGTGPCLAPRLLVAIGENRSRFNSASEIQMYAGIAPVTVRSGQKSWIHWRYQCSKFTRQSFIEWAAKSVHQSYWAGIYYQQQRSKGNTHQSSIRSLAFKWIRIIYRCWKTKEPYNEAKYLKALSDRNSPLLFKEKAC

SEQ ID NO: 322207 - protein, 421 aa, unidentified
MVQQKISRKLAQVKKGTLHAGVDLGSENNVAVVINEYAERLDRFSFPNDRDGYEYFQRRIEKQKQQHKAPEVLVAMEPTNYLWMLLATVLEQKGITYRLVNAYTVKKHREGDQLDRSKDDPRDAFTIADLSRTGKCTETQLQHGAYAELRQSVSLYYRLKRQIRREKQHIWHAAGQLFPELPRVFKNITGETAKAMLITQAAAVEIQKMSEEEFITKVRIGFDGNRLLVSRLRAAYHLAMVSVGVKYGVQALQLALKLHIESLNLHLNQEKRLLSALELCFLSLPEAKALLSVNGIAILTGATILAEIGDPKRFRHAGQLVKLAGIQPTPNRSGRKQRSATPMSHQGRPRLRSALYMTCLRLIRVDRRFSILYHRLQHREKNPLTKMQSLGVLMNKLLHILWALMKQQTQYKPLDASLTET

SEQ ID NO: 322208 - protein, 355 aa, unidentified
MREEKYIGMDVHQATISVAVVDVHGKLIMECLLETKAATIIEFIQGLRGTLSLTFEEGTSAAWLHDLLKPHVNRLVVCDPRKNALLKEGNKSDRVDARKLAELLRTDQLKPVYHEEHGMRTLKELGRSYLTLTKDVTRVMNRIKALYRSWAIPCSGTTVYTPGHRAEWLAKIAEPGVRVRAEHLYQQLDSLQPVRLQARRELLRESQKHAAVKLLRQIPSIGPIRAAMLVALLQTPHRFRSKRQLWAYSGFAVETHDSGEYRNVRGKLQRNRERMTVRGLNDNHNKDLKNLFKSAAISASTRPGPLHDFYVARVEKGMRPTMARLTLARKIATIALTMWKKGVGFDPQQLHRQAA

SEQ ID NO: 322209 - protein, 387 aa, unidentified
MRQPNDLSRSLVALDQDSTLIAVIEMGQASWLVAGIVPGFNRHPLKKIATDQEQLLQVLRRWAKEAETTGRMIKRIAVAYEAGRDGFWLARWLRARGVEAYVIHPSSVPVSREHRRAKTDRLDTELLKRAFLGWLRGEPDHCSMAAIPTLTEEDAKRPGRERESLVGERTRIINRIKGALARLGIREFKPMLRSAPQLLETLRTPEDAALPPNTLAELRRDMARLSFVKQQINEVERARLERLQQAAENEAMRWFRLLTRVVGVGVETADMLVQEIFSRNLRDRKAVARYAGLTGAPDESGKKRRERGLAKSGNARVRRGMLQLAWGFLVHQPDSVLAKWYRARTADARGVTRKTMIVALARKLLIALWRLATTGEVPEGLAIRAAA

SEQ ID NO: 322210 - protein, 344 aa, unidentified
MTYYAGLDVSLRTVNICIIDEQGEFVTETKLASDVQDMVAYLDELDLDIESLALEAGTLTQYLTYGLQAAGFEVICMESRQVKGALSAMRNKTDKHDARGIAQILRSGWYSPVHVKSIESHHIRMLLSSRRAVLSKCVDLENEVRGLFKIFGLKLPPKLGHGAFDNAVRDIIETDAALSHALLPLLEARLALYRSFRELDNRTRKMANADPVCQRLMTVPGVGFITALTFKAGVDDPSRFKKSRTVGAHFGLTPRRSQSGEIDFDGHISKAGDADVRCALYSAANAMLTRTAQWSSLKAWGMQIAKTRGHQRAVIAVARKLAVILHRIWIDDTQFRWGTEVARS

SEQ ID NO: 322211 - protein, 256 aa, unidentified
MEHRTFPTSAAGLHRALAWIRDRTQTRTCLVVVEGTGSYGAQLTEHFTQGGILVAEAPTVPAARRRGKDDVLDSARIARAVLGLRLDQLCWPRAGGTRTAIRVLVSARDQMSTERTKIINSLTALVRGVDLGVEARKALTSAQITTIAGWRTRDEDPATAACRREAIRLASRIRTLGRDLAANMAELRRFTAAEVPELLNLPGVGPVVAGTILLAWSHPGRVRSEAAFAALAGTSPIPASSGHTIRYRLTGEATDS

SEQ ID NO: 322212 - protein, 384 aa, unidentified
MQASHVSTPIKSNVSTIFVAIELSQRSWLVTMHCPDEEKISHHKLEGGDHAGLLTLIERMRERAARALGAVPAVVSCYEAGYDGFWLHRLLMAAGITNHVFDPASIAVDQRARRVKTDRIDGEKMLRTLMAYLRGEPRVVRIVRVPTPEQEDARRASRERDRLTKEQTAHTTRIKALLRLLGMAVGNPRRHDWLTWLVKQRDWQGQAVPPQIMAEIKREHTRLMLVREQLDALAQTAANLTPAAAQMAQRSELLLRLKSLGPAFTTTLTNEVFYKDFRNRREVASYVGLTPSPWQSGGIDRDQGISKAGNPRARCAAIEMAWLWLRHQPDSKLTQEYRRRTLDAGKRIKRVAIVALARKLIVALWRYLTTGLVPEGAMLKTAEV

SEQ ID NO: 322213 - protein, 420 aa, unidentified
MKVVYQTCCGVDVHKSFLVATIIKTTSGVEPSYQKKRFSTFNNSILQFKEWLVKNQCRDVCMESTGKYWVPVFNLLEDEINITIANPKWVKAVKGNKDDTKDSKWIGDLFRLGLVPGSYIPCKPIRILREFTRYRYKLTSCRTSEKNRYQNALTVCNVALDSVVSDIFGKSATSVIDYLIEQPDNSINHEEIASRLLRSLKRKSDSVIESIEGYQMTDSQKYRMCLIRAHLDYITSTINDIDTMLNSLIAPYENAVQLLCTIPGVDRNSAITVISEIGTDMTPFSNSKRLCCWAGLTPGNNESAGKKKSVKITRAGVYLKPALVQVAHAAVKSNKSPYYKQKYERIMKRRGKKRAIIAIARMILTAIYQMLSTGEAWNPTDLYKIDMPEPMKEKQKEKAIKQAKKLLIREGILSESQLVS

SEQ ID NO: 322214 - protein, 432 aa, unidentified
MPVFCGIDWAEDHYDVALVDQVGVVLMGRRIDDDAISYQLLLALLAEHGDDQGEPIPVAIETPRGLVVACLRGTGRQVYAINPLSVARYRERHSVARTKSDRVDAQLLANILRTDRAAHRPLPTDSELAQAIAVLARAQQDAVWNRQQVANQLRSLLREYYPAFLEAFKDRRPGGLAHPDACAVLAVASTPTQAARLTRPQLSAALRRAGRQRGIAAASIRLRAIFRRTSLQQLPMVEQAMGFQALALLKQLEAATQATDDLAEATRLVFQQHPPMAIFTSFPGLGELPAARLLAEIGDDSTRFADARGLKAYAGAAPVTRASGKKLVVLHRKVKNQRLAAVGHLWTLPLCASQPVPELTTTAADWPAIDTPPHNATCSTASSAASITASRRARPMPRPRPFRCLSQLPLDKLRSWDVWAAPAVSLWTSWWC

SEQ ID NO: 322215 - protein, 361 aa, unidentified
MNATTAAIDLAKNVFQVALADANARVLEQHRLTRAQFERFFDNRKVARIVLEACGSAHHWARVFTARGIEVMLLPAHYVRAYVRRSKTDAADALALLEAARCADIVAVKVKSVEQQSLQAVHRTRSLWMGTRTSRINALRGFCRELGLHVPVGARTGLEAMARAVADDQSPIPALLRPIMQQLLEEIRVLEVRIAQLERQLAQLARECSACRLLMSIPGVGLLSATAILAATSGNVAHFKSARHFASWFGLTPKESSSGGTRRLGRISKMGDKYLRMLLTHGARSVMRAATVAKLRGQELLGVRHWALQLQGRSNHNKAACALANKMARICYAVLRDQTPFGQPATRLSKKMQRQSFELAH

SEQ ID NO: 322216 - protein, 412 aa, unidentified
MRVAHPHCAGIDVHKKNMTVCVFVDQDHGSQPVYHKRTFATHTEGIQELMIWFQEHQVTEVGMEATGVYWKPVWNALEGKYGLHLCNPEHIRAIPGSKTDLRDGTRIADLLAYGKLPESFIPPRWQRELRDLTRMRTKLKQEAARASNRIGKVLEDAQIKLGNVASKILGVSGRLMLNALIKGETDEKVLSDMAKGQLKKKKVELRQALRGGVQEHHRFQLQLLLQHINEIEEKIFQLDLRIAKYLEPYEEIVQRLDAIPGVDRIAAAIILAEIGPTVESWEEARKLACWACMCPGNRISANKRQSGRMRKGNRWLRAAFCQMAWASTRKKGSYFKTQFRRLAGRRGKKRAVMAVAHTLLIIVYHLLRHPGLTYRELGEDYFDKRDAEHTAASLVKRLRKLGYEVSVTRKAA

SEQ ID NO: 322217 - protein, 392 aa, unidentified
MAKVIIGVDPHKLSATIEVVDGYEKLLGSGRFSTDQAGYTAMRTYAKAWPDRVWAVEGSNGAGRPLAQRLLEAGEQVVDVPAKLAARVRLFDTGHNRKTDARDAHSIAIVAVRTNTLRVLRPDGELEALRMLCDRREELTRLRVQTVNRLQRLLAELVPGQAKKDLTALQAKAILATVRPRDIAGKTRRRIAAEELADLVAVEAKMKRSTAELKALVKARRSRLMDLPGVGPVVAARTLADVGDIARFADRNRFASWTGTAPLDASSGEQNRHRLSRAGNRRMNHMIHIAAISQIRLDTEGRAYYRRKQAAGKTKLEALRCLKRRISDALYRQLVADAEQVERTNTPNEAGTGPGGHCGASLESSAVDLPPHIDTSDQPLPGPAKKTLRPTG

SEQ ID NO: 322218 - protein, 355 aa, unidentified
MDSKKYIGMDVHKESISIAVMNGAGKIVMECVIETKASMILQFIDGLRGDVQVTFEEGTSAAWLYDLLKPHVTKLVVCDPRKNASMREGNQSDKIDARRLAELLRLNHLSPVYHGEHGLRSLKELVRSYLTITKDLGRVMTRVKAIYRSWAIPCTGKQVYAPRHRAEWLAKIGERGVRRRAEFYYQQLDALRGVRQEVRRELLAEAKKHQAWKRLCQIPSIGPIRAAVLLGILQTPHRFRTKRQLWSFSGFGIETHSSADHRRVDGRLQRAKKQNSIRGLNRNCNHDLKNLFKGAAVVASSKPGPFQEFYTALLTKGIRPEMARLTLARKIATIVLIVWKRGACFDAQHLKPQTA

SEQ ID NO: 322219 - protein, 405 aa, unidentified
MWYAGIDWADEHHDAVVLDEQGQRVGACRVTHTPEGLAQLITFLQGTVASAPEPQELACLIETTHGLLITALLDAGLAVYPVNPKTVDRRRKPSGAKTDAIDAYLLAKTGRSDLADLRRLAPDSPLVQELKALTRDQDGLIQSQTRLVNQLTACLKAYYPVALDLFTKLHQPLTLAFLQIYPTLEAARGSSLEQLTEVLRHHHHPTPGPTAQALWERLHQPQLQADAITTRTKSRLMVALVSQLVPLLEQITQYDAEITRLFLSHPDSTIFASLPRAGTRLAPRLLAGWGDDRERYRSAASVQALAGTSPVAYESGKYSKAHRRYACIKPFRNTLYQFAWQSTFREPWAAAYYRRKRQQGKSHSMAVRALANGWVRIIQAMWLTQRLDVAETFLAAQHAHAEHAA

SEQ ID NO: 322220 - protein, 430 aa, unidentified
MTVMEVIHPRCAGIDVSKKDAKVCVRIQGRGRKATSSTVTTWTSMTGSILALREHLLAERVTCVVIESTAAYWKPFYFLLDEALNVMLVNARHARNVPGRKTDVSDAAWLAELGAHGLVRASFVPPEPIRVLRDLSRARTTIAQARTKEIARLETLLEDAGIKLSSVACEITGVSGRAMLEALIEGQHDPGELADLAKRQLRKKIPALTEALQGRFTAHHGFMVRLYLDRIDAHEADIARLDARIEEAIGPFRAARELLVSIPGWSQVVADVFIAETGADMSVYPTAEHLASWVGVTPRANESAGRIKSAKTMPGNRHLKAALGVAALSASRSTNTYFGARFRRIAGRRPVRPGTKKSRRQSAAGQTAIVALEHKMLTCAWHMLVNGTFYQDPGPDYYTRNHPAQTKAKAIKQLQALGYDVTLQPHTDAA

SEQ ID NO: 322221 - protein, 320 aa, unidentified
MTTFDSQVVVGVDVAKDEIVVHRRDLEKTQIIANETPALKKWLRSLPLDSAIAIEATNIYHVETVELAYSMGHRVFVVDPGKLSKYRDSLGKRAKTDASDAALLARYLAHEGAALRLWSPPPEVYTELKNLLHRRAKLVSIQVTLKQSWGNHADLPKEFGAVIDSLKALDQAIQNLMKDILNKAGLMPQIKRCEGIEGVGFLTATAFLTAYMRGDFASSDAYIAYLGLDLCVRDSGKKTGRRRLTKKGDPEIRRLGHNASMAACRSETWKPFYQRHLDSGKARTQALVILTRKLARVAFALMKNQTDYRPNSIFGASPQT

SEQ ID NO: 322222 - protein, 343 aa, unidentified
MSEISTIGLDIAKHVFHAHGADGSGRQVFSRRIARRKVLEFFASQPRCLVALEACGGSHHWARELMRLGHDVRLIPPSYVKPFVKRHKNDAADAEAICEAAQRPNMRFVAVKSEEEQASALVFRTRDLFVRQRTQTINALRGHMAEYGWVAPQGRAHVATLADLLDEAAGASVPEAAGAMLRVMIAMVAELDGRIAELDKEIARRAREDVVVRRLMTIPGVGPLAATAIAALAPPLETFSRGRDFAAWLGLTPLQKSSGGKQRLGRMSKMGERTIRRLLIIGSSAVVRHASRPGAPERPWLTAMLARKPRMLVTVAQANKTARIVWAVLTKKEDYRAPAARTA

SEQ ID NO: 322223 - protein, 351 aa, unidentified
MIIIGVDYHPSDQYIAFVDTETGEGDERRLNHSDGEAEKFYRELAARGASVRVGMETTGYSRWFERLLAELGIELWIGDAAKIKTKRVRKQKTDRNDAQLLLKLLLDNNFPKIWVPSPENRDLRQLLWHRHRLVQMRTRIMNQLQALAMNEGQRRKKKLWSEVGRAQLEKLALAPWASRRRQDLLELLDRMNPRIQELTGAAEQEAKKRPDVLRLMTHPGVGPLTALAFVLIIGTVERFQCGKQIGSYVGLIPCEDSSAGHQRLGHITKQGSSLLRFLLGEAAQAAARCDADWRRRYLHLALRRQRNIAKVAMARRLGVRLYWMWRKGWEYSDWVKFSSHAGQLGIGNGVQ

SEQ ID NO: 322224 - protein, 387 aa, unidentified
MPQPNDLSRSLIALDQNSTIIAVVELSHSSWLVGGVVPGIERQPRKKLEPSPERLLALLHRWRDEAVRAGSTITRIALAFEAGRDGFWLARWLEARGVEAHVIHASSVAVSREHRRAKTDRLDTELLKRGFLGWLRGERGHCSMARVPTIAEEDAKRPNRERDGLVGERTRIVNRIKSTLARVGIRNFKPALRKAAERLATVHTPEGMPLPPNTLAELQRDMARLSFVVSQIKEIEETRQKRLEQQPETGPDAMVRLLARIIGVGVETADMLVHEVLSRPMRDRRAVARYAGLTGSPDESGAQRREQGLSRAGNARVRRGMIQLAWRFLMFQKESALALWYRARTADSRSGTRKTMIVALARKLVIALWRFVTTGETLEGVVLRPAS

SEQ ID NO: 322225 - protein, 343 aa, unidentified
MMQYVGLDVSLEQTAVCIVDEHGKALWRGKCASTPEAIAAVVKARAPHVARIGLESGPLSTWHWHELKKRGLPVICLDARHAKAALSLQVNKTDTNDALGLAQIVRTGWYREVTVKSLDSQVIRSYLSSRARLVEVRVDLINQIRGVLKPFGLVAGKGGRQPFIDRVRELVADGPLKDAVDALLTALQEVSRQIGILSRRLMGLARQDQTTRRLMTAPGVGSLVALAYISVIDTPDRFSNSSSVGAYLGLTPRRYQSGEIDRSGRISKCGDPLLRTYLFEAAGILLNRVSRWSALKAWGTRLAKKVGGKKATVAVARKLAVILHRMWRDNTDFRWSRQEGQPA

SEQ ID NO: 322226 - protein, 369 aa, unidentified
MDGNPWQAAGDRIEPTQSSLWLPRSVIASAPSSDPDGCRNNLVRFHKAGSRKMTQTSMTTAGIDTSKAKLDIAVHNRTERWQVVNALPGWRALLANLTKAGVTRVGIEATGGYERGVVEYLRAAGLTVLVLQPIQVKAFGRVHLRRAKNDALDAVLIAACAAAIDQPRIAPDPRLAELAENLTFLEQIEEDIRRFKTRLEHVDQPRLRRMVLGDIARLKARRVAQIRDIAKQLRCHHDLAARLDLVLSIPGIGERTALALIIRMPELGRINREEAAALAGLAPFDNDSGQQKGQRRIAGGRARLRRSLFAAALPAAFRWNKALILLYARLTAAGKHHNAALIACARKLLVYANTVVQRGTPWSERPLRV

SEQ ID NO: 322227 - protein, 415 aa, unidentified
MDILFKHCAGLDVHKKIIVACVLLSSPEGVQRFVKHFATTMAGLEALDAWLTGLGVTHVAMESTGVYWKPVYNVLASHFEVWIVNARDMKQVPGRKTDVCDAEWICKLMSIGLLKRSLIPEVAQRDLRDLTRYRRRLVEERTAASNRLEKILEDSNIKLAAVVSRLQGVSARAMLEALICGETDTAKLADLAQARLRSKIPELEAALVGQIRDHHRFMWRELLYHLDELNARLAALNERIAAYTAPHEAVLQRLCTIPGIQRWTAEVILAEIGPNVTAFPTAQHLASWACLCPGNNISANKRRSGKTRRGQNWLRPALVEAAWATSHTQTYFGSQFHRLRARRGDKRAAVAVAHSILIVVYHLLADPEAVYTELGADYFTKRNPEQEQRRAVRKLETLGFTVTLAPAQAAAPAPS

SEQ ID NO: 322228 - protein, 469 aa, unidentified
MVSSLLNHIQGKNGSRWADFLRKVGAENLLIVAVDAAKYTHKGMICTFYGEILVRPFEFDASMSGFQKLKHHIKNEMDQHNFKKVVMGVETTGHYYEDLVHHSKDEGYQVRILNAATTANERKSILNGSKTDNLDLMAIVQSIIYGRGTSSELATGKVHDLQKLTRARRELVKGETAVKNLIRVYLDYIFREFQGKSVWKDGKHRNVKPFSQLFGKAPRYIMRHCLHPSDILSLGAEGLRELSIRENLKMRDQSIETLLAFAKYSISKPKDDLQVEHYLLKQQLDQLELLERQIKNLERQIEDLFVQTEGAVTLSVSGIGVVTGAELYAEMGDISDFDHAGQLIKMAGTNPIVKQSGDRSPSYYAVSKQGRRTFRNIVYQVGRTLARNNPDMKQKYLALLERGKYPRQAYIAIGNRMIRLAYSMIKHQTLYRTSHEDYTLQDQISKKLHRKNASLFYEKFVLSNEELSA

SEQ ID NO: 322229 - protein, 342 aa, unidentified
MKDTMIGVDLAKRVFQVHGATMRGEVKFRRKLTREQFRAFMAAQAPAVVVFEACGGASYWARQMAGLGHEVRLIAPQYVRPFVKRQKNDAADAEAIVVAAQRPEMRFVTPKTADQQARAVLFRSRERLVRQRTELVNALRATLYEYGHTIPQGIAHIKQIEAILDAPHSELPALVRHECRDLLAQIAEQTARIDERARKIKTLAAETDAARRLQTMPGVGPMTALAVEAFAPERTQFRRGRDFAAWLGLAPRQHSSGGKERLGRVSKAGQADIRRLLIIGAMARLTARARRSIPEGSWLAKMPGKKPRMLVAIALANKMARTIWAMLTKEEDYRDPARAAAA

SEQ ID NO: 322230 - protein, 434 aa, unidentified
MATIRGSSSTAGDQYFAGIDWGGSFHQLCVVDGAGNTVIQKRFQHTKEGLEALGKKLGSLPGAVLMAIERGEGLLVEFLLTLGFPLYCVSPKISARARERYRVQSKKSDAFDAFVLADTLRHEHSYWRPLSVQSETMMQLRAVIRDRERVVWNQRDLENQLRAAMETYYPAPLHVFSSLDRDITLEFIKRYPTPEHASRIGPARMEAFTKRQSYTGRVAPEVLVERLREHALSASTGTTSGKAFAAVRFAEQLQLLNQHLRDYDKEIRRLLASHPDTPIFTGFPGLGPVTAATLLAGMGEDRAKYPSAASLLAETGLAPVTRASGRTRQVRFRYAANKRMRHAIDWWMFVAIREDPHWSGVLYEQARAAGQGHHRALRGIGARWVRVLWKCWNTHEEYDLTQHTRRSEALQAIEKEQDSIPTIPLVNEELKAAS

SEQ ID NO: 322231 - protein, 342 aa, unidentified
MEQYVALDVSLKEISVCIVDSNGNVIFEGKTAAEPAILVELIRSKAPQVKRVGLETGATSPWLFHALASAGLPVVCMDARHAHAALSMRPTKSDRSDARGLADMLRMGWYREVHAKSVTSHEHRTILGARHQLVTMRSELDAQIRGILKTFGLILGTGNKDTLIQRAEKLAAGHPVLSALVAKLAEVRRHVASQIAAIDRDIRQLVHTEPTLKRLMSVPGVGPITALAFLSSVDDPSRFKHARDVGPYLGLTPTRYQSGETDRQGRISKCGDTFTRTCLYEAAHVLLTRVQRFSPLKTWGMRLAKRIGGRKARIAVARKIAVILHCIWTDGTEFWWTRKKAA

SEQ ID NO: 322232 - protein, 424 aa, unidentified
MTGSTSITKGCTLVAIDVAKYANDVLIELPSGEKRKCRVSNTMVDWQRLAAFLQSTHAPCQIAFEATGDYHRPLAYFLQQQGFSLSLVSSIAVARTRDALYNSWDKNDSKDAQVILHLLRTGATQVYHDPLRSGSHDLQELANTYQQISLRKTRLQHSIMTHYLPLYFPEAERYSHSTRAEWFTQLLLLTPCPAAVLKYGKQEFICGANRLSGHKNDKSRWLADFYESACSSIALPVAEESEAIRMFRLVLQEHLHVCRLRRELEESVVTRLADHADFRRLQTIPGIGPILALLILAEAGDPRRFSHYRKFLKYCGLDLCTEQSGQFRGTTRLSKRGNARLRYAFWMAGAVAVRAKQNTFCKKFEDYVRRDPRNPDLRRKAYTAVAAKMARVAYALIKAGIDYRRFHEAAIPGGRIPSRRAVEA

SEQ ID NO: 322233 - protein, 331 aa, unidentified
MKYYTSTTEYNCGIDLHARQMYVCVMDRQGKKLVHTNVKDNDFAFFLKLVQPYRHDLSVCCECMFGWYWLADACQAAGLKFVLAHALYVKAIHGGKNKNDRIDSEKLTHLLRSNLIPPAYVYPAQKRPLRALLRQRIYYVWRRAELLARIHSHQLAHNRIPAKQTRRVRDPWEEQLLAAEDHPLRQLALKNDLAMIRHFDHQIFQLEEELQRQTKQLASREYALLQTVPGIGETLGLTLLYEIGDIERFPTVKAFLSYCRLVKGTVASAGKIKGLRGAKLGNPYLRWTFGEAAVIAKRDHFKIRPLAQQLGGMRPQHNQDADDCHQANNSD

SEQ ID NO: 322234 - protein, 353 aa, unidentified
MTVYVAVDFHAREQTISYCDSADGEIHRTKLRHQHDDVRKFYEQFTGEVVVGLEASGYSAWYEQMLAELGHTVWLGNPAEIRRKAPRRQKNDRRDADLMLDLMLKGDFPRVHSFSEESRTVMRQLRYRHKLVKVRTIAKNSLHAIGINAGLPLKRKLLTQAGIEQLQALPLSSVLSAQRDDWLELIALMNKRIATVEEALQERAKDDAEVALLRSHPGIGLLTALALRYTLLPVSRFTTTRRVTAYVGLDCVEDQSSERRRLGSISKEGSRLVRFLLNEAGQTAARRDPELKRFYKRLSHRRDKPKAKVAVARKLLVRSFIMLRDQIDYVEFVRRGVAARVARETHSPNMTDL

SEQ ID NO: 322235 - protein, 465 aa, unidentified
MKRHRRHPSPKPRTSPDVLERLHPHAAGIDCGSAEHFVAVPPDRDATPVRSFATFTGDLHRLADWLTACGVTHVAMEATGVYWIPIFEILETRGLQVILVNARHVKNLPGRKSDVSDCEWLRDLHILGLLRGSFRPADGIVALRGYLRHRATLIESAGALVQRMQTALVQMNVQLPLVVSDITGVTGLRILRDIVAGHRDPQQLAQHRDYRCHASEEEIVAALTGNYRAEHMFVLQQNLELFDTYQQQLAACDAAIEAQLAQLAAIAAPPVTALPPARRRQKPRENEPRFDVRTPLHRLTGVDLSQIDGLGPYNALRVLSEIGTDMTRWPTEKHFTSWLTLAPQNKVSGGRLLSSRTQPSANRAAAILRLAAMNLGRTQTALGAFYRRLAYRVGKATAVTATARKLAILIYRTLNDGLAYADPGAEAYDTRHRTHVLRRLRQRAENLGFGLIDLSTGELVEGAVS

SEQ ID NO: 322236 - protein, 421 aa, unidentified
MKVTYQTCCGVDVHKTFLVATIIKTTSGVEPSYEKKRFSTFNSDIRHFKQWLLDNNCLDVCMESTGKYWVPVFNLLEDRINVTIANPKWVKAVKGNKDDVKDSKWIGDLFRLGLVCGSFIPCKEIRIIREYTRYRFKLVSCKTSEKNRFQNAFTVCNVALDSVVSDMFGVSASAITDYLITTDEFDEEICKSFLKGTLKAKADTVVESIEGYQMTQDQKERMLLIRSHLEFVQMELNAIDAKLDDLVAPYEEAIALLCTIPGVDRASAVTIISEIGTDMSQFDSSKRLCSWAGLTPGSNASAGKKKSVRITRAGVYLKPALVQCAHAAVKSIDSPYYKSKYERLLKRRGKKRAIIAIARMILPAVYHMLSTGETWNPCDLFKIDMPQEMQDKQKAKAIKQALKFLMLEGVISQSDTLISSG

SEQ ID NO: 322237 - protein, 353 aa, unidentified
MNTIYIGVDFHARQQTVCSLKTDEGVVVTHNLKHQDKNEVRAFYQQFSGRVIVGIEASGYSPWFEQLLEELGHEVWLGDATEIRRRARWRQKNDRRDAELILDLLVHDEFPRLHRPSPQSREILRMLRYRQKLIKIRTMGKNSLQALALQSGLAKRSHLFTKSGQQELRTTQMSPVMQWQREQWFQLLEPLNERLLETMLWLKQQSQDDARIKLLRTHPGIGLLTSLCVVHTLDPVSRFRNQRKVAAYAGLDPMERSSAERKHFLGISKAGSRVLRYLLVEAAHTAVKKDDDLKRFYQRLVERRGRPKAKVAAARKLLIRSYIMLRDEIDYAEFRRRAVAARLARQSTRPPCL

SEQ ID NO: 322238 - protein, 431 aa, unidentified
MASATGLHNVGDGNGATITTPEKEGYTVDNSYQVFCGIDVGKTSHYAVALNRDGQRIAGLEVHQDETALRQLFTNLSRHGTVLIVVDQPRNIGALPVAVARVCGIDVAYLPGLRMRRIADLYPGDGKTDAKDAFIIADAARTLPDTLLPIGETSDLVEGLRLLSGFDADLAVDENRLINRLRSVLLSVHPALERAIGAQMHRPIGPGLLAKFGGPVGFTAASRSRLDSCAQGLAPRLWKKVVESIVDALAEQTVAVPGAVQADLVIKHLAGQLLDVRVARSDLAARFEQALTEHPAGPILTSLPGVGVRTGVTILVEITDIGRFRDAGALAVYAGVAPRTHRSGTSIKGEHRQHSGNARLKRAMYLSAFAALKDPVSRAYYDRKRAEGKNHRSALICLARRRSNVLYAMLRSEVPFQPHRVELQQSTDVAA

SEQ ID NO: 322239 - protein, 348 aa, unidentified
MYDSKDIILAVDYHDENLVIRQFNCHSGEERLLKYRTTSRNIRKIVSESVNEAAAVGGHVFWIMESTTGWARVKKAIGPLATMLVANVLQMPLPPKAYRRKTDKIDTGRILREFLNGSLPMAFQPSDELRQIRRLVATRESLVSRRTALRNWINRYLAHETWRSRAGLWTAKGMRSLKRFAASIEGPDKVVLSVKLKELEHLVELQTTVEAEMLAIYKQWPQAQWIDEIPGIAEISAVSILARVGPIERFDSPEELISFAGLAPGIQQSDGSKREGRIGGGGTDKHLRHYLIEATFWARRVPRYRPTYERMLDRRGPKIARVVVARMMLRSIHKMLQAQVRFNRLRVA

SEQ ID NO: 322240 - protein, 427 aa, unidentified
MNYNQNHKLSQITPSTLIVGIDIAKDKHVARAQDDRGFEFGKRIVFSNRIEGFEQLLSWISKLQKEHGKSELIIGAEPTGHYWLSLAYYLRANDINFVLVNPMHVKKSKELDDNSPTKNDTKDARVIAQLIKDGRYSVPNLLDGIYAELREGIKLRDQLVKQLITIDNRIQNHIQRYFPEFNDVFKDWEGKTALFTLREFPFPSDLRHLTPEEVLAQWKTVVKRGVGIKRATSLVEKAKKSVGIETGLRFAKKEIHSLLDQYELYQSQLTELDEEITEVLQDIPGAQEMIDIKGLGPITIATFFSEVGDLTKYNHPQQLVNMAGLSLREHSSGMFKGQTRITKRGRKKLRKALYLAVRPLVASNPTFKALHNYYTTRPHNPLKKQQSLIALCGKLLRVLFVIGTKQCEFDGNKLLTGLPQVQPLQAA

SEQ ID NO: 322241 - protein, 398 aa, unidentified
MSRIWAGIDSGKGHHHGLALDTDGKTLLSRRVANDEPELLKLIGDVLDLADGRPVTWAIDMTGGEPALLLTLLVNHGQEVLYIPGRLVNRAADGYRGEGKTDARDAYVIADQARMRRDLRPIRPVDEAATELKLLTGRRADLVEDRTRVVNRLRGTLLSTFPALERALEVTNTGPLRLLTGYQTPAAIRRAGVTRLTTWLANRKVRGARALAEAAAEAAERQHTAVPGEKTIAKLVHTLAEEVMALNEQIAEMDKLIEGRFREHELADIVLSVPGIGTVLGAEFLAAVGGSLEEFDSPDALAAFAGVAPAPRDSGKVSGNLHRPITYHRRLQRVFYTSALVSVRYDPNSRKFYDRKRAEGKKHVQAVLALARRRVNVIWALIRDRRCYEVTPPVTAAA

SEQ ID NO: 322242 - protein, 429 aa, unidentified
MQNESTPGARGPVFCGVDTHADSHWLCVLDWRGRKVLSRRFPADAAGYEALAGAIAAAGEPACVAMEGTSSYGAGLTRHLASLGMPVREALSPARTQRRRPGQGKCDEADAERAARAAMSGSRLGTPKSQDGWVDGVRCMLAARSGAVKARTSAINTARSLLTTAPEGLRSRFRGMGGPRLMEELPSVRAEGALGAALGALADLWAAARDAALDMERAIEASLEENCPALLAMYGCGPVSAAKLAVAAGDNPGRLRSEASFAAICGACPIPASSGKTVRHRLNRGGDRQANSALHEIARQRVMRDPETAEYAERARARGKSDREVMRCLKRYVAREAYRALMRPHEVRRPEDASELVAARRAARVSQVRAASILGTSEKYISMLERGQRELKPIRRAYEAWVEAGLPLDWDRQAFEAERKMDSKKHLAK

SEQ ID NO: 322243 - protein, 375 aa, unidentified
MDQHNRAFVGIDTSKLRNAVAVAEEGCGGEVRYLGEIDTAEAATRKLVAKLAAKYRQLTFCYEAGPTGYGLHRLIGKLGHDCIVAAPSLIPKKPGDRVKTNRRDAVGLAKLLRAGELTAVWVPDERHEAMRDLSRAREAARKDLKGKRQQVSSFMLRLGRHYPGKKTWGPAHMNWLMLQKLEHREQRIVLEELLGAVRQESERVERLEQAIRDAVPEWSLAEVVTALQAMRGIDLVAAVTVLAEIGDLSRFQNPRQLMGYLGLVPSESSTGDTVNRGGITKAGNGRARRILVEAAWSYRYPPRVSREKQMKVAAAPRAVREIAWKAQMRLCGRFRSLTRKGKRPTVVATAIARELAAFIWAINREVVESHATANQ

SEQ ID NO: 322244 - protein, 350 aa, unidentified
MPIVAELFEYVVGIDTHARTHTYCVLACATGAVVDTATFPTSKAGQTRAVSWITRRTGGSVLAAVEGTSSYGATITKTILEAGIDVTEVRPAGRKAPAHHGKSDAIDAETAARSILGRDHNTLARPRSTGRRTALRVLLASRSLIDQQRTANRNALTALLRGADLGIDARRPITDAQVRTIAAWRIGRDTSQADALAFVRREARRLAIAILEQTELLKQNHRELHELANELAPGLQNLPGVGPVTAAITVCAYSHHGRVRSEAAFAALGGIAPIPASSGNTSRHRLTRSGDRQLNRAFDVIVRTRMSYDPTTREYVARRRAEGRTTREIRRCLKRYVCRAIFRELQTIMA

SEQ ID NO: 322245 - protein, 452 aa, unidentified
MSKVLRSAGSMEDRSFSRPRPLVSRGLRRAQEKRQRKRQRVPADALILGLDLARENQAASYGHGSDIFGRRRFRAGAETIDQLFPEARALAEAHGFARVIVAFEPAGHYWCLAAEACERAGLDYVLVHTLAVKKEREITRFNPEHTDPRDADLICSLPHQGKFTECRLPRTRERDALWQLARDYMRVRKLAAAERTRLHNFWHRTLPEFFTVFRDPAGATALATACALAPFSQLATLSTRSWVARVRRAAHGQRILTARAARLLPLLQAAHADPVRRSAEGMPARIRHAAQRRRLLEQQKADLRDDLLHRYQSCDEAPFLDSISGSDPFYNALTLALVGDFLDYDDPRALVKLAGSEVNHYASGDWQGSSRMSHRGRSPLRAAAYQQARHLVAHNDDFRARFFYLLHDTERARLTKQQAYVALMNRYLRTAHVLVTRQQFYRSPAHPGEGGA

SEQ ID NO: 322246 - protein, 345 aa, unidentified
MTNNIQFSSVCGIDIAKSVMQVYKVTSDGVVSNKAVKRADFLNEFRNIPPALIGMEACGGSQHWARELQSLGHTVHLMPPKLVKPYVTGLKNDKNDARGIYKALEMSVREVPVKSAAIRDLALLQTMRTKRQREKVAKINHIRGILTEYGLVMGKSINAFLAKAGSLIVQLKERADVSPYIVSELTALFREVKEAMEKIKELETNIDSIAKTLKQYDLFRSAPGVGPITAATMLVLLCNPAVFKNGREFAAYIGLAPKSSGSDGKNFVTHIPKKCECNNDVRALLVQCAHSICRCKHKSDWVSSILARKPKKVAIIAIANKLARQLWIMAKKGEKFEKRFILAAV

SEQ ID NO: 322247 - protein, 431 aa, unidentified
MHNRLQVGIDFCQKRADFCLLFPEGQPLESHIAVDNSYLGYSRAKRLLLDALDDYAFDGIDVSGEATGYLWLPFFLQLAADPELKLHDLRLHLLNPRWVKWFKKCFPQDDKTDQKDSFYIADRTRTRRPDVTWSPQLDTLPLRFYTRLRFHLVQNLAREKCYFSAFLFLKASSYRRLKPFSDVFGVTSRRVLSEYATLDELAAIPVEDLAQTLHEMSGHHLPDPFDNARTLHKVATESFPLPDALALPVHRILDLTLKHIRFLEDQIALVEDWITTEVQPHPTIMKLATIPGVGPVFSCGNGAEIGGIQRFLQAQKWDKRRKRYRPRNLRDAEDAVAKLAGLWWPRADSGDFEAEDRRMAKTGNRYLRYYLIQAANLMRQHIPEYTEFYRRKYREASKHHHKRALVLTARKSVGLVVGLLHRNEAYRPREV

SEQ ID NO: 322248 - protein, 349 aa, unidentified
MTDQRIPYCGRIVYVGIDVHKETYTVTCVCNKQIVKTVTMQADPAALAASLPRWFPGATLYSVYEAGFSAFVLHRVLTKAGITNIIVNPASVAVAANDKVKTDRRDSKKLAIDLADGRLRGIYVPTEAEELARLLPRTRAQIVKHRATIARQIKAKLHQFGLIAPASRRLISSRYLREIAAWSLPPELSVSLTLLAEQWRFATRQLIEMRRLLRDQAQAQEEIEKVYRSVPGIGEVVARTLATELGDMTRFANERALFSYTGLTPSEYSSGASVRRGHISRQGSSRVRHLLVETAWRALPRDGVLKEMFDRIAATRGKKRAIVAIARRLTGRIRACFRQGTTYAVGTYA

SEQ ID NO: 322249 - protein, 353 aa, unidentified
MNIIGQSLGIDIAAKSFQVCLQIKQADGHCKIKGSRSFPNTAKGIVALEQWLAKRLHSELALAVVMEATGVYYETLAYSLDEAGYRVHVLLPNRIKGYLKFLNVKSKTDKIEAKALAQLGLDQQLPVWQAASPQMYSLKRLCRERNILVDEKTMISNRFHAEVSCKTPEPFTVKRLKQRLKLVDKQIQEVEGQLKQLVARDEVLSRHLENICQVKGLGFTTVISIIAETNGFALVDHKSQLVSYAGYDVVERQSGSSVKGRTRISKKGNAHIRRALHFPALSVVKHHDEFKALFTRVLERTQIKMKGYVAVQRKLLVLIYTLYKKEQAYDPTYAQKQTQEQRGRQDTMPAYAG

SEQ ID NO: 322250 - protein, 414 aa, unidentified
MFAVGVDVSNGKSTVAVLQSKSTVTLKPFEVSHTPEALGRLVDKLNGLNGETKVIMEHTGRYYESIAMFLDSAGIFVSAVNPILLNGYQDGMSVHKVKTDKADAIKIAKFGLDNWDQLRQYEPMDTIRYQLKTMHRQFQLASKSETAFTNNLIALLEQTYPGIRKLLSSPARPDGSQKWVNYVGTFWHVDCVRKLSLNAFKERYLKFCERHKYYYSDEKAAELYRHAQNAVALVPKSDVSKMMVKEAVAQLNAISRTVETYRAEMNRLASQLPEYETVMGMYGAGPSTGPQLMAEIGDIRRFPKKNSIIAYAGIDPGKDDSGDVVKKSNKSSKRGSPYLRKTLFVIMDVLIRNKPADDPVYQFLDKKRSEGKPYYVYMTAGGNKFLRHYYGKVRDCLKEKGLWDQPLNGNKLSE

SEQ ID NO: 322251 - protein, 393 aa, unidentified
MKYTQNEKILQVTEKTLVVGVDIAKERHVGRAFDFRGVELGKRIEFENRKEGMEKFLDWANKIMKANGKDNMIVGIEPTGHYWLCFEQYLRENGIKVVLVNPFHVKRSKELDDNTPTKSDIKDPKTIAMLVKDGRYTEPNIPEGIYAEMRVAMNIYERLQKQLNVLKNQIINWLDIYFPEFLEVFSDWEGKVALLTLKEMPLPSDVIEKEVEGIIEYWRDKVDKRAISRRRAMDLVETAKRSIGKKEGRKLARQEIKYLLEEYELLKKQVEEIEGEMAELLKDVPNGDRLLEIKGVGVKTAVGFISEVGDIRRYEDARQIQKLAGLNIIENSSGKYKGQTCISKRGRGRLRSSLFRAMITIVAKNEEFKQLHMYYTTRQNRDLSRILCFQFIT

SEQ ID NO: 322252 - protein, 411 aa, unidentified
MRLFAGDDWAEDHHDIEVMDEAGKVLAKRRLPEGAAGMTQLHELIGRFLPEDADDAEVVIGIETDRGPWVAALVAVGYTVFPVNPLQASRYRERHGVSGAKSDGGDAHMLADMVRTDSHQLRPAAGDSPEGQGIKVVARAHKTLIWDRTRAVQRLRHQLREYFPAALEAFEDLDAPDTLELLGKAPDPARAARLTRAQVAAALKRARRRDIAGKTDAILAALRGEHLGQPAALTAAYAATARSLIAVITTLNAQVKLLEEQVREHFGRHPDAEIYQSQPGLAAILGARVLGEFGDDPRRYVSAKARKNYGGTSPITRASGKKKVVAARFIHNDRLVDALMSWAFSSLTASHGARAFYDEQRAKGHDHSDALRRLANRLVGILHGCLKTRTLYDEATAWGHRENLPQSSAAA

SEQ ID NO: 322253 - protein, 396 aa, unidentified
MGTVGIDVGGRIHVAARCREGETKADRGVLRISQSRAGFNALDAWLEAGPEPIELVIMESSGHYWMPLAAHLKRRGVPVAVGNPLAARYFAKSRLGRTKSDPADARSLAEMAMRDTPAAGDPLVGVELRQAARFAMTLVEEQAKVCQRLHRLVELGFPELRELFDDPTCRTARAVLRLAPTAHQASRRRTETLANANKGLGRRRLGVTRAERLRAAAAESIAVPELDAETAFEIGLLLDQYDLLEGQIEAADRRVAGLLDGEIARRLLTIPGVGPAIAATVMAEIGDIHRFTDFDQLLAYAGVHPAERSSGTKGARPETSWHMSKAGNSHLRAAAYRMALVGIQHNPVIATHYARKRAAGKSPMNAIGHCMRKALSLVWGVWRNGQDFDPDWGVEA

SEQ ID NO: 322254 - protein, 501 aa, unidentified
MSCRLRDEQPEPKEERLREVTVNVQVNGTGQVPVRRLVGIDLGIASEHTVRVLDGAGNKVCAARCVPARESLLAMEARALAGTPAGTRLEVVLEPTGAAWFPVARFLSARGHAVYRVSSAKAADLRKFYRRHAKSNGIDAETLARLPLAAPDGLTELELAAGDEAVLDRRVRACDRLTQQAARHKTRIKDLVRQLMPMTPLTGDVGKADLQVLERYADPRALLAAGPAQLAALIRSASRGHQGQARAAQWAAAAQAAIELYGPDDPAVPFADLAAEVATEIRLLQAIEAELQAHAAAREAAYRTVDPGQIARTLPGLAEVGGPAMTAIMGKPGRFPGGHHFKSFLGLAPRASETGETDRKGEPMTKAGPSPGRATMIRAADTARKLDPQLARIYYTQMTERGANHLKACCVVAGHLSLRLHAAMLRGAPYQLRDTDGTPVTPEQARQIIAANWTVPEDVRKRRRSRKTTGRTPQQAKKPVQRGDPPRPGSRPGNTPVNPAP

SEQ ID NO: 322255 - protein, 403 aa, unidentified
MYVLALDVSMGKSYVVIYHENTCLFEQEILHDKTHFNALLQEIYALPERPQIVFEATGVYSRVIETFCQKNHFAYCLLNPLEAKKQLNIDLRSVKTDKRDAHRLAQTHGQFLRKQKQSQTEVYKQTRDFARFYQQIERDIKRTRMNLHTALQLTFPELETLFTNRLSKLALNLVELFPHPDYLAHLSQTKVKNVLKKNTDKKISDQKALAKAQTLLSLAQNSYPAESGQSISVQKVVYYAQQLKQLLVTKEQLAKQLVEIAKQTIEFDFYQSIPGIGELSAGLIIGELGDIRRFSSHKQLNAFVGVDTRRYQSGKYIAKEHMNKHGNPKARKNLYFIMMNMIRQQAAGPNHLVDYYYKLKTQPSPKKHKVALVACINKLLKCLHSMVRHSSPYDYSYTASNDQ

SEQ ID NO: 322256 - protein, 430 aa, unidentified
MKSNTQNAKIEAITEKTLVLGIDVGSETHYARAFDYRGIEYSKKPFKFSNTEAGFVTFKEWILDLKERHEKDKVVSGMESTGHYWFNLGKFLQDNEMKPVLVNPHHVKKSKELDDNNPTKNDRKDPKVIAGLVREGRYMIPYLPDGVYADLRTASNIRFQLQAELTRIQNRISRWFNIYFPEYKTVYGKPDAKSGILILKAAPLPEDILTLGIDGVNQIWRDAKLRAVGKARAKTLIEAAEHSVGSKEGAVAARMEIRMLLEDYESRNTRLQEVMVLIEELVRKIPMAEKLLEIKGVGIRTVSGFLAEVGDISRFNNPKELQKLAGLALVENSSGKHKGETTISRRGRKRLRYLLFEVAMSLVAKNPEFRELHNYYTTRRQNPLKKMQSLMAIAAKLIRVFYVMLTKGVNYDPKKMVNDIKRPAVYLQTA

SEQ ID NO: 322257 - protein, 345 aa, unidentified
MNATTVAVDLAKNVFEVAAADGKWRVIERARLTRAQFERWFANREVARVVMEACGSAHHWARVLRARGIEVRLLPAQYVKAYVKRNKTDAADAVALLEASRAADIKPVAVKSVEQQALQALHRTRSAWMGSRTGRINMLRGFCREFGLVVPEGAVRGLAQMARFIADEHSGIPAMLRTPMRLVLEEIRLMEARIETLERELAAIARESPACHALTSVPGIGLLTSTAMLAAVGDPRSFASGRRYSSFFGLTPREFSSGEHRYLGRISKRGNRYIRMLLTHGARSVLRAATVARRLGRPVDRLRSWALAVQERTNHNKATCALANKLARIAWAVWVKHEKYQSAAA

SEQ ID NO: 322258 - protein, 475 aa, unidentified
MNVKGTKKKNQGSAINIFEKQEIIAKAEELKTNLKAYTWHELETNGKFDKNEKLSFIRDDMLILGCDIGSETHYVRAIDARGRELSKSAYPFSNTSEGFHSMLDWATKIAAAHDKTQIVLGLEPTGHYWFSLATWLVANGISVVQVNPYAVKQTKELEDNSQLKDDTKDPKLIANLVKDGNFGMPYLPENLYAEIRRLSMFRDQLNEDRIRTLNRLHREMKIYFPEYKDAFGKIDGAFCLEVLKVSPFPDELVSLGTEGIRQIWHDAKLRGRGYINATSIYEYAKNSVGIKDGSESSRQSVKWFVEHIIELDEKLSDIEKQLNQKCMTIPHAENILAISGVGENTLCGILAEMGDITRFDDVKEVQKLSGLGLVACSSGKHKGETKISHRGRKRLRYWLFQAAKSAVAHAEEFKELHVYYTTRKENPLKKMQSLIVIACKILRVIYTILTKGTVYDPKKLLSDIVRPAQQETQAA

SEQ ID NO: 322259 - protein, 340 aa, unidentified
MPNPAVIGLDIAKNVFQVHGADAEGRCVLRRRLRRAEVITFFARLPKALVGIEACPSGHHWARELRSLGHDVRLIPPQYVRPFVKTNKNDAADAEGICEAVVRPNMRFVPIKSVAQQAAMMLHRTRALLLRQRTQLINAVRGHLAEFGLVARRGARNIRELAELVRDTGSDKLPDAARAMLVLLLEQIREVQLRVQKTEHALETWAKQSDACRRLMTIPGVGIMSATAIVLAMDDPKRFRSGRHFAAWLGLVPRQSSSGERQVLGGISKRGDGYVRTLLIHGARSRTRWRRESWRWLAGLLMRRPTNIAAVAIANKTARTAWAILAYGHQFQPTRRAEAA

SEQ ID NO: 322260 - protein, 520 aa, unidentified
MASTRTRCHSYRRRSPMSLGKLRGVLHPRVQQVGPEHFGIVCFDCHKASSKFLLADFYGRQLIAPTKVHHNRPELDAAIAQIRQAFEQHQLGDGLVVIERTGRYHRVVQRAFAAAGFETRIIHPFVTKQYRQPVDPSQKTDDADLGAIHRATVTGCALLEATRDEAWTILQLLIRHRRDLVRKGAALNCQIRDHLEAALPGYAACFDKLWESAIPWHLLRHFPTAGQLRDAGLTTLCHSLDEAGIRFQQRTIQTVVDWAHQAAPGDIGASLHRRIALALYEDRQRKTQEITALEREIAGRLVQTPYVLLLSFPGINVVSAADFGGEAGPMEHYLNAKSITGRAGLRPSRYQSDQVDLANGPLVRNCNRSLRAAILGIADNLVVCNHHFQVLATQWRAQGKDPRHTRVKIGLRFCRIAFQMVAGRQVFRHPSIQGRHYILDKLTAFHLAHGTKMPDLLRDLQAAIGQIPRRQYAAEAKPLQDEYRKIHDGRRRGPQLLGDILPIVLARLGVDVVQSNESGE

SEQ ID NO: 322261 - protein, 316 aa, unidentified
MVDHPVYVGIDVAKATLDVAVAPTAERWTLAYTEREMAGLVTRLTALAPALVVLEATGGLEGPLVGALAAAGLPVVVVNPRQIRDFAKATGTLAKTDALDATVLARFAATVRPTPRPLPDAATQTLAALVTRRRQLVEMLTAERNRLGSAPRTLRAEIQAHITWLKRRLARLDTDLGQAIRTSPAWRVQDDLLRSVPGVGPVLAATLLASLPELGRLDRKAIAALVGVAPLNRDSGTLRGRRRVWGGRAAVRAVLYMGTLVAVRHNPVLRAFYQRLRAVGKLPKVALTACMRKLLTILNAMLKHQQPWTPAYAHGA

SEQ ID NO: 322262 - protein, 327 aa, unidentified
MRQHKSLTEKAKTTVAFDVCKAVLDVHIRVDGKAFQVPNTDEGFDQIAVVLADYDVSLILMESTGGYEDVAACCFQSLGYDVAVINPRHARNFAIAMGQLAKTDRLDAAILADFAAVIDSRPDRARFIKPPSDEERKFLSQMVARRRQVVDLLSTEKQRLSHADDYAKQSIDKMIISIESQLKEINEDISVYVKKNYADLSKMLSKVPGIGELSVGLLIGDVPELGNIGNRQLSAVIGVAPFNHDSGKRRGKRCISGGRQNVRNVLYMGIMSATRYNPVIKAFFDRLIAKGKSKKLAYIACVHKLLRIINAMVRDGTSFNPELHTVI

SEQ ID NO: 322263 - protein, 344 aa, unidentified
MDYFVGLDVSLRSCALCIVDTKGNVVLERELACEVDDIAECLSEFEFPIERVGLEAGTMSQHLYFGLQAAGFDVVCMESRQVNAALSAMRNKTDKNDAKGIAHVLRTGWFSPVHMKSREAHGLRALLSTRKALLKKTMDLANEARGLLKIFGIRLPKTVSHGSFDGIVRPIIEMDDVLAHALVPLLDARVVLHQHYLELDRRVKRAASHDDVCLRLMTVPGVGPIAALTFKAAVDDPTRFKRSRTVGAHFGLTPRRYQSGEHDNPGRISKAGDSDVRAALYAAGNALLMRSMAQSQIKSWGMRLMRTKGRRRAVVAVARKLAVLLHRIWVDGTEFRQEQLGSTA

SEQ ID NO: 322264 - protein, 421 aa, unidentified
MKRIKPKKTRSVNQKALIATIDGGKDKHYGYYRCPDGTDCKPFEFWNNGRGINEFWERISTAARMHDLEEIIVGFESTGPYMEPLVQFLKNSKSVRLVQVNPMHTKRLKELTGNSPLKTDRKDPKVIADIIELGHALTVVIPEGPAADLRRLTQGRERTIASRTRLFNQLQSLLVISFPEFLQVMTDVKSASAQHLLRHYPTAQDIVALGEAALATLLRKVSRGKLKKDRARALFEAASESVGVQEGRSSMLLEIRLMLETIASYDRFIDGVEAEMVRHLEQIPYSRVILSLKGIGPVTAAGLIGEVGDFTKFSTIGEVMKLAGLDLYEVSSGKHRGKLRISKRGRPLMRKLLYFAALSAVRKGGVLHEWYQRAVGRGMLRMKALVAVARKLLGIIFALVRDHSVYVEDYAKQEPILQEAA

SEQ ID NO: 322265 - protein, 424 aa, unidentified
MKSTVRNATNQRIERITMQHVVVGIDIAKDAHAAQITDFRGRSLTSKHLSFTNSLEGFERLLDWIKKAQAKHSLTSLLVGLEPTGHYWFNLANWLLQQGIEVVLVNPVTTHRNKENRDNSPSKNDPKDALVIADVVSRGYYTEYSPHAAVFRRLKTLMSDREFWVKQSACFANRIIRWIDLYFPEFRQVFPNWATLRSLASLKAFPLPSDLEGLDVDAVIAQWRDQGMKRASGVSGRAKAAELLAAATRSIGDRQALQEARDDIDRLLAAYEHTAAMLDDIEQALELLLADIPLIEQLRSIQGLGTIALAAILSGTGDLRHYAHGQQILRRAGLNLAERTSGKFKGQVKVSKRGDSTLRKHLYWGMLSLVQRHPDFKQWHANNRARGMKKQASLFKLIGKLARILVGMAQRGESYRECADLVAA

SEQ ID NO: 322266 - protein, 346 aa, unidentified
MEHYVGLDVSLKLTAICIVDQTGKIVREGVVTSDPDTIAAFIKSHAPHVARVGLEAGATSTWLWTELNKMVLPVICIDARHAKAVLKMQINKSDRNDAVGIARIMQCGWYKEVRVKDLDSHATKALLVSRALLVKIKRDIENQIRGLLKNLGLVIGRAKMNVFATRAAELAEARPELAAAVEPLLKAREAVGRQIADLDRKVMRLARNDAQVRRFMTAPGVGPITALCFLATIDDPTRFKRSRSVGAYVGLTTRRYASGEIDWTGRISKCGDAMLRSYLYEAANVLLTRVAKWSTLKAWGIRLAKRSGLRKAKVAVARKLAVILHRMWIEGTEFKWSSKEAANQPA

SEQ ID NO: 322267 - protein, 340 aa, unidentified
MKRFIGIDLHRNCFTACTLLENGRVYERSWRVRDLHRFASQLRKTDEVAVEVTGNTRLFYDAVGERAARVVVVNPTQFKVISHSVKKTDRNDARTLALYLSKDMLPEVRMKDKTHAQLASLTQTRDKLVKLRTSLKNKVNNILSAHGVNLRKEALSSEKGLDRVLGMKFDPIVEVELGVLVEQIRSLTTSISKLDTSIKNDTKELDGYKNLKSIKGIGDTGAGILLSVIGDINDFADEGKLAAYFGIVPRVDNSNETLRSGRITKRGNKLGRTILVQCALIAKRYSPYLAEFYGRVKARRGTGKAIIALAKKFLGIIYHTLKQNWVFEDFPNFILAEQVT

SEQ ID NO: 322268 - protein, 407 aa, unidentified
MQEATQHDAVDVFVGVDVDVGVDVGKGQHHAVALDRNGKRLYNKALPNDEVKLRALIAELKTHRRLLFVVDQPSTIGALPVAVARAEGVLVAYLPGLAMRRIADLHAGEAKTDARDAAIIAEAARSMPHTLRSLRLADEQLAELTMLRGFDDDLAAQVTQTSNRIRGLLTQIHPALERVLGPRLDHPAVLDLLERYPSPSALAAANEKTLANRLTKLAPRLGKNWAAEIVQALNEQAVIVPGTQAAAIVMPRLAQQLAALRKQRDEIAAEVERLVLAHPFWPVLTSMPGVGVRTAARRLTEAAPKAFATAAHLAAYAGLAPVTRRSGSSIRGEHPSRRGNKVLKRALFLSAFAALRDPVSRAYSSRKIQQGKRHNQALIALARRRCDVLFAMLRDGTIYPPKSAPNA

SEQ ID NO: 322269 - protein, 339 aa, unidentified
MFYVGIDYHKESLAVCIMKQGGDVEKFVELYATPDGMDSLINMMGGRKYRVMGEAFTYAIDLHNYLVERGVDSYLVDAKDFKVITRSHKKTDRNDAETIAWYLRLWSRGEIDLSVAYIVRNDEMKLRDLCRLREDLAQQKGQEMQRIRMHMRRNGEYIDETKYPDLTRNKALKHVQESFSGDYALMERIKTYIYITGRCGAIDDSFDKLAENSRDVKLLTSLGGIGNLTAVQLMSMIVSIDRFETADKMRSFYGMAPNVRNSGEVVSRGHITKAGDPMMRTILNRVIYTHMRCGGDDIAAFYESRKGSMGKMKAQTAACNKLLDRIFAVLKRGTPYVRR

SEQ ID NO: 322270 - protein, 340 aa, unidentified
MKYVGVDLHKHVIKICVVQVVDGKRKVIIRRKFACNETATIRDFFQRLKQFQVVVEATASYEWFFLLVDDLADRVILAHPKKLRVIAESTRKTDKIDAEVLATFLALDMIPEAYRPSPRIQQYRVLVRHRRWTQSRITANKCKLRNKLAHYNADIAELFTRRGQQYLANLAVSEADRFEIEKLNEQLDMFKRQLAEADQQLRDFAKTAPLWEREARAVLASIPQVGPVTIDVVLSELGDWRRFRSAKAVVAYAGLAPGVRQSAGKCHAMHITKEGSRLLRWAMVEAAWRLVGRSPRWRRIFQQLHASTGSKKKAIVGVARRLLCVMFSILQSGQAYRLVA

SEQ ID NO: 322271 - protein, 343 aa, unidentified
MQTISTVGLDIAKSVFQVHGVDADGQVVVRRQLKRRYVLVFFQKLPPCLVGIEACASAHHWSRELQALGHTVKLMPPAYVKPYVKRHKNDAIDAEAICEAVTRANMRFVATKTPEQQSCLTLHRTRHLLMRQQTSVINAIRSHLAEFGIVAPVGRNGVEQLLGVVADPSDKRLPEVARACVAALGAQLRVLKVQILEFDRMIRAWHRSSEASQRLDQVPGVGPVLATALVASVADPRAFRSGRDFSAWIGLVPKQNSSGGKERLGNISKRGDRYLRSLFTTGALAVIRYAKIHGTRHRPWLTALLARRPTKVAAIALANKLARMAWAMMAKGERYKEPAALAA

SEQ ID NO: 322272 - protein, 397 aa, unidentified
MYIVGIDIAKRKHEAAVIDGEGAVIIKPFSFTNNCSGYNRLLAMLTKAKLPLDEVSFAMEATGHYWLALFTRLQKEGFRVQVINPVQTNSIRSFYIRQAKTDPRDALLIAEVIRFGHFSESTLHPENIYELRELCRGRHAIVSMQADVKRKVVALLDQVFPEYETAFTNLFGDTSMAILQTCPTPKELSEMPLEELCHLIEVSSHKRFRMAKAQELQALARNSFGFAMAGDVFSTMIRLYAKHLDFLKQQVREMDRKIAEIMDTLDTPITTITGIGPTLGAYILSEIGDISRFSSAAKLAAYAGIDPTMRQSGEYNGVRNRMSKRGSPYLRHAIWLAASSAVLHDPALKFYFQKKRDEGKPYMASVGHACRKMVSIIYAVMRDNKAYTPYIPNEISA

SEQ ID NO: 322273 - protein, 428 aa, unidentified
MNEEDRTRLEEFRQFRREIRKSAEYLIVGIDVAKDKHHAFFGTATGKTLFKRLVFENDLEGFRKLLVQAEAMKVQEGLKKVVFGLEPTGNYHKPLGEHLMRCGQEVVLVSGVAAHENRKTLDGRWDSNDTRDAANVADLISQGKCLFYEFPVGSLQDLRNLLSLKRRLKRQEHGYRVRIRNHLVAKYFPELDRYFEQSEKTSLAIVRWCLDPSVIAGLEYPKFVEMVSSGQRRLSQENRLQAIWKMAVDSVGCEVGPAVAFEVQVMVEGLKQIRQGIRDIEEKIYEICSPFPEYEFLLSIPGFGPDVSSKVLGAVGDPFRFQNGKQVLKMAGLDLSAERSGKTSESAIPVISKKGKADLRYALYQAAFIASIRNQDFIVYYTHKLRGREREPGIKTKMRVKLAAKLLIIAWTLMKKKEPFNPDYLVIE

SEQ ID NO: 322274 - protein, 355 aa, unidentified
MTTKIPLITIGLDLGDKKHALCVLNQDGEIIDERTITNHRESLRRLSQKHPGARIAFEVGSHSPWIKRFLTDLGHEVFVANPRKLRAIYTSDRKSDKNDARMLAKIARMDPQLLHPVEHGSEEAQRDLLRLKLRDNLVRQRVDIISSVRFTLKSLGVALPSPNSACFAKRCRTLLAERDNALLESIEPSLQVIDLMTQKIRELDRAVETLCETKYPVTQRLRQIVGIGPITALGFVLTIEDPELFENPRDVGAYLGLVPKRDQSGGLDKQLRISKAGDAYLRSLLVGCAQYIIGPFGPDTDLKRHGLMLAERGGGRGKRKAVVAIARKLAVLMLALWKHGRDYEPLRGAEAAKAA

SEQ ID NO: 322275 - protein, 316 aa, unidentified
MTNNHHHHIGVDIAKQNFVADLPKGATSFKQTACGMRHFLEQLPERAWVVCEASGGYEKALVSACHKAGLRVSVANPRRVRAFALSQGILAKTDRIDAPLISLYARKTEALREHREPSAAEQELRALYQHRAALVDMHKQEQNLSEHAPDKSSAAGQQIAKMSKCRRRLLERQIKKLEAQMRQLIEADERLRQRARRMEQVEGVGALSIAAVLSLMPELGELEEGQAGALLGAAPIVRQSGDTDKIRHIEGGRHRLRKAIYMAALSAARHNPVLKVFYQRLRTQGKPVKVALTALMRKIIELLNALIKNPNFCLAR

SEQ ID NO: 322276 - protein, 387 aa, unidentified
MPQPNDLSRSLVALDQDSTIIAVVEMSQSSWLVAGMLPGIERQPRKKLEPSAERLLGLLHRWRDEAVKAGRKITRIALAFEAGRDGFWLARWLRAHGVEAHVIHPSSVAVSREHRRAKTDRLDTELLKRGFLGWLRGERGHCTMARIPTIAEEDAKRPNRERECLVRERTRIVNRMKGTLARLGIRNFKPTLRKAAERVTTLHTPEGSALPPNVSAELQRNMARLGFVVSQIKEIEAARQKRLEQEPETEPHAMVRHLARVVGVGVETADMLVNEVLSRPMRDRKAVARYAGLTGSPDESGAKRREQGLAKAGNARVRRGMIQLAWRFLRFQKESALALWYRARTADSRVGTRKTMIVALARKLLIALWRFVTTGETLEGVVLRPAG

SEQ ID NO: 322277 - protein, 344 aa, unidentified
MSKHSIRAGDVAGLLVRLAQLKEKARGRTGRDFPIIAIQEAGLDGFWIHRVLQSEGIESHVVDAASILTSRRRRRAKTDGIDGETLVRTLLAYKRGEPRVCAMVKAPTPEEEDRRRICRERKTLVGERVEHVNRIKGLLFAQGVSDYEPLKRNRRARLEELKTGDGRPLPAHLKAQISRELDRLELVLPQLKAVEAERDALLKPVSEGCPAPAAMLAQLKGMGPEFTAILWSEGLFRSFSNRRQLAAYAGLAPTPWQSGSVAHEQGVSKAGNPRLRTTMIQLAWLWLRHQPTSALSVWFQQRVQSNGSKMRKTMIVALARKLLVALWRYSTSGVVIEGAVMKTI

SEQ ID NO: 322278 - protein, 405 aa, unidentified
MKLYIGIDWSQSKHDICFVNTKGVIQSQLVIPHSQTGFWEFEQRRKRLGVPAEDCLVGLETSHSILVDFLWDRGYANLFVLPPTLVKGSRTRMRSSAAKDDPGDAYLIADILRTDHGRLQAWQPDSGLTRQLRTKVRFISFLTRNIVRMTNRQRAVLLRYYPVATELFSSLSTLISQHFILAYPTPQAAAALDLDSFRKFARQHGYTHKSKLANILAKLDQDDPQADMDIIDACQDEAQGLAHVLLDMIRLKRDNLKQLQQLLDLHPDQNIFASLPGTGVYLQAALISKFGDDRGRFPAPDRVQAIAGTSPVTIRSGKSKYVRFRKSCDYEFRHIVQQWAKQSLRSSVWANAYYARVRPNCDSESHAFRCVANRWLAILWRLWQDHNPYDETHHLKQRALRSQPR

SEQ ID NO: 322279 - protein, 415 aa, unidentified
MKVVFPTCCGVDVHKTFVVATIITTLVDSLQPHYQKKRFSTFNSDLNRFADWLLKHDCLDVCMESTGKYWVPVFNILEKRGIRVVIANPKWVKAVKGNKDDTKDSKWIGDLFRIGLVKSSFIPDLDIRILREFTRYRYKLISMKSSEKNRFQNAFTVCNVALDCVVSDMFGKSATAITDYLTSDESFDPEHCVSLLQRTLKKKAEQVLESIEGFSIADEQKARIKIVREHYDFIEKLIAEVDTCVNEMVAKYGDEINLLCTIPGIDRNSAITIISEIGTDISQFGSSKRLCCWAGLTPGNNESAGKKKSVRISRAGVYLKPALVQVAHAAVKDKNNPYYALKYERIAKRRGKKRAIIAIARMILTAIYSMFCTGEIWNPVDLFKIDMPEHLKQQQLAKAIKQATRFLEKQGLSVA

SEQ ID NO: 322280 - protein, 422 aa, unidentified
MRLTYPICCGLDVHKNVIVATIVTTDKTGISKYNQKSFSTINSDIQKFHNWLIENDCKHVCMESTGKYWIPIFNYLERDIDVCLTHPKYVKAIKGKKTDKKDSKWIADLYKFDLVRSSFIPPKDFRQLRELARYRFKLVCMKSSEKNRIQNCMTVSNIGIANVLSDPFGKTATEIMTYLLTNTSTTIDDKALRKLIKKRATAKSDEIIEAIKGYNIESDQAKKLDLARKHLEYLDNMITQTEVELYVRIKPYYEFVEYISSIPGITELSATIILAEIGVNMNIFDDAKHLCSWCGLSPSNNESAGKKKSVRIAKAGAYLKPMMVQCALAAIKSKKQPYFSIKYGRIKKRRGHKKAIIAIARMMMVSIYHIICEKQSFNPRDYIELMNPNFNRPKVTLNDTNVFAYLESQGYDTSLLVKCNDN

SEQ ID NO: 322281 - protein, 411 aa, unidentified
MEVVHVRCAGLDISKKDAKVCVRVAGAGRRKTVETVTTWSSMTSQILALREHLIAERITCAVMEATSDYWKPFYYLLEDAGFDVLLVNSRHVKNLPGRKTDVADATWLAQLGAHGLVRASFVPPEPIRQLRDLTRTRTAITRERSREVQRLEKLLEDAGIKLSAVASDIVGVSGRAMLESLIAGNSDPAALADLAKRRLRSKIPALTEALTGRFTDHHAFLARVHLDLIDQHTAAIDEITIRIEKMIAPFHGFRDLICTIPGISTLTADVIIAETGADMTRFPTAAQLASWAGTTPGNNASAGKVKSSRTRPGNPYLQGALGAAAMSCAQNPRTYLGARYRRIASRRGPQKANVAIQHSILIAIWHMGTNGCLYDDPGADYFNRLHPDRAKKRAINQLEAMGYQVTLTHAS

SEQ ID NO: 322282 - protein, 391 aa, unidentified
MLPTRLREQNESDKVLIKGDSMSVRRILAKTINTDLEYEAIGIDLAKNCVSVALLTTDGEVVCIDRLDYSELEKSAQVLCPTTFAMEPCTEMNYLVQKLEAWGHRCLVIGGKNVQNYVENHYSGQKTDLNDAQALAFLAQDTQLRTIKAKDMEQRKYASLTTLREQYIKQYRQTIVSLKGICQAWGLNISKGISGKARLKDLIENHAAFPEELKESLVDMVTHAQTAQKALNKITKTLEELAKSDKVCQLIQTIPGLGSICSCRLRATIGDIKRFKNPKDFPAYYGLVPRSIATGHNEKKGKITHRGDRTMRSLMVQGAGSVVNMATKGKLKSKQLTKWILKKQKEKMPWGKLVCAVAAKLLRIVRAVLISNKPYNSKIAGVAKCSLSKGS

SEQ ID NO: 322283 - protein, 355 aa, unidentified
MDSEKYIGLDVHQATIVVAVTDSTGRLVMESILETEAATILQFFAGLRGTLSVTFEEGTWSAWLYDLLNPHVDQLVVCNPRKNALLKDGNKSDRIDARKLAELLRGNQLKPVYHGETGVRMLRELSRSYLTIVKDLSRVMNRLKAVYRSWAIPGAGRDVYYSRNRAQWLAKIREAGVRRRAERLYEQMDMLQHLRQQARRELLAESRKHAITAKLRQIPYLGPIRSALAVALIQTPHRFRTKRQLWAYSGLALETRISAEYRLVEGQVRRSKKLLSIRGLNKDHNHDLKGLFKGAATMASVRPGPFQDFYQAALAKGMKPTMARLTLARKIAAITLTLWKKGENFDAEKLKSQAA

SEQ ID NO: 322284 - protein, 307 aa, unidentified
MRCYTTQHPFYCGIDLHARSMYVCLMNHAGEILLHRNMKAAPEPFLKAIAPYRDGLVVAVACIFTWYWLADLCADEGIAFVLGHALYMKAIHGGKAKNDKIDSQKIVALLRGGMLPQAYVYPAEMRATRDLLRRRTHLMRKRAELLAHVQNINSQYNLPEIGKKIAYKANRAGVAERFEDAAVQKNIEVDLALLTYYDGLLTDLELSIVKTAKQHDAPTFYRLRSIPWVGKILALVMLYEIHDIHRFPRVQDFVSYCRLVKCARESAGKRYGPSGTKIGNAHLKWAFSEAAVLFLRNNPAGQKYLAR

SEQ ID NO: 322285 - protein, 407 aa, unidentified
MEVLYPRCAGVDVHAGSVMTCVRIASGAEVVYQHRTVSATTQGLLELADWLAAAGCTHVAMEATGVYWKPVWHVLEGQFTLVLANAMHIRNVPGRKSDTNDATWIADLLAHGLIRGSFVPPAPIQELRDLTRTRKQLVGEIARHTLRIQKTLEDANLKLTQVVSDILGTSGRAILNALIAGETDPARLADLTTGRLKATRAQLIAALHGRVTPHHRFMIELHLTQIEALDGAVRKLEGHLGDALAPFRAAAERLTTMPGLSDTAARVLIAEIGVDMTRFPSPGHLVSWAGLCPRLDESAGKRRSTRIRHATPWLKTTLIQGAWAASRKKGSYLQAQFLRVKNRRGPKKAIVAVAASMLTAAYFILRDGVEYHDLGGRYFVDRDKQQLTKSLLRRLRDLGVEVEIKAA

SEQ ID NO: 322286 - protein, 418 aa, unidentified
MGNTYVVAGIDVHKSMLAVVVSDAGREGEFRFERRKFGTAAGQLRALRQWLSEAGVREAVMESTAQYWKPVWQELEGHCELYLAQAHSNKAPRGRKRDFADAERLLRRHVAGELIRSFVPDAEQRLWRTMTRSKHQLTRDRVRIHSQIESLLEDGRIKLGVLVSDLLGVGSRRILRGLAAGEADPAKLAAMREPSMRATVEQLQDALSEAARWSSLHREILGLFLTRLDLIEAHIAKLDLRTAEALREHHDAVQRLAEVPGFGIDSAQQVIAEVGPTAATFPSPQQMASWVGTCPGREESAEVSKNNRSPKGNRMMRRVLNQTANAAVKSKGSVFQNLYRRLVARLGHNKAIWAVAHKLCRLLWKILHQGVRYIECGVRTNPQAVQKRARKLLRELRALGYQVPSTMLRPQATQESTP

SEQ ID NO: 322287 - protein, 323 aa, unidentified
MKHSSFVGIDVAKDKLDIAVTVRQVGQSLSMPASAREEWVLRNADQDVAKLVERLKQLQPERIVLEATGGYEQRAFLALRAAGLPAVIVQPLHVKEFGRSMAIKFKNDRKDALVLAYYGEVRRPDLQPLPTENQKRVAELRGLRTDLIATRVAYGNRLEHASPALAKRLQGFVASVQAQIDELDAELARALRATPEDAAKSELLQSVPGIGPVSAAALIGELPELGKIDRRRIAALVGVAPMSNDSGRHHGKRFITGGRKALRTVLHMAVVSARKHNPVIHAFAERLQAAGKPPHTIMSACVRKLLVILNAMVLSGTRWTLSP

SEQ ID NO: 322288 - protein, 311 aa, unidentified
MEHSHFVGIDVSKAHLDVHVLPTGDSFRVSHDDDGLVTLIERLRPVAPVVLVLEATGGYEVTAAATLASAGLPVAVVNPRQIRDFARATGQLAKTDILDARVIALFAEAVRPAPRPLPDEQARALGELIARRRQLVDMLGAEQNRRRLLHDRRLQRHVDAHIAWLEEALRRLDHDLTTLIRSTPVWRETEDLLRSVPGIGPVTACTLIADLPELGHLDRRRIAALAGLAPFARDSGAFRGRRMIAGGRAHIRRVLYMATLTAIKHNPAIRVFYLRLVAAGRPGKLALTAAMRKLLTVLNAMLRDRRPWQPA

SEQ ID NO: 322289 - protein, 394 aa, unidentified
MGIWVGIDIAKGVHWATAIDDLGQVVWDQRVANDPAALAQLIEDLAGLGGELVIGLDVVGGIAALAEAMLLAAGLRLVHVSGLAVNRARQGTTGGEHKSDPRDARVIAEQVRTRRDLRAIQPVSELELELRLLVGRRGDLQVEQTRRLARLHDLLVGIHPGLERVLDLTTKGGLWLISRYVTPAEIRTAGHQGLVAHLRAAGGLSAGQVQTLADRALAAAVAQHLAIPGERLAASLVRELAAEALACRQRVGELDRELARLLERHPDAALIRSLPGMGAVLTAEFIAMAGPLGRFRSADALAAAAGLAPVLRQSGKVRFQRRPSGGNKALKRVFYQSAFCSLSAPDSRAFYARKRREGKRHHQALIALARRRIDVLWAMLHTRQPFQPNYPKAA

SEQ ID NO: 322290 - protein, 381 aa, unidentified
MPDGIRWVGLDVHARESTLAIFDQATGEVTTKRVMGRPHELLPWLRAVQRPARMVYEAGPTGYGLARRALAEGIELSVCAPSKTERPSDRIKTDQRDAVRLAKLLAASELVLVTIPSVEREELRDLVRCREDIRADLVRARHRIGNFLLRREIYWEGTGEAWTRKHRSWLTSIKFADQASRSTLADYLHAHDVLISRRDQVEADLAKLALTAPCAHTVARLRCLRGIDTLSALGLCAEIGEWGRFDHPDQLSAYLGIVPCEHTTGSQRRLGSITKAGSTHARRLLVEAAYHYRRGPVVGEMLERRQRGHAPEIINISWKAQRRLNARWRQLRDARRKPNGIVAIAIARELAAYCWEIATCTTTSPDPTPTPTTRKRLTNSR

SEQ ID NO: 322291 - protein, 396 aa, unidentified
MWTLGIDVAKRRHHATLLDEDGKVVFRNHAFAHSREGVGGLLERLAETGQSPGGIRIGMEATGHYWMVLFQELTKAGYTVVVINPIVTAARRNMTIRGTKTDAVDSVLIAKVLREESPKVSAIPEHDVAALRNLTRLRFECAQAATAEKQRLVALLDLVFPEYAEHFSDLFGATSREVLASFPTAKDLAKVDIRRLTRVLREASRGRLGRDHAERLKAAARNSFAFTSNHEAFALELRFLVERINLLIDQIAQLDRRLGNLLPDDQELVRTVPGLGPVWAPTVLAEVLPVFHPQSQHGARKFVAAAGLDVRLHDSGESQGKGRMSKRGSKYLRTAAMQAAEVAVFLAGDPLFKAVYDRQKARGKAHTVALSHVANKLLHVVFSVLKNRQPYKPVLN

SEQ ID NO: 322292 - protein, 342 aa, unidentified
MEQVSVVGLDLAKSVFQVHGVNAQGEAVLRRRLTRGQLLKLFEKLPPCLVGMEACASAHHWARELVALGHEVKLMPAQYVKPYVKRCKNDAADAEAICEAVTRPTMRFVGVKSPEQQATMMLHRVRKILTRQRTQISNALRAHMAEFGITAAIGRGGLERLIAVIADQEDARLPDEARACLGVLSTQLDMVKEQILDNDRRILADARKTEAGRRLMKIPGIGPLLASAIVACVPDPATFSNGRSLSAWIGLTPRQNSSGGKERLGSITKAGNTYLRELLVVGAMAVVRRAKQGSTKRPWVMQLLERKKPKVAAVALANKNARIIWAMMATGEAYRETELAAA

SEQ ID NO: 322293 - protein, 340 aa, unidentified
MGDITTIGLDLAKNVFQVHAVDQAGNVVVRKRIRRGQVLAFFSGIPTCLVGLEACATAHHWARELIALGHDARLMPPNYVKAYVKRNKHDVADAEAICEAVRRPSMRFVPLKTTEQQSALMMHRARDLLIRQRTMLVNALRGHLAEFGLIEAQGLHKVARLVTIVVDEVDERVPEMARQVLKVIVNQLKDIQTGIADLEKQVLVWHKNNPVSQRLATIPGIGPIIATAIAATIADPNAFRSGREFAAWLGLVPRQNSTGGKARLGGISKRGDSYLRRLLVNSAHTVLLCSKAAKNDPWLISLLSRKPRLVAAVALANKTARVAWAIMSRHDTYRHVAAAA

SEQ ID NO: 322294 - protein, 346 aa, unidentified
MLHVGLDLSRKRIDVCLISDQGELIDRFTATPDRDGLHGLARRVAVYGEPVRAVVESMNGARFVHDELTAHGWVVLVADAQKVKGLAPLACKTDKIDSRVLAELSFRDLVPAIWLPTFGLRSEREISRWRLHLVKHRSALKNRVHSTLITFGHQRHMSDLFGVAGRRLLKELEIPEPWRSHVDASLVLIDDLETRIIQIAKELRRSGADHPYVPLLMTAPGFGWITSFTVACEIGDINRFASPVKLSGYTGLCPRVKQSGDMDQRGPLSKHGPKYLRWGLMEAAIAASSHPLYRERYQRTKRRLGKQRGPKVAQIDLARQLTEAIWYMLTRNQPFAPAGATIRLAA

SEQ ID NO: 322295 - protein, 336 aa, unidentified
MKNCQFVVGIDVSKKTLDICLLVLSNVADGHYYHTANSLKGYLRLLAWLKARNVSLKEGLFLLEHTGVYSLIVCLFLKKQSLNYSLIPGIVLKKSLGICRGKSDKKDAYAIARYGYLYREEINIQPLKEDQILKLQILFSQRKRFVLALKSLLSPIKEMEEMGTADLAKQAIQNQQIVITELKAAIKKTEAQMLNLIEEDVELNKQYNLCTSIPGVGMQLASYLLIVTHAFSRFSDCRKLASYAGVAPFPYQSGTSIKGKNKTSPMGDKALKALLHMGALNIIQHDNQIKIYYARKRAEGKNAMLVLNAVKNKILARVLATVNRGTPFVQLAQHVN

SEQ ID NO: 322296 - protein, 421 aa, unidentified
MTHEAHEAFAAFVGIDWADAKHDVCLQTAASTKREYFQLEHTPEAIDAWVTTLRTRFNGQPVAICLELTKGPLVSALRKYDFLVLFPINPLMLARYREAFTPSRAKDDPTDAALQLELLLTHRDKLQPLRPQSPTMRALAQLVEHRRRVVGDKVRITNRLTSTLKNYFPHVLQWFQEKDTVIFCDFLRRWPTLKTAQLARRSTLETFFREHHVRYADVIAQRIQAIKAATPLTTDEGVIAPNALLVQALIAQLHATLQAIADFDSAIAQRAQSHPDFSLFQALPGAGPVFAPRLLVAFGEQRERYTSAAELQKYAGIAPVTERSGKKSWVHWRLQCPKFVRQTFVEWAAESIRHSFWAGVFYQQQRDKGKAHQAAVRALAFKWIRILYRCWQDRTPYDESVYLQALNNRGASLLQNLVHQS

SEQ ID NO: 322297 - protein, 351 aa, unidentified
MPATAQTAVAVIGIDIGKNSFHIVGLDSRGAIVLRQKWSRGQVEARLANMSPCLIGMEACVGAHHLSRKLKALGHDARLMPAKYVRPYSKGQKNDFRDAEAIAEAVQRPTMKFVATKTAEQLDLQALHRVRERLVSQRTGVVNQIRAFLLERGVAVRQGLRFLRAELPRLLATPPDVLSPRMARVIESLAEDWHRLDERIDHLSDEITALARQDAGCERLVSVPGIGPIISSAMVAAIGNGDAFSKGRDFAAWLGLVPKQISTGDRTILGKISKRGNRYLRVLFVQAAWVVLIKPQSWERHGLKPWIEAAQKRLHRNVLAIALANKLAWIAWSVLARGRSFEARPAMASAA

SEQ ID NO: 322298 - protein, 348 aa, unidentified
MTLYIGVDFHPHQQTACWCDMETGEIKTRTLFHNTDEIKQFYQTMPPSTIGIEATSKATWFENLLFENQHKLLIGDPKLIRKRATSRHKSDNRDAANIFDLLIRSEFPTLWRRTPVSSARLELMRLRHNLVKQRTQTYNRLQALAHAAGLPKGKIRTYLFQARLQRIELSEAFNLQRQMLFEVVANLNQQISQLELWLQAQAAADAQVKLLLTQKGVGYLTALCLIDTIGDISRFTRPTKQVPAFVGLDPVEMSSGSKTKFGSISKAGSPLLRFLLGQATQSVSRYDQKLKAKYKQLSKKKHKAVAKTAIARKLLVKLTIMVRDKITADEFDLRGRTARNARKVKGLQ

SEQ ID NO: 322299 - protein, 362 aa, unidentified
MTKSTTIIAFDQHAATTVAAVLLPADRTPALHKLTSDIPTILRFLERMRRGHAVQCCYEAGPCGFELQRALSGRGIRCDLIAPALIPRRSGDRIKTDRRDAAQLAVLYRAGALTAIHIPTEQEEAARDLLRCREDIRADLLRARHRLSKFLLRHGRRFTGTKKAWSKRHDVWLRAQAWPIPALDQTYRAYLRAVDEALARLRSAEEDLRALVTLEPLQARVQRLRCFRGMDDLTALTIAAELGDPRRFASAPRTMAFVGLVPSEHSSGTRQARGAITKTGNAHLRRVLVEAAWHYRHRPFVGAALRRRQRGAPDAIVAQAWTAQDRLYRRYHRLAGRGKPHQQVITAVARELTGFVWAALVQ

SEQ ID NO: 322300 - protein, 410 aa, unidentified
MTAPPATPARFIGLDVHKHYLIALAVNPAGETIGGPWRVAVADLETWAAQRLTAQDAVVLEMTTNALQVHDDLVGRVHSVTLVHPPHVPLITRAQVKTDTRAALALAQLHAKGLLPAVWVPPQAVREQRATLAQRAKFTRLATQAKNRLHAALHRHHLALPPSGSAFAPANRAWWLSLPVSASERARLETDLETLAFAAQQIERLTTALAADAAQDERLPLLVQLPGFSVVNSLTVLAAIGEVSRFESAKHLVGYAGLGARVHDSGQLHRTGRITKAGRRDLRAALVEAAQTAVNTHPHWQAELARLEPRTGRNKAIVAIARKLLVAVWHVLTKRQADRYADANRVARKLMDFTYKIGRANRQPGQATAAYVRAQLDRLGLGAELVSVAWGRRAIPLPPSRLDPTGTNAP

SEQ ID NO: 322301 - protein, 470 aa, unidentified
MAMKEPEEICDDAHEQIFERVCAIDVAKDSGKVCLRLAAESGTGRRVSRVWDVAARSRAVSDLADHLAELGVQKVTVESTSDYWRIWFYLLEARGLDVQLVNARDVKNVPGRPKTDKLDSVWLAKLTEKGLLRPSFVPPKQIRVLRDYTRLRVDLTAERARHWQRLEKLLEDALIKLTAVASRIDTLSVRDMIEALIAGERDPRRLAGMARAQMRVKHADLVEALTGQFDDHHAELARLLLDQIDGLNRQIETLSDRIDALLADLPIPPGPNDSPGAAAHHHGPSSEVPDAGASPEASRPIPPPIGTARDLADLLDEIPGIGRHVAEVVIAEIGLDMSQFPTAGHLVSWAKLCPKTIQSGTRSTAGKTGKGNRYLKAVLGDAAAGAGKTKTFLGERHRRILKRRGKLKAVVATARSTLVIIWNLLGSPGTRYTDLGEDYFVNRMDKGRRVRNHVRQLEALGFEVTLAVAA

SEQ ID NO: 322302 - protein, 427 aa, unidentified
MSEQNALEIRVSVDVGCHSHNVAIGLSSGEVLEEFQISHGPEGFKYFFGRIERQQKKRGCPVAVAMEGYNGYARPLDGMVRSRGYRLYNINNLKLARFKEIFPGAAKTDPIDARKGLELFQLRDHLPLAKEVLQEVAATPQANQMLKRLSRRRRRLVDERVRVLNNLQGDLQAVCPGLLEITNEAGNQWFLHFLVSTDTLPQLARLRRSSVLKVAAVGVKYAGMIRDWQKRAYFSVEVEWVGEMIQEDAHRVLELEEKIKTLEAKNKQVAKESKIAKVLLSIPGFGSVCTSELAGEIGTVERFGKEGSLALYLGMATLDNSSGKHQGSKRPRQVNTRAKAAMMTALDRHRKYVPESQRYYEKKRSQGKRHNQAIRALGRHLCRIIYKMLKEEREYQLRSVKGGTQTKVRSRSLLKRQIRRPKISANS

SEQ ID NO: 322303 - protein, 365 aa, unidentified
MTKVRTWAGLDVHAAATVACVVDAPSGELSVHRLAGRTSELTAFCAQLPAPVRAAYEAGPTGFELARALDAAGVACVVAAPGKIERPAQDRVKTDRRDAERLVRLLMIGGLHPVRVPTGEEEALRDLVRAREDIRGDLMRSRHRLSKLLLRHDVRYDDTASAWTTAHRTWLSRVDLGELAAQATLLDYLGAIDALVVRRDTIERMIAELVPCSPWAEPVARLRCLRGIDTLSAVGLCAEIGDFARFERPGQLMSYLGLVPSERSSGQTRRQGAITKSGSRHARRLLVEAAWHYRRPPRTGTTLQRRHEGQPAQAVAISWKAQQRLHQLWRRLDGERGKRKTIVAVAVARHLAGFCWAITTTTTET

SEQ ID NO: 322304 - protein, 372 aa, unidentified
MNNKPNGAVSKGIRDKATQDNVVVRALNLGLDVHYRQVTVAMQEDGGRIKAAGKMGLGGFLNWVRTKLEQGWRIESCYEAGASGYWLHRQLVELGVKNLVVAPKAMGGAEAKRQKTDKRDSAQLCDALERYLRGQDKALSVVAVPTVEQEQNRALIRYHRQMIKDRTRAEARGKGLLCAQGIEVGGRWWESKGWTQLQSDPRLKDWMKEQLEDWRKKILSAQAEEKPLRKRIEALAPERLPKGVGAYSAAVLKYEMKGWERFSNRRQVASYTGLCPGIHLSDGRGKEGSINRCGNPTVRWTLVEMVWRLMIWQPQYGPVRQLATDLVKSKRAKKRLVVKAARRLAIDLWRLETGQTTAEKLGLIMRLRSSSK

SEQ ID NO: 322305 - protein, 342 aa, unidentified
MENIGLDLHQRESQLCILTEAGEILERRIVTSRERFTAVLGGGAAARILLEAATESEWVARHLESLGHEVIVADPNFAPMYATRRRGVKTDRRDARTLMEALRLGAYRRIHRASAAQRHVRAQLAVRDALIRTRTRYVSVVRALTRRDGLRLASGGPEYLEAKLAALSLAPPLQAEIAPLRVVLEPVNAQIDHADAQLAATAAGDPRVARLRTVPAIGPVTAVAFVATLDDVTRFRTAHQVAGYLGLTPREYSSGERQQRGRISKTGNPRMRALLVEAGWRVLRAKDPAAAPLRAWAERIAARRGAKVAAVALARRLAGILYALWRDGTTYRAPATRDATAA

SEQ ID NO: 322306 - protein, 344 aa, unidentified
MVVLGTDTHKRNHTVVAADEAGVEIGSVTVAATPEGHLKLVRWAARWPERRWAIEDCRQLSRRLEADLLRVGESVVRVPPKMMAGVRRSARTRGKSDPIDALAVARAALREPDLPVAQLDGPSRELRLLVDYRESLVKDRTAAQNRLRWRLHELKPGYDPPPGSLNRYKTLDEIEELLTAHTSMVAELGRREVVRIRELTREANQLERDIGKRVVEQVPSLLKIPGCGGLTAAKLVGEAADITRFKNRDAYAMWAGTAPIPVWSANNQRFRLNRGGNRQTNAAIHRIAITQIRIHPDAQAFIKRRLETGSTKREALRLLKRKLANVVYRTLLNDVQQPALADAA

SEQ ID NO: 322307 - protein, 347 aa, unidentified
MKKIFIGIDVSKEKCDATAISAENGLTEVEKLDYLVFENRPKGFRTLLSWAKKLKPDIIQEDILFVCETTGAYDRALCDYIYSKGLDIWRESALQILWSSGVRRGKDDKTDSLMIAEYAMHHMDRAHLYESPDGRILEIRAVFLYRRKLEQEKTSKLVRIKEIEATAGKSKTLTFILRDAKKSIRQLEKSIRECEEKIRELVEEDDGLAKSYQHLDSVKGLGIVNITALIVYTNNFKAFKTSRKMATYWGVAAFRSKSGTSVDKRADVRNLSSSMLKSYLTQAAMHTIAKGGIYHDYYQRKIAEGKTHSIALNNAKNKLLHLAMSLVTHDRDYEENHEFLRTQRAAN

SEQ ID NO: 322308 - protein, 421 aa, unidentified
MIEEIAEEPAELLQRAAALDIGKASLVCCVRVPHESRPGARRQEVRTYDTVTPALLELRDWLICQGVTRVVMEATSAYWKPPFYLLEDDIECWVVNARDVKNVPGRPKTDKLDAVWLCKLAERGMLRPSFIPGRPQRQLRDLTRYRRTLVQERSREKQRAEKLLEDAQVKLSSVISDIFGVSGRDMLAALIAGQRDPYALADLARKSMRAKMSVLRQALTGHFTDHHAFLLGMMLDRTDALTAQIDALTARIEEAIAPFAAQIAQLDEIPGVGITTAQEIIAETGTDMSRFPTPGHLVSWAKFAPKARQSAGRAKAAATGKGSPWLGGTIGEAAVSAARTQTFLAARYKRIVRRRGKKRALVAVGNSILTITWHLLSDPGAHFTDLGPDWHDRLAPQRRKRQLIAELERLSGKKVTLHDAA

SEQ ID NO: 322309 - protein, 440 aa, unidentified
MAKKMKEEMSHSIIKKTVEVDALYGCCCGIDVHSMIVMACLRKGRNDEVREYKAYTRTLYELAAWLKESGCEMIAMESTGSYWKPLMNIFEEEGLSAIIVNAQHMKAVPGRKTDVTDSQWIAQLLQQGLLSASYVPERDQRELRDMIRYRKSTVEERARETNRLIKVLQGANIKLAETVSNINGVTAQRLLSLIRSGEEISLEKVNICKIGRIEATTEELVMALEGHCTPLQKDLIGVIISNIESINQRIEKIEGLIDKHMTIPFVDAAERLEAIPGIGNDSAQVIVTEIGIDMGKFPAAKHLCSWSGLSPGNRQSAGRQKSGKTCKANKTLKSVMVQCANAALKNKNTYYSAQYARLVRSKGHKKAIVAVAHSMMTAIYHVLCGEEFKDLGADYYNNFNRDKKIFAHAKQLQKLGMTDNEIVELMQRLKVEKEKQQLTA

SEQ ID NO: 322310 - protein, 346 aa, unidentified
MMIIGCDFHPSWQQVSWLDTETGEAGEGKLVQASGDAERFYRQLPAPALIGMEATGNCHWLVDLLAELGHELWVGDAAQIRASCVRQQKTDRRDAEHLRILLQEGRFPRIWMPSAEVRDLRQLLLHRHKLVTIRARVKNELQHLCLNQGVQRKHKLWSQAGQKVLRELPLRPWAARRREDLLGLMAMLEQQIDPLERAVKAEAQRDKMALLLQTQPGVGAVTALAYVLTMGDVSRFARGKQVASYLGLIPREHSSGGRQKLGAISKQGNHMLRMLLVEAAQTAVRLDPGLRKEYLHRCHQKPKAVAKVAAARKLAVRLYWMLRTEKPYPEVVRIESSPRVPLVGAS

SEQ ID NO: 322311 - protein, 357 aa, unidentified
MESQEVKYVGVDCGKKSIEVVRINSENPLERRQFSTTESGINNLLQWLTLNDIVGLEAGSQSFRIAKSILNKGIQVIVLNPGNLATIYQSLKKTDKEDSLKIARLIQRHPIEELPTVPIPNDEEEDNRRLCSEHENWTKQLTQGKNRLHSLFTQAGLTQITKKHLRTKVSREASVTLLSDRYKKEAGRILKVLDLVELNLKLIEEEIQEALKKNKAYVQTIMSMPGIGMITSLAIMSYMGDCKRFSSAKQAAYYAGLVPRVDISGDTVRYGRIINRGCHSIRRVIVQAAWSLVRCQYGGKIKEFYQRLYPKKGAKKSIIATSRKMIEILYTMIKTGELFDSMPEKVLNRKLTQYGLM

SEQ ID NO: 322312 - protein, 312 aa, unidentified
MDECIFVGIDVAKDQIDVCLQPADIYRTFPNEKKGFDELQKLLAHQRITLAVMESTGGLEIPVAVSLGCAGIPIAIVNPRQVRDFAKASGRLAKTDRLDASTLAQFGAAIRPAAQPLRGDEHRALAAIMTRRVQIIDMIVSEKTRLSSVPNSEMAKDIKSHIGWLEKRLRKIDQDLGNRVKRTPLWRERDALFQSVPGVGSVVSHTLLAHLPELGTLDRRKIAALVGVAPLNWDSGRMRGRRVIWGGRAAVRKALYMAAVASMKWNPIIAAFYKRLRVAGKKPKVAIVACMRKLLTILNSIARSGEAWRSCA

SEQ ID NO: 322313 - protein, 376 aa, unidentified
MNRIIYVGMDVHKDTYSLCSFDSKQNYVFSELTVKAETSSVLSYLKNVEKHFVNDDVLFVCGYEAGPTGFSLCRDLQKKDISCVVMAPSSLATSPDAKKRKTDKIDARQLALHLAHNSYKAVHVITPEMEAIKELTRTRASALKAQKRAKQNLLSFLLRKGMVYPFGGRARYWTQQFFSWLKTLEFSNPVERYSFEEYLSEVNHQISRIKRLDDKIAELAEDPLIKDDVKKLCCFSGISTLTAVSFISEIGDFNRFQKAVYFSNYLGLCPGIHKSGLSSQSLGITKTGNKNLRRLLIESAQSMSHSQICGKKSLRLLARQKNMDPLIVAYADKAVERIKRKRSSMIFRGVHINKATTAAAREMACFIWGMMTNNIS

SEQ ID NO: 322314 - protein, 389 aa, unidentified
MQTVADRPEAPSAIRNYLGAIFVSLELSRSTWLITSLSPGGGEKMSKHSVRGGDVTELLERFAQLMAKAQARTGQRFPIVVIQEAGLDGFWIHRVLRKEGIESHVVDPASIATSRRRRRAKTDRIDGEALVRALLAFKRGEPRVCAMVKAPTPEEEDRRRLCRERKVLIAERVKHVNRIKGLLFCQGTTGYEPLRRDRRKRLEELETGDGRALPDHLKAQLGRELARLELLLEQIKAVEAERDALLAAQRAAAPAPAAMLLDIKGIGPEFAAILWSEGFFRHFDNRRQVASYAGLAPTPWQSGKVDREQGVSKSGNPRLRTTLIQLAWLWLRHQPQSALAQWFKERVGRNGGRFKKTTIVALARKLLVALWKYVNAGVVIEGAIVKAAS

SEQ ID NO: 322315 - protein, 340 aa, unidentified
MSLVLQSLLPYPHSCQGTSPHQQGWDTKMAMLSFCGIDVSKDRLDVVVLPEGWFFSVSNDTAGWGELVARLRPLTVSAIGLEPSGGYERGIIRALLAAGLSVRRINPNKLRQFARARGVLAKNDRLDARLIAEYVAIIPTRVVQRDAAVERLAEIVTMRRQLCDEHVAAENQAAHLEDAMLRRLSKRRQMRLEADIRLLDKRLAEMVAANVALAQRYELLISMPGVGPVLAFTLIALLPELGKMSRKQIAALVGLAPYDFDSGKLKGHRSIYGGRMPVRNVLYMAALSASRYSPALKTFHKRLAAADKKSKVIIVAVMRKMITTLNAMLRDSAAWQPRSA

SEQ ID NO: 322316 - protein, 402 aa, unidentified
MNAVGIDVSKGKSMVAIMRPFGEIVSTPFEIKHTSSDINSLVKLIKSIEGESRIVMEHTGRYYEVLAHQLSEANLFVSAINPKLIKDFDNDSLRKVKTDKADSVKIARYALDKWQNLKQYSVMDELRNQLKTMNRQFGFYMKHKTAMKNNLIGILDQTYPGVNTYFDSPARSDGSQKWVDFASTYWHVDCVRKMSINAFIDHYENWCKRKKYNFSKSKAEEIYGKAKELVPVLPKDDITKLIIKQAVDQLNSASITVESLRTLMNETASKLPEYPVVMAMKGVGTSLGPQLMAEIGDVSRFTHKGAITAFAGVDPGVNESGSYEQKSVPTSKRGSSDLRKTLFQVMDVLIKTHPQDDPVYQFIDKKRAQGKPYYVYMTAGANKFLRIYYGRVKEYLASLPES

SEQ ID NO: 322317 - protein, 304 aa, unidentified
MNGIGIDVSKRQLDVGTTDGKTLQVSNSRSGFAELDLWLQGHPAVQIVLEATGGYEQPVLDFLHNAGHPVVRANALRARKLAQGLGHMAKTDRLDAYALAKMAALVKLRSYQPLEPWQREMRDFVRARRQAMHALTVARQQQEMVGNRELRRLLQANITCLQKTVERLGKRISEQVSKQPQLAVLKSMKGVGPGLQAVLASYLPELGKISGKAVASLVGVAPMSHDSGTLRGKRSIHGGRAEIRQVLYMASMSAMRHEPRLRDFYQSLRARGKEGKVAIVAVMRKMLVILNARMRDAQGGPIPA

SEQ ID NO: 322318 - protein, 377 aa, unidentified
MGLSGAGLEPTPGNMNSVYHTELSSLEGTRCQFNGGTEPIKIGIDVHQDFYVVVCQVGGTNPKPPQRFHKEAFVHWATKLKQSGASVYAVYEACGFGFGLQRRLAALGIECHVVCPQKLDEQNRRVKTDGLDAKALCLKLDRFVQGNRDALAVVRVPGEEEERARALHRQREQLVQVRKQLEAQGRSLLVNHGCAPVQQWWKKRAFAQLDVPHWIKELLANSQPILLALQEKIDQLTLHLQNAAIAEPPRGLGKMTSVIIDREIGDWRRFNNRRQIASYTGLCPGQYSSGQSRLQGCVTKHGNPRLRAALVELAWRMVRFQPNYRAVCKWKARLAKGALSTGAARKKAIVALARQLAVDLWRVRTGRLTHEQLGLEI

SEQ ID NO: 322319 - protein, 346 aa, unidentified
MRYSTTVGVDLAKNVIQISVVSGRGKELSNRSLTRKKFAEFLGKQKPSLVAFESCATSHYWARAAQRHGHEARIIPAKAVAPFRQGHKTDSNDALAVAEAARRPKIKEAPMKTVEQQGLQAIHRSRELLIQESTALSNHVRSLLMEFGIVIKRGFASLLRAVPEILEDGENELPDLYRPTLHRMYTRLLELREDIEAMTGEVERLAKAHPICSKLMALEGVGPISALMLYATMGSGTAFSGSREFAAYLGLAPKQYSSGGKTNIVGLSKKVGNRRLRAILILGARAYTYRLKEPKSAKDRWLMDLIDRAGHSRAAIALANKNVRTAWALVTQGTEYQRRAHLEVAA

SEQ ID NO: 322320 - protein, 458 aa, unidentified
MRRKGKRTKGMEVAHPFAGMSQVNPNAAGVDIGAVEIVVCVAGENNTQIVKAFGNYTVDLQSIGTWLREHKIKTVAMESTGVYWIPLFEVLESMGFKCLLISSRSLRRVPGRKSDIEDAQWIQTLHSYGLLGSSFRPQADLVALRTMLRHRAQLLEHRAPHIQHMQKALLQMNVQLSQALSDVMGETGQAIIRTIVKGERSPQLLAAFRDPGCKKSEEEIGKALTGTWRDEHLFVLKQSLELYDFYTQQLEVCDQEIDRQYALIRPDWETGELPPIPKKKQKTHSKNGPENAKEIRLHLKRINGVDLSLVDGFGVSLAQTVTMEVGSNVSEKFPTEANFCSWLGVAPKHEISGGKVLKDKTLKTKNRAGQAFRMAAQSVKNSDSVFGVMYKRFRARQGPAQATVSTAHAIARVVYRMLKYQVEYETISVNEYEKKYEEQQVKYLKKKAAKLGFQLVPA

SEQ ID NO: 322321 - protein, 430 aa, unidentified
MSVQSLPVSLNTFSEGCVMLKIVYPICCGMDVHKSFLVACIASTDRQGVTTYKSKRFSTFTGDLRRCAVWLSENDCKDVCMESTGKYWIPIYNILEPTCKIVLAHPKYVKAIRGKKTDKKDAKWIADIFKHDLVSGSFIPPADIRQLRDLVRYRWKLTNFTTGEKNRAQNCLTVSNIKLDDVFSDVFGKAASAITGRLLENNKPFDVTPYLTKGIKASVEEIQSAVDGEMCDEQAEKLRIIRSHMDSLELCKLNLESLILSVAEKYLPQLNLVSTVPGIQSFSAIAVISEIGVDMSVFPTSKHLCSWAGLTPQNNESAGKKKTTRINRAGAYIKPLLVQCANAVVTSKKHPEIRNRYLALKKRRGHKKAIIAIARMLLTVIYNILKKNEPYNPELYRKSDLPPAHREVSVAEAVFILQRQGYIVSAAPVP

SEQ ID NO: 322322 - protein, 399 aa, unidentified
MLDDGSQPIKLFNVDNNQLGAEVLVERIYAIAKEHCVSDIFIGTEATSMYDWHLLEYLAESKLALEFNLKLYRFNAKWIKNFKKSLAPRGKTDPIDSFAIAERLRMGRLPKEYVPDIKYQPLRKLTRFRFHLQQQIAREKDFFLANLFLKYSAYSHVAPFALTFSATSMSVINDFFSVDELAAMPIEELTEFILEKGKAHFSKPAEIVDNLKRVARESYRLKPELAPTVNLILASTFNNIRCYKDQVKLVDSAIAENLKAFKHTLESIPGIGPVYAAGIFAEIGGVNRFPNDSALAQFAGLTWPKHQSGKFQAEETRMSHTGNQYLRYYLVEAANSVKRYDATYKAFYEKKYAEAAKHHHKRALVLTARKLVRLVWTLLTRQVLYQPGYCSFEDLSKIG

SEQ ID NO: 322323 - protein, 409 aa, unidentified
MRYYLGVDWADQTHAVWVVEERGTKVTMRTVPHTAEGLSEWGRELDEWRAQGIELWAAIERPEGRVVDVLLDHGVVVYPVNPKALDRARDRFRQSEAKSDPFDARVLADFLRTDHLHLRALQPSSDAAQELKLLTDDYQRQIRQQTRLVNQLTTTLKAYYPRGLEVAELTTALAREFLQAYPTPAALTALTERQWQRWARAHRLSEARTQELWAVLQRPQLPVPAHVVRAKGRLMQSLVAQLTLVVEVVGAYREAIEDFFARIPAAQWIRTLPIGDHGITAPTLWARLGDAPGRWESFRHLQAQAGTVPVTIRSGKQQIVRFRFACDKSLRYVIDHVAFLSLRWSEWARAYYDEQRARGHSYRQALRALSAKWLKIIFIMWERHVPYDEQYHLATMTRQQLRLRQKKLA

SEQ ID NO: 322324 - protein, 332 aa, unidentified
MRFFLGIDISKLSLDLALLDLSENCLLAIKLENNYSTIKQFFNGLHRTHNVRPKECLICAEDMGVYATHLMAVAQDKTLSVWLESPLRIKRSLGIQRLKTDAYDALQIARYARRNFKDARIWEPPRPCIQSLKSLSTIRKRLQKVFKMLTNSDKIDTFFLPKEQSGMLREFSENSVTAVAHDINKVNVQIKKIISEDLSLRRLFEIVTSVPGIGQITALEIIVSTNEFKTITSARKFASYCGVAPFKRQSGTSLLGRNKVSPLAGKELKSLLHLAALIYARSDKYSLGRYYLRKTAEGKNRMSVLNAIRNKIIHRIFACVEKGQMFQDTNDM

SEQ ID NO: 322325 - protein, 359 aa, unidentified
MAMTMLEARRVTGGVDTHLDVHVAAALDPLGGLLGTESFEVNPAGYQSLLSWLENSGAVGKVGVEGTGSYGAGLARFLRQHGVSLIEVDRPNRAERRRSGKSDPLDAVEAARAALSGRAKSLPKSRDGAVEAIRVLLVAKRSARQARVKAVTQVRHLVITAPDELHRRMKGLSVSALVEEGAKLRPSRSTDPVVAATKAAISSLAHRMQALESELDELAEMINALLVATAPDLLALSGIGPDTAAALLVCAGDNPERLRSEASFAHLRGVAPIPASSGKSTGRYRLDSGGDRQANSALWRIVMVRIAHDPETTAYFERRVKEGRTKREVIRILNALRCPRGLPPPISRLSPWPWVWLIP

SEQ ID NO: 322326 - protein, 411 aa, unidentified
MYVIYTRCAACDVHKKTVVVTVLLTEADGTVKKLTRTFTTMTADLLALDEWLRSLEIVHVALESTGVFWHPVYNLLEEGRSIILVNPQHMKAVPGRKTDVKDSEWLADLLRHGLLKASFIPPKPIRELRELTRYRKTLVQERAQEINRLQKVLEGANIKLAAVATDILGKSGRDMLDALTGGEQDAEVLAELARGRLRAKLPELRLALTGRVQPHHRFLLERILAHIDFLEGSLQRIQQEIEQHLRPFEEAMTLAQSIIGIQETAAAAILGEIGTDMTRFPTDKHLASWAGVCPGNKQSGGKRLSGATTQGNPYLKAVLAEVVWAISHTRDNYLSAQYHRIARRRGKQKAIVAVSHSVLVILYHVLREKKPYQDLGGDYFAKLDTNRQERHHIRQLEQLGYTVTLTPKEAA

SEQ ID NO: 322327 - protein, 341 aa, unidentified
MKQFIRIGVDLAKNYFQVHALAKEGGTTVKRKLTRSKMHEFFAQIEPCLIGMEACGSAHYWARELKAMGHEVQLMPPAYTKPYVKRGKNDAVDAEAICEAASRPGMRFVPIKSAEQQATLMLHKTRELLVKQQTMSVNALRGHLSEFGIVVAKGIGRVDELLDLAENDTTLPEVAKEAVKILAQHLEGLDKSIDDLEKQIGRAHEQSEMSRLLDQVPGVGKIIASVISASVPDPSVFKSGRDFAAWLGLTPRQNSSGGKQTLGGITKQGNRYIRKSLVLGATSLLHVVGKRKGALRDWIVALLAKKPARLVTVALANKLARIVWAMMKTGECFRAERFARA

SEQ ID NO: 322328 - protein, 326 aa, unidentified
MQGKELSEQATVAKSSVGIDVGKSWLDIHVLPSAETLRVANTREGVRKLKRWLAGFDVALIVVEATGKWHRQVRRSLHTEGFAVAVVDPFRVRAFAKAQGILAKTDRLDARVLAMFAAVMNPALRPPAPEALEELAELVSARDSAVAEQTALKNQLAAAVASFLKRQLERRLARIAKDITALEHEIDKRIAADEALARRYVILTSIPGFGAIVAATLVACLTELGTCSRKQIGLLAGVAPIADQSGKREGARVIWGGRSAVRRVLYLAALSAKTHNPGMKAFHDRLIAHGKCAKAARIAVARKHVVLANTLIAEGRPWQPNPPKQA

SEQ ID NO: 322329 - protein, 410 aa, unidentified
MSKGRIDTRKENIIYVGIDLHKETHTAVMLDCWNQKLGEITFDNKPSVFHKLTRKVSRFVTKEKTAVYGLENAYGYGRALAVWLLEKGCAVKDVNTALSYAQRKSVPMYQKNDSYDAEAVALVLINMLDKLPDAVPDDAYWTLGQLVNRRDNICSHQQRLKKQLHEQLCVAYPSYKGFFGDISRATALYFWLNYPSPEHLRGKTAEELASELRPISHNNCSIKRAEKILERVRTDGQTAREHQASRDAITRSIAGDLEHYREQLKIVESAIETMLPSFRCTLMTMPGVDVTTAANMLSEIGDIHRFPNADKLAKFTGICPINFSSAGKGKDMCPKQGNRRLQSIFYFMAIQMIQVSTNGTPRNKVFREYYLKRVAEGKNKQQVLICIARRLVNIVYGMLKNHTEYREPEQ

SEQ ID NO: 322330 - protein, 424 aa, unidentified
MKNCNKQNEKIELVDEKTLVIGVDVGSYDEYARAFTCRKQELSKKPLHFHNTAEGFKTFKYWAVNIMKTNGLEKIIVGMEPTSIYWEALATYCKDNGMILVHVNPAAVHKSKELDDNDPSKNDRKDPKVIADLVTDGRYSFPYMPEEEYAQLRELSNLKIRTQESLTQCKNRLARWYSRYFPEFKEAYKNVVSKTAMIIMDMYPLPEDIVTLGVEGILQIWRNKKVRAAGESRAKKLYEAAKNSIGRKEAAAVARLEFQSIKEDLDRYQGRLEAIDKEVDEILPKIKNADKLFEIKGVGKATVLTFLSEVGEISRFDNPKEIQKLAGYAIVTNESCKHQGEKRISYRGRKRLRWALYQTALSVIGKNEEFRQIHQYYTTRKKNPLKGIQSVVAVACKMIRIFYKILTDGVSYDGTKMTQDIVRV

SEQ ID NO: 322331 - protein, 325 aa, unidentified
MRQPQSQVKPQTQVGLDVSSQTLDAHIRVDGKAFSVPNTDAGFDQLCEMLSAYDVSMILMEATGGYEDNAACYLQLQGYDVVVINPRHARRFAQSMGRLAKTDRIDAAILAHMAFMIDSGPDRERYIKPVTDEQRKQLSRMSSRRRQIVDLITIEKQRLTHADDYARESINDIISLLNARLKRIESDILRYVKKNFSELADRLLSIPGVGSQAVTVLIADLSELGYVNRRRISALLGVAPFNHDSGKFKGQRRIRDGRSSVRNVLYMGVISATRFNPVIRAFYDSLLLRGKPRKVAIIACMHKLIRIINAMMRTGKPFDMSLHGV

SEQ ID NO: 322332 - protein, 352 aa, unidentified
MIIGCDFHPSFQQIAYVEQETGEYEERRLSHRGEAEAFYRSFTGKAVRIGVKATGNDRWFHKLMSELGHELLVGDASAIHASAPREQRTDKRDARHILRLLMENRFPAIWQPSVGNQEQRQLLLHRCRLVRMRTRIKNQLDSIAKNEGLTGSRVWKAKRRQQIEALPLTGWYAERRKDLLALLDEMDKLIEPLDEAVRAAAEQNAEAQLLMTHPGVGPVVSLSYVLILGDWRRFPRGKQVGSYLGLIPAEASSGKHQQQMGHITKQGNTLLRWLLVEAATKAQSKDPSWHRQYVRLSMNKHHGVAKVAIAHKLAVRLYWMLRSGQNYTQIVERGSHAGQSDLAGGCGLRPIN

SEQ ID NO: 322333 - protein, 402 aa, unidentified
MNAVGIDVSKGKSMVAVMRPFGEVVLSPFEVPHSSSELSKLARLLKSLDGESRVVLESTGNYHAPVAKMLHDAGLYVSVVNAMLVHDYGNNSLRRAKTDKKDAVKLANYGLDHWLSLPGYVPEEDTRLLLKNCYRQYQQYAKVQTMMKNNLLSLLDMIFPAVNRLFSSSVRADGSEKWVDFVDAFWHVQCVSGLSSNAFSSKYLKWCRKHGYNFSEEKALEIHRTARDHVAVMPKTDTTKLLVKQAVAQLRTVSSAKAALQNEMDALAASLPEYPVVMDMFGVGPKLGPQLMAEIGDVRRFHSKKALVAYAGIDAPPYQSGQLNVHSRSISKRGSPALRRTLFLVMSVYLQCSPADEPVYQYMAMKRAEGKPYLVYMMASANKFLRRYYAAVKAYLNALEQG

SEQ ID NO: 322334 - protein, 347 aa, unidentified
MQELFVGVDFHKKSSYVTGMSAEGKVVMRRQLANKKENWERLLKEFPSESKVVVEATCNWYYLYELIENRFEVTLAHPLKTKAIASAKIKNDKVDSEILAHLLRADLIPASYIPTRDVRDLRELLRYRIGMVRMRTILKNRIHAVLSKNGLIFPFSDVLGKKGEKWLRSLKLRQVYVDEISGYLNLAASLTSCIQEAEKVISAKAQLNDQVRLLLSMPGIGEFSALLIHAEIGNIHRFPSAGKLCSYAGLVPSVRASGDRIKMGGITKQGSQWLRWIMVEAAHHLVTGSATFKNYYERVKFKKGASVAKVAVARKALKIIYYMLRNNTAYEEKGNGRMPLGSATEIA

SEQ ID NO: 322335 - protein, 344 aa, unidentified
MTYYAGLDVALRTVALCIVDDQGKIAFDRSLACDVEAISKCLREFPHPLERVGFEAGAMSQHLFFGLQACGFEVVCMEARQVMAALSAMRNKTDKNDARGIAQLLRSGWFNSVHMKSHQAHVQRALLSSRKAVLNKCIDLANEVRGLLKVFGVRLPPRTSHGSFDAIVREIIEADEDLTHALMPLLDARQVLFKTYLELDRRVKRACVGDEVCRRFMTVPGVGPILALTFKAAVDDPARFSSSRNVGAHFGLTPRRFQSGEIDNTGRISRAGDADVRSALYSGANALLMRSMKWTQLKAWGTRLMKTKGRRKAIVAVARKLAVVLHRMWVDGTEFRWDKVEVKA

SEQ ID NO: 322336 - protein, 366 aa, unidentified
MRVQSNKINFEGQNIYTGIDVHKKQWTVCVYLDHMEKEHAIFSQPPTAEALKHYLRLHYPGGVYKSAYEAGFCGFHVHQQLEAAGISNRVVNPADVPTTHKEKVTKDDRRDSRKLGRSLRANELTAIHVPQRKTQEDRSLVRMRCTIRKDINRVKSRTKSFLFFYGIEHPAQFSSPSTHWSRRYMEWLKTVPMEEESGRATLDAMISEVVEMRKVLLSVTRQIRVLSQTEAYAKDYELLLSIKGIGPITAMTLLTEIEDISRFASTDHLASYVGLTPSCHSSGGKENNGQITSRNQQHLREMILESAWKAASDDPALKAAFREFSKRMKPNKAIIRIARKLVNIIYSVLKTKKKYVCMVGNKKETV

SEQ ID NO: 322337 - protein, 342 aa, unidentified
MSNISVFGVDISKQVFHVIGLDDHNNIVVKRKLKRGQVLSWFVQQNTCQVSMEACASSHYWGRELEKLGYQVQLLPAQHVKAYVQGNKNDYNDALAIAEATNRPKIHPVTIKTITQQDLQAIQRMRKQAVITRTALCNQTRGLLGEYGLIVPIGVNQLRKALPALLEDAGNGLSDLFRTLLRQRYDQFIQLDVDIDFYTCQLTIQANQNKCIKQLQTIPGFGPVVASAYHVYVGNGGTYANGRGVSASLGLVPKQHSTGGKQVLLGISKRGDKELRSLLVHGARAVASVAHKHNDRLSLWVCRLIEQKGMNKATIALANKLARIAWVVTTQKVDYQTRSSVL

SEQ ID NO: 322338 - protein, 346 aa, unidentified
MIIIGADYHPGFQQIAFVDTDTGELQERRLAHREEAETFYRGLAQPGRTVRVGMEASGHARWFERLLAELQFELWIGDAAEIRTKRVRKQKTDRQDAQLILQLLLEERFPRIWVPSGENRDLRQLLWHRHRMVQARTRIMNQLQAVALNEGLRCKKRLWRDSGREQLESFLLAPWASRRRHDLLELLDRLSPTIAELTQAIEQEVEKCPEAQRLRTHPGVGALTALAFVLIIGRTDRFRCGKQIACYLGLVPVEESSGERRRLGHITKQGNSLLRFLLVEAAQVTVRSDQEWRSKFFHLALRRGRKIAKVAMARRLAVRLYWMWRKGWDYEQLKKFGSHAGQPGHR

SEQ ID NO: 322339 - protein, 359 aa, unidentified
MTATMTYVGLDVHARSTHAAAIDVASGELCRARFGGGSEEVVAWLQTLPAPLRGCYEAGPTGFALHRAADKAGLLLDVVAPSKTPRAPGDRIKSDRKDAELLARLLLAGQLKPVAVPTPALEAARHLARAREQVRGDLMRCRHRVSKLLLLHARVYHASAWTKTHRRWLEQQQFDQAATELAYLDALAAVDGLVARKAALDERLSRLAREGEWWPTVARLRCFRGIDTLSAFVLCLEIGDWTRFSRPAKLAGWLGLVPSLDQSGESRRQGAITKTGSGYARRLLVEAAWHYLPRPSVGPALAERRAGQPDHVLQIALRAQRRLHRLYQRLRERGKPGNVTTVAVARELACFLWAAAMAE

SEQ ID NO: 322340 - protein, 388 aa, unidentified
MGAVVIGMDPHKRSATIEVMTGNESIVGGGRFATDAEGYRAMLNYAKQFPERTWAIEGCNGIGRHLAMRLLADGEQVVDVPPKLSARARVFATGQGRKTDATDAHSVALVGTRMAGLRPVVNDKQLTVLRVLADRRRALGEEHNRLIARLHHLLLELIPGGAKLHLSHLQARALLAKVRPRDAAGKAIRRVASELIGDLERNHERTKAADKELKQLLAETGTTLMQLRGIGPYNAARLLVEVGDVTRFPSKAHFASWTGTAPIDASSGDHVRHRLSRAGNRQINHVLHIMAVVQLRNQTEGRAYFDRKKNTGKTSMEAMRCLKRRLSDIVYRQLLTDMLTPAGTGPGGHSGTALTSSVADSHPDIDSSDKPLPGPVTTKPRTASLAAS

SEQ ID NO: 322341 - protein, 477 aa, unidentified
MNKTQRGNLRQPKAKSKRRRRNKGMCLEDRPVLEPNAAGIDVGAREMFVAVPPGRDEKPVRVFATFTEDLERITDWLEQCGVTTVALESTGVYWIPLFEILEQRGIRPCLVNARHMKNVPGRRTDWHECQWLQYLHSVGLLRAAFRPGQDVCAVRTVLRHRNELVAAASQHVQHMHKALTQMNLQIHHVISDITGSTGRAIVDAILAGQRDGAELAKLRDPHIKADTETIRKSLEGNWRPEHLFTLGQSRDLYRIYQQQIVNCDLEIEKMLRDFEPRTDPVEKPLPPDRKQNRAGSKRRKKNGHPHPEFDLRTETYKLFGVDVTQIPGIEENALPLFSEVGRDMSQWPTAGDFISWLALCPDNDISGGKVLWRGARRVRNRAGHLFRLAAFSLHHSPTPLGHYLRRMKAKLGPKGATMATAHKIAVIFYAMVKNQVEYDETLWDTRDAQREKRFEAKLKRQAKQLGYELVPIELKAA

SEQ ID NO: 322342 - protein, 322 aa, unidentified
MKTIANNPGIGIDVGKSELVTCIRRSNGAAEPPVAFANSSIGFRKFVVHLTNQKVQSDTPILLESTGPYHWNIARYLADEGYLSKVVNPLHTKQIARYSIRKRKTDKIDAGQLAFLASQNYGYAFVETKEIARKKALVRHYWKLKSVIGNLSKHERYLKQHRGITRATVTPYLIAKCESLKEKIIQDWENGNNLKYLDSIPGITPFLGATILAELAPLERFQRTEQIIAFAGLDPSVKQTGGKSGTHGKLSKRGSRVLRTTLYLAAFGAFNRSLRPLYDTYRKRGLRHSETLCIIARKILRIAVALLKKRRMFDPKYLEVIP

SEQ ID NO: 322343 - protein, 338 aa, unidentified
MELYAGIDLHSNNSVVTVLDEQDRTVYVKRLPNDLGCIVAALRACAGEVRGVAVESTFNWYWLVDGLQAAGFTVHLVNTAAVKQYDGLKHGGDFSDARHLAHLLRLGILPVGYVYPRKERAVRDLLRKRSQLVRQRTTQILSIESLIARNLGARVSGNEVKRWDAKCIDAMELLDEHKQAAKANLVVMNCIDGQVVELERSILAKVKLREDFKGLKTVSGIGEILALTIALETGDIGRFAGPGNFASYARMVDSRRESNGKKKGVGNAKCGNKHLAWAFIEAAHFAVRFDATIKRWYQKKCASSLSVVAIKAVAHKLARACYHVIKDGEPFDAAKAFG

SEQ ID NO: 322344 - protein, 401 aa, unidentified
MVSDFRKGRYNLMKIYVGINIAKLNHFAAAISSDGEIIIEPFKFTNDADGFQLLVSKLESFDKNSLIIGLESTAHYGDNLVRYLVTELYQVCVLNPIKTCQMRKNNIRKTKTDKVDTYIIAKTLMMQDNLRFVSFFDLDMMDLKALGRFRQKTIKQRTRLKIQLTTYVDQVFPEIQYFFKSGLHQHAVYALLKEAPSPKEIASMHMTHLANLLKVNSHGHFTKEQAKELRVLAQKSVGANDSAISIQITQTIQQIELLDSQLEKIEAEMTDIMKFNDSVIMTIPGIGYINGGMILGEIGDIHRFSNPNKLLAFAGLDPSVYQSGNFQAKTTRMSKRGSRVLRYALVNAAWNVVRNNATFKAYYDAKRAEGRSHYNALGHCSGKLVRVIWKMLTDNVEFNLK

SEQ ID NO: 322345 - protein, 412 aa, unidentified
MSKMEITAVGIDVSKGKSTVAVRRPGGEIVMMPFTVLHTAKGLTELTNTLRSISGEIRIVMEHTGMYWRPIALALKEGGFFVSVVNAMLIHDFSDNSIRKVKTDRADSLKIANYALTFWQELRDYSVEDETRQMLKIQSRLYERTLNSSIALRNGLISLLDQTFPGANKLFDEQRAKSGHIKWVDFVRRFWHKDCVAALSFSSFADTFQKWCKRTGYHYSLADAERIHGIARNSVATLTKNDSTKLLITQAVDSLNAVYDTLQILRNEMQRLASMLPEYEVVMAMQGAGPITGPQLMAEIGDVRRFTSKGALVAFAGVDAPPFQSGTFDSKSRHVSKRGSPHLRRVLFTICSVILQHSDHENAVFQFMDRKRTEGKHFYVYTVAGCAKFLRIYYAKVKEYLNNIDSCSDYVV

SEQ ID NO: 322346 - protein, 448 aa, unidentified
MSKSKTKKEKVKRISQLTVINPTAAGIDVSDTEMMVAYPISPEQLEIRVFGCFTRDLHSIAKCLKENGTTTIAMESTGVYWIPLFLILQEYGFEVYLVNAKHVKNVTGRKDDESDAEWIQKLHSCGLLSASFQPDNMVRTLRSMVRHRKNLVRTSATYLNRMQKAMELMNIKLHTIISDIDGKTGLLILEAILAGERDPEVLADLRDKRIKASREDIIKSLEGHWTTEHLFELGQCYQLYCTHRQMIDECDKEIEKQLVIQIASKNEGVIPDIPKVKRKASGKHKVQFNLTADLKEILKVDVTEVFGINELSALTILSEVGCDMTKWKTEHHFTSWLGLAPNTKISGGKVISSRIMKKKHHAGQAFRMAANGLYNSKSPLGDYFRRLRAKAGAPKAVVATARKLAIIYYKMVANKEAFNPKALDDYRKKYNEKKINQLKRKIAQLEAA

SEQ ID NO: 322347 - protein, 342 aa, unidentified
MEILTIGIDLSKTTFHMIGLSARGEIVLRKKLSRKQLLIYTATRTPMLIGMEACAGAHYLARALRDQGHDARLMPAQYVKPYVKTNKNDYLDAEAIAEAVQRPTMRFVPIKNDEQLDLQALHRVRDRWVARRTAVMNQIRGFLLDRGIAIRKGPSYLAAQLQIIFTDGDSSFSGRLLHLIRELKHEWDELERKIEEASAELARIAKEDDGCHRLMEVPGFGPIVSTALVAAIGNGISFRKGRDLAAWLGLVPRQHSTGGKTKLLGISKLGNEYLRRMMLHGARSVVMQMERKPSALGEWLTSLSARRHRNVTVVALANKMARIAWAILSKGTHYCAPALVAA

SEQ ID NO: 322348 - protein, 367 aa, unidentified
MKKISTVATKQAKNFPPQKLTVGLDLGDRWSWYCVLDEAGKIRLEQRVSTTSKAMGEVFGAMPRSRIALEIGTHSPWISRLLSELGHEVIVANARKVRPIAESRKKDDRLDAQTLARLARIDPQLLYPVKHRSVQAQADLTVIRARAGLVRARTALVNTARGLAKSYGERLRSCNVRNLNPEKAESLSPELQAALEPLLKAIESLSERIVEYNERIESLAQQSYPQVALLKQIKGVGTLIGLTFLLTLEDPHRFRKSRDVGCYLGLQPGRRNSGQSEPQMHISKEGDPYLRTLLVQGAQHILGPFGPDCDLRRWGLKLAERGGRNSKKRAIVATARKLAVLLHHLWVSGEVYKPLHHSSPTTVAAAA

SEQ ID NO: 322349 - protein, 389 aa, unidentified
MPSVSERPEAPTAIQTHLAASFVSLELSRSIWLITSLSPGSGEKMSKHSVRAGDVAALLARFSELKRKASERTGKSFPIVVIQEAGLDGFWLHRVLQSEGVESHVVDPSSIATSRRRRRAKTDRIDGEALLRALLAYKRGEPRVCAMVKAPTPEEEDRRRLCRERKVLIAERVKHVNRVKGLLFSQGISGYEPLRRDRRQRLDELTTGDGRSLPVHLKTQIRRELDRLELLLDQIKEAEAERDALLAAPQPAAPAPAGRMLLEFKGIGAELAAVLWLEALFRHFDNRRQLASYAGLAPTPWQSGSVDHEQGVSKAGNPRLRTSLIQLAWLWLRHQPQSALTLWFKERVSGNGGHFKKSTIVALARELLVALWKYVTAGVVIEGAVMKVV

SEQ ID NO: 322350 - protein, 324 aa, unidentified
MTKMIVGIDISQKTFDVAYSDCGAVRTGRFKNDAVGFSTFGAVLGGSEAHCVMEASGPYYLPLATFLFESGVGVSVVNPLVVKRFSQMRLLRAKTDRQDAKCLMMYGATEQPQSWRPSPLYINELSQLQALLDQYLKQRTALNNQLHAQKASGVPNEAFSTSAQKVLETLDAEIKDLEQQMEALARKHHQSEMEALLSIPGIGRKTALVLTVVTHGFSRFDSAKQLASYVGICPRIFQSGTSVRGKSRICKLGMARVRQLLYLCAMQAAKVNQPCKELYERLLKNGKPKMKALIAVAHKLLRQALAIAKSQTTFVQNFSPFTCT

SEQ ID NO: 322351 - protein, 309 aa, unidentified
MSRKERLLVNAIDVEQEYKVIGLDLAKNDTSYVCIADSGEIIAIDRLSYSDLLETAKQLSPTIFAMEPCNGMHWLVNQLQDYGHECRVISGSMVQQYVESHFGKQKTDLNDAQAIAYLALDEMLRSIRVKTPSEMSIQALQTIRTQLSKQKTASIVCFKSMCQGYGISISKGKSSVAAFITLLKETDKIPEEVKDALRMLISNYSVLRMRISKIDKVLEKIVVNNPTGKRLKDIPSFGVQCAARLLTIAPNIKEFKGPKDLVAYCGLVPRNITTGHIQKTAGITKRGDKLMRRNVVQAANVLYCKNKHG

SEQ ID NO: 322352 - protein, 312 aa, unidentified
MNKLTIGVDVSKDTLDVHLHPDGTHRQFINDAAGFRLILDWIGSRPVARLVFEASGAYHRAFEHAMGEAGIALCKVNPARARRFAEATGQSAKTDRIDAAMLARMGAVLEPDTRAAPSKTACDLKELHMMRTALVKDRTAAKNRAATLTLPLLKRQLRQRLAAIDRQIRQIEQAMHARIEVDPELARKRDILISIPGIAERSAFALLTGMPELGDLNSQAAGALSGTAPRTRQSGKWTGRAFVQGGRAHVRRALYMPALAAARFNPDLNQTYKSLTARGKPPKLALTAVMRKLIVLANALIRDNRKWTPKPN

SEQ ID NO: 322353 - protein, 327 aa, unidentified
MTTMVGIAIAKAKFDVALLGQDGHIEYGQFDNNSQGFKQFNTWLGKRRTETVHACMEATGLYSNDLALFLHQRGYTVRVVNPARIRAYGDSLLRRNKTDQLDAALIADFCRTQSPPAWTPPDPSWLELQSLVRHLEDLEQTRQQQRNRLGSGVRTPLVREQLQRHIALLDEQIDQLKHHIQDHLDQHPDLRHPKELLTSIPGIADLTAGKLLAQIPNIRAFDDPRQLVAFAGLNPAQRQSGTSRRSKTPISKQGHACLRAALFMPAVSAKRHNPILHAFAQRLTDRGLCGLEVVVAVMRKLLHLIFGILKSGHPFDPHFLSRLDASA

SEQ ID NO: 322354 - protein, 361 aa, unidentified
MEKIIKQCVGIDCSKDELAVCFGQLGLPWQERHKATGVFENSPKGFKQLLKWSDKLSEQGIAVDFVIEATGVYHESVTHFLFDKGRKISVVLPNQARHFAQTLKVRTVNDKESSKMLASYGLQKQLDGWQKPDSVYVRLKGLTREHAQLKDELTVIKNQKHAEEHCAFPIKESLKRMKQRIAFLEKQIKQIGTDIDSIIASHPVLQKKLKNICTIPGVGKMTAVKVIGETNGFNLIRNKKQLVAFAGYDVVTKDSGTSVHGKPHISGKGNKHIRKAMHFPALTSVKFDKNNRDLYERIENRTGIKMKGYTAVQRKLLVLIYILWNKDEPFDPNYQTNKANQSKLLEQPIMVALTELDQVCS

SEQ ID NO: 322355 - protein, 417 aa, unidentified
MNTEWIHTKFFAALDWASDHHDVIVVDQHGGLVADFRFVHSASGWAEFNESMKGFPGCPVAIETSNGPAVDQLLQRGYSVYPVNPKAAARYRERKVPSGTKTDHHDAWSLAEALRTDGQGWRPLLPQDEATTTLRLLCRDEIELIEQRTALINQLQAALREYYPVALESFNDWTYPYTWAFVRAFPTPVALRQAGRRKWEKFLHVHRLWRVQTSQRRLELFAQAEALPASAAVVAAKSLLAVSLATLLETLQRQLDEYRHRITDAFQSHPDHDVFGSLPGAGPKLAPRLLGGLGSRRELFPDSDSLMCWAGVSPVSFQSGQIRKAHLRRACDHFLRYTIHLWADQSRQSSPWAQAYYRTKRAAGHSHASALRCLGKRWLKILWRLWQNREHYCEERHINNLQHRDSPTWRQLHIQMV

SEQ ID NO: 322356 - protein, 453 aa, unidentified
MKKETVKKGVIKMGTGLPVFNHHAAGIDIGDTLHYVAISDGAGGHEVKTTSAFTCDLEEIVDYLKSNGITTAAMESTGVYWLPLYLMLEDAGIEPYLVNAKHVKNVTGRKKDDTDAIWIQKLHTCGLLQKSFQPDNEIRLLRSYTRQRKNLILLSSDSVRRMQKALELMNIKIHTVISDILGKTGMSMVKAIIEGERDPKILSTLCDPRIRASQEEIIKSLQGIWREEHLFMLEQALENYEFHQKQIKSCEEKIKQQLLNQVATIKEGDITGLEEQLKKKSKAKAKKNQFDFAVAPYLKIIAGVDLCKIPSISEVTALEFIAETGVDMRKWFGGKHFDAWLNLTPNTKITGGIIVSSKMMKKKNRAGQSLRQAASTLSTNKTPLGGYYRKMRARLGGKGAALATAHKLARIIYTMLLKKIEYNPGILTDNEEKSRFEKIKKLEKQLARLKRAA

SEQ ID NO: 322357 - protein, 346 aa, unidentified
MQVTTIGLDIAKNVFQVHGIDASEKVVVRKQLRRSQVLAFFKALPPCLVGMEACATAHYWGRELTKLGHQARLMPAKDVKAYVKRNKNDAADAEAICEAVRRPTMRFVQIKSAEQQGRLMLHRTRDLLMRQRTQVINALRAHLAELGIVAAQGRDGIKELLTLIASEQDARLPVDAHTSLVVLAAELQAMQTMIGSIEKRLMAQHRANEASRRLESIPGIGVIGATAIVATVPDPKVFRSGRDFAAWVGLVPRQDSTGGKQKLGPISKQGDRYLRRILVVGACAVLRYARQKPEKYPWLIQLLARKPFKVVAVALANKMARVAWALLAKGGTYRAPGLAPVLAAAA

SEQ ID NO: 322358 - protein, 338 aa, unidentified
MVYGAIDLHMRDSQIRIVDAEGRVLRDARVRTTAERLVAVFTGYGPMRILWETGTESDWVAEALEAAGHAVIVADPNYAPMYGEIRRKVKTDRRDVAALAEANRHGWYRATHRVSRAQRDVRQVLRSRRHLVRMRAGTISLIRSLLRQDGYRLPSGSSAQAPDRLAALALPARLRATIAPLQRMVETLTTEIATVDTSLATVADADPIVERLQSVPGVGPVVALTFRAFVDDVSRFAHAGPVSAAIGLVPREDSSAERRHRGHITKAGPRELRSLLVQAAWACWRSKASGTLRAWVERLAGRRGKRIAVVALARRLSRILFALWRDQSVFTTATLAAA

SEQ ID NO: 322359 - protein, 418 aa, unidentified
MKIVYQICCGIDVHKKFLIATIVSSKNPPTLTYKKKRFSTFNNQLRQLRDWLLENDCHDVCMESTGKYWVPVFNVLEKVLHVEIVNPKWVKAVKGNKDDVKDSKWIAELFCFGLTKSSFIPEKSIRILREFTRYRAKLVATRSSEKNRFQNGFTVCNVALDAVVSDMFGKSASKITDYLLTTDNPDPKICPTFLHGSMLKKSEAVVESIEGFDFTDEQKWRMLKVREHFQYLNQLIDDIDSKLDVLTTPFKSHIDLLCTIPGIKHDSAVTILSEIGVDMSQFASSKRLCSWAGLTPSNNQSAGKKKSVKISRAGVYLKPCLVQVAHAAVKSTEKPYYKNKYERISKRRGKKRAIIAIARMILTAIYHMLTLGEKFEPSDFKLSDMTPQLKERKRMESIKQAVNLLKRESVLPIEFSAG

SEQ ID NO: 322360 - protein, 349 aa, unidentified
MRHIGVDLHKTNFVVCFLSDDETSRLETFPLTKTGINRFISDLNKEDEVAVEVTQNIYYFYDQIKAHVARVVLVDTYRFAVIAKSKKKTDKADALALARFLKLGYLPEVSVPSERIRRLRQLLEARETLVSMRTKLKNMGHAALSRNGIALSRAAFASEVSRARLAQRDDLPSTDALIMQATLRQIAELNKEVELLEAEIVKVGRTLPGISRLLQLHGMNLLSAISLLAEIGDIHLFETSKQLTAYAGLVTSTRQSSETTRHGKITKQGRKRLRTVAIRAVLAMVNRTDTPLMDFYQKKKREKGSGKAICATARKLLTIIFVMLKKDLDYWYLEDRLYNRKLRALNAAA

SEQ ID NO: 322361 - protein, 374 aa, unidentified
MGNVIEAFVAFDTSKLRNAVAIAEAGRAGEVRFLGEIENTAVAVAKLVRKLAGKYGRLTFCYEAGPTGYGLYRQIEGLGYECLVAAPSLILKKPGERVKTNRRDAVSLVKQLRAGDLTAVWVPDPHHEAMRELTRARETAVEDLRRKRQQVSAFLLRQGLHYPGERAWTKTHRDWLASQKLEYAEHRTAFEEMLLAMRQAQERIERLEQAIRLAVPDWSLAEVVTALMALRGIDFISATAFLAEIGDLSRFRTPRELMAYLGLVPSEASTGDTVKRGAITKAGNRRARRILVESSWSYQHPPRVGKEKQEKLAAAPPAVREIAWKAQCRLSARYRALTRKGKLKTVAVTAVARELSAFIWAINRQIANSRAAAR

SEQ ID NO: 322362 - protein, 370 aa, unidentified
MGNRSMFVGLDVHKETIDVSIAEGQRDGEVRHYGVIASDLEPLDKVVRALRAPDRQLHFVYEAGPCGFGIYRHLTKRGEHCVVVSPSMIPKRSGDRVKTDRRDSLMLARLHRAGELRAIYVPDDTDEAMRDLVRAREDAVGVGTQAKYRLKAFLLRQGRRYPGREGWTLPYRRWLADLSFPSAAQHISLQEYRDAIDETERRIDRLTEQLRQLAPTWRWAPVVAALQALRGVSFVTAVALVAELGDLTRFRHPRELMAYLGLVPSEHSSGPSVRRGGMTKAGNPHVRRLLAEAAWAYQGIPRIGRQHAYRQEGLPKIVCDIAWKAQLRLTARFKRLVARGKAKPKVATAIARELTGFIWAIAREVAPAPR

SEQ ID NO: 322363 - protein, 326 aa, unidentified
MTSLPNPTSDTRVTVGIDVAKATVEVAISGRQKTLALSNDEAGYAALLAELSSLNVGLVLLEATGGFELACATALQLAGLAVAVVNPRQARDFARAMGYLAKTDRIDAAVLADMARTLLARADLSKLVKPMPDAQQLELQALVTRRRQLMAMKLAEDHRMKMPGVRQRRSLNTIIKALDREIARVDKDLQAFVGANHAELAALLDSVKGVGKATISTLLAEVPELGKLSGREVSALVGVAPINRDSGTMRGKRSIFGGRPDVRRVLFMAALVASRHNPVIKAFYQRLLAAGKPKKVALVACMRKLLTILNAMVRSGKPWDQALHLG

SEQ ID NO: 322364 - protein, 426 aa, unidentified
MESTDEPVELVERVAALDLGKAALMACVRVPHEDRPGRRRQEIREYVTLSRSLLELADWLRCERVELVAMEATSDYWKPVYYLLEAEGFTCWLLNAKHVKNVPGRPKTDKIDAVWLAKVVERGMCSPSLVHPKPIRQLRDLTRYRRSLIRERTREKQRVEKLLEDAQIKLSSVIADIFGVSGRQMLEALIAGQRNPRALAQMARGTMRAKTATLEEALTGHFEDHHGFLLQAMLEHIDALTTQIDTLSARIEEVIAPFSHHITRFDEITGVGTTAAQELIAEIGVDATRFPDAAHLVSWAKFAPIDHNSAGHKRGGNTGRGNPWLAGTLGEIVASVSRTDTFLGDRYRRLARRCGKNRAIVAVGNSVLTIIWHLLVDPDAHYHDLGSDYYSTKVNTRRREHDLIRQLERLTGKKVTLKLNASTPAA

SEQ ID NO: 322365 - protein, 394 aa, unidentified
MKLIGIDIGKNKHFFCVMDQQTGEIISQPVSFSNDKEGFDFLVQKIKSYPKDSILIGMEDTGHYHFALLKYLLNLQYTVALINPKTTDFNRKMQGGITKNDKLDTINICDVLDTPERKKQYRITKVNSFDLYEQKQLTRHHHNLKEEENVYKNRLQKCIDIVFPEFNKLFNSKYSTVYMNILKMFGSAENIANTDIRTIRKCFEIEGRGNRISLTPERLKECARSSIGISSSAEVIQIKHLTAQIELIEEQLTEIDKKIEEFSIQNNSPILSIPGISHFSGTSILAELGDISNYSKPSQIIKFAGVAPLHYESSQFNAQHTSITKKGSKYLRKTLYQIILPVIRHNPVFNKYYQLKISQGKGHRCAQGHCVRKLLRIIYHLLKTNQQFDHQLLR

SEQ ID NO: 322366 - protein, 405 aa, unidentified
MAAVMIGIDPHKGSHTAAALNEVEAVLGELRVRSGAAQLEQLLAWAAQWPERTWVIEGAGGLGYLLAQQLVAAGERVVDVQPKLAARVRLLATSSSNKNDPNDARSVAITALRSPEANQVRAEDHAAVMKVWAKRRHDLVSARTRVVCRLHAVLCELVPGGISGQLYASKAATMLDEFEPENAIAAARHELGLELLADLRRVDEQMRETKKRIALAVAASKTTLTEIFGVGPIVAATVIGYVGDVTRFASSDRFAAYNGTAPIEVSSGPRKIYRLSRRGNRRLNHAIHMAAVTQIRNLRSEGRAYYDRKVAEGKTGKEALRALKRRISDALFRQLQIDAQRAQGSIMGPGGQTGNDSKACVTDSHPEGRLFGKATPEPGTTLRPAATSVRSRSSQTPARIARRAS

SEQ ID NO: 322367 - protein, 366 aa, unidentified
MKKTSTVRVNGNMIFKGHKLTIGLDLGDRWSFYCVLDEAGEIILEQKVATTPEAMKQTFEKIPRSLIALETGTHPPWVSRLLSELGHQVLVAHAQKVQLISKSNRKDDRHDARTLARLARIDPELLGPVRHRSAKAQIHLTVIRARAELVRARTALVNAARGLAKSYGERLRKCGTAQVSRELAAAWSVELREALKPLLAEVESLNERIKEYDARMEKIATESYPQVALLKQVKGVGTQIALTYVLTLEDPHRFPKSREVGCFLGLRPGRRDSGESQPQMHISKEGDRYLRTMLVQGAHYILGPFGEDSDLRRWGLKLAARGGKNAKKRAVVAVARKLAVLLHRLWVTGEVYEPLRNSHKAMLAAA

SEQ ID NO: 322368 - protein, 477 aa, unidentified
MLDLRRAVGTEVVHRLGANKPAYKLDPGFPEHPRLSPRVVIGPGARFLEFLFTGPHADDATQEKVMELLHRRCCGLDVHKETVVACLRLVSDGKVTTEVRTFQTTTADLLRLSEWLAANGCTHVAMEATGVYWKPVWHILDDGEFELVLANAAHVKNVPGRKTDVNDAMWLAELLAHGLIRASFVPDTQTQEMRNLLRTRKQLVREQSSHVLRVQKTLEDANIKLDSVLSDLMGKSGRAMIEALIAGETNPVKLAGLADRRVKASPEELREALRGRVTKHHRFLLRLHLNQIDALDAAMATVDAQVEANLGPFRTAVDLIMSVPGIKNLGAQAIVSEIGIDMSRFPSDAHLISWAGICPRNDESAGKRRSNRLRKGAPWLKTTLVQCAWAAVKKKNSYLQAQFHRIKARRGPNKAIMAVAASILTAIYHMLKDGTMYQDLGRDHFDRRSTDQQKKSLIKRLADLGYAVEIKPLAAPA

SEQ ID NO: 322369 - protein, 309 aa, unidentified
MAGSVAGIDASKAQLDLAIRPGPGITRFPNTPEGVAELVEQVRQGGVELVVVEATGKWEEAVARALAAADVPVRVMNPRLVRHFARGLGLLAKTDQLDAAVLAQYAEVVRPAVRALPTEADQVLRSLVTRRRQVSDMATAEKNRRQTAESWVVPLIERHLETLAAEELLLEAQIAALLDGDDDWRQRRALLESVKGVGPVLSATLIAFVPELGALSDTQIAALVGVAPLNNDSGRFRGKRRCWGGRGKVRAVLYMAITSAITWNPPIKRFYARLTAAGKPHKVAMVACMRKLLVTLNVMLRRQTMWQAT

SEQ ID NO: 322370 - protein, 328 aa, unidentified
MQKSKEYVGVDVSKESLDMVMYSTGEMCCVGNDEAGIAKATGWLKQVDPAIIVMEATGGMEVSLYVALQEANLPVAVINPRQIRDFARSMGILAKTDKVDAKVLARYAATIQPEVRPLPDEDAHKLRALVTRRRQLGEMIIAETNRARATRDKAMKERIHAHIEWLKRELANIDKDISQRIKENPVWRAKNKLLQSTPGVGPVLSATLIAELPELGVLNRKKIAALVGIAPLNRDSGKHRGERSIWGGRCKVRQSLYMAALSAARFNPAIQAFYQRLIAGGKDKKVALTACMHKLITILNAMLKHNSYWSCNHATFPDASLPSAKTVA

SEQ ID NO: 322371 - protein, 430 aa, unidentified
MKSNTQNAKIEAITEKTLVLGIDVGSEMHYARAFDYRVIEYSKKPFKFSNTEAGFATFKEWVLDLKERHEKDKVVPGMEPTGHYWFNLGKFLQDNEMKPVLVNPHHVKKAKELDDNNPTKNDRKDPKVIAGLVREGRYMIPYLPEGVYADLRTASNIRFQLQAELTRIQNRISRWFNIYFPEYKTVYGKLDAKSGMLILKAAPLPEDILTLGIDGVNQIWRDAKLRAVGKARAKTLIEAAEHSVGSKEGAVSARMEIRMLLEDYESRNTRLQEVMVLIEELVRKIPMAEKLLEIKGVGIRTVSGFLAEVGDISRFNNPKELQKLAGLALVENSSGKHKGETTISRRGRKRLRYLLFEVAMSLVSKNQEFRELHNYYTTRRLNPLKKMQSLMAIAAKLIRVFYAMLTKGVDYDPKKMVSDIKRPAVYLQAA

SEQ ID NO: 322372 - protein, 416 aa, unidentified
MKIVRPICCGMDVHKNIIVATIGITNKKTRITEYIQETFSTLNPDLLNLKQWLINHKCFDACMESTGKYWIPVFNILEDEINIYLTHPKYVKAIKGKKTDKKDSKWICDLFKHDLIKFSFIPPKEIRALREISRYRYKLVGMRSSERNRYQNCMTVSNIGIGSVFSDPFGKSAQAIMKEVLESDIIEDEKILKCIHGSCKNKDKILDSIKHCNIETDQRFKMNESMTHMEELQVHIDNCEIEMMKRAAPMFDQFMHITQLPGISTLSAILIISEIGVDMKQFESDKQLTCWAGLAPANNESANKKKPVRISKAGQYLKPLLVQCALGAIKDKEGYFGIKYSRIKKRRGHKKAIIAIARMMLVSIYHMILTGETFNPSDYESFRNPKPPIKQQVLTEESAIEFLKKSGFDVSKLTKP

SEQ ID NO: 322373 - protein, 321 aa, unidentified
MAKPNTICAGIDTGKRKLNVAIAGSAEELEVDNTADGHKVLSKWLRRHRVKRIGIEASGGYEQAVVAELRRKHFVVVVFQPAQVRAYAKFHGRRAKNDRIDAQLIAACTAAVKTIHAPPDPRLLPFAEHLTMIDQIGEDIARLKNRLESCRNARFAQVWRDDIARLAEREKAERKVVVAAIRQHRDLAARLDLIASVDGVGLPTAVAILVRLPEIGRISREQAAALAGVAPYDDDSGDQVGVRHIDGGRERLRRALYTAALAASFFWNPQLIALYRRLIAAGKEHKRALIACARKLLIFANTVVARGTPWQQSPITAAPRG

SEQ ID NO: 322374 - protein, 342 aa, unidentified
MTAIGIDTHKATLAACAVDELGRPVGEATFANDPAGHVAFIAWARAVAPEVMIGVEGSSSFGASLARSAQSAGLAVREVPPHLSRVERLRTRRPGKSDPGDALAIARVTAREKNLPPIRLPDRTTELRLLLEAREDLLVDATRARNRLHAHLLTLAPGYGGTVANLVSARNRATAGRILRGVGGVQAELARGLLLRLARLEREIKALTSRIEMLVAGHPLLGLSGAGPITAARLIAEVGDVRRFRSADALAALAGVAPIPASSGQVQRMRLNRGGNRQLNRAFYFIAVIQSRFYPPAKAYVTRRMEVDGKSWREAIRALKRMLVRPVFRLLLEGAELQMEAA

SEQ ID NO: 322375 - protein, 311 aa, unidentified
MMNDSIGVDISKDHLDVHRLSDGVSRRFANDSRGHRTLIGWLERPELRIVYEPTGPYHRALEHRLAEAGFALVKVNPRQARRFAEATGRLAKTDRLDAAMLARMGVLLELEARPARGPTLNDLKDLHMAREALVKNRTAARNRAKNLTLPILKRHNAEQLRQIERQIAALENEIMALIKVDPDLARRFDILVSIPGVSAITAFALLIDMPELGTLDQAQVASLAGLAPVARQSGQWIGRAFIRGGRANVRRALYMPALVAIRFNPDLKAKYDRLKAAGKASKLAITAVMRKLIIIANALLRDGRIWEPTRT

SEQ ID NO: 322376 - protein, 427 aa, unidentified
MTYRIAAVDVHKKMLAVVVADVAGEGEYQFERRKFGATPDQLQLLAEWLGQQEVEEVVMESTAQYWKPVWGALERYWQPARQKREGATQMSGTLHLCQANSNRGRRGRKNDYADGERMLKRLVAQELVLSFVPDAEQRLWRTVTRRKYQLTRDKVRFQNQLESLLEEMHIKLSSLVSDLLGVSARRMLKAIAEGETDPAALAALADYRLRATPEQLRDALGACGQLPGTYRLLLKMALEELKWIEGQIEQLEQEASNLLRQHKDAVQRAAEVPGLGVDSAIQMIAEVGPKAAAFESEKKLSSWVGACPGEEESAGESQSTRSPKGNRPMRRLLNQAAQAAVKVKGSIFQVTFQRLLPRLGYKQAIWAIAHRLCRLLWKILHEGVRYEERGPAVSAKSKRTRAGRMIKELKALGYRVEGGPLPAGTPA

SEQ ID NO: 322377 - protein, 351 aa, unidentified
MLHPTQELEPPANPARFIDLAKRVFQLHGARVDGSVVFRKKLSRGQLLVFFAQQPNCVVAMEACATAHGWGRELEKLGHSVRLIPPVYVKPFVKRQKNDAADAEAIVEAALRPTMRFVAVKTEDQQARAMLFRTRQMFVGQRTQMINALRGHLAEHGLVAATGTAQLKRLADAIEDSDTALPEGVRNLGQMYLAQIAGLNARVAELDQKMRCAAKEADLARRAQTMPGVGPITALAIETFAPDLATFRRGRDFAAWLGLVPKQHSTGGKARLGKTSKMGQRDIRTLLVSGAMAVLQAVERFGTPNNGWLSRLRARKPRMVAAIALANKMARGLWAMMTKREDYRDPVATMV

SEQ ID NO: 322378 - protein, 390 aa, unidentified
MLLLGVDIAKLNHVASLVDSSSGELIFSNFKFQNNILGFSNLLEKISKFSINEIVIGLESTGHYGENFINFFFQKDFKIAVINPLQTSHLRKASIRDSKNDRLDSINIAKALLFGEHRYITQKNLTNFALKKLTRFRKSLIKQKSKTKIQLVSLLDIIFPELQYFFKSGIHSNAVYTLLKKYPSTEKIAALREKSLFSILNKASKGHYKEEHALQLKSLAKSSVGIKDTSVSMHIPQLIELIEMLDSQIKSIEKEIDSSIDEESPILTIPGINTVAAASILGEINDIDNFDSSSKLLAFSGLDPKIRQSGNFSASSCRMSKKGSPYLRYALIFTAWNLVRNSETFNRYYLSKRAQGKSHYSALGHTAHKLVRIIYTLLKKNISYQENLIS

SEQ ID NO: 322379 - protein, 316 aa, unidentified
MICGVDVSSKSLDARIGRDGAAACFTNNLKGIAELAEFCQCHKVHLVAMEATGGYEKKPFALLWAAGIQVAVVNPRAVRNFAHGMGLLEKTDRIDAGVIGWYAQTKGCVAISPASAEQQQLKAMVTRLRQLTELRAAQRNQRLLVTDKVVLTFFRKFLDLVQRQIRDLEVAIAGLIDADAVWQKLDQSFRSIKGVADRTVARLMAEMPEIGRLSNKRISKLAGLAPLACDSGQQKGKRSIRGGRRTIREILFVVAAGVSRHNADFRAFRERLAAAGKAKKVIRIALAHKLLVRLNAKARDVLQQLREAPPAAVLLS

SEQ ID NO: 322380 - protein, 344 aa, unidentified
MSEVIIIGLDIAKYVFHVHGADERGRVIFSKRISRGKQLDFFAAQPNCTVALEACGGAHHWARQLAQLGHEVRLIPPAYVKPFVKRQKNDAIDAEAICEAAQRPSMRFVAVKSEQQQAAGLVFRTRDLLVRQRTQLINAIRGHLTEYGWIAPKGPSHVAMLADLLEEEEMASSLPEAARAMFRLMLDLLAGLNGKIADLDKEIARRAREDEVSRRLMTVPGIGPISATAIAALAPPAETFAKGRDFAAWLGLTPLQRSTGGKRKLGATSKMGERTLRRLLIIGSSTVVLQASKRGAPKGSWLEQMLARKPRMLVTVALANKMARIIWALLVKQENYRAPVAAKA

SEQ ID NO: 322381 - protein, 319 aa, unidentified
MSEQQQERFVGIDVSKAILEVAIRPSGERWSVANEEAGVRELVKALERAIPTLIVVEATGGMQSLVVAELAAAGLPVAVVNPRQARNFAKAMGRLAKTDAIDAEVLANFGQAIRPEVRELKDELTQLLTALMGRRRQIVDMLTAEKNRLASAPKAVRKEIRKHIEWLEARLKAMDGQISDTIKESPEWREKDLILRSTPGVGPVLSVSLLAGVPELGKLNRQKLAALIGVAPLNDDSGNHRGTRRVWGGRAQVRAVLYMAAVSASRANPVIKAFYQRLVAAGKKPKVALTACMRRLLCILNTMIKNGARWQHEEATASA

SEQ ID NO: 322382 - protein, 321 aa, unidentified
MADHSMKVAGIDTGKAELHVCLLPDGTRFKVGNDAGGIAELVAKCVEAGIRRAGIEATSIYHRAAVKALRQAGIEVAELQPRQARGYAQALLQWSKSDTIDAAVIARLTRALDEVRPAPDPKIEAFAEVLTYVEQLEERIAWLKTSRERYANARFKARIAADIKALEKRRRTELKRLEAAMRKDQILATRLDLLLSIPGVAERTAIGLLIRMPELGTLTREAAARLAGLAPCDDDSGQHKGERHIHGGRSRLRRTAFMAAFAAALNWNHDLNIFYKRLRQRGKAHTAAVVACARKLIILANAIIARGTPWEKQRGMPCPAS

SEQ ID NO: 322383 - protein, 457 aa, unidentified
MRQRGKRTKGIEEAHPFAGMSQVNQDAAGVDIGAEEIVVCVAGGETRQIVKAFGNYTVDLQNIGKWLQEHQVKTVAMESTGVYWIPLFEELERQGFECLLISSRSLRRVPGRKSDIQDAQWIQTLHSYGLLESSFRPQGELVALRTLLRHRGQLLEHRSPHIQHMQKAMLQMNVQLSQALSDVTGETGLAIIRAIVAGERDPQKLAALRDRNCKKSAEEIGKALTGTWRTEQLFIVKQSLEVYDFYTQQVEICDAEIERMYALIRPDWEAGELKALPQKKRNSHSKNAPKNTTEIRKHLKRISGVDLSVVDGFGVSLAQTVIMEVGTDMSKFPSEKHFCSWLGLAPKHEISGAKVLKNKTLKTKNRAGQAFRMAAQSVKKADCVFGSLYRRLKSRLDKAQATVATAHAIARVVYRMLKYQVEYETIDVEDYEQKYKEQQIKYVKKKAGKLGFQLVPA

SEQ ID NO: 322384 - protein, 333 aa, unidentified
MTREYIGVDLHKRFFQACAIAMTGDRLWEQRFPRTTDGVGRFSARVTGECAIAVEAMGPTWAFVDAVAPTGAAVCVVDPRKTKLKAGHAAKTDRLDARRLADALRRDSVVSIYIPPREIRALREVCRGRHQLVRLRTRLAQMIRALLLRCDAGEPPGTTLYAARALAWLTTVQLPAEAACQLHRLERLYRAVHADATAADADVKTRAAADPIACALATMTGIGPILGLTLRAEIGDATRFSGGPPLASYAGLVPRVDNSGERVYHGRITRQGSPWIRWALVEAARYAIRRPDARGRWARRLAVKKGLAKARVAMARVLCDEVIATWRAIPGSA

SEQ ID NO: 322385 - protein, 321 aa, unidentified
MGSTPSSPIAVGIDIAKESFVTALGGEGSFSLSNDGAGHDALLERLQGRTIGLIVLEASGGYERALAGALQAAGFAVAIVNPRQARDFAKGMGYLAKTDRLDAQMLAQMGDVLMRQPDLNCRVKPVPTAERQRMHALVVRRRQLIAMRVAEQQRLTLADVVMSRSVKAIINALNHELARVDRELQRQVEVHHAELANLLRSAKGVGDATLSTLIAEVPELGKLNRREISALIGLAPMNHDSGTLRGKRAIAGGRAFPRQALYMAALVASQHNPVIKVFYARLLAAGKPKKVALVACMRKLLTILNAMVRTGRPWDASLNHA

SEQ ID NO: 322386 - protein, 428 aa, unidentified
MEQQDGIRLEQFRQLKKEIRGSERHLIVGIDVSKDRHHAFFGTVMGKTLLKRLVFENSCEGVTKLLDQVARVQLENGLPEVVFGLEPTGNYHKPLGEYLIRRFAQVVLVSGVAAKENRKTLDGRWDSNDPKDAANVADLVSQGKFLFYEYPGPRLRELRSLLALKRRLKRQEHGYRVRIRNHLVAKYFPELDRYFDQSEKYGLAIVRWCLDPRSLSGYPFDEFVRWVAPGRRGGEQNSRLRMILQMAQGSIGCEAGPAVKFEAELMVEGLRQIRLMIGDTDKQIQDLCREFPEYAYLLSIPGFGPDVSSKVLGAVGDPFRFENGRQVLKLAGWDLNAERSGKSSDLVRPVISKKGKADLRYALYQAALIASIKNQHFMVYYTNRLRGREREPGIKTKRRVKLAAKLLIIAWTLMKKKEPFNPDYLKLE

SEQ ID NO: 322387 - protein, 431 aa, unidentified
MPRDREIAFAVVASETKIPWGVDSDQVWSQTEVAKPLNLETTMLHDHPSDGPSAIRTHIAAIFVSLELSRSTWLVTSLSPGKGERMSRHSVTAGDMAGLLALFAELRRKAEVRMGQSYPIITLQEAGLDGFWLHRVLQQNGIESHVVDPASIAMPRRRRRAKTDRIDGETLLRTLLAYKRGEPRVCALVVAPSPEEEDRRRLCRERATLIAERITHVNRIKGLLFAQGISDYAPLRRERRARLETLRTGDGRELPSHLRTQIGRELDRIELLLEQIEAVETERDGLLAAARKPASEEAAPDAVTMLLALKGMGANFAAVLWSEAFYRQFANRRQVAAYAGLAATPWQSGGIRHEQGVSKAGNPRLRTTMIQLAWLWIRHQPQSALTRWFKERSPQGRKRAIVALARKLLVALWKYVTQGVVIEGAVMKPAA

SEQ ID NO: 322388 - protein, 383 aa, unidentified
MQPTRKEHFTPTEDILAVALELASGAWKMAFQDGKHEKPAISTVSNEIASKRLAEAVQEIDKIKRKWKLPAKVRTVVLYEAGQDGFWLQRALTKLGYETLICDPGSIPVERHARRAKTDRLDAIKLVLCLRAWLRGEYDRMHIIRVPRVEDEAQRQLSRDRGELVKERGQHHDRMRKLLRTVGCWEALQGDVGKHLKQGDYRCQDGSKLPAEMYARLERECERLALVEQQLAYLDDELAHQLPEGTQERIDHLQKLKAVGAVGATRLILELFWRRFDNRRQVGACVGLVPQPYDSGESRVDQGISKQGNRRVRSLLIEMAWFWLRYQPTSAIAKWYVQRTSGKGQNKRGKRSAIVAVARRLVIALWRYLEQGVIPEGAELKMH

SEQ ID NO: 322389 - protein, 327 aa, unidentified
MPNIHDISFIGVDIAKNKLDICVYNGNFSSCEYNSYSNDLDGFNDFLLLLNSVNILKDIRIGFEATSTYMIALQKYLDNLKVKYILINPQRLSHYIKYKHSNNKTDKLDSYYIADYITTLNDKSFNSSHSQNKSLYQSYNAYLNLIITTETRIKGLNDSILSDEFTSLSLKNEIINLKSVLNSTKNKAQKELLIAIKISMPEYDLIKGDLVGVGDKTLLAVLPLIYDISDKYSLKQLQSFIGLNPVFKDSGSSIHKKQRVSKAGNSEARKMLYMSAVSSIRSNTELMIKYQRLLDNNKPKMVALVAISAHIFRAIVKKLNHYKALNE

SEQ ID NO: 322390 - protein, 345 aa, unidentified
METIYYIGLDVHKKTIAFCVKNVTGKIVREGTIKANRQSLTQWISTLPGCWMGALEATIFTGWIYDFLKPHAVELKVAHPQMLKAITAAKKKNDRADAEKLADLLRVNLLPECTMLSEDIRELRRVLRYRNLVVRLATQMKNKVSGLLMEVGAEYDKKRLHGRKYFTELLETIEDVPDSVKDLLQLSRGNLELFTAAQRRLTQGLRKQPLIRNRVDCLMSIPGVGEILALTWVLEIGDVNRFGNSSQVVSYCGLCSAQRESAGKEKRGPISKQRNKYLQTMLIEAAKLAPNWNGQLAELREKELTKGNRNRATLAVARKLVEYLLAVDRRGTPFIVEETQQERVA

SEQ ID NO: 322391 - protein, 438 aa, unidentified
MKKKAFRLLKPNAAGIDVASEVHYVAVPIDRSDTPVRSFTSFTDDIHEMALWLKSCNIDTVAMESTGIYWIQLFLILEEYGFEVFLVNARHIKNVSGRKSDVMDCQWIQELHSYGLLNASFQPDSDTRELRSYLRHRKSLTESYCKEVLHMQKAFEQMNIKLHDVLTDITGKSGQLIIKSILAGERNPEELVKHINSKVKASKQDIIKSLKGIWREEYIFQLRQAYELYLVFKSKIAACDNQIEKTLKSIEEKNNVYNTEQSSRGVYSKNRLGFNGTKYLKNILGVDITKVYGISELVAMEIISETGIDMSKWETKKHFTSWLNLVPNNRVSGGKLLKPQKSKKKNKAGQAFLMAAFALQRSDHWLGHYYRRMKAKNGPKVATKATARKLAIIFYEMVKYRKEFDPITVEDYTKQFRNNKLKYLTKQASKLGLQLVPV

SEQ ID NO: 322392 - protein, 479 aa, unidentified
MAMKRKGSSLNRKQRKELARRLRSEDPGLEVMHPNAAGIDVGNSAHYVAVRPDRDPEPVRRFECFTVDLHRMADWLQSRGVKTVAMQSTGVYWIPLFEILERRGFEVYLVNARHTKNLPGRKSDVQESQWLLKLHTYGLLSNSFHPTAEIRVLRTYWRQRGDHIQAISMCIQRMQKALTQMNVQLANVISDLSGVTGQRIVRAILVGDRDPKKLAELADPRIWASQEEIAKSLEGPWQPELLFVLKQEMAMYDVYRERISECDRELQRHLKGFEDGVAGESPKVGSTVGQPTAKASRATKRNKKAQGHAPDFNLGGELQRISGVDLTRIDGIDVMVAQTVISEVGLDMSRWKTEANFASWLGLCPDNRISGDRVLGKGTRHVVNRAATALRMAATTLLKSKSYLGAQYRRMRTKLGAPKAITAMAHKLARLVYRMLKYGQQYVDKGMQYYDERYRDQQIDLLKKKAATLGLQLVKTPVV

SEQ ID NO: 322393 - protein, 384 aa, unidentified
MKKQTENSTALLRYCVGIDVSKDSLQICLSAIDINGKTTVKGTSKMANKVSSFDGLLTWVAKHCKEKQLPVRYLMESTGVYHEQIAWYLFQNDLLVSVVLPNKSKNYLKSLGNKSKNDKIDAARRTARGLAQMGLEQTPSLWKPLSKNIYSLRMLTRQHQRLQELKNQSENQKHAILHSQISDKFIMKQLDKLIKLYDQQIDQIAQEMQNLLSKDLVLKNKIDQLCKIKGLGLLSVATIVAETNGFEGFENLRQLVSFAGYDVVENQSGLRAGKIARRPPEFQKKETRGRPRGRIRRILFLPAFNAVRFGEPACQALFERVFTRTRIKMKGYVAVQKKLLTLCYALWKKDVNYDPLFHSQHVKEFDYQDIKIVPASRTTQDESA

SEQ ID NO: 322394 - protein, 372 aa, unidentified
MTQSTRTLFVGIDAHQNSLAIAVLPQEAAAPEPVRVIANEPVRIGVFFRELLKRAAIESVYEAGCLGFVLQRQLESLGVRCVVAAPSRIPVLPGERRKTDRLDAQRLAIFLRGGQLTAVRPPSPELEALRSLVRTRQALQDDVVRARHRLQKFLLARGHIWNSGANWSARHLAWIHTLKLSLEEDRSTRDFLELELHLRLRSIQSLDERIAQRAECADVRDPVLALEAFRGVGALRALNVIAEIGDPRRFSSAEQAAAYTGMIPSEHSSGEKVRRGSITRSGNGRLRRVLIETSQHYARARAARSRALEARRAKAPREIAELARFADQRLIARYRALHHRKHTNVVKTAIARELVGFLWRALLLTEKAVMAN

SEQ ID NO: 322395 - protein, 304 aa, unidentified
MNGIGIDVSKRQLDVGTTDGKTLQVSNSRSGFAELDLWLQGHPAVQIVLEATGGYEQPVLDFLHNAGHPVVRANALRARKLAQGLGHMAKTDRLDAYALAKMAALVKLRSYQPLEPWQREMRDFVRARRQAMHALTVARQQQEMVGNRELRRLLQANITCLQRTVERLGKRISEQVSKQPQLAVLKSMKGVGPGLQAVLASYLPELGKISGKAVASLVGVAPMSHDSGTLRGKRSIHGGRAEIRQVLYMASMSAMRHEPRLRDFYQSLRARGKEGKVAIVAVMRKMLVILNARMRDAQGGSIPA

SEQ ID NO: 322396 - protein, 422 aa, unidentified
MLMTLFVGIDISLRKATCCFLNQNGKLLKKIFEVDNNISGFEKLKELIEILMLANDVPLIYIGLEATNMYGFHLLDYFSSTTFKYPVEVKLYQVNAKYVSRFKKAFPEKEKTGMVDCKVIAEYLRFGRFPAEYKPECLFLPLRRLVRYRYHLVKHLEKEKKIYMANLFLKFPGWVQNKPIKTLGKTALEVTGDFTLDQLVEMPLDQLAIFIAKAGKNRSPDPVAIAEEIQKAARESYRIRPELAYSVTFVLASISITISALKDNLKQVDKAILAETKGFINPLISIKGIGPVYSSGILSCIGDVKRFASHDQLARYAGLVWKRKQTGNTESQEKRIVTECDKYLRYYLVEAANSLQMHNENFKLFYQKKYQEVNKHQHKRALVLTARKLVRLVFALLSKNQLYDPLWIPQSSRLSELKQNCQ

SEQ ID NO: 322397 - protein, 474 aa, unidentified
MEEYPFLRPQTCLNFTKLPKTMAKVARKIKTKKGLRLKIVNPDAAGIDVSDGEMQVCVPEDRDGENNRRFGSFTCDLHEICAWLKACRITTVAMEATGVYWLNIFLILQDEGFDVVLANPLQVKNMMEEKTDEADAEWLMLLHSYGMVKPSFQPDSVARRIRNLTRHRSTLITAAGREVQHMQKAMELMNIKLSTVISDVLGKSGQAIIRAIIDGNHDPKSLAQKADGRCKASKEAIAKSLEGTWDEDLLFILEQTVELYDTYQEKVKSCEQEIEKLMMRYAGQVDLGKAEKLLRSNKRSTYKNAPDIDIEKYGYALWGVNLMAVPGVGAGALLQLIAELGYDFVSKFDTCLKFCKWCNLSPNNKITGGKLISSHIPRRKNPVGQILRQCANTVKDEKSEMGAYFRRMKSKDGYMQAIVATAHKIARIIYTMVKTKKEYNPKLVGCNEKELLERKIARTTRQLQKLNEKLEKVA

SEQ ID NO: 322398 - protein, 330 aa, unidentified
MNYSHFVGLDVGKKSFDACLVSSDKELSHHTFPNTPGGIEELLHRVKQHGVEVETALFCAENMGSHVIDLCLSSYQFHFPLALECPLTIKRSIGLQRGKNDRIDARRIARYACLHYRKLRLYQLPDKDLVKLRNWMVIRDNLVKQKVSSLKLLELTRETSGLADLVTAMTFLEKQLSLVKEKISYVEQEMEKIISSNIALLTNYQLLTSIKGIGPINAIVLLCVTGNFHRFSDPRKFACYCGVAPFEHSSGTSIRGKTKTSNLANREVKVYLTRAAITAISWDPQIKAYYKRKTGEGKHKASVINAVRAKIIARCFAVIKRKTPFVTLRA

SEQ ID NO: 322399 - protein, 410 aa, unidentified
MRRTFVDLTRQCLMKGGIILTYFVGIDLAKFHHECLIINHYGEVIIKSFTFDNTHHGFRSMLSALSSLDASESIKIGFEATGHYGTNLKNFLTHHGYDFMEIHPVLINQFSKSSSLRKTKTDRTDVALICSYLITVEFKPYPTQSYHTASLKSLTRSRDTLVKERSLQLQRMTNVLDLVFPEFKPFFKHSLASATCLYILNNYTLPSKIARMNLISYEKMSSILRHTISYARFLSLKDLAKNTVGVENDLLEFQLRNYLTLYTTLNQLILETEALIVREFSKIPTHLQSIPGIGIISAAGIFSEIDPIARFNHSDQLVAFCGLDPALYQSGESEFKGRMVKRGSSYLRQYVMNSTQMVILHNPIFYDYYLKKRQEGKPHRVALSHVAKKLIRIIYKLETSQINFDASKMI

SEQ ID NO: 322400 - protein, 316 aa, unidentified
MEAAVYVGIDVSKARLDLALGPAGELLSAANDASGIAALRERLLSLAVARVVLEASGGLETALVAELGAAGLPVVVVNPRQVRDFARATGQLAKTDALDARVLALFGERLRPELRALPTEQERELKALVARRRELVEMITAERNRLARAPKVLRKEITAHIRWLEQRLMERDRDLDRMLRGSPLWREREDLLRGVPGVGPVLCATLLAELPELGRLGRREIAKLVGVAPLNRDSGTLRGKRTVWGGRGQVRAVLYMAALVAVHHNPVLKTFYQRLLNAGKPRKLALTAAMRKLLVILNAILKTHTPWSEHAPLQNC

SEQ ID NO: 322401 - protein, 310 aa, unidentified
MKDSIGIDISKDQLDVHRSQTGASAQFSNNPAGFRALKNWIGNSSPDLLVYEPTGPYHARFEKTFAGRLPLVKVNPLQARRFAQAQGTRAKTDAADARMLARMGSALDLVPDAPAAEDQSDLKELQIARIALIKDQTRLKNRLKTQTLAITRRQTQARLAQIERHLTALQSEMESRIKACPKRTRAYAILRSIPGIGQVAATAILIACPEIGALGKKQVACLAGLAPMTRQSGTWRGKAFIQGGRKNLRDALYMPALVAFRHNPDMKDKYETMINAGKPAKLALTAIMRKLIELANTLIKDDREWKPKLA

SEQ ID NO: 322402 - protein, 388 aa, unidentified
MFKTVERPDAPAAIRMDIGAIFVSLELSRSTWLLTSVSPGAAEKMSQHATPAGDLRRLFECLAELKRKALARTGKTYPIIVIQEAGLDGFWIHRALEREGIESHVVDAASIAVPRRRRRAKTDRIDGKTLLRTLMAFKRGEPRVCAMAKPPSVEEEDRRRLGRERKTLIAERVEHVNRIKGLLFTQGAIDYQPLRRDRRARLEALRTGIGDPLPARLKDLISRELDRLELLLAQIKAVEAERDALLAEQSRQAPAAAGMLLAFKGIGPEFAAVLWLEGLFRSFANRRQVAAYAGLAPTPWRSGSIAREQGASKAGNPRLRATLIELAWLWRRHQPKSALTLWFEDRVKANGGRVKKALLVALARKLLVALWKYVTTGLVIEGAVMTTA

SEQ ID NO: 322403 - protein, 357 aa, unidentified
MKYIGCDFHPSFQQIAMLDLETGERVERRLLHAEEARVFYQELRGPVVVGIETSGNTHWFESLLVRCGHQLWIGDAAAIARQEGRKQKHDRRAAALILKLMVENRFPQIWVPTVAERDLRQLLMHRHHLVRMRTRVKNQLQHIALNQGVQKKYKLWTQAGLKVLRELELEPWTRLRRDTLLAMLEELEQKIQPLERAVEQEAEARPAARLLATHPGVGPVIALATVLTMGEVKRFENSRSWVSYLGLNPSERSSGEKRRLGAISKQGSPFLRFLLVQGAASAVRGDKNLARVYARLKAKKHHGVAKVAVARKLAVRLYWMARTQKPYPEVVRMQGSQSLPVAEVMAVRLSRPPASRQ

SEQ ID NO: 322404 - protein, 348 aa, unidentified
MRFYHREHMYYCGVDLHARTMYIWILNQTGETVFHRNIRACPEAFMKVIEPFREDICVAAECTFTWYWLADLCAEENIHFVLGHALYMKAINGAKTKSDKLDAEKIARILRGGTFPIAYVYPRKMRSTRDILRRRMHLTNKRSELLVHIENTNSQYNLDKFPKKLTYRSNREDVASRFEDSSACKTIEVDLHLLDCYDKLLRDLELYIVRTARCHDADTLHLLKTVPGIGKILSLVLLYEIHDINRFPSVQDLASYSRLIKPPRESAGKKYGSSNTKIGNVHLKWAFSEIACLFLKGNDRGQKHHNRLVSKHGKSKALSILSRELGRSIYFMLKRREPFDMDKFFNQR

SEQ ID NO: 322405 - protein, 393 aa, unidentified
MRFVGIDIASETHVVAAVDERGEALVRPTAFAEDARGYEKLIRLLGSPDQCLVAMEATGHYWQNLFARLAAEGFAVALLNPLRTRRFAEGDLERTKTDAIDAVGIARFAQQKRPAPTRLPDSATQELRELVRLRDRLTEDFTARVNQLHRLVDLGFPEFTRFVKTLDSELATAVLHEYPTARAFIGVSARRLAKLCYDGRHKVGPELAQALVEAAKVSVGRHHAEAYRVQVRYACEDLDVLRRRLRDLERDIERTLKTHEVGTLLTTIDGIGPQTAARLVAELGDPAGFRDAGALAAYVGVIPGIKHSGKHKPTRAGLTSVGNARLRAALWMPTLTAVRRNPWLRAYYLRLRAAGKLPKVALVAAMRKLLCAVYSVAKHRRPFVPQLAQEATP

SEQ ID NO: 322406 - protein, 325 aa, unidentified
METIVASPGIGIDVGKRELVTCLRRLNGVTEPPATFTNSSIGLKKFVVHLGECGVEKTTPIVLESTGPYHWPAARYLADNGYLAKVINPLHTKHIARYSIRKRKTDKIDASQLAFLASQQYGYTFVETKEMAQKKALIRHYWKLRLTAGSLSIHERYLKQHRGITAASVTKYILERCETLKARIVKEWGTGNDVKYLDSIPGITPFLAITILSELEPLDRFQRIEQIVAFAGLDPAVSQTGGKPGIHGKLTKRGSRTLRHVLYLAAMGSFRCAWRETYDSYRKRGLKHTETLCIISRKILRTGVALLKKRRVFDPNYLTKHDLST

SEQ ID NO: 322407 - protein, 318 aa, unidentified
MTNTTTLTAGIDTAKDKLDVAIHGQTAVWTVENSLPGWKRLAGELAKAGVQRIGIEATGGYERGVTRHLQGAGFTVVVLQPLQVKAFAKLHLRRAKNDRIDAILIAACTVAIDAQNKLPPDPRFDALTDHLTFIEQVEEDIARYKTRLEHVSNKRLRRSIDADITRLERRRTEELKRLIGAMRGHADLARRFDLVLSVPSIGERTALALVLRMPELGQVSREEAAALAGLAPFVHQSGKHQGETHIGGGRARLRHSLYAAALPGAFRWNPALKDLYARLMARGKTHKSALVACARKLLVFANTVAARGTPWLNKPAGA

SEQ ID NO: 322408 - protein, 371 aa, unidentified
MEESSKTLYVGLDVHKESIAVAYAPEERGTEVVSLGAIGTRQCDIDKLIRKLQSKGAPLVFVYEAGPCGYWLYRYLTRKGLSCHVVAPSLIPRKPGDRVKTDRRDAALLARLMRSGDLTSIYVPTLEDEAIRDLSRGREDAMRDLKATKYRLKAFLLRQDIRYEGRANWTAAHLRWLSEVVCPTPAQQIVFQEYVRAVTEQQERVQRLETELHEHVKTWRLFPVVEAIQALRGVELTGAVIWIAELGDLTRFDTPRQLMSYLGLTPSEYSSGERRRQGGITKAGNTHARRALVEGAWAYRYPAKVSRHLQLRLEKLPAEIQAISWKAQVRRCKRYRQLIARGKHANQVVVAIAREMAAFAWAIARTVPLTP

SEQ ID NO: 322409 - protein, 322 aa, unidentified
MTRATIGIDVSKKKLDVALLFGNNESRKKTFTNDHEGFERLIEWVRRYHSGDMHACTEFTGIYDESVAEFLYSKGYTVSRMNAMAIKSFAQSKLTRTKTDAKDSMVIAQYCKLYDPSPWTPDPLYIKTLKDLSRTLETLKDDYQLICNRLEKYKIRESPAKKIWQDCLTEAGKKVKDVEKQLDHHIKDHPDLAEKGDLLQTIPGIGKTTAWILLAEIPDIRNFKDARQLAAFAGLTPRQRQSGSSVHGKSRLSKIGSTRLRKALYLPAVVAKTYNPIIAVFFNRLIQRGKCKMSALGAAMRKLLHIVFGVLKNQLPFGEKIS

SEQ ID NO: 322410 - protein, 339 aa, unidentified
MKYTPVGVDIAKHLIQVHFIDEHTGEVIDKQLRRQDFLMFFCNREPCLIGMEACGGSQHWARELTKQGHKVRLLQARFVKAFVMGNKNDVMDARAIWMAVQQPGKEIAVKTEEQQSVLVLHRSRRQLVKFRTMQINSLHGTLLEFGETIHKGRAAMEREFPEALERMKERVPPYLITVLENQYNRLNELDSLIEDIEKQLTSVAKQNETCKRLLDIPGVGPLIATAAVATMGEASAFKSGREFAAYVGLVPKQTGSGGKIRLLGISKRGDTYLRALFIHGARAAALLTKEPGPWITELKKRRPASVAIVAMANKLARTVWAIAAHGSKYDKNHVSIRPY

SEQ ID NO: 322411 - protein, 341 aa, unidentified
MGKATLQHSYQHFLGIDVSKDTIDCLLRPSEAYSQWTNRPEGFQRLHRWLIQHQCNPAHTLICIEDTGIYSDRVHRALADFGWQCAVVKTTATKKVAPEHHRKDDRFDAGLLAEYGQRYADRITLTQPPKQVIKQLQQLYGERQRLIKARGATQNRSQQSSHGVVDSELLAQQWARQLQLYNKQIDSLESRMRQLVADHSGLHRYNKLLESIPGMGQVTRWLWLILFYGQEQLNHKQIASRFGFAPHRFSSGSSVRGKTRSSGHGNSQMRSCMTMVARSVSHHYERFARYKQRKLEEGKPWPVVRNNLINKMIKITCAIWNSGQPYRQDYESRFNRQKNAA

SEQ ID NO: 322412 - protein, 414 aa, unidentified
MEQKLIYLGIDWADDHHDIVITDDSAKTLNQFQIDHTPDGFALLHATIANYQKSPADVLIAIETNRGLLVHELIRTGYTVYAINPKAVNRYKDRHVLSKAKSDILDAQALAHLLRTDRHRFKALVPLPEDYRLLDRFCGDLRKLIDEKSRIVNQTISCLKEFYPKALELFSLNSQIFIDFLKAFPDHDTLRACKKKTFLAFIKKHRYPYPGKIEELWETIQSSTLQADTVTARAGKLRLLMLLDQLENLKIHCTHYEQEIQKILDTLPESNSIQSLPGVGDRLAPELVAALGPNGKDTHHRFHSAEEIAKLSGCVPIVKQSGKWEKVSIRHACVRSLRRTFHDWAFTSLKSSTWARAYYDYHKARNQSHFTILRNLGKKWIKILFAVWSKGTTYDEALHIQNLKARNIPWAMAL

SEQ ID NO: 322413 - protein, 345 aa, unidentified
MSTVGGLDIHRKQITFDYLDTVTGEVKRGQIAPADREHVRAWLARFAGQDDAAFAVEGCCGWRYVAEELAAAGIAAHLGEPADTAALRGRKRHAKTDKTDARHLRALLAEGRLPECWIPPPHILEYRALLETYHDLRTEHTAWVQRIHAVFFHQGGPPLGEGVLRTEPGLEALQSAAAAHLSPAGQQQVATAVDMLAATEAQLGPLRHQLRQAAAHLVGAKVLAARLYGVGPVTGLALTCWLGGKDRFSSSRKAVRFTGLDITVHSSDRKGPPGRLSRQGPPVLRWAVYEAGKTHARASAPDHAYYAAVADRKNTKRAALSEARKIVRQACHILTELGDDALTAA

SEQ ID NO: 322414 - protein, 371 aa, unidentified
MVWTAPYGISGARMRLLRSQTREPSVNQIIRIGMDTSKYFFQLHGVDTSERPVLRRKLRRNEVLAFFARLPPTVIGMEACAAGHYWARELRRLGHEVKLIAPQHVRAYIKRNKNDGRDAEGLCEAMSRPTMQFVPVKTDEQQAALMLMGVRQQLMTRRTQLSNAIRGYAAEFGLITAKGLDKIEPLLARIAQDESLPALAREMFTLQGRDYARLQVELKAVEARLMAWHRANADSRRLAKIPGIGPIGATALVMKAPDPGLFPSGRHFAAWIGLTPKDHSTAGKTRIGKITRAGDEMLRSVLVAGATAVIQQAKNGRGRPSPWLLALLARKPPKLAAVALANKTARIAWKLLTTGESYDGARMPVASKLAA

SEQ ID NO: 322415 - protein, 345 aa, unidentified
MGTPTDRPAARLFVGVDIAAATFTTTWSRDTQPAVRPLTFNQTPTGFAAFQQQLHQTDISPNATLIVMEATGSYWITLAVTLHEAGYVVSVVNPARVHDYVKSLPRKGKTDALDAGYLTQFAAERRPDPWTPPPAVYHELRQRLAARDALLEMRKLAQNHRHALSQWPIVVGSVLTQLDESIADLNRRMGQLEAELTAILQDGAWAESAALVLSITGIGMLTAAWLLVTTLNFTIAPTAESLAAYAGLAPLPHDSGSSVRGRHQLGHGGNRRLRTALYLATLSAARHNPVIRPFYQRLCAAGKPKKVARCAAARKLLQLAWAVVKKKRPFDPLYQPPVRLGEQAT

SEQ ID NO: 322416 - protein, 422 aa, unidentified
MLKETQDREEIIERVAALDIGKAELVACVRVPSADRAGRRAQEIATYSTMTRSLLGLADRLRVLGVTRVVMEATSDYWKPVFYLLEAHELEPWLVNAKDVKHLPGRPKTDKLDAVWLCKVAERQMLRPSFIPPVPIRRLRDLTRYRLDLVNTRTAEKNRVEKLLEDAQIKLSAVVSDIFGVSGRQMLAALIAGERDPKVLAQLARARMRAKIGVLEEAFVGHFTDHHAFLLRTILARIDETSADIAAVEAKIAELIAPFVQAVERLDEIPGVGVTAAHVMIAEIGLDMSRFPTAAHLCSWARLAPGIKESAGKKKGRGSTGHGNPYLARVLGEAAIAAAKTDTFLGDRFRRIARRRGKKKAIVAIGRSILVIVWHLLSDPQARFHDLGPDFYDTRLGPDRKKRSHVRQLEALGYKVTLELAA

SEQ ID NO: 322417 - protein, 424 aa, unidentified
MKVTYQTCCGVDVHKSFLVATIVKTTGGIEPSYQKKRFSTFNNSILEFKQWLLDNDCHDVCMESTGKYWVPVFNLLEDEINVVIANPKWVKAVKGNKDDTKDSKWIGDLFRLGLVKGSYIPCKIVRILREYTRYRYKLVSCRSSEKNRYQNALTVCNIALDSVVSDIFGKSSTSIIDYLLEQSGTSINHEEIASKILKRLKSKENAVIESVEGYQMTDSQKYRMRLVRAHMDYITAEINDVDKMIETLISSNIDFENAVQLLCTIPGVKRDSAITIISEIGTDMTHFSNSKRLCCWAGLTPGCNETGGKKKSVRITRAGVYLKPALVQCAHAAVKSDKSPYYKKKYESLVKRRGKKRAIIAIARMILTAIYQMLSTGEQWNPSDLYKIDIPAPLVEKQKAKAIKQAKNLLQREGILPPDEPLAS

SEQ ID NO: 322418 - protein, 368 aa, unidentified
MGEITRGVPVRVGADLAKSVIQVDGVDAAGRRVAAKALRREQFLGWCKQLPPGCIVAMEACSSAHHWARKLRALGLDARLIAANFVSPYRMEGKSGKNDATDAAAICEAASRPNMRFVPIKSCEQQGLMSLHRVREGFKEERTACINRIRGVLAEFGLVFGKSPKTLRSVLADVLEDASNELSTQARWVLQRAFEHWRELDEHLRWCDRQVGAHVRSDPAARRAARITGIGELGASALVAGVGEFKQFRSADQFGAWVGLVPRQNSSGGKTSLGRITKRGDDYLRTLLIQGAKSAVMSAHKRDDPVSRWLVQLRERIGWQKACVAMANKNARILWAVMTREHGFDPQHLSVKPLAKQPTAQAPSRCAA

SEQ ID NO: 322419 - protein, 417 aa, unidentified
MNQNVYAAYIGIDWADRKHDIYLYDCTTGETEESVIGSQPDAIAAWVEGLRKRFGNGLLAVCLEQKRGPLIYALCQYENLALYPINPRTVANYRKAFQPSRAKSDPIDARILVELLQKHRDKIQAWQPESAQMRALRQWVEARRMLVGEKVRLTNRLTAALKNYYPQVLDWFEDKDTQVFCEFLEHYPTLKAAQAATESELTQFFRSHHVIRRSAITRRIEQIATSGIPLTEDPGIVEPMQWLVQTLIGQLKPLLLRLTELTLKIDQCFKALPDSDWFAALPGAGEHLAPRLLAAFGEERSRFDNAQQMMCYFGIAPVKESSGKKNWVHWRWSCPIFLRQTFVEWANQSRHHCAWAQVYYRMQRAKGNAHPAAMRSLAFKWIRILFRCWKNREAYDEAKYVAALKRKGSPIAELLVG

SEQ ID NO: 322420 - protein, 409 aa, unidentified
MHVVHPVCCGLDVHKSVLVACVRRDLGGGRVEKETRTYGATVRDLERLAAWLVERRCPVIAMESTGVYWKPVYHVLQTAVEVIVGNPRDMTRRPGKKTDKIDADWISELLAHGLIRPSFVPSPEISALRDLTRLRVTLTQTRSQAKNRVHKLLEDTNLKLSSVVSDVFGVSGRRMLAALVAGERDPQRLAQLAVGTLRKKIPQLELALHGRFTDHHAAMIQMALDQIDLLTRQIAETDQRLARLTTPYTAALQQLDTIPGVDETAARSILAEIGPDMSRFGGDKRLASWAGICPGNDETAGKRKSGKTRKGNRWLRRVLNQCAWATRKTDTYLGRTFRSLQARIGGKRAAVAIAHKILVIGYHLLDQGTCYEEDRYLRTNPRLEARWRTNAVHTLQRLGYTVTLDSALA

SEQ ID NO: 322421 - protein, 348 aa, unidentified
MAHFVGLDVSVKETSVCVVDDAGKVVCERKVPTEPDDIAVLLTSVGGDYVRVGIEAGPLSQWLVNGLSEAGLPVICVETRHMKALLQAQQINKSDRNDARGIAQMMRVGLFKPVHVKTLAAQEQRMLLTSRKLVQRKLIDIESDMHGTLRNFGLKVGVVSTIGYEARIRQLVESFPRLAAIVEPLLTVRRVMRQQLATLHKMLLDTVRHDPVCKRLMTAPGVGPVVALTYRASIDQPQRFVHSRAVGAHLGLTPRRHQSGEVDYDGGISKSGDTMLRTMLYEAAQILMTQSRHWSWLKAWGMKIAQRRGMRRAIVAVARRLAVVLHRMWTDGADFRWGSEPGTAVAVA

SEQ ID NO: 322422 - protein, 357 aa, unidentified
MERNYIGKTVFVGIDVHKKSYSVYCICERTKVKSWSMAANPQELIQTLKKNFSGARLCTVYEAGFSGFALHRELISAGIESIVVNPGSVETASRDKVKTDKRDAKKLSEQLSDGRLESIYIPSLEEELLRLNTRMRQTLVDDRKRITCRIKSKLFQFGYNHLVPSNKSANATWIEEIRDNPEYPVELRAIIDYWCNQWVKLTEDIKGINKEIAKQSQSNKRCANQEAIYRSTPGLGNISAKALSRELGDLQQFDSNKKVYSYLGLTPSESSSGERRKQGGISHCGRPYLRHLLTEVAWRATNKDKELADKFAMLSYRRGKKRAIVAIARILIGRIRTCFKNGTLYQEQVLAEKDIDA

SEQ ID NO: 322423 - protein, 340 aa, unidentified
MNATTYGLDIAKRVFQLYWVDPQTGEIANRKFGRDDLIAFLARRPAGRVALEACGSAHWWARKIRALGHEVVLLHAQFIRPFVQTNKTDAADARAIWTAVQQPGMRTVAAKTEDQQVMLSLHRMRSLLVKFRTMQINQLRGLLYEFGVAFRAGRVAGLDEIRERMAELEDTLPRSILINLLEQLRRINLFEEDINQLEKRIGAWQKHEAACRAISEVPGIGRLTATALVATIGDAKTFRSGREFAAYLGRVPRQNGTGGKIRLGSISRRGDPYLRTLLIHGARSVLCHTKVPTAWQKAIQVRRPANVATVALANKMARIAWAILAHGTSYEAHHVSNRPA

SEQ ID NO: 322424 - protein, 412 aa, unidentified
MEVVYPCCCGLDVHKKSITACVLWAGAKGKSRKEKRGFGTFTHDLLRLADWLGECGVTHVALESTGVYWKPVWNILAEQFEVLLVNAQHIKAVPGRKTDQKDSEWIADLLQHGLLRGSFVPPRPTRELRDLTRYRVSLAQEINRIANRIQKVLEDANIKLASVATDALGASGRAILEAMLAGEQDSARLAEMAQGKLRNKIPELKLALEGRMTEHHRFLLRQLFDHLHFTESKLSEIEQEIDRRMRPFEDQVARLCTVPGVDRVTAWGLLAEIGLDMNQFPSEKHLSSWACLCPGSFESAGKRLSGRMRKGNVSLRRCLSQAAWAISMTKNNYLSALYRRIAARRGAKRAIMAVAHALLVIAYHLLKRKEDYRELGADHFDRIDVNRIRRSLVRRLERLGHKVTLEPLAQTA

SEQ ID NO: 322425 - protein, 361 aa, unidentified
MLITIAAANRQFIGYFNPSYNVVYRHLIVSSFFFLVMGTYLGIDVSSDFIHIAYQTDKDWVYAKVANDSKAIDEWISSMPADIHVIFEYTGTYSHRLTYGLSLRERTFSMITPSQSKGFATSLKNKAKTDAQDAKVLALYGSKMQPEPTTLTDEKIHQKKQIYKHYNDLVAQKQAVSNKIHALTFDPRAAKDVIESLETISKVYQQQIEAFQAQLFDLNDDEFKQIKDKLMQIKGIGEKAATGIIIQTNGLKNFHSAKALAAFLGLVPTTKQSGTSLKSRGKLVNTACKQLRTVLFCAAQSAARFNLDCKELYTRLMANGKTKKAAKIAVAHKLIRQAFAIIKNNTVFQNDFQANKIALTK

SEQ ID NO: 322426 - protein, 337 aa, unidentified
MFQLGIDVSKKTLDLCLLREGVKGRVKNRKLKNDFNAVGTVVSLLRKQHSEPGDVHIIMEATGVYHESLAYGLHDAGAKASLANPHRSREFARGMDILTKNDKVDAYMLACYGALKEPEPWEPPPENVRYLSALLRCHNALVTDSSREKNRLEKCRATDTPAAVAESIENVLRNLSAELQRLETLIQGHLDQHPELKKDFDLLTSIKSVGFQLGLNMLVILRSHRFGTAEQAVDFLGVVPAEKSSGTSVRGQSRLSKIGPPEIRAKLYLASLFGMRFDPAMKAMYERLCQRGKTKMCAIGALMRKLVHWCYGVLHTQQPFDAEYRSSDAHSVCKAAC

SEQ ID NO: 322427 - protein, 433 aa, unidentified
MKEGTGEDNVYQQYHTPVGQITREQLKLKHAGATKRYIGLDLSKQSCYVCIINKQGEVEKHRSYSMRSNQRHKLYETLQAGDVVLMEASTGTFNIARAMNKLSGVVACVINPHTTRINETKKKTDKEDSLFLARLIARTPVVELSLVSIPSDQEMANRETISYYQHLKKQHTQGINRMHALFYEKGFPEAGKAYNLHTKGGRAAAIEKYIGSDRVLATTKRLLKGYSKQLTLLEQQMESEDTQFAKIVKQDDRTAAILGSIPGVGLKSIAAFIAFVGDINRFSSAKQLASYCGLVPRVSQSGQKNSTGKITKEGQAALREYLVEAVLTIQNTKFDFPLKRKYLEMKQRMNGRKAAVAIAKKLVTIMYSMLKNGTVFFVEKEEERKAIATYQSRKRIQSLGGYYKICNSCKEYSEMVRTTNTLHSNEIGVLKFI

SEQ ID NO: 322428 - protein, 347 aa, unidentified
MDYVGVDLHKERSWFYIMNEQGKKISSKSISNELGVLKEYFQSITKPFTLAVEATYNWYFFVDLAEEYADKVYLANSYELKAFAKRNKKTDKIDARLIADILRKGYLPSVHIADKETRELKESLRYRMNLIKDRSKAIFRLKALLDKLGMQATGDFTTNKALDNIDFTSIPTGYHSLVNKYIEQLKWYWEKLWGYRKNLEKRLITDQDILNLISIPGIGFFSAALIKTEIADISRFKNFNRLCSYAGLAPSVHQSANTCRRGPLSKNRCKNLQWILLENSIHFIHAMPSIAKKHERIKQRKSYNTAKVACARDMLKAVYHVLKDKRKFFIKKNDVIRTHAISALSGV

SEQ ID NO: 322429 - protein, 388 aa, unidentified
MQIVTDRSQAPTAIRTDLGAIFVSLELSRSTWLVTSLSPGGGEKMSKHMIRSGDVAGLWSRFSQLKDKALDRTGQVVPIIVIQEAGLDGFWIHRLLQSERIESHVVDPASIATSRRRRRAKTDKIDGEALVRALLAYKRGEPRVCTMVRAPTPQEEDRRRICRERKTLTAERVEHVNRIKGLLFAQGISDYEPLLRKRRERLEELRTGDGRPLPEHLKAQIRRELDRLELTLQQIKAVETERNAMLSPSDDGTPAPGAMLKNLKGIGPEFAGVLWSEGLFRSFSNRRQVAAYAGLAPTPWRSGSVAHEQGVSKAGNPRLRTTMIQLAWLWVRHQPRSILTLWFHQRTQLNGGRVRKVLIVALARKLLIAFWKYVTAGVVLEGAETTSA

SEQ ID NO: 322430 - protein, 452 aa, unidentified
MSTLYVGLDLAENTFTACLMLEDGTEPTKRCTFPHDIPGTEMLVEKILMLAQAHQCTRLKVGVEATGLLWWHIASTLPQHPSLKALRPEAFCLNARQVANFKKSYAEVHKTDPNDAFIVAERLRFRGLPHPFAPDEAYLALQRLSRHRFHLVRDLASEKNRFLNHLFLKFPSFLQEEPFSDTFGAASIALLTEFLTVDEIASQSVEALAQFLREKGCRRIPDPEKTAETVQRAARNSYRLHRCLTDPVNMILSMTVANIRFFEEQIRVLDRAIARELGVLPGAQVLRSVPGIGPVFAAGILAEVQDVTRFASDDSLAKFASLIWQRRQSGKFEADETPMLHSGNTYLRYYLVEAANSVRMHTEEYRAFYESKYNEATTHRHKRACVLTARKLVRLVYYLLLHGQLYQPPQSRKEKPADPTVPVLPPGELARHIVERRRGVKRRAASACQASS

SEQ ID NO: 322431 - protein, 357 aa, unidentified
MESQEVKYVGVDCGKKSIEVVRINSENSLERRQFSTTESGINNLLQWLTLNDIVGLEAGSQSFRIAKSILNKGVQVIVLNPGNLATIYQSLKKTDKEDSLKIARLIQRFPIEELPVVPIPNDEEEDNRRLCTEQENWTRQLTQSKNRLHSLFTQAGLTQITKKHLRTKANREISVALLPSRYQKEAERILKVLDLVEQNLKLIEKEIQEALKKNKAYVQTIMSMPGIGMITSLAIMSYMGDCKRFSSAKQAAYYAGLVPRVDISGDTVRYGRIINRGCHSIRRVIVQAAWSLVRCQHGGKVKEFYQRLYLKKGAKKSIIATSRKMIEVLYVMIRTGKLFDSMPENILNRKLTQYGLM

SEQ ID NO: 322432 - protein, 397 aa, unidentified
MDAAGRRLAAARLPEGVAGITRLHEMIGAHLGEDAGAGEDAGAGEVAIGIETDRGPGVSALVAAGYTVYAVNPLQAARYRERHGVSGAKSDKADAHTLADMVRTDAHQLRPVAADSPQAEAIKVVARAHKTLIWERTRHTLRLRYVLREYFPAALEAFDDLAAPDTLELLAKAPDPASAAKLNRSQIRAALKHARRRDIDMKTTRIQAALRSQQLGRAPVITAAYAATTRSIAAVLATLTEQINTLRGQVETHFGRHPDAEIILSQPGTGVLLGARVLAEFGDAPGRYADAKARKNYAGTSPITRQSGKRKITHARFVHNDRLVDALMSQAQSALLASPGARAYYDKQRARGLDHHAALRQLANRLVGILHGCLKTRTLYDEATAWSHHNQDQRTAA

SEQ ID NO: 322433 - protein, 354 aa, unidentified
MSQTLNAAIAVIGIDIGKNSFHIVGHDARGAIVLRQKWSRGQVEARLANVPPCLIGMEACVGAHHLSRKLKALGHDARLMPAKYVRPYSKGQKNDFRDAEAIAEAVQRPTMKFVATKTADQLDLQAMHRVRERLVSQRTGITNQIRAFLLERGIAVRQGQRFLRAELPRILATPPDVLSPRMVRVIEGLAGDWRRLDERIEGLSGEIEAIARQESGCERLMSVPGIGPIISSAMVAAIGTGDAFSKGRDFAAWLGLVPKQMSTGDRTILGKISKRGNRYLRVLFVQAAWVVLIKPMSWERHGLKPWIEAAKKRLHRNVLAIALANKLARIAWSVLARGRSFEARTITNVAAQAA

SEQ ID NO: 322434 - protein, 341 aa, unidentified
MQDREPVTAFPAAREVQVQESEAVFIGIDVSKAHLDVAVHGEPEVRRVTNDEEGIRDLVSSFVELGPSLVVLEATGGFEMPVAVALAAVQIPLVIANPRQTRDFARSTGQLSKTDAIDAQGLALFAARVRPEVRQLPSEEAQALDALLARRRQIIGMLTQEKNRLGFALGPVQKGIKKHIAWLERQLADVDADLDARIRNSPVWAAKSDLLQSVPGVGPNLSRTLIAELPELGSLNHKQIAALVGVAPRARDSGKFRGKRMIWGGRATVRSALYLSVWSACKWNPVIRPFYERLRDQGKPARVAQTACMRKLLIILNAMVRDGRSWDPSVPLGQLKLQHSC

SEQ ID NO: 322435 - protein, 335 aa, unidentified
MVEGTEGSHHKEGSTKMAKRITICAGIDTGKSKLDVALDGSGEQLQVENTSEGHGVLLDWLRQHRVKRIGIEASGGYEQAVVAELRRKRFVVVVFQPAQVRAYARFQLQRAKNDKIDAALIAACTVAVRKIHAAPDPRLLPFAERLTMIDQTSEDIARLKNRLESCRNAHIRELWKQEIARLSKREKAELAALAAAIRQHHDLADRLRLIGSIDGIGLKTAVAILVRMPELGQITREQAAALAGLAPYDDDSGEQVGARHIEGGRERLRRALYAAALPASFRWNPHLIALYQRLKAKGKEHKRILIACARKLLVYANTVVARGTPWQDQPFLGST

SEQ ID NO: 322436 - protein, 297 aa, unidentified
MKKVSTAALKQSRNFSQPQLSIGLDLGDRSSCYCVLDETGRIVMEQKVATTPKALQAAFGAMPRSRIARETGMHSPWVSRLLAELGHEGIVAHARNVRLIGESRKKDDRLDAQRLARLARIDPGLVSPVKHRSAQAQADLTVIRARAGLVRARTARVNTARGLAKSYGERLRGCNVRHRNPEKAEGLSPELRSALEPLLAGIESLSERIHECTERIENLAREKYPQAARLQPIKGVGTLIALTYMLTLQDPHRFRKSRDVGGYLGLQPGRRNSGQSEPQMHISRVENPAPRPHAGLS

SEQ ID NO: 322437 - protein, 346 aa, unidentified
MEQIIRIGMDTSKHIFQLHGVDAAEQVVLRKKLSRKQMLEFFAKLPATVIGMEACGGSQYWARELSRLGHEVKLMAPQLVKPYVARNKNDWRDAEALCEAMSRPRMRFVPVKTAEQQATLMLVGIRDALIARRTQLGNAIRGYAAEFGLIAAKGLEKLEALLARIAADDSLPPLARELFAVQERDYARLQDELRAIEARLMAWHRADPMGRRLAQIPGIGPIVATTLVMKTPNPHAFRSGRHFAAWLGLTPTDHSTGGKTRLGKITRAGDEDLRRLFVIGATAVIQQARRGRGRHSQWLLTLIGRKPPKLAAVALANKVARIAWKLMVTGESYDAARMNADPALAA

SEQ ID NO: 322438 - protein, 467 aa, unidentified
MKALSACGASTRRQAVRAGQQVSKVKVSNHHFGENPTMTRRKFTPPDAVLVAIDVSKNRNDVLIEIPGKTRRRRLIVPNTGGEHDRFISLLNSLGRPVIAGFEATGNYHRPLAYRLLQAGVGLRLVSSVALARTREALHNGWDKNDPKDAQVILHMLKIGATQVYLDPIDAGINDIQELSKTHEIVSKAKTELWHRLLTHYLPLYFPEAARFAGNSRSDWFLAFLGQFPTPASITSYEKDAFIDAAWSVVGKKVSKARLLGDIYQTAQSSIGLPVSLDSPAITMFRMVIAEGRSLIRQRDAIEQQAHAALAENTDYQRLRQIPGIGPIIAMTILAEAGDLRRFRHHRQFLKFCGLDLATHQSGQFRGQTRLSKYGNARLRRAFWMAAQVAIRQRDNSFRAKYERYIAKDRDNSDLRRKALTAITAKMARTAHALIKTGADYRPFFEGPIPSGRTSIRVGREGALATL

SEQ ID NO: 322439 - protein, 356 aa, unidentified
MEEFSKNYFSEIDIFIGLDVHKKSWDASIYVEKTFFKSISISPPSTKIIIDILHKNFPLGKYHVVYEAGFSGYWIYDQLTEAGIDCVVVSPADIPMSNKDKKFKTDRNDSKQLAQKLRAGLLEGIYIPEKIQREHRVLLRLRDKLVRDRTRSKNYIKSNLMFFGKTIGIDYVDNKSWSTKFIQGLSRIEYLTTQGKDVIEKLIKMIKVYNEEIKKIDKKILELSKTEQYKQDVKILISVPGISILSAMTILIEIGNFSRFEDTNKLKSYVGLIPQEHSSGEKEIKTGITRRGNKFLKKIIIEASWIARRKDKTLLSRYTKLTKRMRGSKAIIIIAGILLNRIRSIMRTREQYKIAA

SEQ ID NO: 322440 - protein, 387 aa, unidentified
MAKQNDLSRCLVTLEQDATVIAVIEIGQSSWLVAGIVPGLERNPLKKLSPDQDALLQLLHRWQKEAVQAGHTIKRIAVAYEAGRDGFWLARWLRAREIEAYVIHPSSVPVSREHRRAKTDRLDTELLKRAFLGWLRGEPKHCSMAAIPTLADEDAKRPGRERQSLVGERTRIINRLKANLARLGIRSFRPNLAQASSRLEALRTPEGSAVPTNTLAEMQRDMNHLRFIKQQIKEIETSRAKRLAAAPNEQRHAMVRLLARVVGVGIDTADMLAQEVFSRNMRDRKALARYAGLTGAPDESGKKRRERGLAKAGNARVRRGMIELAWGHLVHQKDSALTAWYRKRTSDARGGTRKTMIVALARKLLIALWRLVTTGETPAGLLLRPAA

SEQ ID NO: 322441 - protein, 341 aa, unidentified
MADAKLIGIDLGKYSFFVHAQDARGQQLWRRKFTRHQLIMMLAQHPPCTVAMEACAGAHWLARKLQSFGHQPRLITPQFVKPFVKGNKTDFGDAQAICETASRPSMRFVAIKTPEQQTLLALHRVREALVSERTATSNQIHAFLLEFGISLPTGARAIARLPALLDEPAHELPPRLIATLLRLHRRYGQLGNEIAEIETDLKAQLAEDEAAQRLLTIPGIGPITASSLIAVIGDAHAFRHARDFAASLGLVPRQHSTGGRATLLGISKRGNAQLRSLLVQGARAVMRYIERRHDALGTWVQSLLRRRHSNVVACALANKMARIVWAILARGGEYRAQPSPA

SEQ ID NO: 322442 - protein, 355 aa, unidentified
MNNFSMSYRGKKVYIGIDVHKKSYVFTAICEDEIIKRARVDASSANFIQQLKDWFKYAQVYSAYEAGFSGFHLHRQLVTAGIKNIVVNPASIPVKANDKTKTDKRDSLKICQTLVAGMLKPIYVPSKKEELARLLPRTRDQLVKIRTKVGNQFKSKLYQFGLMEGQDDKIISQKFIDETLERTDLDIELEMVLEILAEQWKSLHKQICKIEKLMETQASKEPKIEKIYRSVPGVGEISSRILSTELGDMKRFSNQKKLFSYTGLTPSEYSSGPHIRKGHISRQGSNRLRQVLTEIAWRAIKEDPALRDSFERISIKAGKKKAIVGIARKIIGRMRACFMNNQEYQIGVGYAFGQV

SEQ ID NO: 322443 - protein, 337 aa, unidentified
MELYSGLDLHSRNTYIGILDKYFNRVFKKRVSNNLHLILEILEPFKDQFKGLVVESTFNWYWLVDGLMDAGYDCVHLANPSAIKQYEGLKHSDDQHDAFFLAQLLILGILPQGYIYPKEDRPVRDLARKRMLLVKHKTAHILSVQSLIARCCAQRMSKHQIRQLTVADLRQLLKEEYLLLSAQASLNMIDFLIQQIKALEKAIKKKVKLDKAFEQLMTVPGIGFILAMTIMLEVGDISRFAKVGNFASYCRCVSSQRLSAGKAKGSGNRKNGNRYLSWAFAEAAQLGRRYSQRFGRYYDRKAAQTNTIVATKALSNKLARICYYIMRDQVPFRKELF

SEQ ID NO: 322444 - protein, 346 aa, unidentified
MMIIGCDYHPSWQQICWLDTATGETGEKKLEHASGEAERFYRQLPAPALIGMESTGNCQWFVELAATLGHDLWIGDAAKIRASDVRAQKHDRRDAELILKLLREGRFPRIWTPSGEEKDLRQLLIHRYKLVRIRAQVKTELQHLAMNQGITKKRRLWSKAGEKVLRELPLAPWASQRRKDLFRVREMLDGQIDLLDQAVVEIAEKNEKARLLMTQPGVGPITSLAFVLTMGDVSRFQRGKQVASYLGLIPREYSSGGHQRFGSISKQGNRFMRMLLVEAAQGAVRCDPGFRNEYVHRCHRKPKGVAKVAAARKLAIRLYWMLRTNTGYPEVVGVESSSRVPLVSAS

SEQ ID NO: 322445 - protein, 363 aa, unidentified
MNATAALPVVGVDLAKSVFQLAVADGAWHVIEQQRLTRTQFERWFSNRAVGLVVMEACGSAHHWARWLNGLGIEVRLLPAAYIRAYVKRNKTDSADACALLEAARCAEIIPVRVKSIEQQALQGLHRTRSLWMGTRTSRINALRGFCREFGIVIAQGSRLGVEQIGRVLADPHAPVPTLIRGTMTLLVEEIRLLEVRIAQLERELTTLARQSPACTTLLSIPGVGLLTATAMVAATSGEVSHFRDARHFASWFGLTPKERSSGGTRHLGRISKRGDRYLRMLLTHGARSVLRAASVARHAGRTIDALRHWALAVQGRSNHNKATCALANKLARICYATLRDGEPYGTAQLQKKVTRTAFALPA

SEQ ID NO: 322446 - protein, 358 aa, unidentified
MAGPSLWVGLDVGADETTICATDDSGAVVFELPVASRPAALHAVMKGDKRRIRCVGLESGAFGLVLCRSLLQRGYPVAMFEARQASRFLSIRKNKTDKNDARGLADIARLGRGSVSEVRVKAPECQRLRSLLVTRQKLVQLRAALEGNMRSLFRLNGGKLKRSYSTAGLRRNVHEELRRLRRSEKIDLSAEVQPLLALSTAMRGYIEDLDERLKKRAAKDPVCQRFLEIPGVGAITALAFYSAVDDPHRFRRNSDIGAYLGLVPRVRQSGQSLSLTRISKNGDKLTRTYLTSAAQHHLRTGQSSLALWGAALAERLGKPGVHVALARKLAVVMLAIWKSGEDYHPYYAHQLHGANDGC

SEQ ID NO: 322447 - protein, 384 aa, unidentified
MEKFSTLYVGLDVHKESIDIAAAEAARDAEVRHLGSVAGGLDAVSKSMRKLVSAGHRLHIVYEAGPCGFVLQRHFSSLGWHCDVVAPSSIPRPSGERIKTDRRDAMKLARLARSNDLAVVRVPGPADEAVRDLVRARDDAVREQRNGRHRLKALLLRNGITYAGKSSWTAAHLRWLATLKMEHAAQQIGFQEYLHSITETTARIHRLEQAMRDALADWTLRPVVQALMSMRGVQLIAAMTLVAELQDFLRFESPRQLMGYVGLVPSEHSTGPKRRQGSITKAGNSAARRMFVEIAWHYQHSPRVSAVIATRHDQLPKAITDIAWAAQLRLHAKFKRLMARRLMKNKAVVAVARELAGFVWAIGCEVQTSGWQGIAVEPTTAAAS

SEQ ID NO: 322448 - protein, 344 aa, unidentified
MQITTVGLDLAKHVFQVHAIDAEGVVVLRKALRRAQVLPFFARLAPCLIGLEACGTSHCWARELIHLGHEVRLMPPAYVKPYVKRGKTDAADAEAICEAVTRPTMRFVPVKSCEQQAALSMHRARNLLVKQRTQLVNMMRGLLAEFGIDIPQGLGRALLLAQRVVEGATPDVPQAAAKIVGMLSQQALDTDAQLREIDRALVALQRTDDVARRLATIPGIGPVGATALAAAVTDPGQFRSGRQFAAWLGLTPLQNSSGGKERLGRISKMGDKYLRKLLVIGATSLVRRARHKPENAAPRLTSLLARKPVRVAAVAMANKMARIVWAIMTRGEVYQASHMPVLAA

SEQ ID NO: 322449 - protein, 324 aa, unidentified
MICGVDISSASLEARIGRDGASGSFANNSDGINALAAFCQAQQVELVAMEATGGYEQQAFAGLSEQGLPVAILNPRSVRKFAESMGRLEKTDAIDAGMIAWYAEVKQSRPLCLAPASQQHLRALVTRLRQLTDMRTAQLNQQRLVTDQAVQASFDQLLAVIAGQIRTLEQSIAVLIDADPLWRELNQAFRTIKGVADRTVARLMAEMPEIGVLSNKTVSKLAGVAPLARDSGKYQGKRAVRGGRAPVREILFIVASVVGRYEPDFIAFQQRLRAAGKPPKVVRIALAHKLLIRLNAKAREVRQQLGILTQASSHNRSGAVVMGI

SEQ ID NO: 322450 - protein, 317 aa, unidentified
MTKCNTKTAGIDTSKDKLDIAIDASTTCWQVENTAIGWRHVAARLAAAGVTRVGIEATGGYERGVVRYLREKGFTVLVLQPTQVKAYARMHLRRAKNDKIDAALIAACAAGLEAPAVPPDARLEALAGHLTFVEQVEEDIARLKVRLEHVEDARLRDILKADIAGLKARRATEMLRIINALRAHADLARRYHLVLSVAGIGERTAIAIIIRMPELGRISREQAAALAGLAPYDSDSGTHKGQRHIAGGRARLRRSLFAAALPAAFRWNKALIELYTRLIARGKCHKAALIACARKLLIYANTVVQRGTPWVQEQVPA

SEQ ID NO: 322451 - protein, 346 aa, unidentified
MQYYTERHRHTCGVDLHGRNLYLCVLDPDRKIVLHRRVDCDEEKVLRALAPYREDLVVGVECMFKWYWLADICDEHGIPFALGHALEMKAVHGRKSGNDRLDAERIARLLGSGMFPVGYVYPKKMRSSRDVMRRRSYLVNQRSSLITHIQITSLQYNLPELGKISKPKNREGIIEQFQDPAVRASVEADMAVIDILDVVIARLERVIIRAARGHDPVAFTLLKSVHGIGDIIGLTLLYEIHDINRFDSLGGYLSYCRLIKCTKTSDGKPKGTGKRKQGNQHLKWAFSEAAALFLRANPEGQKLHSRLLKKHCKAKALGILAAKLARSVYFMLHRNTPFDMERFVRA

SEQ ID NO: 322452 - protein, 334 aa, unidentified
MDKVTTVGIDLAKSVFSLHGVDGAGRVLLRRTVRRDQLIQTVAALSPCLIGMEACSGAHEWGRRFQALGHTVKLMAPKFVAPYRKSGKNDGNDAEAICEAVTRPSMRFVPVKSVEQQALLAMHRVRQGFVVERTATINRLRGLLCEFGVVLPLRSVTVRRQAAAAAEKLPELARRAIGDLLEQLRVLDERIGGYDREIEAQARLCEPAQRLMKIRGIGPTTALAIVATVGNAREFKNGRQFAAWIGLTPSQYSTGGKPRLGHISKRGDAYLRNLLVQGARSVLNSASAHQDRMSRWILELQPRRGYYRTLVAIANKNARIAWALLARNESLRSA

SEQ ID NO: 322453 - protein, 341 aa, unidentified
MKTFIRFGVDLAKNFFQIHGIEQEGGAAVSRKLTRGKFREFFQRISPCRVGMEACGSAHYWGRELTAMGHEVVLIAPAYTMPYVKRGKNDAADAAAICEAMSRPEMRFVPIKSADQQATLMLHKTRDLMVKQRTMNVNALRGHLAEFGLIAPKGIHRLEELLALARGEGALPDQARWAVDWLALLIEQLNAHIDRLEKDIVKAAAKNSTIRLLKEIPAVGPLIASAIAASYPDPRAFKSARDFSASLGLTPNQHSTGGKEKLGSITKMGNRYLRKMLVVGCTSVLRVAAKYKGALAEWIVAMKARKPERHAAVALANKIARICWAIMSTGEHFREELYTRA

SEQ ID NO: 322454 - protein, 412 aa, unidentified
MDVIYPQCCGLDVHKKTVTACLITSIEGLEPVKEIRTFRTMTADLLALADWLQEAGCTHVAMESTGVYWRPVYNLLEGQCALLVVNAQHIKAVPGRKTDVKDAAWIAELLRHGLLRGSFIPSNPQRQLRELTRYRSTLVQDRARTLKRLQAVLEDANLKLASVVTDIYGVSARAMLEAILAGERDGEALADLARGRLRAKRDQLKEALEGRVTAHQSFLLTEHLSTLEYLDEAIARVSGEIDQRLIADQEAIALLDTIPGVGQRAAEIRIAEIGTAMSRLPSAKHLASWAGMCPGNYESGGKRLSGKTRKGSRWLRQVLVEIAHVAAKTKHTYLAAPYKRIAARRGKKRALIAVGHPILTIVYMMLTRKQPYQDLGAAYFDQREQQRVERRLVQRVERLGYEVSLQPRALAS

SEQ ID NO: 322455 - protein, 346 aa, unidentified
MKINRVGVDLAKNVFQLHGADYKGKTLWKRQLSRAKWLPVLCDTVEPGTEIGMEACAGAHHWARQLMQRGYPVKIIPPQFVKPFIKSNKNDANDAQAICEAMGRPDMYPVKVKTVEQQDLQAMHRIRDEVKGHRIAKANQIRGLVTEYGLVAPLQLPALRRAIPEWLEDADNGLTFLFRQLLQGLWGDLYALDQRMTELDKQIAVVAQEDPTARRLQQLRGVGPLIATALVATIGDARQYRKGRDMAAALGLTPRQHSSGGKDRLLGISKRGDAYLRCLLVHGARSAMRTAKDKDDRLSRWIIDLQSRRHANVVAVALANKMARMAWAMMTRDVDYDPDLAAASVN

SEQ ID NO: 322456 - protein, 363 aa, unidentified
MYSERTSVGLDVHARSVAAAAIDSVTGELKQARLTPSHDHIRSWLDGLAGPVAVTYEAGPTGFGLYRSLTEAGVRCVVAAPSKLQRPAGDRVKTDAKDAVHLARLLRLGEVSPVTVPSVAQEAARDLVRAREDCRGDLMRARHRLSKLLLRQGIVYSGGQAWTGAHDAWLRRQRFDNRATQLAFESDYDAVLAVSARRDRLDTAINDSAADSEFTPVVRRLACLRGVSTLTAFALAVEIGDWHRFSGNSIGSFVGLVPSEHSSGASRVQGSITKTGNTHARRLLVEAAWHHRARYAPGKTMHDRWELAPPAARARGDAGNRRLHARWVTFNLRRKRPVIANVAIARELAGWCWSLAVLDSDTS

SEQ ID NO: 322457 - protein, 406 aa, unidentified
MKLQNHVFVGVDTHKNQHTACVLSCVHQKIGLTQTPNNPVEFDKFIQDIKSVKSPDKSLIFGLEDTQGLGHSLSQWLLDKGYTVKEVNPALTKRERHHSTNPDKSDEIDAEAIANVLITDFNELPDAFYDANFKAIKHLNNQRQTMVKEKTKIKNRLHNLIHQQYSEYQKFFSNPFCKTGLAFFEEFPHPADLNYYAEDRLNKFLKNQVKSIRNNKAAKILSHVNKDKKKAADAKARSTIIKRLIKQLKLLSESLNKINQKLKSAVEKSQYQLTTMPGIGFKMAAMFISSIKNIDRFDSASKLARYAGLAPVEHSSGTSKRLNLKKYGCRDLNHAFYMLAFQQIGNNKNPASYSYYQKKLKEGKSKKIALICLQRRLVDIIYAMMRDRSAYKLPENIGYEVLDKAG

SEQ ID NO: 322458 - protein, 324 aa, unidentified
MEQQKWIGIDVAKSAFQAALVPGGATRSFPNNEQGAAALVDWAKTLPDFQGHIAMEATGIYSRTLAAILHDLKAHPAIINPYHIHAYGLSFGRRNKTDPIDARLITQFANERQPRLWEPPDAASEGLKVLLEQRESAKLEQDRMNKQVSVLTNPPQILKKRQLDNETYIKKLEAEIRKHERQNEQLAQNTKLLCTIPGVGNWTARALLACTNNLKDFTRRSVASYTGLAPCVYHSGTYHGGGHIPHTGPRLIKKYLYMAAQANTQTRMKDNLLAQHYQKLRANHKTGKQALCALMRKIILIARALIQTQKPYDPKIHGQALVEN

SEQ ID NO: 322459 - protein, 343 aa, unidentified
MQIAVLGIDLGKNSCSLVGLDHTGAVVKRRRMRPESIPAFTKSMPACIVAMEACCGAHHLGRLLAAQGHTVRMMSPEYVRPYVKAQKNDDRDAEAIAEAATRPTMRFVELKSEEQLDMQTLHRVRDRLVGERTALINQLRAILLERGVTVAQGRRKLEQHLATMLDDDNKAALSPRMRQLIDEMRVEWVELDRRIVALDNEFAAHARTDADARRLATIPGIGVLNATALVAAVGNAQTFARGRDLAAWLGLVPRQITTGGKPRLVGITKRGNKYLRKLLVHGARSVMPALAASATPLGGWLRGLLARVHKNAAVVALANKLARIVWVVLRRGEAFDATASAVA

SEQ ID NO: 322460 - protein, 437 aa, unidentified
MIKKEKIELTMKQDIFVGIDISGRKHRARFIDRMGREKAAPISFSNDVEGLKKMENHLKGIRGIGHNVMFGVEPSGDYWKPIAYYLKKEGYPVVLVNPYHLRSTKEIIDNSQEKDDNKDSYLIADLIKQGKYFFPIMPEGIYGELRELSNIWEKTSKELAIKKCYLANFLAKYFPEYRENFTDVLGKTSFYILKHFPLPEDITKIGKKRFSRLIKRVSRGRIGQYKIEMIYEKAEKSIGIKEGSQVAKNFLKGILADIERLKERKEEIKKVMEYFLGQTGYKENLLSIPGVGIVTASIFLGQIGDVSNYRRSREIEKLAGLNLVENSSGGRKGDRKISKRGRNMLRYVGYLVATVGISKNPEIKSLYWYKVMECKKEKMKVLTSIAAKMLRIMFIVCKKKVYYDAEEIRKYFNNRGKIGGVRSGSLHQAPYSGDTGN

SEQ ID NO: 322461 - protein, 344 aa, unidentified
MPTHFIGIDLGARRTQVCITTDDGTVLTNTSVASRLDGILVLAQRHGATACPVAIEATFAWYWLADGLQDHGYEVHLVHAARCAAITTAKVKTDRRDAATLAQLLRAGLLPEAYLYPRAQRGTRDLVRQRHAVVERRSGVLRKIRCLLYREGHVDHDLDDAKHLDADDLMTRFADPMVRFHAQTLIDEQAHLLEIQTRIEKILLDQAEETPQHALLRSIPGIGKILSLVIGYEIGDIRRFRSIQGFCSYCRVAPGIAQSGNSVRHGRANKAGNPHLKRSFHQAAVLACSHEEGWKHWRDRLLVRHAGQGGKMKATNAVAHRLARIVFRILLSGKPYEETLARLA

SEQ ID NO: 322462 - protein, 374 aa, unidentified
MNGSLTSFMLNPITALTEQVIDNKAQGTKKAKRIVLGIDVHLRGYQVASKEDNQAIGAVHNFGNQSEVWLWIEKLKRRVEPIEVVYEAGPLGYSLYRELSAQGISCRVCAPDSSVQKRRRRKTNAIDARELAGRLFNYLNGNQQALQLVRIPSIEQERRRLKSRQHDQLVKERKRLAAQGNSILLSQGWGSMKNWWRPRIFERLSQVVVPEITELLEVWLELLHKLDEKIQQAKAQQKRNQKGPRPKGLGAGSLEQLESELLDWKRFSNARKIACIAGMVPSEWSTGEGQRLGSITKVGLPAVRRILVEAVWRMQRLQPDYEPFKKWRAALEGKNAASKKKAVVAIARQLIVDLWRLKTGRVSAQELKLVMVGG

SEQ ID NO: 322463 - protein, 385 aa, unidentified
MTATTRRFDPTALEKLLCLSFELGEGSWTLSFTSGFGAPVHRRRVPARDRDAVLRQVEAMKERLGLGASCRVVSCYEAGRDGFWLHRFLEAHGIENLVVDSSSIEVSRRSRRAKTDRLDGESLLDLLLRHRAGSQKKVFSVVRVPTVEQEDRRHLHRELRSAKQDRTRVTNRMKGLLANQGLTLDLKREIPAQLAALRQWDGSALPAGLQARLAREWDRVAFFTALIERLEADRRELLRAGDDPTLGKIRQLNLLRGIGTNSAWLYGMELFGWREFRNRKQVGAIVGLAPTPHASGTQEHERGMSKAGNRHVRAMAIEIAWGWLRFQPRSALSQWYQRRFGGGSTRLRKIGIVALARKLLIELWRYLETGVVPEGAELKTDVRVR

SEQ ID NO: 322464 - protein, 321 aa, unidentified
MTYVGIDVSKATFVVAYSSAKSSETKTFKNTTKGIREFIRTISPEENHCVLEATGNYSMLLVYLLSKAGFTVSMENPLKIKNFARVMLSVVKTDEIDARLIALYGERMQPAPFKLRSDSLLLLKQKRTVLRQLKKQLTANRNLEGSLKILPFIDSKCKKVLEKTIKFLEKQIEEMEEELTSLAEIEYKKQMDLLTSIKGIGATLAAALIIATGGFTYFDNAKQFTRYLGLSPTYQQSGTSVNVKGHINRNGDAYLRSQLYIGAMASLRCNTECKACFERLRSNGKPGKVAIVAVANKLIRQAFAVVTQEKIYIDGYKSVKP

SEQ ID NO: 322465 - protein, 391 aa, unidentified
MSMYFIGIDISKYKHDCCIISAADQKVVSKVTIKNNKAGFNELLTIIHSLANPADIRIGFESTAHYALNLELFLENSLLTFMEVNPVLISEYKKSKTLRRTKTDSVDCESIARWLMTVEYKPHSKGFYHAYSLKSLTRLRDKLIRQRSFYLVKITNVLDHTFPEFKPFFNERLSKTALYLLENYGSAEKMARMNSASYEKLRSLSRGKFSPQQFLRLKELAANTVGVNNSIFDVELNSLLSLYKSLVKEIDTIEKEINKLIEEVHPHYMSVPGIGPLSAAVIYSEYGDISNFTNPGQMLAFAGIEPGINESGTESHGGKMVKRGSSQLRYTLINCCLPLIRFDMTFATYYAKKRGEGKPHRVAITHVAKKLIRVIYALERQDIDFNAQKLR

SEQ ID NO: 322466 - protein, 347 aa, unidentified
MRFYNQPHQYYCGIDLHVKTMYVCILDAAGQVLVHRNVPSTPAAFLETVGPYRPGLVVAVECMFTWYWLADLCAAEGIAFVLGHALAMKAIHGGKAKNDKLDSHKIAILLRGGMLPQAYVYPAAMRSTRDLLRRRLHLVRKRGQLLAHIQNTRAQYNLPAFEKRLAYPGNRDGVVEHFPDPSVRKSVEVDIALIDQYDTLITDLELTIVREAKRHDADAFHRLRSVPGIGKILALTILYEIHDITRFDRVQQFASYARLVTCRHESAGKVVGGGGAKIGNVHLKWAFSEAAVTFLRHNRQGQQLRARLEKKHGKGKALSILAHKIGRAVYYMLSRETVFSMEKFLAA

SEQ ID NO: 322467 - protein, 347 aa, unidentified
MNPVIGLDIAKGESQGQAFLDKGQPYGKSFTIIHTREGLQLFHQLLKDLEATTGQKPTVILEATGHYNAPVTQFLDDQNYFYIVVNPILSYQAKKSSSLRKVKTDAIDAYALCEFFYKEEFDHHKTRGVQLLNLRNLTRQHGSVTGQFVQIKLQFQAVLDQVFPEFRGVFGALYSAVSLRTLLSFPTSEDVLSAGEAKLTERIAVLCVGRSEKWAKEKAQKLMAAAIRNPFRKAPYQSHLFSMNMYISMLLHYKEHLSTLEKQIDALANEVEEYEIIQSIPGIGEKIAATIISEVGEIDRFNHPKKLVAFVGVDPSVHISGKFTATINRITKRGSSRLRHALYMAVL

SEQ ID NO: 322468 - protein, 400 aa, unidentified
MDEAGDVPIDVFVGVDVGKAAHHAVALAAGGEVLLDRSLPQDEQQLVALLDELVVHGRVLFVVDQPATIGALPLAVARSRGVEVGYLPGLAMRRIADVHAGEAKTDARDAAIIAQAARTMPHALRSLRPDDEVTAELMMLSGFDEDLAGQINQVSNRMRGLLTQIHPALERVLGPRLAHPAVLDILGRYRSPQLLREAGRGRLAARLRKLAPRVGDRLAEEIWGALAEQTVTVTGTDAAAQVLARLTEQLVVLRRQRDEIAEHVERLVEMHPLAAVLTSMPGTGVRTAARILVEVSGRDFATAGHLAAYAGLAPVTRRSGTSIRGERRPQRGNRRLKRALYLSAFASLKDPTSRQYYDRKRAENKSHQHALMALARRRCDVLYAMMRDSAVYDQNHARAA

SEQ ID NO: 322469 - protein, 336 aa, unidentified
MKYTPVGVDIAKHLIQVHFIYEDTGEVVDKQLRSRDFLEYFSNRKPCLIGMEACGGSQFWARELTKLGHKVRLLQARFVKAFVMGNKNDVMDARAIWMAVQQPGKEIAVKTEEQQSVLVLHRSRRQLVKFRTAQINALHGTFLEFGETIHKGRAAMDREFPEALEAKLPPYLINVLEDQYNRLSELDSLIDGLEKQLNSVARQSETCKRLMEIPGVGPLIATAAVATMGEASAFKSGREFAAYVGLVPKQTGSGGKIRLLGISKRGDTYLRTLFIHGARAAALLTKEPGPWITELKKRRPTSVAIVAMANKLARTVWAIAAHDRKYDKNHVSIRPY

SEQ ID NO: 322470 - protein, 424 aa, unidentified
MNCNQNFKISQVTEGTLVLGIDVGSNTHYARAFDWSGLELSKVFKFKNSFEGFQSFVLWVNDLCCKYNKSKVIAGLEPTGHYWFSLGELLKENNITIAIVNPYHVKQSKELDDNLQTKNDSKDPKVIAKLVIDGRYSFPYIPEGIYGELRVADKLKNDITQQIISIKNKIHRWLSIYFPEYENIYSSIDSKSGFLLLKETPLPKDIVELGSEGIVERWKQTKLRAVGLDKAKKLEEAAKKSIGCKNITSSARFEIKLLIEDYEYKQNQLNSITEELNKLCEKIPMIKEIAEIKGIGIATAISFVAEVGDIRRFKSAKQVQKYAGLALKENSSGKHKGLTRISKRGRKKLRTILFRATIPLIGFNKEFSSIYNYYIERKDNPLKKKQALTAICCKMIRIFFTILSKGIKYDETKMLHDIKRPVAA

SEQ ID NO: 322471 - protein, 414 aa, unidentified
MESSYKIAGRDVHKKMLAVVIRDVAQVGEFRFERRKFATGAMELPALAKWLAEQEVREAVMESTAQYWKPVGQALEGQCRRQLAQAHSNRAPKGRKRDFADAERLVRRQVAGELILSFVPDPEQRLWRTLTRTKQQWTRDRVRLQNQLEGLLEEARIKLSSQVSDLLGLSGRRMLQALADGENDPVQIAKLAAPGLRASQKQLADAMSAAATLSPLHRQIMKLFLQRLKLIETPMDALESRVAEPLRPFPDAVKRLAEVPGLGADSAQQIMAEVGPRAATFPSPDQRASWVGCCPGREESAEVSTSDSSPKGNKHMRRLLSQAANAAVKAKGSVFEILYRRLAPRRGHFKAIWAVAHRLCRIIWKILHEGVDYEERGYRTNPHAVQKRTNRLVRELRRLGYQVQLTSSKAGAPA

SEQ ID NO: 322472 - protein, 407 aa, unidentified
MDVVYRCCCGLDVHKESVTACVLWIEGSRSRREKRKFGTFTQDLLVLADWLRGCGVTHVAMESTGVYWKPVFHVLEGQFELLVANAQHVKAIPGKKTDPRDAAWLAELLQHGLLRSSFIPPEPIRELRDLTRYRVNLAQECNRVANRIQKVLEDANLKLASVATDPLGASGRAMLKAIIAGERDVEKLAEMSRGLLRRKIPQLQLALEGRVSDHHRFLLQQLMDHLEFVESKMTRLEQEIAERLRPFEETVRRLCTVPGIDRVSAWGIISEIGLNMEQFPDEHHLASWAGICPGNWESAGKRKSGRIRKGSTWLRRHLCQSAWGVSTKQNNYLSALFRRLAARRGVKRATIAVAHALLVITYHILSRPVEYRDLGPNYFDKLHPERLKRKLVKRLEGLGFQVSLQSV

SEQ ID NO: 322473 - protein, 424 aa, unidentified
MDLLIERCAGIDIGKTEVVACVRTPGPRGEGRRKETRTFPSFSADLEAMADWFSAEGVTEVAMEATGSYWKPVWYVLEDRGFDQKLVNAQHLRILPGRKSDVLDAEWIAELLEHGLLRGSFVPPEAIRELRDLTRYRKRLTQARTAELQRIEKTLEDAGIKLDVVASDILGVSGRLMLKALIAGERDAEKLAEMAKGVLRNKIPQLRQALRGRFRDHHALLVGMALEHAEYLDAAIARLDDQIDALFAANTSEAGVPFVEARDRLATIPGVGKRAAQTIIAEIGVDMARFPTAGHLASWAGLAPGTNITGGKRRSGKTSPGDKWLGEILNQCAWAVARSRDTYLSAQFWRLARRIGKKKAAVAVSHSILVICWHLLTERVDYHDLGGDYFTRRNNPDRRRDHHIQGLHTLGYRVTLDKITDTAA

SEQ ID NO: 322474 - protein, 389 aa, unidentified
MNTISTTASTATILAIDLGKYKSVACVHDADSGEIRFATFDTSRAEVQRLLAKEAPGVVIIEACLLAGWVHDLCGERGVRCLVANTASEAWKFKHLKRKTDKDDALRLAQLHMLGQLPTVTLPPTAVRQWRSLMATRQNLVGRRVAVQNRIRALFVAQGLPAPRGAKAWSQTGLAGIALQVKALADCGPDELWRGLLELALTEYRQVSELVARAEARLDALGKQSAAVQLLQTAPGLGPRTAEAVAAYLHDAPRFRTGKQVSAYSGLVPRQHQSGEMDRRGRITKRGPALLRKLLVECAWCMVRYNGWARNFYLRLTGGGQRRKKQAIVALARKILVRCWAMLRDNKPWRDPQTAPKQPLPPSKQRRQAEAQQHRQAKQQAALTPTAAS

SEQ ID NO: 322475 - protein, 392 aa, unidentified
MVVSVGIDVSKDKHDCFILNSEGEILSDVFTIPNSLDGFTILLQRIRDCSSSQDNIKVGLEATGHYSYNILGFLLDNGLPTYVLNPLRTNLYRKSLSLRKTKTDRVDARTIAAMLLSDAGLKPYTDTVYHNEELKSLTRYRFDKVKERAKLKSSVARLVNILFPELEKLVSSLHIAVVYALLSNYPGASYIANANTEELAETLCTASKGRYTKSKTAEIQVAAGVSIGSKMPAKSMELKHTIALIRELDKEISEVESAIDKITSQMDSPIFTIPGIGRHMGAMILAEVGDFSNFASADKLLAYAGLSPSTYQSGQLQNCYAHMEKRGSRYLRYALFNAAKYVCLWCPTFSAYLEKKRSEGKHYNVAISHAAKKLVRLIFAMQRSGKAFLADY

SEQ ID NO: 322476 - protein, 390 aa, unidentified
MHVVAHQPEAPGTIRSDLGAIFVSLELSRSTWLITSLSPCAGEKMSKHGVAAGDIGALLARFSEFKQKAFARTGRSFPIIVIQEAGLDGFWIHRVLQSEGIESHVVDPASIATSRRRRRAKTDRIDGEALLRALLAYKRGEPRVCAMVKAPTPEEEDRRRLSRERKTLIGERVEHVNRIKGLLFCQGVSDYEPLRRNRRQRLDELKTGDGRALPDHLKAQISRELDRLELLLEQIKAVEAGQNTLFAAAKAEAPTPAPVTMLLDIKGIGPEFAAILWMEAFFRSFANRKQIAAYAGLAPTPWQSGAVNREQGVSKSGNPRLRTTLIQLAWLWLRHQPQSALALWFKERVTRNGGRFKKTTIVALARKLLVALWKYVTAGIVIEGAVMKAA

SEQ ID NO: 322477 - protein, 374 aa, unidentified
MSNHSEAYVALDTSKLRNAVAIADAGRAGEVRFLGEIENTGEATAKLVRKLCAKYERLTFCYEAGPTGYGLYRQIKSLGQECIVVAPSLIPQRPGDHVKTDRRDALSLVKLLRAGELTAVWVPDRRHEAMRDLTRARETAVMDLRSKRQQVSAFLLRQGLHYPGKKTWTRAHMNWLASQKIEYPEQRIAFEEMMLAMRQAQERIERLEQAIRTAVPDWSLAEVVTALMAMRGIDLISATTLLAEIGDLSRFQTPRELMGYLGLVPSEASSGDTVRRGPITKAGNHRARRTLVECAWSYQHPPRVGQKKQEKVDAAPRAVREIAWKAQCRLHGRYRALIRRGKRKTVAITAIARELAGFIWAVSREVTTARAAAR

SEQ ID NO: 322478 - protein, 408 aa, unidentified
MKVLHQRCAGLDVHKDEVVACVRLVRRSNATHEVRRFATTTRGLLELADWVRATACTHVAMEATGVYWKPVWHVLEGQAELVLANAAHIKNVPGRKSDVNDAVWIADLLAHGLIRSSMVPPTSIQALRDLTRTRKQITREIVQHTQRIQKVLEDANIKLSSVVADVLGVSGRRMLRALIDGESDPEKLAALGSDRLRCPRAGLVEALRGRATDHHRFLLGQHLHVVETLERTVTEFDRRIEVALTPLRPEIERLSAIPGVGTTAAQVILAEIGSDMSRFPTAAHLRSWAGLCPRLDESAGKQRSTRVRHGAPWLKTMLVQCAWAASHSKETYLRAQFLRLKARRGPKKAAVAVAASILTAAYYLLRDKAEYQDLGPDYFLRRDSARVAERLARRIRELGYAVEIHKAA

SEQ ID NO: 322479 - protein, 376 aa, unidentified
MLYVGIDIAKNKHDVTALNVPGKTVLKPLTFSNNKAGFELLDLSLRQLNQDCLIALENTGHYAFNLLNFLHEQGYKVYTYTPLLIKEFAKSLSLRKTKTNKKDAHGIALKLLSDPNREQFQHDNRQVELKILARHIHRLKKKQSDWKVQYTRCLDIIFPELDKIVGKHSEYTYQLLTRYPNPQKRLEAGFDKLIEIKRLTASKIQDILSVAPRSIGTTSPAREFEIIEIIKHYKRLIDKAETCVNDLMTEFNSVITTVTGIGGRLGAVILAEIRNIHAFDNPAQLQAFAGLDSSIYQSGQIDLAGRMIKRGSPHLRWALIQAAKACARFSPAFKAYLKTKLEQGKHYNVAIIHLAKKLIRTLFYILKKSCHLTNKK

SEQ ID NO: 322480 - protein, 314 aa, unidentified
MASIICGVDVSSETLDARIGLAGPTAHVKRTPEGIAELRSFCAEHSVELVVMEATGGYEKLPFSLLWAAGLPSAIVNPRSVRCFAEAMGFLEKTDRIDAGVMADYARVKRIVAQEPASAAQERLRSLVTRLRQLTELKVAQTNQRRLLEEADAQASIDELLAVIRRQIKSFEAMIAELLGSDPLWRALDKAFREIKGVADRTVARLAAEMPEIGTISNKAIAKLAGLAPIAKDSGKRQGKRSIRGGRSSVRSILVVVAGVAQRHDPDLAAFHQRLIQAGKCKMAARVAVARKLLVRLNAKARDARKALEQPLAA

SEQ ID NO: 322481 - protein, 350 aa, unidentified
MIIIGCDFHSRFQQIAMLDPQTGEVIEHRLEHENGEARKFYAGLATPARVGMEATGYAQWFERMLAEQGHQLWVGDAAEIRAAMVRKQKTDSRDACHILDLLLKDKFPRIWIPSTEERDVRQLLRHRYKLVCWRTSLKNQLHAMAMGHGICRKKKLWTAVGRKELQGLSLGPWASRRRQHLLGMLDQLEPVLEELDRAVIQEVEKRPAAMRLMTQPGVGPVTALAYVLTIGPVSRFQRSKQVVSYLGFNPSEESSGGRQRLGSISKQGNSMLRFLLVEAAQTASIYDPELRRDYRRLKFRRGSGVAKVAIARKLAVRLYWKLREQPSPVPPAPMQGSPAVSVVGESLSSS

SEQ ID NO: 322482 - protein, 352 aa, unidentified
MMVVIGVDAHKRTHTLVAVDEAGRRLAEKTVAATPDGHLEAVEWAARWPERIFALEDCRHLTRRLEVDLLRAGEAAVRVPPHLMAVVRQSGRERGKSDPIDAHAVARAALRESDLPVVQLDGEARDLRLLVDHRDDLVRERTRMQSRLRWHLHELFPGLEIPPKALRRQHVLAELEERLAGVTGTVADIARELLVRCRESTSRANELQVEITRIVRRLAPSLLALPGCGVLSAAKIVGEAAGASRFRSKAAFARWNGTAPIPVWSGNSPRHRLSRGGNRQMNAALHRIAITQLRGVGEVGRVYVEGRMAAGDTKTEALRLLRRRLSDEVFRRLRADETMKPDVLRVSDSMAA

SEQ ID NO: 322483 - protein, 376 aa, unidentified
MPTTNLQNSIEFKEQKFFIGMDVHKKSWAITIRSMGLQIARFTQPPSPETLAAHLNKSYPGGIYYSAYEAGFCGTGIHEELCKLGIQNIILHAADIPTTDKQKKNKTDIRDSRAIAESLEKNNVRGIHVLTREQQELRSMFRLRESTVIDVTRANNRLKGYLMYFGIQVPEELVKSERLGRKALEWLSNLELSVESGSLTLKYYAEDLSYRRKQLFGITKQLRRQIQASHQKTYECLLTIPGIGPITAMGLLAEIGDFNRFTDPDQYCSYLGLLPWEDGSGERYNTKGLQPRCNTHLRPLLIEASWAAVKKDRSLFAYYSKHAVKNSKRALVKVARKLALIAKGVAQKQQHYAPDYLTKVTNEKPKKVLEAKQNSI

SEQ ID NO: 322484 - protein, 338 aa, unidentified
MAIVTVGIDLAKNVFAVHGVGPSGKPELVRPEVRRSKLLELVVALPPSLIGMETCSGAHHWAREFEKHGHTVRLMAPKFVAPYRMSGKRGKNDANDAAAICEAVTRPSMRFVPIKSIEQQAVLFVHRARQGYIEERTALINRLRGLLSELGIVLPLKASVLRREVHKVLEDLPGWCNTVVGDMLGHLTRLDERVTDYDKHLSQIAQHNDNARQLMKLAGIGPTTASAIVASVGNGHDFKNSRQFSAWLGLTPGQHSSGGKARLGSITKAGDSYLRTLLVMGARSILMKAAKHTDPVSRWALKLKERRGFGRAVVAIAAKNARMCWAALRLGDAFKVPA

SEQ ID NO: 322485 - protein, 391 aa, unidentified
MTFFIGIDIAKYKHDCFILNHEGEVIRSSFSFTNDRAGFAYLKEILSTLDSNQTMRIGFEATGHYAMNLKVFLEENGFTYMQFNPFLIKRFAQATTLRKTKTDKVDARVIATYLLSVDYKPYPPQSYHIKNLKSLTRDRDDLIKQRSRQLVKLTNLLDLIFPEFKPFFGHSLTSSTCLYLLDHYLTPSKMARMNLDSYHKMTSELRRTLSYARFCTLKQLARDTIGSEDPTLTYLLKKALELYHTMDDQITEIQLLIEQTYSQLDSHIHTISGIGIQSAACILAEYESIERFDNSDQMLAFAGLEPSRKQSGESESKGKMVKHGSSLLRQTIMNVSATSIIHNPILYEFYLKKRNEGKLHRVALSHVAKRIVRIIFHLEKHHLDFDLAKMR

SEQ ID NO: 322486 - protein, 411 aa, unidentified
MRLFVGDDWAEDHHDVEVMSEAGKVLAKRRLPEGVAGIAQLHELIGRHLGEDADEAEVIVGIETDRGPWVTALVTAGYLVFPVNPLQASRYRERLGVSGAKSDAGDAHMLADMVRTDSHQLRPAAGDSAEAEGLKVLARTHKTLIWERTRAVQRLRHQLREYYPAALEAYDDLDAPDTLELLGKAPDPARAAKLTRAQVSAALKRARRRNITDKATAILAALRSPQLGQPAAVTAAYAATVRSLIAVITVLNEQVKILQRQVEENFGRHPDAEIYQSQPGMGAILGARVLAEFGDDPHRYADGKARRNYAATSPITRASGKKKVVAARFIHNDRLVDALNAQAFTALRASPGARALYDELRARGIEHNDALRRLANRLVGILHGCLKTRTLYDEATAWSHRQNLPQSSVAA

SEQ ID NO: 322487 - protein, 330 aa, unidentified
MEREYIGVDLHKQFFHACAVTETGTRAWEQRFPRNDGGLVLFRARCSPMTAIAVEAMGPTWAFVDALRPSGAPVCVVDPRKTRLKAGYAAKTDRLDARRLADALRRDSVVSVYVPPPAVRELREVCRGRYQVVRLRARVAQMIRALLLRSGCDDVPVTRVFSPRGLAWLSAVQLPSEAGASLERWRRVLMAVHAEAAIADATVRTRAAADPIACGLDAMVGVGPVLALTLRAEIGDIHRFAGGPALASYAGLVPRVDASADRYWSGRITREGSPWLRFALVEVAMHAMRRQDAIGRWARQLAMRKGAYKARVALARRLCDEVVAKWPRCA

SEQ ID NO: 322488 - protein, 337 aa, unidentified
MDYFAGLDISMDETRICVLDREGAVVYEGKSASTAEAIADELAKAPSCRRTVFETGRMAPILFHSLSQLGLPVVCVESRQAYQALKSLATHKTDRNDARGLAHLARTGFFKPVHVKSLSAHAVRSLIIARKKLVGQRVTLENQIRGLAVVFGVRLPRALTTAFIDQALKASEGVAGLSAAMRGLIAARTAVMTAVAAIDADIRRMTGASEACRRLMTIPGVGRLTALAFVAAIDDPSRIRRSRDVGAYLGLVPKRYQSGEVDYVGGISKCGDRRVRTLLYEAANVMLTRHKGQLKLKNWAFAIARRSTMRKARVALARRLAIIMHAMLRDGTDFVAA

SEQ ID NO: 322489 - protein, 368 aa, unidentified
MSKTEMSKTERIPRICVGVDLHKLQFTVCAINEETGEVVLTGVFKTNSEGYKEFCEKMHAAEAEQGCLVELAVEATGNARYFKNKMEAEGFSVVVVNTSKFKVITTSTKKTDANDAATLAFYLSKDMLPQSHLCDQTSEEIRRMLKTRSILVSSTVKIKNQIHGMLLGYGIETKSSQFQSKKKRQELLKDLADQGYSQFTASSLEVTLSILDEICAQVKRIEAQIKEMVKEDEDVALLMTMPGIGFVGATTIASYTKDIQRFGGDFKRFSSYLGIVPSVHNSADTVRMGKITKRGPQDLRTAFVQVAMGIIRQPQNTSEWKLMKDYQAMKVSKGSGRAIIALTRKVARIVFAMLNKKEAFNPNLVVKC

SEQ ID NO: 322490 - protein, 347 aa, unidentified
MRVYIGVDFHARKQTISYLTTEDGEIRQLELDHEKDDIRAFYGQFGGQAVVVGFESSGYAAWFEELLEELGHETWIGHAGAIRQYARRRQKNDRRDADLILELMVAGDFPRLHRYSRESREVLQQLRYRQRLVKMRTMVINSLRFMVTSRGVSLRSTLQSQRGQARLRQLALPGPLAQQRDELCRLLVELQQKIDTVEEWLQQKAEADPRVQRLRTHPGIGLLTGLCLVATLESIERFANPRKVTAYVGFDPVEDSSGERRRMGPISKQGSRLLRLLLVEAGQVAARRDQELGQVYRRVTLRRGHATAKVAVGRRLLVRAFIMLRDEIDYAEFQRRGVAARSSRGSA

SEQ ID NO: 322491 - protein, 460 aa, unidentified
MRSPSSRASSQGQSSPPAGSLGIVHPHAAGIDIGSEKHYVAVSADRDPEPVRCFGCLTPDLQAMAQWLKACAVTTVALESTGVYWIPVMQVLEENGLEVYLVDARQAKNLPGRKTDVKDCQWLQELHAHGMRTRAFRPADAICVLRSYWRHRKDLVEMAAMQIQLMQKSLEQMNLQLHKVLSDITGVTGLKILRAIVAGQRDPVVLAQMRHPLVHSSEETIAKALTGDWRAEHLFTLRQALELYDIYQQKIQDCDREIEAYMKTLGSRGAPQDLPQSPAARRRKNQTHFDLRTRLYEVTGVDLTSLPGLDAMTAQTVLSECGLDLSRFATEKHYSSWLGLCPNHQITGGKIRRRRTRKVRHRAAQALRLAAQSLHKSKTALGAYYRRMRGRLGPAKAITATAHKLAILVYRMLKYGMEYVEQGQQAYEKQYQQRTRQLLLKRVKRMGYALVDLASGEVVS

SEQ ID NO: 322492 - protein, 315 aa, unidentified
MDVLISRCAGLDVHQETIVARVLIGEGDETPRAEIRTFPTMTRDLFALMSWLESEGVSHIAMESAGIYWKPVYNILEGYFDIALANAQRIMNVPGRKPDVSDAEWIAKLLRMGLIEKGFVPSEDLRELRDLTRLRKKRVGNLTAEKNRIQKVPEASNVKLGTVISVVFGVSGRNLLERLITQGYVDPDDIEKRVHGNIKRNVARVAESLFGTLNTHQMLMIRNCWEHITFLEQSIAALDAEIEAHLQPYKEAQQLIQTIPGVSEVTAAVIIAEIGVDMEQFPTAAHLASWAGVAPGNHESAGKKSTRTPPRATRM

SEQ ID NO: 322493 - protein, 341 aa, unidentified
MADAKLIGIDLGKYSFFVHAQDARGQQLWRRKFTRHQLIMMLAQHPPCTVAMEACAGAHWLARKLQSFGHQPRLITPQFVKPFVKGNKTDFGDAQAICETASRPSMRFVAIKTPEQQTLLALHRVREALVSERTATSNQIHAFLLEFGSSLPTGARAIARLPALLDEPAHELPPRLIATLLRLHRRYGQLGNEIAEIETDLKAQLAEDEAAQRLLTIPGIGPITASSLIAVIGDAHAFRHARDFAASLGLVPRQHSTGGRATLLGISKRGNAQLRSLLVQGARAVMRYIERRHDALGTWVQSLLRRRHSNVVACALANKMARIAWAILARGGEYRAQPSPA

SEQ ID NO: 322494 - protein, 360 aa, unidentified
MERMRTLFVGVDVHKDTHTAVGVSPFGDKMFEMTIGNEETDFQSLVEKTYEEARQAKLIPRFGLEDVHSWGERLSQYLAEEGLPVCAVAPILVDRLRSTQTHPEKNDSLDALGVAEVMLRKSDSLPAYTLTEDAKKAKQIRELSVEREWLVDERTRLKNQLHVLLHRVHNTKYRALFKDPFSKKALAHWMKSTPKNTEPILAARTKRAVKRLQQLREDVLEIEKELETLVLKSGHTLTSASGCGVVIAAEIIGEVGDIKRFKSPGALAKYAGCAPRECSSGKTKRFRKTRSGNRRLNRSFHRMALSQISRMGNPAALRYFKRKVSEGKSKSQALVCLRRQMVPIVWMMMKHKTAFCYPQA

SEQ ID NO: 322495 - protein, 344 aa, unidentified
MAIVGGLDIHRRQITFDYLDTGTGELRRGQIAPGDRAHLRAWLARFAGRDDVVFALEGCTGWRYVSEELAAAGIEPHVAEPADTAALRGRKRHAKTDKTDSRHLRQLLADGRLPECWIPPGHILECRALLELYHDLREEHTAWVQRIHAALFHQGAPQLAGQSLRTGDGLAALASAAGQLSPAGQLQVATALDMLAAVEGHLDVLRRRLLAAARRLTGAQVLTARLYGVGPVTALALCCWLGGAGRFSSARKAVRFAGLDVTVFSSDGKRSAGHLSRQGPEVLRWCVYEAGKTHARGGAPDHRYYASVKERIDGKRAAISQARKILRQAVHILAELGDEALTMA

SEQ ID NO: 322496 - protein, 360 aa, unidentified
MQSKVNTKSFVGQSFYVGIDYHKKSWKVTILSDHYEHKTMSQDPQPEVLASYLKRTFPGGNYHAVYEAGFSGFESCRKLNKLGIKCDLIHPADVPTSQKEKLQKTDKADSRKLARMLRGNEYHAIHIPDRKLEADRALVRQRFRIMKDVSRTKNRVKSLLFQFGIDLPARFTQPQTRYWSRIYIDWLKDIDLSQERLRQTLDNYIRIGELLRKELLVVNRQIRELARGEAYSKNFELLISIPGVGLMTAITFLVQIGDINRFKTLDDLCNYVGLVPSMHGSGEKTQTGKITHRGRKELKIMLIEASWEAIRKDPALMLKFNELIKRMNKNKAIIRIARKMLARIRHVLKYQQEYELSVIE

SEQ ID NO: 322497 - protein, 463 aa, unidentified
MVGFGGVRRNQLGQAVLRIELRARIVTWPPQRLARLRCERESVSVASARRLLTNSVERGAGDVRFIGMDVHRSFAQIAVVEDGVCRDEGRIGVKPEDLRAWAQTLGPDDQVALEATTNSDAIATMLREVIDRVVVSNPRKTRAIAEAKVKTDKVDAQILAQLLAADFLPATWVADDRTRMLRRLVARRTQLVRQRTRLKNQVQAILARNLVPTCPHADLFGGVGRRWLARQSLPADEQRSVDALIRQLDFHRTELAEVQRDIATDAIDDPVVARLMTVPGIDVTVAISVVAAVGDFSRFASPQKLVSYLGLNPSVRQSGDRPAFHGRITKAGRSQARGMIVEAAVAAARAPGPLRAFYRRIKQRRGWQIAAVATARKMAVLCWHLITHDQDYAFARPGLVAHKRRSLELAAGHPSRRGSTAGPSRDYYIKALRDQERAFVEQQERAYEVMIARWQPNKPVHKG

SEQ ID NO: 322498 - protein, 321 aa, unidentified
MSTKKSRRSFIGIDVSKRLLEVATHQSDYHFRCPNEPKAFPALIAELINLRPARIVLEATGGLERPLLQALQAVGLPVVLINPRQVRDFAKALGQLAKTDRLDARVLAHFAAAVEPPLRPLKTAEDSELDALMGRRNQLSDMLSAEKNRRGSAATDAARADIEAHIEWLEQRLKTLNKELKEQLKHCVAWQQKDKLLQSVKGIGFVISVSLLADCPELGQLNRHQIAKLAGVAPLNRDSGKQRGTRHIFAGRAQVRAKLYMATLTAIRCNPVIKAFYQQLIARNKLKKVAIVACMRKLLTIINVMVRENKCWNDKAQPVSA

SEQ ID NO: 322499 - protein, 363 aa, unidentified
MKNYIFVGCDSHEKTLVNKIAHNDGPLETKRFSARRAGRQKLIENLRERSRQAGGAQVVVAYEASSHGFILCDELRAAGFLCHVLAPTKIERSIKQKRNKNDDRDAERLLDIVRGHYLAATKMPAVWVADLQTRDDREPVRARQDLSEKQTTVKTQVQMLLKRQGIEKPEGVGTSWTKRYRLWLEALSGEGPAIQSGMRQTLKTLLRQLQFLEHEIEQMDQAMRELANTPRRKPIVDELMKEKGVGLATAMKYVTDIGDFKRFSRGRQIGAFFGLVPSTAESGENNDRKGHITREGSPSARKVLCQATWSRVQHDKQEREVYRRLVARNPKKKKIALVACMRRLAVRLWHIGFQAQLKMEAAG

SEQ ID NO: 322500 - protein, 375 aa, unidentified
MKETIRFIGLDVHKEFISVAIAGEGRGEAVSYGEIANTAAAISKLAKQLSRDECDLCFVYEAGCFGFVICRQLTGMGHSCVVAAPSLIPRKPGDRVKTDTRDALKLARLLRSGDITPCHIPDEADEADEAMRDLVRAREDAVCAYRVSRQRLNGFLLRHGNVYGGKSRWNTAHMRWILDIKLDHEAQQVVLEEYRRRVEHDDDCVDALTKQIKRLNQSWRWQPVVDALQALRGVCLITAVTVVAEMGDLCRFAHPKQMMAAIGLVPSEYSSGGKRHQGSITKTGNGHVRRILIESGWNYRFPARLTRQMERRQRGLDKEIVDIAWHAQTRLCTRYSQLNMRGKNVKLITTAVARELCGFIWDIAQQVEPKAISNH

SEQ ID NO: 322501 - protein, 328 aa, unidentified
MNIIGIDVSKSKLDCALIDNSTHRKLKFKVVSNSDEGFVTLIDWLAKHTKSSISAYHFIMEATGVYHEKCAYWLFDSGARVSVVNPARVKYYGQSLGVRSKNDKKDSVVLAHYGLTQTPMVWQPEALEIRILKALASRLDAIEKDILREKNRHEKSSINPSSQTILNSIETILFTLNKEKLHLEKLIHNHINQYEYLKNNNALLQTIPGVGPVLSRYMLIVLGGRTFQSASQCAAYLGLVPIQNESGSSLRGRSRISKAGSPVIRAKLYMATISALQHNPDIKIQNQRLLKNGKSKMSALCAAMRKLVQICFGVIKHQQPYHVQAKFL

SEQ ID NO: 322502 - protein, 327 aa, unidentified
MIHVGIDLHTRNMTLVAINDNSEEIAFASKVKANKHELERFFSSIEEPTQAVIECTSNWYWVDDWFRQQVIPLVLAHCKMLKAISYSKVKTDSVDARMLAKLLKNGLVPQAWKTEKKQRELRELTRSRLVWIRKRVTLQARLTSLAGRYNVNIEPGDWKNHPGLYKLLRSHLPMEAWLDAEITLDMISNIQQSIMKIEQAIDRQIWYTEELRMLMKIPGIGKVSAWTILAEIGDIKRFPSHKQFVSYCRLVPGSNDSAGKRKHKSGCKDGNKYLKTAFYACGYRSLFKLQHCSEVSCQVQETPAGIGSSNNCCQRNCEYCLACVVEE

SEQ ID NO: 322503 - protein, 355 aa, unidentified
MDSVKYIGMDVHKEAISIAVLNSSGKLVMECVIETKAITILQFVQGLRGSLHITLEEGTWAAWLYDLLKPHVTKIVVCNPRRNALLKEGSKSDRIDARKLAELLRSNLLRPVYHGEHGVRALKELARSYLTISKDLGRVMSRLKAIYRSWGIPCTGKQVYAPRYRAEWLAKITEAGVHRRAEFYYQQLDALRPLRQQVRQELLAEARKHSAWKLLRGIPSIGPIRAALIIAILQTPHRFRTKRQLWTYSGFGIETHSSAEHRYVDGNLQHAKKQISIRGLNRNHNHDLKNLFKSAATLAAAKAGPFQEFYDALVAKGIRPQMARLTLARKIAAITLIVWKKGVHFDAKHLKPQTA

SEQ ID NO: 322504 - protein, 352 aa, unidentified
MQHFIGCDVHTRDQVVAWIEEQTGEIKKRRLEHEGKEVKEFYAQFPRGTVVGIEATFPAYWFERLLGELGHELWVGDAARIRAREVRYQKTDSRDAEGILDLLRTGRFPRIWVPSLEERDLRQLLVHRMKQVRARTQVKNQLHALAISQGVCRKSQLWSVKGRKELDGLALLPWAARRRKELLESLDRLDEQVRELDRAVEEAGHARPDVALLRTHPGVGMVVGLAFVLSVGPIERFPNSRHLVSYWGLNPREASSGGRQRLGSISKQGNSMMRWLLIEAAQTAARLDPQLRRTYQRLKKQKTSGVAKVAVARRLAVRLFWMLRTRHNYAQLVHMSGSPGSAVVPPKTGSKV

SEQ ID NO: 322505 - protein, 342 aa, unidentified
MQVTTIGLDIAKNVFQVHGIDANERVVLRKQLRRSQVIAFFKALPPCLIGMEACATAHYWARELTKLGHEVRLMPAKDVKAYVKRNKNDAADAEAICEAVRRPTMRFVRIKSAEQQGQLMQHRTRDLLMRQRTQLINALRAHLAELGVVAAQGDRGITELLAVVADDRDARLPVDARASVIVLAAQLASLQTMIGSLEKRIQAQHRANEASRRLETIPGIGVIGASAIAATVTDAMEFRSGRDFAAWIGLVPRQDSTGGKHKLGPISKQGDRYLRRILVVGAISVLRRAMQSPDKYPWLTQLLARRPFKVVAVALANKMARTAWALLAHGGTYRAPELAAAA

SEQ ID NO: 322506 - protein, 340 aa, unidentified
MQITTMGLDLAKNVFQVHGIDAAENVVVRKQLRRRQMLEFFKALPPCLIGMEACATSHYWARELTKLGHEVRLMPAKDVKAYIKRNKNDAADAEAICEAVRRPTMRFVQIKSAEQQGQLMQHRARDLLMRQRTQVINAMRAHLAELGIPARQGREGLKELVAIVADDDTRVPVNARASLMVLAAQLQALQTLIGSIEKRIIKQHRVNEASQRLESIPGIGVIGATAIAATVADPKVFRSGRDFAAWIGLVPREASTGGKHKLGPISKQGDRYLRRILVVGACAVLKLARQKPEKYPWLTQLLARRPFKVVAVALANKMARMAWALLANGGTYRAPRIAAA

SEQ ID NO: 322507 - protein, 350 aa, unidentified
MVVVGADVHKRTHTFVAVDEVGRKLGEKVVAATSCGHAEAVMWARERFGAEVVWGIEDCRHLSARLERDLLTAGQQVVRVPPKLMAQSRASARTRGKSDPIDALAVARAVLREPDLPVASHDEVSRELKLLVDRREVLVAQRTATINRLRWRVHELDPARAPKPASLDLPKHRSLLGTWLATQPGLVAELARDELTEITRLSEIINALAKRIGERVRGVAPVLLSLPGCGELTAAKLLGETAGVTRFKSEAAFARHSGVAPVPVWSGNTAGRVRMTRSGNRQLNAALHRIAVTQIRLDGLGQAYYRHRLAAGDSTTEALRCLKRRLARTVFHHLHTDHQTHNQPCQRAAA

SEQ ID NO: 322508 - protein, 356 aa, unidentified
MNTIYIGVDFHARQQTICYLTTDTGEVQFLQLQHHDKQAVRSVYAQFTGQVIVGLEASGYSPWFEQLLAELGCEVWLGNAKEIRRRARSRHKNDRRDAELILELMLHNEFPRLYVATVQSREVLRMLRYRQKLIKMRTMVKNSLQALALQSGLAKGSRLFSKAGLQELRCAPMSPAMQWQREQWLQLLEGLNQRVLEVMQWLQQQSVNDPRLGRLRTHPGIGLLTALCLVHALEPVKVRFRNARKVVGFAGLDPLEDSSAERIRCGSISKAGPRVLRYLLGEAAHLSVKHDDELNRFYKRLVERRGKPKAKVAVTRKLLVRAYIMLRDEIDYAEFKRRAVAARLARQNSGTPCLCS

SEQ ID NO: 322509 - protein, 382 aa, unidentified
MDLIVACCAGLDVHKKTVVACVRRAGPDGRVDRAVRTDRTMTADLIALADWLDAEGVTHVAMESTGVYWKPVFHLLEGRFEVLLVNAHRIKNVPGRKTDVKDAEWIAQLLQHGLLEASFIPPPPIRELRDLTRGRAQLVRERAAVADRIQKVLEDANIKLASVATDVLGASGRAMLAAIVGGVDDPATRAGLAKGSLRRKAPELAAALRGLVTDHHRFLLRALLRQVEQLEGLIAEYTARIEQVAVPFAEAAGRIEAIPGVGARAAEAIVAEIGTDMATFPTAGHLASWAGLCPGNDQSAGKRRSGKTTKGSRWLRTTPVQVAWAASHTKETIFGATYRRWVKRLGKKKALVALGHKILVVIYKLLKDRTEYRELWRAPAAA

SEQ ID NO: 322510 - protein, 465 aa, unidentified
MAKAQKSRSKSRAKQNHRAKLKPQDCTLGLQVVHPKAAGIDVGNEEHWVAVPPNLDPEPVRSFGCFTKDLQEMADWLVRCGIETVAMQSTGVYWIALYDILAERGIGVFVVNAQDTKNLPGRKTDIQECQWLWKLHAYGLLRNSFRPEEEILVMRTYWRQRQQHIGDASRCIQHMQKALTQMNVQLANVISDISGTTGQAILGAIVAGERDPHKLAELRDPRIKASEARVAKSLEGNWRSELVFVLRQELESYQTFQTKIAECDQQLHRHYKSMEAKADPKQLPQIPRDKRAHGNIPAGFDLRAELYRATGVDLTAIDGINVLTAQTLIAEVGYDMSRFATEAHFVSYLDLSPRNKISGGKVVGREKRKTKNRAGLALRLAAGTLLESDTYLGAQYRRLRTKLGAPKARKAMANKLARIAYRMLKYGEKYVEKGKELYEQKYRQLQIRMLTKRATELGLQLVQPA

SEQ ID NO: 322511 - protein, 353 aa, unidentified
MMEMLTTIDAREEETMAKVTVIGLDLAKNVFHVVCCDGRGKVVGKKRLKRAQVLDYFAKLEGCVVGMEACAGAHYWGRQLKALGHQVKLLPPLYVKAYVRGNKNDYNDALAIAEAVVRPQMRFVALKTPEQQDIQALHRLRERRLQERTALCNQVRGLLGEYGLVLPKGVNVLRRRLPELLEDAENGLSDVFRRLLAESYRQLRELDAHIEFYATELARQSRLSEACQRLETIPGYGPIVASVFHSVVGDGSGYRRGRDVAAAVGLVPRQHSSGGKQSLGGMSKRGDRYLRSLLIHGARSVVVQAAKKNDPLSRWVNKVRAERGFNKAAVALANKMARIGWAVLHNKTVYQAV

SEQ ID NO: 322512 - protein, 336 aa, unidentified
MKTLSISQLKNCTAIGIDVSKKTLDFAGLTAGKTILYQLNNTVESIEKLAEKLVESQYKGKIICESTGHYHLKLVSVFSKHNLNLYVINPLQSSKHSKANIRKTKTDPVDAETLATMCLTERNLPKPTKLSDRNLLITLKVGQIKAIEKLIQKMGSSLRLFEETYQGLGFDLDEVQQDLATKLAELKSLHKRMLRELEALIVETNESARDTDILASIPGISSTTAALLSQLDRRVKSCHSWVAFVGLDTSIRQSGTWRGKGKLSKRGNTYLRKRIFCSAWGATMHDEHFKAYYDKLRAEGRSYKEALCILAKKQIRIAYHLLSSGEKYDPIKAFGA

SEQ ID NO: 322513 - protein, 345 aa, unidentified
MLAEQTDFVIGVDTHRDRHSAAVLASNGGLVDETSASADRGGYATLLGWARRHASGRRLWAIEGSGSYGAGLTSFLDQQGEWVVEIGRRVRRNGPNRAKSDPLDAIEAAREALSQRRHAAPRAAGEREALRVLVNTREGAILARTAAINQLRALIVAAPEPLRASLRSLSFAELVTRCARLRPGARDVTTRASALALRSTARRIAALSAEARQLTREITHLVETKAPALLEEPGVGPISAARVLIAWSHRGRFHSEAAFAMLAGTSPIPASSGQTVRHRLNRGGDRQLNRALHTIALSRRATHRPTRDYIDKRVRDGKTTRDINRSLKRYLARRLFRLLERSAMT

SEQ ID NO: 322514 - protein, 342 aa, unidentified
MGEATVLYGGLDLHGDNVFCTLMDAARNVRFEQRFPNDLFTITEGLKPFRKWIKALAVESTYNWYWLVDGLRKVKYDVRLANPARMQENIGLKAANDKTDARFIARQLVNGILPEGYIYPEETRGVRDMLRRRMRLVHERTSEWLSLMSLVARHTGQDMTIAELEGCDLKAVLEGQPHALVMAHASERHIVFLNDEIKALEKEVLRELPDKETYKRLMTVPGIGLVLARTILLETGPVSRFKEAGNYASYCRAVSTVHTSNGKKKGEGNGKCGNRYLAWAYVEAANCAARYSPEMHAWFQRKQSRSGKRVIAVKALANKLAKACYFMMRDGTDFDVKKLTGI

SEQ ID NO: 322515 - protein, 356 aa, unidentified
MLYLGIDQHARQVTISLRDEKGDVVQARQVSTAPDKISDFFQQLTRERISNGEPFVAVLEVCGFNDWLIRMLQDYRCHKVILIQPDDRKKRKTDRRDAAALSELLWANRDRLLQGKPVRGLRQVDIATSTDQENRRLTTLRKDAGRDRTRIINKIKQILRRYNWQWEMPTKTFPTVSAIAWLKKLVLPEIDRLEMNHLLADVEQVEKRLKELEQVIARRVAASKEAAILSSMPGMGGGFTALSLACRVGRVERFPRAHSLANYWGLTPGCCNSGENSQRLGSITKAGSSTARWLLAQLVLKVLRKDARLREWFKRIKRRRGASIARVAVMRKLATIMWHMLNKRKTYAECRELAAA

SEQ ID NO: 322516 - protein, 407 aa, unidentified
MISIGIDISKDKSTICALKGGSETIWKPFDLMHLQSDMQSFISKLEALTGELRIVMEATGKYHLPILYSLKSKGYFVTVVNPLKMKQFCRSMSFRKAKNDNIDSRLIAEYGLIYWHKLEEYKLDREVYQNLKHLNRSYHHYMDLRISQMNFLDTFIDQVFPGLKKLLPHGSGDFNKDKLLDFLEVWWHKDVVISKGEEEFIKDYQKWAKEKRYHPNAKKAQAIYKVALEGISTQPSNSPYIKADVYESIQLVKRINQSLNCILSQMLDLAEPLEEFQEAKKFSGISDKLAVQITAEFGDLSKFRNKKCLISFVGIDAPTYESGDFKGNRRKISKRGNAILRKVGYQAMKCMMGAKNPENPVYCYMVKKEEEGKAKKVSKFAGLNKFLRIYYARVIEAKEEKTSKKAA

SEQ ID NO: 322517 - protein, 355 aa, unidentified
MSQEKYIGMDVHQATISVAVRDVLGKLIMESVLETKASTILEFVQGLRGTLALTFEEGTSAAWLHDLLKPHVSRLVVCDPRKNALLKDGNKNDRVDARKLAELLRTNQVKPVFHGEYGTRTLKELGRSYLSITQDRTRVMNRIKSVYRSWALPCAGTSVYTRRHRGEWLAKLVEPGVRIRAEHLYQQLDSLEPVRQEARRQLLLESQKHAAVKLLRQIPSIGPIRAALLVALLQTPHRFRTKRQLWAYCGFAVEVHDSGEYRWVRGKLQRNRERITVRGLNHNHNSDLKNLFKGAAISASTRPGPLQDFYLARVAKGVRPTMARLTLARKIAAITLTMWKKGANFDIQQLQRQAA

SEQ ID NO: 322518 - protein, 386 aa, unidentified
MEHYVGLDVSLKLTAICIVDRTGKIQREGVVHSDPEAIAAFIKSNAPHVARIGLETGATSTWLWTELNKMGLPVICIDARHAKAVLKMQINKSDRNDAVGIARIMQCGWYKEVRVKDLDSHAVKALLVSRALLVKIKRDLENQVRGLLKNLGLVIGPAKMNAFALRAAELTEDRPELAAAVAPLLNARAAIELQIADLDRKVMKLARSNAQVRQFMTAPGIGPVTALCFLATIDDPGRFKRSRSVGAYVGLTTRRYASGEIDWTGRISKCGDKMLRSYLYEAANVLLTRVAKWSALKAWGIRLANRSGLRKAKVAVARKPCGHSAPDVDRWYRIQMVIKGGCPATSIANYRIPADHGGIQGPCRDVGVGAIAPGFAMLKRQARFTH

SEQ ID NO: 322519 - protein, 336 aa, unidentified
MKEFTSCIGIDISKDTFHVCCKQSVGEQFVIKGTHSFENSYTGFTALLDWTLTKTKNAETLYVMEATGIYHEELTHFLYSNAQTVAVVLANKINHFAKSLNIKTKTDKADASMIAHYGLERFPEAWQPMMPQMKSLRDLCRERLSLKQNIGSLKCQLHALKNAHGTLEFVFQMKQKQVEFMEINIQAIEQEIKRITMEDKDFYERVKKIETIKGLQSITIVTILAETNGFAQFNNIRQVVSYAGLDVAERQSGLFKGKTRISKKGNSRIRQCLFMPALSATNHNDKIKALYQRIVERNPTIKRKGVVAGMRKLLILTFVLWKKNEAYNPDYQWNIE

SEQ ID NO: 322520 - protein, 342 aa, unidentified
MEYYVGLDVSLKQTSICVVDQAGLVVREGVVDSDPEAISVYVRSKAPDAVRIGLETGPTSTWLWTELKRLGLPVICIDARHAKAVLKMQINKSDRNDAIGIARIMQTGWFKEVHVKDIDSHSVRALLASRALLVKIKRDLENHVRGLLKNLGLVIGRAKFNVFAVRAEELIEGRPELIATIRPLLEARNAVGQQVSELDRKVMKLARHDAQVRRFMTVPGIGPITALAFKATIDDPTRFARSRSVGAYVGLTSRRHASGEVDWSGRISKCGDAMLRSYLFEAAGVLLTRVPKWSAVKAWGVRLAKRNGLRKAKVAVARKLAVILHRMWIDGTEFNWSKEIAA

SEQ ID NO: 322521 - protein, 323 aa, unidentified
MQGKVSPERSAAIRVYVGIDVCKAWLDVFLHPIGRQFRFANSREGLKRLKRELANLEVVLIVMEATGKYHREAHRSLHASGFIVAVVNPLRSRLFAEATGMLAKTDQLDARILAVLAESLAPKAKPPAPEILEELQELVRAREAAVADLTALSNQHSESKTAILRRELARRIKATQASIARLEAEIERRIESDPALARRYLILLSIKGIGPVAAAALLVGLAELGVCSGKQVALLAGLAPVACDSGESRGERHIKGGRGDVRAAIYMAAITAARYNPDLCNFYRRLRNKGKKFKVAITAVMRKLVVLANTLIREDRLWQPTHA

SEQ ID NO: 322522 - protein, 350 aa, unidentified
MSQKLESAIAVIGIDIGKNSFHVVGHDERGAIVLRQKWSRGQVEARFANMPPCLVGMEACVGAHHLSRKLNSLGHNARLMPAKYVRPYSKGQKNDFRDAEAVQRPTMKFVATKTTDQLDLQALHRVRERLVSQRTGIINQIRAFLLERGIAVRQGLRFLRGELPRILATPPDVLSPRMVHIIEDLAGDWRRLDERVEGMSNEIEAFARQDAGCERLMSVPGVGPIISSAMVAAIGAGDVFTKGRDFAAWLGLVPKQISTGDRTILGKISRRGNRYLRVLFVQAAWVVLIKPQSWERHGLKSWIEAAKKRLHRNVLAIALANKLARIAWSVLAHGRSFEASKLAAAVTQPV

SEQ ID NO: 322523 - protein, 391 aa, unidentified
MFAGIDIASERHTLARLDDTGAPVGKPMPIGEDREGYDALLKALGPGPVLVVMEATGHYWKNLFAVLTAAGHEVALLSPLVARRFQDSSLERTKTDAIDAHGLARLGFEKRPTPTRLHDEVAESLRELVRHRDRLRQDFDDRVRQLHRVVDLGFPEFTRYVRTLDSMLATSLLAEYPTAHAFARANPRRLAKLRYDGRHLVGDELAQQLVDAAARSIGQHHGPAYTLQARHICQDLDLWRRRLSEIERDIENLLDTHEVGKLLTSIEGIGPQSAARVIAAVGDPARFRSAAAFAAYVGVVPGLKQSGKRIGLRAPIGPLGNAKLRSALWMPVLSAVRRNAWLRAFYERLRAAGKPPKLALIAAMRKLLHAVYSVAKQRAPFTIRTQQARAA

SEQ ID NO: 322524 - protein, 354 aa, unidentified
MNYVGVDIHKRYSVLVAVDERGRELARGRISGNSVHAFAQFFEALQGPGKVVLEACWNWGRIYDVLSEIEQVEEVVLAHPLKTRLIAEAQIKTDSLDALALATLLRGNLIARAHVPSKATRARKELLRQRLYWARLRTRVRNRVHAVLDRQRELEMPQCSDLFGRKGLNALSKLRLAEPDATLLGEELDLLKLIDSQIKAQEGRIVAFNANEQATQYLQSLPGMGKILAAVAAAEIDAIERFDGAAKLCAYAGLVPTTYGSGGKVHQGHLLKSRNKWLQWAFIEAAWVAVGCSSYFGGIYRYQRARGKKANIAITIVARRMCRIAFTLLKERRNFQEQHRTFPGRSAVRLTAAA

SEQ ID NO: 322525 - protein, 404 aa, unidentified
MLFVGDDWAEDHHDVYLMNDAGDRLASRRLPEGLAGIERLHALIAEHADDPAQVVLGIETDRGLWVDALTAVGYQVFAVNPLAAARYRDRHHVSGAKSDASDAKLLADLVRTDRHNHRLVAGDSSAAEAIKVLARAHQNLIWARTRHTNGLRSALREYYPAALEAFEDLADRDALAILGRAPTPADAQRLSVSKIRAALKAAGRQRNLDTRAVQIQEMLRSQQLTAPAAVTAAFGASTRAAVGVIAELNRQISDLEAELATHFEAHPDADIYRSLPGLGVILGARVLGEFGDDPNRYTTAKCRKNYAGTSPLTIASGKKRAVLARHVRNRRLYDALDQWAFCALTTSPGARAFYDHHRAAGDLHHQALRALGNRLVGILHGCLRHHSTYDEHQAWAHRQATTAA

SEQ ID NO: 322526 - protein, 349 aa, unidentified
MVADELDYVIGVDTHLDEHVLAIVAARSGAVVAQHSIQASAPGYAAALRFAADEANSARVWAIEGTGSYGAGLARFLAGRGETVLEISRTPRAERRLRGKDDSLDATRTARAALASETLALPRSGERREALRLLLVARRSAVDVRREALGQLRGVIVTAPDKLREELRVLPTGRLLKRCSRLRRSSSAGADELATRLVLRSLARRIEAATLEAAELERELLGHLRALAPALLDEPGVGPIVAAQLIVAWSHPGRVRSEAAFARLAGVAPLPASSGKTTRHRLSRGGDRQLNRALHTVVLHRRQYDPATKDYIARRIAEGKSRRDATRLLKRYLARNLYRLLEAGAPLAT

SEQ ID NO: 322527 - protein, 361 aa, unidentified
MKIMTGIDLHSNNALCGLMDESGQRLVHKQLPCELSAILQLLDPYKDRIDTVAIESTYNWYWLADGLQDHGYHVVLANPARMKPYDGLKHTDDVSDAFFLTELLRLKILPTGHLYDRKTRPVRDLLRRRLMLVHQRTTLILSFKSLNERTLGRRIALSRVKTMPVAEARALFADPADQLLSGTEIELVGRFTQAIEQLEAHVLGVAGKWDPYQRLQTLPGIGKILGLTIALETGDPKRFATAGNFASYCRCVKSRRESNGKKKGENNRKCGNTYLAWAFVEAAHFARRYNAACRRFYDRKKQPTHPVIATKALACKLAKAAWHVMAEDAPYDAERVFGPGQKTDIGETGREPAKGSGHPSQ

SEQ ID NO: 322528 - protein, 368 aa, unidentified
MGKSSTVLVGMDVHKDSIEVGLAEVGGEVRHYGRIGGEAVAVDRLVRKLRSVHRELVFVYEAGPCGFWLYRRLTAQGLRCWVVSPAMTPRRAGDRVKTDRRDCLALARLARAGELTPIYVPDAWDEAMRDLVRTREDAVAMQRQARQRLQALLLRNEIRYVGKSAWTQAHRRWIAHLKLPSGPQQIAFEEYVQAVEEAGQRLGRLTGAIEAELEHWRWRPVVEALQALRGISAIHAVRVVAELGDLSRFESPRQLMGYLGLIPSEDSSGPRRRQGAITKAGNTSARRALVEAAWAYQHPARVSWVIARRQSGLDRRLCDIAWKAQLRLCTRFRRLAARGLHKNKIIVAIARELAGFVWAIAREVKPAA

SEQ ID NO: 322529 - protein, 349 aa, unidentified
MEHYAGIDVSLELSSVCVVDAKGKIIKEAKVVSDPDALVAFLRELGVSIERIGLEAGPLSQWLHAGLTKAGFETVLLETRHVKAALSAMTVKTDRKDARGIAQLIRMGWFRPVHCKSPGSQEIRALLVARKLLLGKLLDVEFSIRGILRGFGLKMGLVTRKGFEARVRELSAGQAMLEQVCAAMLAARAGLQAEYTKLHKALLTIVRNDQVCRRLMTAPGVGPVVAITFKTAVDDPTRIAKSKAVGALFGLTPKKYQSGETDVTGGITRVGDAMVRTALYEAANILLSRVTRFSALKRWGMDVLKRRGTKRAKVALARKIGVVLHRMWIDGTNFRWTKAERATEGASPA

SEQ ID NO: 322530 - protein, 351 aa, unidentified
MIIIGCDFHTRFQKIAMVDTETGEIAKRRLEHGNDEARAFYATLPGPARVGMEATMNAQWFERLLEEYHHELWVGDAAQIRAAAVRKQKTDDRDALHILDLLVRDKFPRIWIPSPENRDLRQMLRHRDKLVRIRTSVQNQLHALAMSQGLCRKAKLWTKAGRKELEGLPLDPWASRRRRELLQLFDQLDPQIEELDKVVIQEAEKRPAAVHLMTQRGVGPVTALAFVLTIGAVERFPTSKHLVSYLGLNPGEDSSGGRQRLGAISKQGNSIMRHLLSEAAQTAVKFDPELRRDYLRLKFRRGISGVAKVAIARKLAVRLYWKLREVAQPNTAARMQGSPTSLMVEATPSRN

SEQ ID NO: 322531 - protein, 409 aa, unidentified
MEVLYERCCGLDVHKKSVVACLLISQPAGEPVKTIRTFGTMTADLLALADWLMEAGCTHVAMESTGVYWKPIWNLLEDVFTLLLVNPRDSKAVPGRKTDITDAEWITDLLRHGLLRSSYIPARPQRELRELTRYRTSLVRERTAEANRLQKALEGSNIKLGAVATDILGTSGREILQALVAGATDAAALAQLAKGRLREKLPELERALVGSFTAHQRFLVAEQLAHIDFIEAAIARVSAEIAERLRPCAEAVARLDTIPGVGPYLAEALIAEIGTDMSRFPSPAHLASWAGMCPGNHESAGKKRSGRTRKGSPWLRTLLVQAAHAGARKKDTYLGAQYRRLAARRGKSRAAVAVGHTILVIAYYLLRDGTVYHDLGSRYFDERDRRAVERRLVHRLEGLGYTVSLQPAA

SEQ ID NO: 322532 - protein, 341 aa, unidentified
MTCTTVGVDIAKNVFQVHYIDEETGELVNKPIRRARFLEYFANRAQCVIGMEACSGAHHWARQFTKMGHQVKLMPAAFVKAFNIRNKNDAADARAIWLAAQQPSKPIAVKTEMQQAMLALHRMRDQLVKFRTMQINSLRGLLTEYGEVMGKGRVALDKAIPDVLTRVAERLPAALIDTLREQWNGLTKLDEQIAAIERRMHAWVKEDRAVKAISDIPGVGMLTATAAVSMIGDARAFRSGREFAAWAGLVPKQTGSGGKVNLHGISKRGDTYLRTLLIHGARSVLAHSKEPNQWVERISKRRPPNVVAVALANKMARTIWAVLAHDRPYQKGYASTKPARR

SEQ ID NO: 322533 - protein, 413 aa, unidentified
MKMNIVYRSCCGLDVHKKTITACAVYTDENGKRRLERRVFGTFTQELIALAAWMHERGVRQVAMESTGVYWKPVWNILEGQFELLLVNAQHIKAVPGRKTDQKDSEWIAELLEHGLLKSSFVPPREIRELRDLTRYRVTLAQECNRVANRIQKALEDANLKLASVATDALGASGRAMLKAIIAGEEDPATLAEMSRGLLRRKKADLALAMDGRVSSHHRWLLGELLRHLEFIESSMERLDKEIAARVEPFADAVRRLCQVPGIDRITAWGLLAEIGLDMNQFPDAKHLASWAGLCPGNWESAGKRKSGRTRKGSLWLRRCLCQAAWGISTKQKNYLSALFRRLAARRGLKRATIAIAHALLVIAYYILKGAEYRELGANYFDRLNPDLAKRRLVKRLEALGHKVILQPLALPS

SEQ ID NO: 322534 - protein, 364 aa, unidentified
MYEHTHIGLDVHKESIAVTVLRPGVSECDERVIANPPEALRKLFARYPERAALRTCYEAGPTGYEAHRFLSSLGIACEVIAPSLVPRRAGVRVKTDRLDARNLDRLYRAGELVAIRVPTPAEEALRDLVRAREDLKGDRRIARQRIRSFLLRYGVRYPHGPDRWSHRFEVWARALRFEEAACQAAFEHLLGAYLVRDAQLAAIGRQIEELALAEPLAASVARLRALRGIDTLTAVTLVSEVCDFRRFGSAASFMAFTGLVPSEHSSGASRRQGGIAKTGNRHLRRVLVEAAWAYRHAPALRGGLRARQDGQPPEVVAYSWAAQCRLHATYRRLAPKKGANKAVVAVARELAGFVWGAMTDNMAA

SEQ ID NO: 322535 - protein, 430 aa, unidentified
MNCNAQNKKIEAITETTLVIGIDVGSETHYARAFDHRGLEYSKKPFKFSNNEAGFATFKAWILEYKEAHGKDKVVPGMEPTGHYWFNLGKFLQDNEMKPVLVNPHHVKKSKELDDNLQTKNDRKDPKVIAGLVKEGRYMIPYLPDGVYADLRTASNVRFQIQSELTRIQNRIGRWFNIYFPEYRTVYGNIDAISGMMVLKQAPLPDDILTLGVDGINRIWRDAKLRAVGKKRAQTLVTAAEHSVGSKEGATAARMEIRMLIEDYESRNARLQEIMTLIDELVKQIPMAEKLLGIKGVGIKTVSGFLAEVGDINRFNNPKELQKLAGLAIVENSSGKHKGETTISRRGRKRLRYLLFEVAMSLVAKNREFAEMHHYYTTREQNPLKKMQSLMAVAAKLIRVFYVILTKGVDYDPKKMVDDIRRPVAYLQAV

SEQ ID NO: 322536 - protein, 320 aa, unidentified
MTEAQRYVGIDVSKDTLDVAVAPTGQQWRVSYTEEELGPLVERLQGLSVALVVLEATGGYEMPVAAALGAAGIPLAVVNPRQVRDFARATGKLAKTDKLDAQVLALFAERVGPAPRPLPDPQAQELNALLVRRRQMVAMLTTERNRLGSASPSVRPEIQEHIAWLEGKLGGLNDRMGKLLRESSLWREQEDLLRSVPGVGPVLTLTLLAELPELGTLGRREVAALVGVAPLNRDSGAFRGRRSIWGGRAKVRAALYMATLVATRHNPVIKAFYQRLLAAGKAKKVALTACMHKLLTILNALLKHRSPWQPLTLQMVARCS

SEQ ID NO: 322537 - protein, 409 aa, unidentified
MQVVHEVCCGLDVHKKGVTACVLWASGRRRQTRAFGTFTRELLELGDWLRACGVTHVAMESTGVYWKPVWNLLEGQFEVLLVNAQHIKAVPGRKTDQKDSEWIADLLQHGLLRASFVPPTPIRELRDLTRYRASLAQEINRIANRIQKVLEDANIKLASVATDTLGASGRAMLEAMIQGEQDSRRLAEMAQGKLRNKIPELQEALQGRVSRHHRFLLRELLDHLYFVESKMQRIEQEVAERLGPFQSEVARLCTIPGVDRVTAWGLLAEIGLSMKQFPDAQHLASWAGLCPGSHESAGKRKSGKIRKGSLWLRRCLCQGAWAVSTKKNNYLSALYRRLAVRRGSKRATIAVAHKLLVIAYHILRDGTCYSDLGADYFDRLNPEGLRRRLTKRLEGLGFKVTLEPLAQVA

SEQ ID NO: 322538 - protein, 347 aa, unidentified
MKELKQVVGIDVAQKELVVTLGRMFEDLSIELYAYKVFKNTEKGFVGLSDWVKKITKTEVKVLYVMEATGVYHQKFAYYLDKSNCNICIVLPNKISNYIRTLDIKTITDKTCSQAIARFGLERKLDLWKRPKSIYKNLQQLTRERDQIVGERVIVKNQLHAEESEAEPNEKSLTRIKARIRFLNTQEKEIKDDINAIVKSDENLKSEIDIICTLPGVGELTAVIVLAETNGFELIRNKRQLTSYAGLDVKEKQSGTSIKGKPRISKKGNRSLRKAMHFPALVAVKWDENFRELYARLVSKHGIKMKALVAVQRKLLEMIFTIFKNKTIYDKEYENKKQIQKIACKYK

SEQ ID NO: 322539 - protein, 309 aa, unidentified
MLTAEADKCKTKVVVNTAAGVQALLAWCAKHGAQPAQLHAILEPTGLYHEQAATALPQVRVSLVNPAQARDFAKALALRSKNDALDSYVLARYGQTLSPALWHPAPLHARQLRALLTRREALSKDLLRELNRKEKSQFSPSAPLVDGSIDKAIAFLREQIKQIERAIDQHIDNHPDLKQDCELLNSIPAIGPQAGNAILAVMHNRHIDSAQSLAAYLGVVPVQRQSGSSLNSCARLSKAGPSQVRATLYMAALVGTRHNPHIRALYQRLLKAGKSKKAALGAAMRKQVHLCFGVLKNRIPYQPNYAMNG

SEQ ID NO: 322540 - protein, 528 aa, unidentified
MPISVNVTPLQVAKAGCPVVTLYPSRSLVSGVGGNDIGESIIRQNVRSPGKENATKMLPCACEPSITLEDKGMSQRKRKARKSKINVSNLPPHLRHINLNAAGIDIGSDRHLVAVPEGSDDVSVQQFGAFTSDLHEIANWLEKCGVTTVAMESTGVYWIPLFEVLEQRGFEVKLVDARHVKNVSGRKSDVLDCQWLQQLHTYGLLQGAFRPPDEVCVLRSYARQKEMLTQASSMHIQHMQKALQQMNVLLHNVVSDITGVTGLKIIKAILAGERDPNVLALNRQEGCRNSKETIAKSLVGNFRDEHMFALKQAVELYEFYQAKIAECEQALIKHLGTQPDVTDDQPPDSGKHVRARERMRANVDVREKLFKMTGVDLFAIPGLAADTLLTLASEVGIDMSPWKSVKHYTSWLGLCPGTKFSGGKALDRRTKRNANRGAQAFRMAAASLARSQTALGAFYRRIRSRTDGRRAITATAHKIARIYYSMLTKGTAYVEAGQQAYEHMYKERRINALKKQAHSLGYQLQLAS

SEQ ID NO: 322541 - protein, 401 aa, unidentified
MSGLKGSFNGFVGIDVSKDKFDACGITGEEAKLFQFSATMDRKGFDKLKGHLASVSVSSVLIGMESTASYHVNLFSYLVSEGYNVILINPLLISNYVKMQLRKTKTDKKDAVVIAQFLRTNGGTLIQRVTSSLISDLRDLARQRESLVDEMTALKMEIKRLLNITFPELEHMAGIFTKSILKLLQRYPSAFALRDADLGQLSQTLIADSYGHKREAFATELIKTAHASIGSSSPAKEMILKQKIALLLHLEEALQEITDVLIEMSRKLMEEDINIMTSIKGIGDKTAVSFLIEMGCDINQYDRSGKIIAMAGLDPAVYQSGNHEGKGRITKRGNRHLRRVIWLMTTRVIHYSDIFKVYYIKRRKEGLPYKMAVLATAHKLIRVIYAMLTQRTSFCPQTNSL

SEQ ID NO: 322542 - protein, 417 aa, unidentified
MKDILETCCGLDVHKDTVVACLLKGNVDGEPTKTFRTFSTLIAGLEELRTWLEEENCRHVAMESTGVYWQPVYNILEEAFDSNIALIVANARHMKNVPGKKTDMRDAEWIATLLRAGLLEGSFIPPKPIRELRNLTRYRKSVMEEIASQKNRIEKHLQSCGFKLSTFLTDIFGLSGRAIMDHLAHHGKITPQEIEALVKGRARKKADEIKQAVNGQMDVHQREFLKLLLGWLDQHYEHLRQVEQKLEEKLKQYQRQLQHLDSIPGIDKTAAAAILAEIGIDMRCFKTAEHICSWAGLSPGNNESAGKRKSTHVTRGNTYLKRILCEIGWCITRIRSSYLSSWYWKVKQRRGAKVALVALARKLLVIIYNLLKNDVDYDEASFEKAKQKQHGFRVKKIIDEARKLGLAIVEPYKSHAT

SEQ ID NO: 322543 - protein, 356 aa, unidentified
MSRDIKYIGMDVHKEAIVIAVLNDSGKVVMESVIETRASSILQFLHGLRGELHVTWEEGTWAAWLYDLLQPQVQHILVCNPRRNALLKEGSKSDKVDARKLADLLRTGMLRSVYHGENGLRTLRELGRSYQTISKDLTRVMNRLKALYRGWGIACAGTQVYAARSREEWLSKIPQAGVRRRAELLYQQLDGLQILRRNVRPEFLAESRKHKAAKLLRQIPCIGPIRAARLIALMQTPHRFRSKRQLWTYSGLGIETHDSAQFRFVSGQLQRSKKPQQIRGLNRNHNHEMKEIFKGAATRASCSRGPFHDFYAGLLAKGMKPEMARLTLARKIAAITLTLWKKEERFDAEQLKQQAA

SEQ ID NO: 322544 - protein, 409 aa, unidentified
MYYCGIDWSEKTLEYHLRNAESKVLCKGVVAASVGGLAELYGVLERHACPEEIGVAIETCHGAWIQAMLDRGYIIYPVNPKTVERFRQACSASGVKTDKIDSKVLSMFLLTFHKENKPLRPDAPEIIKLRLLCQDRLRLTEEHTAKIHELGAVVKCYYPAFVGLFGRMDSDIALDFLIRYPTQSQFKKLSDRGFSNWVGRHHYSCPRRIEGMLEKLRAPVFGVAEHLQESKKHLICYLSRSLKLLNAEIAERDREINDHLDGLPESDWVRSLPGAGNVLAPSLLACLGRDPERFGSTGEARAFMGTAPVTVASGNSCSVHFRRGCWKFARRTLQLFAEQSRHQCCWAQAFYEKQRAGGRKHHAALRALAHRWLKILLAMKRTGSCYNEAVYLNDQRRHILKIPMLKAVN

SEQ ID NO: 322545 - protein, 344 aa, unidentified
MSVFVGIDIAANSFEMVSRKNGKVSKVESYRQTSQGHAQALKRLTVLKPALIVLEATGIYYFDLAVALAQADLPVAVINPKSFHHFASLKLANSKTDGVDAALLAEYGERMQPQCWMPPDETRLALRDIGRQINRLTGTRSQAKNRLHALQSKRSTLPLLVEDEQAGIALLDQRIERLSEAALSLIAESPALSRDFSNLCAAKGVGKATALSVLGELCVLPCELKAPQVSRFAGLDVRLTQSGSSVNRPARLSKAGNAYLRSALYMPAMSAVRYDPRAKAFYENLVARGKKKIQALCAVMRKYLTGLWACLKTKTAFDSTLLFSEQHKKLDGKQSIYTGGTLFL

SEQ ID NO: 322546 - protein, 343 aa, unidentified
MDHFAGLDVSVKETSICIVDDTGRIVREVKVASEPDALLPILKNDAYRFRRIGLEAGPLSQWLFSALAEAGLPAICVETRHMRAVLQAQINKTDRNDARGIAQMMRAGLYRRVHVKTLRSQKLRMLLTHRKLLQSKAIAIENDLRATLRNFGLKVGMVGTVKFEARIKELIQKLPDLADLVEPLLIVRGVLRQQLGILHRRLLAIVRDDAVCRRLMTVPGVGPVVALTYRATVDVPARFHNSKAVGAVFGLTPSKYQSGEINRTGAISKCGDEMMRMVLYEAAQAMLTRTNKWSWLRAWAMKIARYRGMKKAIVALARRLAVIMHRIWVDGTEFRWTREVAAA

SEQ ID NO: 322547 - protein, 425 aa, unidentified
MVDGSYALVGGHFMHVTIEGGTVDHTTIEVVVGIDMAKGDHFAQAITMSGEELFARPLANDQADIEAMIETAGEHGTVALVIDMTASVAQLLLSVAAQQDVPVAYVTGLQMRRAADLYAGTAKTDPRDAFIIADFARRNIDRLTWLEVSDELLVELRVLNGRDVDLAGDATRTINRCRDALVAVSPALERAIGGRLTKAGVRDAVIKFPTPSALKAAGKARIRTAINKRSPRLAVKVADEIWDALEAQSVTLPAEQAWGEVISDLLKDLERVQARRVELGAQIEKVFLSHPLGQVLVTLCGFGPRTGARTLAEIGDPSRFESGSRLASYAGLAPTDWRSGRSINGAFQHRGGNHRLKNAMFLAAFVATQHDPDARAYYQRKRDEGKKHNAAVICVARRRCDLVLAMLKTATPYDPSRHEELPIAA

SEQ ID NO: 322548 - protein, 346 aa, unidentified
MLADELDYVVGVDTHRDEHVLAVVTAPAGAVVARRVIGADRRGYREALRFAGQVAAGRRVWAIEGTGSYGAGLARSLSEQGEAVLEIGRTPRTERRLAGKDDSLDAVRIARAALASEKLALPRRGERREALRLLLVARRSAVDVRREALTQLRAVIVTAPESLRDDLRRLPLGKLLDRCSRLRRTSAADELATRLVLRSLARRIQAATIEAAELEREILAHVRALAPALLDEPGVGPIVAAQLIVAWSHPGRLRSEACFARLAGVAPIPASSGQTLRHRLSRGGDRQLNRALHTIILHRRQHDPATRDYIARRVSEGKSTRDATRLLKRYLARHLYRLLEKQPAMT

SEQ ID NO: 322549 - protein, 332 aa, unidentified
MSIIGCDLHSRYQVIAMLESGTGEVITRRLEHEGGEAQRFYAGLKERSLIGIEATGYTQWFERLAAELGHELWVGDPAEIRARAVRRQKTDTRDAEHLLDLLVNHRFPRVWAPTPEERDFRQLLKHRDKLVKMQTSVRNQLHFLAMSQGVCRKQRLWSEGGREELEGLGLGRWASRRRQELLELLDRLGPRIEELDAAVKAEAARRPAAVRLMEQKGVGPVTALAFVLTVGPIERFPTSRKLVSYLGLNPREDSSGGHQRLGHISKQGNEMVRWLLVEAGHTAAQYDLELRRRYQRLKFRRGGKVAKVAIARRLAVQLYWMLRRDAAGSHVR

SEQ ID NO: 322550 - protein, 350 aa, unidentified
MVVVGADVHKRTHTFVAVDEVGRKLAEKVVGATSAGHAEAVMWVRERFGAQVVWAIEDCRHLSARLERDLLTAGQQVVRVPPKLMAQVRASARTRGKSDPIDALAVARGFLREPNLPIASHDEVSRELKLLVDRREDLVGQRTSTINRLLWRVHELDPERAPKPRSLDLAKHRTLLGDWLATQAGLVAELARDELADVTRLTEAINALAKRIGERVREVAPTLLAMPGCGELSAAKLLGETAGVGRFKSEAAFARHAGVAPIPVWSGNTAGRVRMTRSGNRQLNAALHRIAITQARLDGLGQTYYRKRLAAGASNPEALRCLKRRLARVVFGHLHTDHQNRIQPCQPAAA

SEQ ID NO: 322551 - protein, 350 aa, unidentified
MHFVGLDYHTKSSYVSILDEHNEEIWNGRLESSSELADFLKGLDDAKVLFEAGYGWPRLAKMLDDTGVELTMCHPEHNRRIATDRRKSDRRDARNLAVYLKTDGYKKAYMPGADIRDERQLIRSQIHMSWGVTRLKNQIHSLLAYAGVSKESFNIFTKRSREYLETVELPEYTRQVLDAKIELYDFTKDLLKRIESIVAELNRSDPDARLLKTIPGVGDITARVILSEIGDISRFESDDSLACYSGLTQREYQSSETRRTMGITKEGSSDLRWVLIQAAWIAIRFDPALREFYERIEARKNARVAICAVAHKLVKAVWHILTEKIPYKAKKPEAKGKPAVARGKAVASPS

SEQ ID NO: 322552 - protein, 355 aa, unidentified
MLIIGVDFHPQFQQIARVETDTGEFQEQRLQHREEAEQFYHALAASGQKVRVGMEASGHARWFERMLAELQFELWIGDATRIQSKRGRKQKTDRQDAQHILKLMLKDDFPKIWVPSWENRDLRQLLWHRHRMVQARTRIMNQLQAVALNEGLRCKKRLWRGSGREQLESFRLAPWASRRRRDLLELLDRLNPTIAELSQAVEQAAENHPEARRLMTHPGVGALTALAFVLVIGDADRFPCGKQVASYLGLVPLEKSSGNRRRLGHITKQGSSMMRFLLVEAAQVTVRSLPEWRSQYFRLMMRRGRKTAKVAMARRLAIRLYWTWREERDYEQCRSSVRTQESPEILMVCKRTPSN

SEQ ID NO: 322553 - protein, 364 aa, unidentified
MFTERTSVGLDVHARSVAAAAIDGDTGELFKSKLTPAHDHVRSWLNGLPGPVAVAYEAGPTGFGLYRYLTDAGIRCEVAAPSKLHKPAGDRVKTDARDALHLARLLRLDEITAVAIPTIEQETARDLVRAREDCRGDLMRARNRLSKLLLRHGIVYYDGHAWTGRHDAWLRHEALPLLTSPTTRLTFDNDYEAVLTTTARRDRLDAAIEEIAAASGFTPVVRRLGCLRGISTLSGLALAVEIGDWHRFTGSTIGAFVGLVPSEHSSGQSRVQGPITKTGNGHARRLLVEAAWHHRSRYQVGKTMRDRWELAPATARARGDEGNRRLHQRWLKFIERRKPNTVANVAIARELAGWCWSLAVVDQD

SEQ ID NO: 322554 - protein, 328 aa, unidentified
MVKQSVVDAVQVVLVDECWVGIDVAKAHLDVATWPAGERARVARDEAGLAQLVVWLRARPPNLIVLEATGGLETPVVGALVEARLPAVVINPRQARDFAKALGRRAKTDALDAEVLARFGQAIRPDPRPWKDEDAQELTALIQRRRQVVDMLTAEKNRLASAHRHVRPDIQATIDWLERRLKDLEGDLQRRLRESPVWREQDDCLQSVPGIGSVTSATLLAALPELGTLNRRQIGALVGVCPFNRDSGQCRGRRLICGGRAGVRAVLYMATVTASRCNPVIKAFYQRLRQAGKPAKVALTACMRKLLTILNAMLKAKTPWQPPAECKP

SEQ ID NO: 322555 - protein, 342 aa, unidentified
MSEIITVGVDLAKNVFQVHGADGAGHAVLRKKLRRTQVLEFFSQLPPCVVAMEACGGAHFWGREIGKLGHDVRLIPPAYVKPFVKRQKNDAADAEAICEAAVRPTMRFVPVKSEETQGAAMVFRVRELLIRQRTQAINALRGHLTEFGQIVPQGAANTSKLIAVVEDPDSGIPADAIATLKVLVMTLANLDAEIGKLNAEIARRAKENDVARRLMTVPGIGPLIATAIAVLAPPPETFRKARDFAAWLGLVPRQHSTGGKQRLGATTRMGERSLRRLLIIGANSVIIKRHVHAAAKPGTWLGGMLTRKPPMLVRVALANKMARIVWALMARGGVYKAPAMAV

SEQ ID NO: 322556 - protein, 349 aa, unidentified
MGEVSTIGVDIAKSVFQVHGVDADGAVVIRKRVGRAKVIEFFANLPSCLIGMEACATARQWARELKKLGHDVRLMPPTYVKAYVKRGKNDAADAAAICEGVTRPSMRFVPIKSVEQQSALMLHRTRDLLIRQRTQLINALRAHLAELGLVAAKGHEGLQQLVMAVTESSDKRLPSNARFACQSLVAQLYALQTQINGLDKRIIQAHRANADSKRLEAIPGFGVILSTAVVATMIDPRAFRTGREFAAWIGLVPRQNSTGGKERLGSISKQGDRYLRRLFVLGAISIVGTARTRPDKYPWVTELLGRRPAKVAAVALANKMARTAWAVLAKGETYRTPTRSSSAAIAAIA

SEQ ID NO: 322557 - protein, 339 aa, unidentified
MRLYAAFDLHSSNSYLGISDEKGKRIFKKKLPNDPATIKETLKPFKADIEGIVVESTYNWYFLVDLLREEGYRVHLANVMKTQQYSGLKYSDDKNDAFWLVEMLRLGILPEGYIYPKEERPVRDLLRKRGHLVRLRTSLIVSLQNIVARNLGGRLKSNDVKILTTDRVTPLFQGNEDLALAGKVSKEAIDFMTRQIKAIETTIDGRIHLSNPYNRLLSIPGVGKILAFTIQLETGSIERFQKVGNYVSYCRKVPSGRFSNDKKKGTGNRKNGNKYLAWAFSEASDHARFSDAESRIYYQHKLQKTNAPIAHNALAHKLARAAYYIMRDGVVFMPDKAFA

SEQ ID NO: 322558 - protein, 367 aa, unidentified
MSKTETGRLCVGVDLHKTQFTVCALSEDGEYLLEKKYPTKEEGYREFTSEMHNREEQRYSIELAVETTGNARFFKNRMEKEGFVVKVVNTNRFKVITTSTKKTDANDAATLAYYLMKEMLPEAHLCSQTSEEIRRLLKTRSVLVQSMVKIKNQIHGMMLGYGIETTAAQFQSKRKRQELINDLADHNYSDYTASSLKVMLKILDDLSAEIKDIEKHLEEMVERNEDVELLMTIPGIGINTATTIAAYTEDLERFKGNYKKFAAYVGIIPSVHNSNESTHYGRITKHGPQELRTAFVQAAMGMIRLTKVTSEWRLIKEYQRRKDEKGSGRAIIALARKITRIVFVMLSKRERFNPDLMRCDEQIQQMA

SEQ ID NO: 322559 - protein, 419 aa, unidentified
MAQFNIDRQLAQDPAGTLHAGVDLALEKNVVVVVNEKTERLDHFSFPQDRGGYDYLLRRLEGLRQTHQAAKVVVAMEPTNYFWKLLARELEEKQLSYRLVNAYTVKKHREGDQLDRSKDDRRDAGQIAELSRNGKTTQTQLQKGAYEDLRQYATLYHQLMQSIRREKTILWGLVGQVFPEMVQAFKDLEGESYQALLMTCAAAATIRQMSMDAFLTQVRAAYSGKRLCISKLKRVYQLADRSIGVTEGIQAIQLAIQVHLTQLQVFETQLEQVTGAMTARLFSLPEALYLLSCPCLKPTSAALFLAEVGDPQRYQKAAQWVKLAGIQPIPKASGKKQRSRTPMSHQGRPRLRTLLFFSCLRMVQYDTRFAQLYAYLQRRKDNPLTKMQAVGVLMNKLLHIWWALIQNQTFYNPSFGQSS

SEQ ID NO: 322560 - protein, 353 aa, unidentified
MKYVGLDWAYRTAQWCALAPGGEIAGEGRIAADRDGLARLVLELGDEVTACLEMMSGALWVRDQLVACGWQVEVADARKVKTVAPLAAKTDKVDARLLAELSRRELVPALWLPSLDERALRERLRRRMHLVRLRTSAKGRIFGLQTQWGVRVSLARLRRADGLTLLERAGVPEVWRRSVGECLALIDFLDARLEPLDAELRPFANADPRAVLLDTIPGIAELLALTIAVEVGEISRFASPQKLVSYARLAPRVRQSGQARPRSGPLSKSGSRLLGWAAVEAAQQAWRESNPWHGLYVDVSARSGNRNSAKAAVARKILIAAWHMLSRNEPFNPAPRSTRGGSVPASSRLALAA

SEQ ID NO: 322561 - protein, 353 aa, unidentified
MRKQYNTVSFKNQTVFVGIDVHKKQWTVTIRHCGLAQKTFSMDPEPEKLAEYLKRNYPDAEYRSVYEAGFSGFEAHRTLCRLGVRNIVINPADVPTSGKEREKKNDSCDSRKLARELENGSLEPIYVPTPENLMLRNLKRREDQLVQNLTRVKNRIKGHLNFNGIKFISWAGGSLKIMEEEARKRNDWTLLSDLRELRFLRTERLQVIRDERACLKLLDREKIQENIQSVSGIGFRTGVALQAELWDMNRFKTNDHLNSYVGLAPHTFGSGEDVIAKCGNRKKKQLHYLMIEAAWRAVRYNLEYKARYGALLGRGMSSQKAIVVIAKKLMQAIRAVWLQDRKYKNYLETSKVK

SEQ ID NO: 322562 - protein, 327 aa, unidentified
MVEYILGIDVSKDTLDVVLRDQDRSQHQVFSNNAVGYARLTRWLIAHKAGAVHACLEATGQYGDGVAEYLYHAGHAVSVVNPLRIKRYGESKLHRNKTDKADAALIAEFCAKETPPLWKPLPDSLKQLRQMVRRLDNLQCAYQQERNRLTSGVTNTWVVADLQAHLQELRQRIQAMKTAIQQFIAADPELKHQAYLLDTIPGIGELTAARLLAEIGEITSFEDAPQLAAYAGLNPKGARSGSSVRKKTRISKEGRAFIRYILYMPAIVARKHNPIIRDFCSRLAQRNLPEMAIVAAAMRKLLHLAYGVLKNDTPYNPNILKEKVFSP

SEQ ID NO: 322563 - protein, 350 aa, unidentified
MKIVAQHFIGVDLHKTVLQYCVVDGKGNIVHEQRVTIAPDAAGAAVFDEFGPWQPGCRVAVEAVGMNRWFVNGLVERGFPVVVADPIKLNLKVLGKKTDKRDAREIARRLWLGDIDRDAKTWYPDDEVYGDRKLARTRQDLMVQRQHLSNQIKALLRAYNVSPPAKTLHSKSGIKGLLAMRLVNDQLTRSLHELTNAMAAMAAGVEALKAGIEERVAADPRMHAAMVQLPSMGAVSVLTLLSELGDAGRFRDAKAVASSGGMVPRVYQSADTSHHGRLTKRGNRGLRFILGQWAVRLMGASATVAVWARQKCKRLHVNKVRMALARKLLIGVWVMLTRGEVFNLKLCLGS

SEQ ID NO: 322564 - protein, 361 aa, unidentified
MLYLATDQHIKPLTVNLRDEEGQVLLRRQVSTVWEKVHAFFDDVRNRAKDCGGFMAIVEVCGFNDWLLAMFKEYGCKEVVLIQPRETSCNKTDRRDANRLGEILWLNRDRLSKGTPVQGLRRIRIVDSVEADNRRLTVLRIRSTRQQTRTVNRIKQILRRHNLEQHQPCKGIQTKATQKWLRELNLCEQDRLSMNILLKELELFGRHLDQLDEKIQQRIDTCPEAQLLGSITGGKAGFSALTLACRILPVNDFRTARSLANYFGLTPGCRNSGEATQRLGSITKEGSAIARYVLGQLVLHVLKRDPGMRKWHRRIKKRRGSKIARVAVMRRLTVIIWHMLKNNVPYRKCCQAGHPDDCPQT

SEQ ID NO: 322565 - protein, 428 aa, unidentified
MKITRTAQKINLNNVVDISVDVHKHTLCFFFEIDGKEFSDTCQNRTIIIEKRLLDYHKIAVEHGRTSLRIICEPTGQYQNSLFRTARRLGFFTNYVNAEAVAKFRVVESNDSNKTDKKDPRVINTLGKLNKVIKLRLIGEEYLMLRKLNKIYDECDVTITSLRCRISKLLVELFCDYSFEKDFLYSNSGIALIEEYGCNPYRIVADGHDIFCRRMKKAAPRIMTASLKRLWDDASSSALNEMPPGYIEVLQSYFYDLMADYLQQVERKDRITAQMIEILNRLRAQDPKIPPPTPKVISDKNLARFLGETGPLIDFAHWRQLMRYAGLSLRTRQSGTFQGQDKISKKGRRLFRKVLHVIALPLVKHGCLYGEVYHKKKDETKMPGNKAMTVVSRNLLRKLFGWYQSGKAFDEQRFFTCKSQYKPLAEAA

SEQ ID NO: 322566 - protein, 346 aa, unidentified
MMIIGCDFHPSWQQVAWLDTETGETGERKLVHAGGEAKVFYQQLAEPVLVGMEATGNSQWFIEMVEDLGHVILIGDAAQIRASYVRKQKTDKRDAAHILKLVVENRFPRLWTPNREQRDLRQLLLHRHKLVEIRSRVKNELQHLSMNKGMQKKRTLWSQAGMQMLRELPLKPWASCRREDLLGVLAMLDEQVGKLDKAVEQAAEENPQAKLLMTQPGVGPNTALGFVLTIGEVSRFPRGKQVASYLGLIPREESSGGRQKLGAITKQGNRMVRSLLVEAAQTAVRYDPGYRKQYLHRCHCKPKGVAKVAAARKLAVRLYWMLRTQVGYPEIVRIESSPRVALVGAS

SEQ ID NO: 322567 - protein, 345 aa, unidentified
MPIVGGLDIHRKQITFDYLDTATGEVRRGQIAPADRKHVRAWLARFAGRGGVAFAFEGCTGWRYLAEELAAAGLRAHLGEPADTAALRGRKRHAKTDKTDARHLRALLAEGRLPECWIPPPHILEYRALLETYHDLRAAHTAWVQRIHAVFFRQGAPPLSDDALRTEQGLARLQAAAATHLSPAGQLQVATALDMLAATEARLGPLRQQLRETARHLTGARVLAERLYGVGPIAALALTCWLGGAGRFSSSAKAVRFTGLDITVWSSDRKGPPGRLSRQGPPVLRWAVYEAGKTHGRAAAPGHGYYATVKDRKNGKRAALSEARKIVRQACHILAELGDDALTAA

SEQ ID NO: 322568 - protein, 425 aa, unidentified
MTQVYGNTGEKVLVAIDIAKKRNTVLIQFPDESRKKFMVANKLSDYQEFTAYLKSLGYPCVIGLEATGNYHRPLAYYLQQEGFDLKLISSMAAARTREAMYNSWDKNDPKDAQVILHMLKTGLTQTYHDPLLHRINNIQELSKTYYQVALRKTRVQHSIMTHFLPLYFPEVQKYYYTSRAQWFSSLLLRFLSPSSVLKYSIEEFIEAARDVAGRKVNKSAWLTDFYETASSSIGLPVTEDSEAMTMFRLVLQEHQHLCRLRRSIEERAELYLKDNADYNRLQTIPGIGTVIALTILAEAGDLRRFSHYKKFLKYCGLNLSTLQSGNFRGMSKLSKHGNARLRYVFWLAGTSAIRMRENTFRKKYENYIKADPSNPDLKRKAYTAIAAKMARVAYSLVKSEKDYRCFYESSIPSGKIPSVGPLRHL

SEQ ID NO: 322569 - protein, 331 aa, unidentified
MKFRAFIGIDVSKSTIDIHLRNAGRHSVFVNDLEGFEAMVEWLMDILGQVCPEEMMFGMEHTGLYSELLISFLNDHNFPFTVLSGLEVKKSMGIRRGKSDKADSKDIAEYIYEKREKIKLFRMPSRNLESIRKLASYRERLVKERTAFKTRLGEHQKVYGKESYEIYTESHKQIIACLDKQIKGIEAEMERLIKDDQEMLRQYQLIKSVKGIGPQTAIMMIVLTKAFTAFPDWRKFASYAGIAPFPNQSGTYMGKTRTSKLANKRIKGLLTMCAGVAVQYNPEMRLYYEQRVNKGKNKMSTMNIIRNKLVSRVFAVIERGTPYVETMKYAA

SEQ ID NO: 322570 - protein, 408 aa, unidentified
MNPLFVGIDVSSRNNVAYLMKPDGSKHSSFSVQNNLGGAKLLSERIVSALHSMQLCDVVIGLEATSIYGDSLVYALQEDGGLSQFQRKIHVLNPKQVKKFKEAYPDLPKNDWVDAFVIADHLRFGRIGKEVYMDDYRYKALRTLTRARFDVIQNMTREKQRFANYLFLKCSGMAQNKDIANSSATTIALMERFETVDELADADLDELTAFITEAGRGRFADSEAAAKAIQAAAKGSYRLPKTVNDTVNQAMSVSIASMRALKAQVKVLEKAIEQQFEIIPNTLTSIPGIGKVYSAGIIAEIGDVRRFNSQASVAKYAGLVWTQHQSGDFEAEHTHLIKSGNRYLRYYLLEAANSVRRCDSEFRRYYDLKFHEVNQFQHKRALALTARKLVRLVFRLLKDNRLYIPPEG

SEQ ID NO: 322571 - protein, 311 aa, unidentified
MCVLPGASAFGEAGTPHGGSFVVANDQEGVDGILSRLAKPGGSPKLVVMEATGRYERLAATSIAAAGISVAVINPRQARDFAKAMGRLAKTDKIDAFVLARFAEAIEPEASVIPDEDAAALQGILARRRQLIEMLVSEGNRLQMAPKALAKRIRAHVGWLEKEIGRTDSDLDDAIENNAAFKASGSLLRSVPGVGRALSRTLLDELPELGGITHRRLCALVGVAPFNRDSGQRSGKREAWGGRAPVRATLYMGALAATRHNPAIKEFCQRLLDAGKPRKVALVACMRKLLSILNALMRDRSIWRCPHALTP

SEQ ID NO: 322572 - protein, 405 aa, unidentified
MQVYIGIDWSENKHDVCFMHETGAVLLMLQIQHTMAGFRELDQAGQSLGMSRQEVVIGLETAHNLLVDYLWDQGYEQIYVLPPSVVKSAQKRFRQSGAKDDPWDARLIADLLRTDHHRYTLWQPDQPLTRQIRAEVRFANQLGRELVRDENRLRALLLRYYPAILEAFPHLDSLVFLAFLQTYPMPSQADALSFEQLQAFLREHHHTHTHRWPHIYAGLHADHPHTNPELETAYSPLALAQARIVEMLLRSRQACLARLGNLYQQHPDHEIYDSLPQAGALLAPALLAKLGDDRNRFPSPAVLQAVAGTCPVTNRSGKHAHVYFRIACDHEFRHITQQWARLTLNASPWAATYYHLVRPHCQTDSDAIRRLANRWLEILWRLWIDRTPYDQALHLKQHALRSQAR

SEQ ID NO: 322573 - protein, 439 aa, unidentified
MSNLLNPHAAGIDIGSQLNVVAVPEDRDVENVRSFGTFTSDMKLLVDWLLKCKIETVAMESTGVYWYHLYTMILDAGIDVKLVNARHLKNVPGRKSDVNDAQWIQQLHSFGLLNGCFQPDNLTRQLRTIVRYRKQITQDIGTQINRMQKALEQMNIKLQNVISDIDGKSGRAIIKAILEGERNPEVLYSYADKRIKASKEDVIKSLEANWRADQLFMLKMTSDQMHHLEQQMMRCDKEAENIISQFDLKKNETSKPNRKEKRQPSFNVREYVANIYGIDVTKIPGFKNASALTVLSETGPYLKDKFPTSKQFLSWLNVVPDNEITGGKVVKRRRKKKKNIAGQAFRTAANSLWNSKSSLGEILRSKKKHKGGTQAVIFVAKKLASIFYVMVTESKEYDETQIMVSKQKHYELKLKRLKNHMKNIESFLTDIQNVNECVR

SEQ ID NO: 322574 - protein, 354 aa, unidentified
MDSTSIQNEVILGVDTHLDTHVGVIINHQGKVIGTLASVPTNAAGYLKLLTWARSLGDVRRTGVEGTGTYGAGLARLLYEQDIEVWEINRPDRAKRRLQGKSDPTDAESAARMVLSGEAVATPKLQSGVAEVLRTLSVARRSVVKARTQAINQLRSLLISAPDDLRERLWKTKPEQCVAGCARLRNIEGNVLLKTLTATLRLLAKRWLMLSAELEELDATLDRLTSQSAKRLRNQFGVGPQTAAILIAVAGDNPERLRNEAALAALCGASPLQASSGKTARHRLNRGGDRSANNALWTIAMVRMRSEPRTQAYVTRRTAQGMSNKEIQRCLKRYIVRELYPLILADLSDAATII

SEQ ID NO: 322575 - protein, 458 aa, unidentified
MSNANARRLSRGDRQRNERLTRLRSVITRESAVLAFDLAADKQVCALCDQDSQVIARRTITAKAWQLSAAVAWGLARAAEAGFASVVVACEPTGHRWRVLDQLAEAAGVRLVCVQPLLVGRAREAEDLTRNKNDDSDAVIIARLVAELRCYLPERAEPAWARLRHLGARRARLVVEAGAAGAQIRDLLECAWPAVWTAAVEPLESASWRAAVTVVLDRVADTGDLGRFRRSGWSRFAATVRRELPRHGTVRWHSPIVRAVFAATTDPDQAGLGVLEQRGGALERVRFALDDLAHARAELAVVEARMVAVLDDLGLTELVTSIPGLSAVGAAAILAESGDPRRFTTARALVKHAGLCPRDNASGGYQGKTAISGRGRPRLRMAAWRAIFPALHHNPVLAARYVHLVGRPDRRLTDAQARVAVAGSLLRQLHAVTTTGTPWDESIAAGTHRPGQEAASAA

SEQ ID NO: 322576 - protein, 383 aa, unidentified
MRIVCGLDVHKDSVFVCILNEKGEKFESKYGVLTPELEELHQLLLTHEVKEVTMESTSIYWHPIWRVLGDIECLKLVNPYFIKQLPGRKSDVRDAAWIAECTMKDLIRGSFVPDATVQCMRQYNRRIFDLNKEKVYKLTKLDALLHRCNIRISNYVSSIDSKSYKEVVWLLSEGIVDAERLMEAIHGRTVNRVGKDVIKAALTGIVNEVDIDLIRLYREELQIDDKHLKECQNKLTEICRNEFPKEFENLQTIPGVKERSATSILSELGADMKMFLTASALVSWCGLKPRNEESAGKIKSRRITHGNKYIRKTMIECAWGASRTQDCFYSNFSYIQTKVRRKNAMKVKVAIARKMLVAIWHVLGENVPYYDYKKPKAIADGNS

SEQ ID NO: 322577 - protein, 320 aa, unidentified
MLSFCGIDVSKDRLDVMVLPDEYSSSVPNDPAGWAILVEQLRGFSITAIGIEASGGYERGAVRSLQAAGMPVRQVNPFKLRQFAKASGVLAKNDPLDARMIASFVGIMPTRPAQRTTLAAEQLVEMLAVRRQLSAEKTAAENASRLLEDLMLQRLSRRRIARLAADIELLDKRLVEIVATDATLAHRYRLLTSMPGVGPVLACTLIALLPELGGMSRKQVAALVGVAPYAFESGTLKGRRCIWGGRANVRQVLYMAAMSASNWNPVLKLFHDRLKGAGKLPKVVIVAVMRKMITTLNAMVRDDIAWADRLSGRHSVTTAR

SEQ ID NO: 322578 - protein, 377 aa, unidentified
MFHLPVFVGIDYHQKVVQVCVMDQTRKILLNQAVDNDPEAVFRAVAPFGSNVHAAVEACTGAAEFVEQLIDQFHWSVELAHPGYVARMKQTPDKSDWTDAKLLADLTRAGYIPRVWLAPKHIRDIRDLVRHRHGLVEQRKQSKLRLRALLRNHRIACPFSPWTIKGRKWLLDKTNIESTTTLFLLRDHYDTIEYFDKKIAAVNEEMFSSVVDDPVIKQLLRQPGIGPMTAITMRALIGRFDRFRTGKQLANFCAVCPRNNSSGGKTTTGGLIKAGDELLRCVLIEAAHRLMRYDPHWRGMATRLREAGKKTCVIVAAVANRWVRKLFHQMVESTSTGGATVGFSRHGQESTKEGKNPSDAGTNRHTAPESSVRNVLP

SEQ ID NO: 322579 - protein, 436 aa, unidentified
MRGCRCSMIMGFTKPIEHFNLQRKKVITMNTLYVGIDVSSKSNVIYLMLPNGDKHSNFSVANSHEGSTQLVKRILSALTSHSLDTVLIGLEATSVYGDNLVYFLREDATLAPFNRKIHVLNPKQVKKFHDAYNDLPKNDYVDSFVIADCLRFGRINKEVYMGDYRYKALQNLTRARFFAVQNLVKEKQRFMNVLFKKYSTMTQEKVFSDTFSTTALAVYDEFEYAEALANMDLHELTDFIIEKGKNRFPDPDAVAKAIQKAARSSYRLPKTVNDSVNQVLSISITSMKALESQIKEFDKAIKAQMELLPNVLISIPGIGPVYSAGIMAEIGDINRFNSQAALAKYAGLAWKQHQSGGFESEVTRLIPSGNRFLKYYLCEAAFSLVRCDKEYSDFYRLKYKEVNRCQHKRALALTARKFVRLVFRLLKDNRLYCPAK

SEQ ID NO: 322580 - protein, 284 aa, unidentified
MGHYAGIDVSLECSSVCVVDASGKIVREGKVASEPVTLITWLGSLGVSLERIGLEAGPLSQWLYGALRETGLAVELLETRHVKTALSTMPVKTDRNDARGIAQLMRLGWFRPVHCKSMAAQEVRALLTARKLVQSKLYDIEMSLRGILRGFGLKVGPTTSQSFAARINHLVDGQTSLEAVAAALLSLHAVALREFKSLEKSVRQISRADARVRLLMSTPGVGPLVALTYVAAIDDPARFTSSKSVGAHFGLTPKKYHRSNEDVCQTFAISKGASTSRAPVGGSS

SEQ ID NO: 322581 - protein, 352 aa, unidentified
MQTAYDGRQVVGMDLHRRRSVLVRMTEDGRRLGTARITNSPRELRREIAKAGRSPRVVLEATYGWYWAADTLAAAGAEVHLAHPLGVKAFSYRRVKNDERDAADLADLLRMGRLPEAWIAPRRVRELRELTRYRHKLVSLQTSCKDQVHGVLAKLGIPVTCSDIFGVAGSAWLDSLGLPQPYAGKVTSLRQLTAELSTEISMLSEVIADLLAGDRGYRVIQQLPGIGPVLAAVITAEIGDVTRFSNAGQLCSWAGLTPRHRESDTKITRGHVTKQGSPMLRWAVIEAIQRIPRDSVIGAAKQAIIARRGKQARNIAKVAAARRLLTLVFYGMRDGQIRCLSQAPGQPPVRAA

SEQ ID NO: 322582 - protein, 353 aa, unidentified
MIIIGVDFHPEFQQIASVDTETGEFQENRLAHREDAETFYRALAGQKVRVGMEASGHARWFERLLAELQFELWIGDAAEIQSKRVRKQKTDRQDAQLILRLMLKDDFPRIWVASWENRDLRQLLWHRHRMVQMRTRIMNQLQALALNEGLRCRKRLWREHGRQQLESFRLAPWASRRRRDLLELLDRLNPTIAELSQAIEQEAEKYPEAQRLMTHPGVGPLTALAFVLIIGKAERFQCGKQIASYLGLVPLEKSSGNRRRLGHITKQGSSMVRFLLVEAAQVTVRSLPEWRKKYAHLMMRRGRKIAKVAMARRLAVALYWMWRKGWNYEPSKSSVRTRASSEQAMVCSKTPSN

SEQ ID NO: 322583 - protein, 429 aa, unidentified
MSEVEFVKQEPQFAAFLAIDWADKKHVWCLQGVGSEKRESGELEHTPEAVEAWVGQLCQRFAHRPIAVAVEQSRGALVFMLSKYEPLQLFPVPSTMAANMREALYPSGAKDDPRDADLLLDLLLQHRDKLRRLVPDTEATRRVQNLVEERRKLVDEKTEQSNRLTSHLKIYFPQMLDWFEHLDTELVCAFLLRWPTLEELQKVPPAQLRTFFRKHHCRDQELIERRILAIRQAMPAIRDRAVIEAKSTVVKVMVRVIRSLLEGIANLDEKIEEAAAAHPDFFIFNSLPGAGAALAPRLLAAFGSQRERYGSAGEVQTYSGIAPVMERSGKKKWVHCRVACPKFLRQSFHEWAGHSIANSVWARSYYQQLRSRGKGHHAAVRALAFKWIRILFRCWKDGVAYDESKYLAALARRSSPLTAVNVAIAGKAL

SEQ ID NO: 322584 - protein, 359 aa, unidentified
MRKRLTKKERFFNDINFTADDDIYVGIDVHKVNYHIAIWLNNGIALTFVAPADNSAIARELDKLTPGLKKIVYEAGPTGFSLARTLAAASLPVGVIAPSKTPRPAGQESKSDRLDCRKLAQLAAKDMLVEVAVPSEQQEVDRQVSRLRNQLGDKKIRIKQQIKSLLLQHNIKEPAGLARWTKQSIIQLGDMELCPEMRFTLDVMLDQLSYLQAQIKRVDKQLKEIFSKDANARQMEILRSHPGVGPITSRQFCAEVFNPERFNKSTQITRYVGLCPLVSQSGQKRKDGRLMKAGQIKLRATLVEAAWAWVRVDPDAKETFRRLLSNTGEKNKAIAAMARRLAIHLWKMLCDDKIYCKAA

SEQ ID NO: 322585 - protein, 360 aa, unidentified
MRAKLGHAMLYTGIDYHKRYSVVSTQDATGTRIREARIDENDPAAFAAYFGTLPEPSRVVVEACWNWGWLYDELGEIDGIEDIVLAHPFKTRLIADAQIKTDRLDAGALATLLRGNLVATVHAPEPATRARKHVIRQRIFLVRVRTMIRSRVHTLIARQRNLARPVFSDQFGRKGLHWLRSLVLPAPDDALLRQDLQNLEHLGMLIKELEEQIASDNAHDEATRRLQTLPGVGPILAAVMAAEIDGIARFPRADKLCCYAGLVPTTYSSGGKTSHGRMLPHSNRWLKWAFVEAAWVAVGCSAYFGGIYKRHRARGKKANTAITIIARRMCTIAWQLLHHARDFTPNPPILALSPVAPSKD

SEQ ID NO: 322586 - protein, 366 aa, unidentified
MKKTSTVRVNGNMIFKGHKLTIGVDLGDRWSCYCVLDEAGEILLEQKVATTPEAMKQIFEKIPRGLMAMETGTHSPWVSRLLKELGHAVLVAHAQKVQLITKSNRKDDRHDARTLARLARIDPELLGPVRHRSAKAQIHLTVIRARAELVSARTGLVNAARGLAKSYGERLRKCGTQQVSRGLAAELSVELREVLEPLLKEIESLNERIKEYDVRMEKIARESYPQVELLKQVKGVGTQIALTYVLTLEDPHRFPKSREVGCFLGLRPGRRDSGESHPQMHISKEGDPYLRTMLVQGAHYILGPFGEDSDLRRWGLKLAARGGKSAKKRAVVAVARKLAVLLHRLWVSGEVYEPLHNSDKAMRAVA

SEQ ID NO: 322587 - protein, 394 aa, unidentified
MKLVGIDVGKNSHHFCVMDKETGELNVTPSSFSNNKEGFDFLINSLKPYSKKSILLGMEDTGHYHVALLKFLLSNGYTVALINPKTTDLTRKMEGGITKNDKLDTITICDVLDTPERKKQYRITKVDRFDLYEQRQLTRHHHNLKEELNIYCNRLQKSIDLVFPEFNTLFGSKYGVVYMNLLKTFGSAEAIASTDIRTIRKCFEIKGRGGRISLTPEKLKECAKNSIGISSEVETIQIKHLVSQIMLIKEQIAEIDKKIEEFSIKNNSPILSIPGISHFSGTSILAELGDIGNYSKPSQIIKFAGVAPYHYESSQYNAQHTAITKKGSKYLRKTLYQIILPVINNNPVLKKYYLLKISQGKGHRCAQGHCIRKLLRIIYHLLETGQSFDPALLR

SEQ ID NO: 322588 - protein, 377 aa, unidentified
MKRIKFVGLDVHAETIAVAVAEQEGEVRALGIIPNRDESIRKLVKKLGPVEQLRFCYEAGPTGYVVYWQLAALRAKCEVVAPTLVPVKSGERVKTDRRDALKLARNYRAGELTAVWVPDAAHEALRDLVRAREAAKKDQLRARHRLGKFLLRKGRRPPSGVKPWTLKYLAWVKQEVHFEQLAQEATLLDYLCEVEHAEARIARLDRAIAEAVTLTPPKMRAVIQALQALRGVAQVTAVTIVAELGEVSRFTRARQLMGYSGIVAREHSSGESTRRGSITKTGNAHLRRVVVEAAWAYRHRPNIGGTLRKRQEVVSEEVREIAWKAQHRLHTRYRKLTARGKNNGKVVTAIGRELLGFIWTIGVKAEAAQKESERRAA

SEQ ID NO: 322589 - protein, 348 aa, unidentified
MVHFVGLDVSVKATSVCVVDDAGKVILEQKIPTEPADIIVLLTSLGVTFGRIGIEAGPLSQWLVNALTAVDLPVICVETRHMKALLTAQQINKTDRNDARGIAQMMRVGLFKPVHVKTLAAQEQRMLLTSRKLLQRKLLDLECELRGTLRNFGLKVGVVSGSRYEARVRELVAGFPRLAAIAEPLLNVRRVMRQQLAVLHKMLLNTVRDDPVCRRLMTAPGVGAVVALTYRATVDQPQRFVHSRAVGAHVGLTPKRYQSGETDYDGRVSKTGDALLRTMLYEAAHSLLIHSGKWSWLKAWGVRVAQRRGMRRAIVAVARRLAVVLHRMWVDGSEFRWSKDSAAVPTVA

SEQ ID NO: 322590 - protein, 366 aa, unidentified
MFKIFRFNCCGLDVHKTWIYACIGITDSNGRTEYKEKRFSSFSRGLRELDEWLTLYSCDEVCMESSGKYWIPVFNVLEKNHKVTLAHPKYTKPQKGNKTDRKDAKWICDLFMCDMIKPSFIPPPDIRQLRDLLRYHRKLTNMETGEKNRTQNCLTVSNLKLDDVFSDVFGKSALSITKYMLDHPGESFDVSPFVDTRCKTPMEEIQAAVDEAISKEQAIKLRQCLEHIEQLEHHKQSIRNETLSITEPYSETLELLRTIPSFDKNPMTAITVLSEIGNDMTVFPSAKHLCSWGWCCPRNDQSNQKVKCRRISQAGTYLKPLLVQIANALIKSKSHTEFVERYRRLKARRGHKKAIIAICKMLLTAI

SEQ ID NO: 322591 - protein, 389 aa, unidentified
MKIFVGIDIAKLNHFAAAISSDGEILIEPFKFTNDADGFQLLVSKLESFDKNSIIIGLESTAHYGDNLVRYLVAEFYQVCVLNPIKTCQMRKNNVRKTKTDKVDTFVIAKTLMMQDDLRFITFFDLDMMDLKALGRFRQKTIKQRTRLKIQLTTYVDQVFPEIQYFFKSGLHQNAVYALLKEAPSPKEIASMHMTHLANLLKVNSHGHFTKEQAKELRILAQKSVGANDSAISIQITQTIQQIELLDSQLEKIEAEMTDIMRFNDSVIMTIPGIGYINGGMILGEIGDIHRFSNPNKLLAFAGLEPSVYQSGNFQAKTTRMSKRGSRVLRYALVNAAWNVVRNNATFKAYYDAKRAEGRSHYNALGHCAGKLVRVIWKMLTDNVAFNLE

SEQ ID NO: 322592 - protein, 342 aa, unidentified
MKIIGCDFHPSFQQIAMVDTETGEHTEKRLTPSEAVEFYSQLSGKVVVGIEASGNTLWFERLLTKLGQQMRMGDAGKIRTMELRKQKTDRRDAELLLKLLLEDRFPEIWVPSLEMRDARQLLVHRQKLVGMRRQLKNQLQHLALNQGVQRKRKLWSQKGRQELKELPLTGWTARRRDDSLRLLDDLDQAIAELDVAVEREASNSPVARLLQTHPGVGPVTSLAYVLTLGKIERFQHSRQVVSYLGLNPAENSSGGRQRLGAISKQGNPMLRSLLVEAGQSASRVDMELKRAYQRLKQRKHSAVAKVMVARKLTVRLYWMWRTQQPYTVTRMQGSPSHPVAAA

SEQ ID NO: 322593 - protein, 312 aa, unidentified
MYNVGIDVSKDSLDIAWLPAIRPAISLPNNPSGHQQLVEMLVRQQPQRIVIESTGGYERMLQAALMEARLPLVLINPRQVRDFAKAAGQLAKTDRIDAAILARFAQVMMPEVRPLADEQTRELQDILMRHRQLVAMRSSEQTRLKQAHVQRVKVSIQSLLQAIEQQLDDLDRQLDELIQSVPTWQHKADQLKSMKGVGDQTARMLVARLPELGRLSRQQIARLVGLAPINRDSGLQRGRRCIGGGRSDVRSLLYMPTLCAVRSNPRLKQFYEHLLAQGKPAKVALVAAMRKLLVTLNAMIRDNKPWKIPQNP

SEQ ID NO: 322594 - protein, 349 aa, unidentified
MQHYVGLDVSVKETSVCIIDEAGKVIREVKVATEPVAIFAVLTEEALAIERIGLEAGPLSQWLYSALAEAGLPVICVETRHMKAALSAQINKSDRNDARGIAHMMRVGLYRPVHVKTLASQKRRMLLTSRQLLQAKALDIENDLRGTLRNFGLKVGMVGTVKFEARIRELVADHPDLGTIVEPLLIARRVLREQLGVLHRQLLEIVRHDEVCRRLMTTPGVGPVVALTFRATVDVPSRFTSSKAVGAAFGLTPRRQQSGEIDRMGGISKCGDALMRETLFEAALVLMTHSRKWSWLKAWGMKIARHRGMKRAIVAVARRLAVIMHRMWVDGTEFRWSRKEASGGVTVSV

SEQ ID NO: 322595 - protein, 347 aa, unidentified
MEQIIRIGMDTSKYIFQVHGVDASEQPVLRKRLGRKQILEFFAKLPPTVIGMEAYGSSHHWARELKQLGHEVKLIAPQHVKPYVKRNKNDGRDAEGLCEAMSRPTMRFVAVKTLEQQAALMLAGLREQMIARRTQISNAIRGYAAEFGITVAQGLNQIEPLLARLAQDDSVPELARDLFALQGRDYAQLQMELKAIEARLMAWHRANADSRRLAKIPAIGPIGATTLVMKTTDPGAFASGRHFAAWIGLTPKDHSTAGKTRHGKITRAGDERLRSVLVAGATAVIQQARHGRGHPSPWLIALLKRKPPKLAAVALANKTARIAWKLMVTGESYDGARMPKASVVAAA

SEQ ID NO: 322596 - protein, 340 aa, unidentified
MTQYKRIAIDTSKAVFTLHGIDHQDRVILQRNLRRAQFLPFFEKLPPTEIVLEACGGAHHWGRELTALGHSVRLLPPQYVKPFVKRGKNDRNDAGAICETGARPGIHPVPIKTVEQQAQGMMLKVRETLIGQRTALSNTLRGLAAEFGITTAKGLGRLAELLATIAADPALPVEAKDSFIILGEQLGRLDEQIKMLEKKVAAAHKANPLSTRLATIPGLAAIGSLMVATRVNADDFASGRHFSAWMGIVPKEHSTGGKQRMGGISRAGDERLRQLFILGATSVIRAVTRPGGSKLASPWLLALLARKPRKLAAVALANKMARIAWAMMKSGEVYRRQVAA

SEQ ID NO: 322597 - protein, 341 aa, unidentified
MQIRSIGIDLGKTTFHLVGLGERGKSVIRKKLSRKQLLAFTANLPPSLVGLEACSGSHFLGRALSQQGHDVRLIPAQFVKPFVKSNKNDYLDAEAIAEAVERENMRFVPIQTDDQLDLQALPRVRQRLVSRRTAVINQVRAFLLERGITFRKGPATLRRQMPEILENADAQLSPRMRNLLATLWQEWKQLEEQIDCLSADIETICIADPACQRLRQIPGVGPLVATAVVAAIGNGAAFHKGRDFAAWLGLIPKQYSTGGKAKLLGISKRGNPYLRKMFIHGARAAVLRLKRDGSLLGAWMNGLEARAPRNVLVVAMANKLARITWAVLSSGEPYRAAALAA

SEQ ID NO: 322598 - protein, 405 aa, unidentified
MCPSGESGVGLAPVCWPDQKPVRAVGRVTRHSCAARGFHPQTDTGSCPPTLGLEVSQGMLADQLDYIVGVDPHRDSHALVVLHVISGAVVIEAAVSANSEGYAQALELVDQHAAGLRAFAVEGTGSFGAGLTRFLTGQGERVLEVSRLRRERRSGGKTDALDAIRAARSVLAQERPATPRAGGERQALQALVAAREGAVNAKRAGLCQLRDLLITTPEPLRSELRPLTRARLLQRLAATRPDARRDPELRGSMLALRSIARRVLQLTAEERELAREIETLTRKLAPQLLEQPGIGPHAAAQLVLSWSHQGRITSEAAFARLAGAAPIPASSGQTIRYRLDRSGDRKLNRALHMILVTRKRSHPATSAYIARRVEEGKTRREANRCLKRYLARNLYRLLEHPPMTT

SEQ ID NO: 322599 - protein, 358 aa, unidentified
MEAQVKKIDFTNQNIYAGFDAHLKSWKVSIMVENVMYKTFTQPPKPDILFNYLKDHFPGGTYHTAYEAGFCGYWIHDKLVSFGINSIVVNPADIPTTDKERVQKEDKRDSRKIARSLSSGNLTAIYVPSLKTQRDRTLLRTRAMLVKDLARYKNRIKSFLYFYGISIDESFMNPQSHWSNRFMKWLESIDTGEESGKEALNILISECKNLRTSILKITKQVRHLSQTDFYQEQVLLLRSIPGIGLLTAMIILTELETINRFKNIDKMCGYIGLVPSTKSSGEKEKTGDITPRGHSVLRTAIIESSWTAIRNDPSLARSYSSYIKRMDQNKAIVKIAKKILSRIRFVLANKKPYTCSIV

SEQ ID NO: 322600 - protein, 367 aa, unidentified
MSLHEKKILMAMELSKKNWKLQFGDGSRLRQRTIPARSEAMLMREVMLAKEKMGLPADAPVISCYEAGRDGFWIDRMLRKHGIINYVMDPASIEVPRRARQRKTDRIDAEKLLDLLMRAELWGQRKAFSVVRVPTEEQESAMRLARERQRLSKERTAHRARMRSLLVLHGIEIGNPAKAALETLRDWEGKPVPAVLVDELNREQKRLHMAEEQMDTIEEQQKAIMEAETPVAQKVRKLCRLKAVGQQSSWLLVNECLGWRNFKNRRQLGSFAGLTGTPYDSGDTLRELGISKAGNARVRTTMIELAWLWVRWQPNSALTRWFIDRYVRDGTRRCRRKGIVALARKLLVALWKYLEQDLVPEGAILRA

SEQ ID NO: 322601 - protein, 344 aa, unidentified
MQIAVIGLDLAKNVFQVHGIDDSGQALLKRKLRRSEVLPFFAGLAPALVGIEACHTAHYWGREIAALGHDVRLMPPQFVKPYVKSQKNDAADAEAIAEAVQRPTMRFVPIKSADQQAVLMLHRTRDLLIRQRSSLISAIRAHFAEFGIVVGQGIRNVERLLALLETAGDQRLPALAAEMLGILAAQLRYVAEQVKEVEVKLLAWHRADETSRRLQSVPGLGPITASAIVATVGDPKQFKSGRQFAAWLGLVPQQRSSGGKERLGGISKRGDGYIRRLLVHGARAIVGWRKRSATHKTPWIERLLARRPTNVATVAYANKLARIAWAIMMHGNRYNPALAFATIP

SEQ ID NO: 322602 - protein, 476 aa, unidentified
MAGSKKAISNMALIPMLPHETLYVGVDVGKSRHVAGFLSRTLLQRHERFEGCPTLVFEQSREGFRTLVDRMREYVPLEQATVLLEHTGHYHKNLEQYLLEWDITVYRIHVQERPKGMTKTDKRDALGLANRLYTQLELGAQVEEKMQLVRRTARPTQAALQLRGFMQHRYELSHQRTQLRNKLTAICDELFPEFTQIFHDPNLEVALAFRETFPTPHDIATASLSALRETRVKYFPSEANLLRLQQLAEKTIGINNKDRLRGMKLEQELLIKELRLVQGHLERLDTEITDIVRTSREGQILLSMPPIGPVQAATIIATIGHIDNFEKASELKSYFGWAPTRHQTGVTFDRTKLSHRGVRPVKQMLFLMAARATTLDGEWARIYRRLLPRMATYDERVKEYRGKKKVLGRIAGQMVSMIFALLKTDQETLSRVPSGEEPPPPMLYDPDIHRKHQEGSYRSLKPGTQPRKILQLPSKP

SEQ ID NO: 322603 - protein, 313 aa, unidentified
MEKITVGIDVSKDRLDVAVRPSGERFAVSRTGAGLADLVARLKLKPNLIVLEATGGFETVVVAALAAASLPVAVANPAQIRAFAKAIGQRAKTDPIDAGVIAHFGEATGVTPRPLPDEATQQLADLVARRRQIVEMIGSEKQREKGANPRIKKSIGRLVKALERELSSVDTDIDDAVRGSPAWRDKEDLLSSVPCVGQVISRTLIAELPELGTLRHKQIAALVGVAPFTRQSGQWRGKSFIGGGRASVRTALFMGAMVARRHNPVLKAFYERLVAAGKPKKVALIAVARKLLIILNAIVRDGTPWKGTVAAVS

SEQ ID NO: 322604 - protein, 495 aa, unidentified
MNRKSNTPKNQEANVGKTGRRSAGPKTGKKNELKRLTKEEQLELKIRAEEIGKGLTSSTWRELETAGKFDKNKKLDFVKDDTLIVGCDIGSETHYIRAIDTRGRELSQGILAFENNSEGFENALSWVLLIAAQYGKTQIVLGLEPTGHYWFTLTAWMLLHGVSVVQVNPYAVKQTKELEDNSQDKNDRKDPKLIANLVKDGNYGLPYLPEDTYATLRVLSGLRDQLKEEVGRSKNRLHRELTIVFPEYKAAFGKLDGPFTLSLLSKAPIPSDLVALGEAGIRKIWHDRKLRGAGYRRVAEIIRQASNSVGLTDGVDAHRICILHYVADIERLTSEIAEIEAELAAKCREIPNAENILAICGLGETITAGILAEMGDIDRFDDVKEIQKLSGLGLVACSSGKHKGQTKISHRGRKRLRYWLYQGAMSLVAHNEAFQQLHVYYTTRAENPLKKMQSMIVISCKLLRIIFTILKKGVRFDSERMLKDIVRPEARKAVA

SEQ ID NO: 322605 - protein, 381 aa, unidentified
MTTAVTHKTNVHTTEATLFVAFELSEKIWQLGFTMGHGQKPRERNVTARHQERVLDEISLAKHRLGLPETAPVVSCYEAGREGFWLHRFFLAHGITNHVVDSSAIEVSRRQRRAKSDGLDVRKLLSMLIRYEQGEHQVWQVVKVPSVEAEDQRHLHRDLETLKRERASTTTRIQGLLSSQGIQVSTLAKLPEQLDTLRLWDGTPIPPGLRRRVLRVYAHHTFLTEQIAAIEAERRAQLQTSSDASIDQIRQLMMLKGIGINGSWLLVREFFGWRAFKNRREVGGLAGLTPTPYQSGESAREQGITKSGNPHVRWMITELAWSWLRFQPESALSVWFRARFGDGGKRLRRIGIVAVSRKLLIALWRFLETGVLPEGAVLKEG

SEQ ID NO: 322606 - protein, 342 aa, unidentified
MDISTMGIDLSKTTFHLIGLSPRGEIVLRKKLSRKQLLTYTATRKPMLIGMEACAGAHYLTRALRDQGHDARLMPAQYVKPYVKTNKNDYLDAEAIAEAVQRPTMRFVPIKSDEQLDLQALHRVRDRWVARRTAVMNQIRGFLLERGMAIRKGPSYLATQLQVIFTDGDPSFSGRLLHLIRELKQEWDELERKVEEASAELAHIARKDDGCHRLMEVPGFGPIVSTALVAAIGNGISFRKGRDLAAWLGLVPRQHSTGGKTRLLGISKLGNEYLRRMMLHGARSVMMQMERKPSALGEWLTSLSARRHRNVTVVALANKMARIAWAILSKGTHYCAPAFAAA

SEQ ID NO: 322607 - protein, 378 aa, unidentified
MSKLLFVGLDVHADTIAVAVAEAGGGEVRSLGTIPNRPESVRKMIGKLGPAGKLKCCYEAGPTGYVQYWQLTQLGVACEVIAPSLIPTKAGDRVKTDRRDAERLARCYRADELTAVWVPDGAHVALRDLVRAREAAKQDQLRHRHQLGKFLLRHGKRPIDAGTPWSETYLNWIRIHVRFEQPALEATLADYLHEVEHAAERIIRLEQCIEEAVAHASPEIRAVVEALQALRGVAHITAATVVAEVGSLARFENPRQLMGYTGLVPREHSSGNRTQRGAITKSGNAHLRRVLVESVWAYRHSPAVNGRLLKRQKSLTLSDEAKHIAWRAQQRLYKRYTALMARGKHKHQVVTALARELLGVLWAIAVHTDAQFKTRKSA

SEQ ID NO: 322608 - protein, 338 aa, unidentified
MELYAAIDLHSNNSMLVVLDQDDHVILERRLKNDLERIRLALAPYRESIRGIAVESTYNWYWLVDGLIDEGYSLHLVNTAAVKQYEGLKYSADQHDARWLAHLLRLGILPEGYIYPKQERALRDLARKRSQLVRARTTQILSIQNLLARNLGTQVSGNEIKTWSTEEIKALPLLPEQRLAINANLAVMQCLDAQIKIVERAILAQARLRPAFKWLLTVSGIGKILALTIALETGDIGRFESVGDFASYSRCVNSVRLSNGKKKGVGNAKNGNKYLAWAMIEAANFAVRYDPAVKRFYQRKKAQVHGVVAIKAVAHKLARACYHVMREGKPFDVTRAFA

SEQ ID NO: 322609 - protein, 341 aa, unidentified
MQQMYVGLDVHKKFIQGCILDKEGKVILEQKFKNEPHSMDLFLSNIQQDSKVALESCSCWQYVYDYLSDAGYKNLVLANPSKVRLIATSRKKTDKHDAKVLADLLRMNMLPESYAPPLETRYERQITRHRLSLVRLKADVKRKVNALLLRHGYQHEYSDLFGKAGMEQMYSLDLPMCDRFELDNYLKTIDFLTEKINNTQDRVEDFVKYNPQARLLMSIKGIDYYSALMISAEIGDARRFNSAKKIISYAGLNPSISQSGDKCYVGHISKQGNNNLRWILVECANIAVMHDSNLALFYHKIKKRKNHKVAIIATARKLLTIIYVMLMSNRNYIPQRKCKAS

SEQ ID NO: 322610 - protein, 385 aa, unidentified
MAPIRMPEAVIGLDVGKSSHWACVATRDGEILLSAPVANREDDLDSLFGRFPDALVVVDQSRNIGALALARARAAGMSAAYLPGLAAHGAARLFAGDAKTDERDAMVIAKTALGIPDALLPVGDPGPTIAAARALAAQRNFLTCENTRNKNRLRSILLESCPAFEALVDLSDGCQLRLMASLGGAWSVADAGPRRAAALTRGAARGKIEALVRSTASSTRPDASVVAAEDRAVKLLARRISENSAEIEAITAEISALLEGDDTYRCLLTVPGIGPKTASELAISIDIEDFPSHDRLASYCGLAPRNRQSGTSISSVTASRQGNKRLKNLLIFSCNCLTRTEGRWGDYYTRCRERGMSHGKALKALARKRLKVIYAVMRDRVPYAA

SEQ ID NO: 322611 - protein, 355 aa, unidentified
MNSKKYIGLDVHQATISVAVLDSSGKLVMESILEAKAATILEFFAGLRGTLSVTFEEGTWAAWLHDLLKPHVAKLVVCNPRKNALLKDGNKSDRIDAHKLAELLYLNKLSSVYHGETGVRMLRELARSYLTIVKDLTRVMCRLKAVYRSWAIPCAGRDVYYTRHRAEWLGKIKEAGVRRRAERLYQQLDMLQYLRQQARRELLAESRKHAITIKLRQIPSLGPIRSALAVALIQTPHRFRTKRQLWAYSGLALETRTSAEYCYVKGGLRRSKKQISIRGLNKDHNHDLKGLFKGAATRASVLPGPFQDFYQRSLAKGIKPTMARLTLARKIAAITLTLWKKGENFDADKLKSQAA

SEQ ID NO: 322612 - protein, 412 aa, unidentified
MDVVVERCAGLDVHKDTVVACVRTPGKGGSREQTTRTFKTMTADLLALRDWLVALGVTLVGMESTGVYWKPVFYVLEDDMACWLLNARHLRNVPGRKTDVQDAEWICQLVEHGLVRPSFVPPKPIRELRDLTRYRKAQIDERGREAQRLDKVLQDAGIKLSSVATDILGKSGRDMLAALIAGTQDPQVLAELARGRLRTKIPLLRRALQGRFVSHHRLIVEKILAKLDFLDETIEDLSAEIDGLIAPFAAEVALLDTITGVDRRAAECIVAEIGIDMARFGGSARLASWAGRCPGHHESAGKHKSGRSRPGSKWLAATLAQCAEAAGRSKGTYLGAQFQRLRGRRGHAKARKAVEHSILVAAYHVLDRHVPYQDLGADWFQRRRPEAHARRLAQQIEALGFRVTIEPTDQAA

SEQ ID NO: 322613 - protein, 426 aa, unidentified
MNKDRLKIFRIMKSSVRGSDKHLLVGIDVAKDSHHAFFGTANGRTLRKRLVFDNSTKGFESLRSLAKDLQNQHGLVETVYGVEPTACYHKPLAEYLIRQNEQVVYVSNVAVAKNRVLMDGRWDKNDDKDAANVADLVGQGRCLFYDMPDESLQKLRSLVTFRLRVKKQEHAVQMRLRNNIFAQYFPELDGACIRAFHGDLVLSIAEHCLDPREIARMEFADFLKLVVSKKIGRKTEKCLREIWEAAGDSVGCPVHDEARWETKSMAHELRAIREIVKESELRMEKVAQEFLEYQYLLTIPGFGPIVSAMVLGAIGDPSRFENQGQVLRLAGLDLCASRSGKKSDSAKPVISKQGKSALRYTLVQAATVASTWNPSIRSYFSGLLKGREHECGIRLKMKVKLAAKLLIIAWTLMKRKEAFKPSCFTG

SEQ ID NO: 322614 - protein, 381 aa, unidentified
MIVISADTHKRTHALAAVDDGTGRVRGQREITADEAGHLAAVRWARGLDEERVWAIEDTRHVSGRLEQALLAAGERVVRVAPHRMGASRRGERERGKSDQIDALAVARAVVKDGAESFPVAYLNHDAMEIRLLFDHRADLVAERTRSQNRLRWHLVSLCPELERSLGSRSLSETRQLDRIDRRLRKLPADARVRVAREQVAQIRRLTRQANALQSELMTMIKTHRPQLLAETGCGPLTAAILIGRTAGAERYRSDACFARHAGTAPIKCSSGQRDQHRLDRGGDRQLNHALHIIAITRAQHDPATRAYLERKRAEGKTKKGALRCLKRHLARRFHHLLALPATTPQPDRSAVDEIPVHPRQPDRSVVDPSVIAAAPMRCLA

SEQ ID NO: 322615 - protein, 429 aa, unidentified
MQESSSSASAEGVAAYVGMDWADQKHDVILRTASEPAKVEYRRLAQQPEALMEWVAELQQRFAEKGKILVALEQSRGALIYHLMGYEFLELYPINPSQLASFRQTFSPGGAKDDRPDAELICELLYCHRDRLKAWKPDDELTRKLTFLNEGRRKAVDQRTQLANEMKSQLKVYFPLALQVLDNDCSTALAADLLLQWPTLDSLQKQRAHKLRKFFYAHNCRQEQKLLERLELIKAAKPLTRDLAVIEPTALRVQLLAQQLKSLLPYIARYEKQIAELFDAHPDSFLFRDLPGAGSAMAPRLLTAFGTDRERFEHSMEISSLSGIGPVRRASGKKSGKHATVHFRSACPKFLRQSFHEFAACSIRYCSWAEACYQTQRNRGKGHHAAVRAVAFKWIRILFACWKQRVPYDPQRYQQTLQTRGSEYAKITA

SEQ ID NO: 322616 - protein, 338 aa, unidentified
MATYAGIDLHSSNSYIGIIDDHDQRLYGRRLPNDLDQILAALKPFKDTLEAVVVESTFNWYWLVDGLQEHGYRMHLANPAAMTQYSGLKHTDDKSDSFWLAHMKRLNLLPEGYIYPKHERPVRDLLRRRLLFVKQRTAQILSLKSMVYRNLSKRIGVNRIKQLKEKDADQMFEAPHLAMAAGHSIATIRFLGQRIRSMEKAILKIIKLKPEFNHLLTIPGIGRILGSTIMLEVGDIGRFPKVGDYTSYCRCVKSERLSNNKRKGTGNRKNGNRYLSWAYVEASHYATRYNASAHRFYQQKTARTCEAVAVKALSNKLARASYYIMRDQVPFDEHKLFR

SEQ ID NO: 322617 - protein, 352 aa, unidentified
MSNQELFPNLTSGLDLGDKVSRTYEVDARGNCVKTAAVATTPGAIERYFGGRPRCRVALEVSTHSPWVSRQLEALGHEAVVANTSEIFSRQRRKRRNDKLDAEFLARQARADVKLLYPIQHRGAEAQEDLALLRARDQLVQARTQLINHVRGAVKSLGARISKCDTDVFAKRAAAQVPEPLRPALAPLLEVIGDLTKRIRELDRQVERMEEKYPEAVHLQQPAGVGPLTALAFVLVVEDPQRFKHSRDVGPFFGLVPKLDDSSDSSPQLHITKAGDTLVRRYLVNAAHYILGPFGPDCDLRRYGQAISARGGKNAQKRAAVAVARKLAVLLHHLWVSHAAYDADWTLHPRAA

SEQ ID NO: 322618 - protein, 376 aa, unidentified
MKNYSKFVGLDVHKAEISVAIANGGREEAGYYGKIENTPYACLKLAKKLSKGGEQVLFCYEAGPCGYEIYRQLTKAGYDCVVIAPSLIPKKAGDRVKTDRRDAVSLARLLRAGELTSIWVPDREQEAMRDLTRAREDMKGMERNSRQRLGGFLLRHGKVYPGKSKWTKTYFRWLETLRFETAAQQIVLQEYIDMVKHTQERVASMEEEIRKALGDWMLKPVVEGLMALRGVDLIAAVTIVAELGDITRFESPRQLMAHLGLVPSEHSSGERQKRGGITKTGNSHVRRVLVEASWCYRLPARKTAHLRRKAEKTSNAVQEIAWKAQKRLCSRYWYLINKGKLPVKSCIAVARELVGFIWAIGQEVMGKGNSSVVLNV

SEQ ID NO: 322619 - protein, 344 aa, unidentified
MGYFAGLDVSLEETAICIVDGSGQIAREARVASEPEALATFFEACGMTMERVGLEACSLTAWLHQGLSEAGIAAICIEARQAKAAMGAMPNKTDRNDARGIAQIMRTGWYRAVHVKSPSCRSWRALLTARRMVLNKRRDVENGLRALLREVGLKVGTPSRRNFPARVRELAADDRVLASLVEPLLSIIAVMTHEAERLTKRVLDEVRVEPTCRQLMTVPGVGPLTALAFRATIDRPSRFRKSRDVGAHLGLTPRRYQSGETDLQGRISRCGDELARTALYEAAHSLLIRSTRWSALRAWGMRIAKRRGMARARVAVARKLAVILHRMWTDGSEFRWSKQPAVAA

SEQ ID NO: 322620 - protein, 419 aa, unidentified
MTRKDDSRIIRIVHPICCGLDVHKESVSACVIFPDSNGEEQHEIKVFGTFTDDLKQLRQWLLDHECPVVAMESTGVYWRPVHNVLEQTVQVVLANARNMKNVSGRKTDIGDSRWIAGLLRHGLLKASFIPPMTVRQWRELTRLRKKYVQSVGDYRKRTHKLFESANIKIDSVVSDLFGVTGRNLMKLLIVDRELTLTDIEACIRGKLKGKEVELFRSIQGFFMGHHRFILKTLLGTIANLEGQIEALDQQIRSLVMDQSELLERMKKAPGISDVSACDILAEIGPTLDSFPTDTALVSWSGLCPGNNESAGKRKSGRSPVRKHHLKTIMIEVAWAAIKKKGSYFKDKYYRLKARRGAKKAIVAIAHRILLGVYHVIKDGAEFRDLGEDYLTLRNKEKKVLYLQKQALALGFNLIPQTIQ

SEQ ID NO: 322621 - protein, 398 aa, unidentified
MICVGIDIAKGKSTVCFLKPGGEVLRTPYDILHTAEEITKLIRDIRSYDEEVRVVLEATGHYHLPVVAQLLEADIFVCVVNALRMKKFCSQDIRKAKTDKIDAVKIAAFGLTYWQDLHRAKPTDEVYRELRLLSRQYFQLTSMLVKAKISLGNLLDNVMPGITDVLQDRDPHHKLTDFVLKYLHFDKITAMGEKKFVSGYCAWAKKQGYRMYERQAKEIFALVQNSIPALPMTPSTTIVVMEAVRVVREIEASRTSILTQMQAFAKSLPEYSFIREMACVGDTLTPLVIAEIGDIRNFHSKHALIAYAGIDAPPYQSGGFYGTERHISKRGNGYLRHVGFEIMQCKLRLKPEGDPVYAFIQKKRSEGKCGKEAMVAGINKFLRIYYGKVTELYRGLDA

SEQ ID NO: 322622 - protein, 372 aa, unidentified
MNYNTVYVGMDVHKESFSLCAYTIEAEKASHYQRTEADSRKVLNYLEFLRTIYGDDANFICGYEAGCLGYTLYHQLTANNVKCIILAPTTMLEQRSKKRIKTDKRDAEIIAKCLAQHNYSPVHIPTAKDEETKEFLRMRDDHKLALKKVKQQILAFCLRHNYRYDGNSHWTAAHLKWLKTLTPEALYKEILDEYLLTYQTLSDKLERLDKRIEELATQDEYKEAVKKLCCFIGVKTHTALSVLVEVGDFKRFASARHFASYIGLVPGEDSSGDDQNRLGITKAGNRHVRLLLTEASQCYARGQVGFKSKELKARQAGNAPAVITYADKANERLRRRYYKMVLNKCKKHNVAKTAIARELACFMWGMMTDNIA

SEQ ID NO: 322623 - protein, 331 aa, unidentified
MKFKEFVGIDISKLKFDVRVLSTQKSSLLENNTNGFKKLISWLLKNVSCNKEEILIAMEHTGIYSLPISVFLSEKGYNFVLLPGLEIKRSLGIQRGKNDKIDAKRIAEYAYQKRDKIIPSRLPFENILKMRRLLALRDRLVRQRGSFLKDSKENLLFLKPKDNKVLLEVIEKSIKDQNKLIIKIEKELDSIIKSDELIKKQYYLIISIKGVGKQTALVMIAYTNCFTNFDTWRKFASYAGTAPFPYTSGTSVKGRNKVSHLANKKIKALLNLCAISAILYNPEMKIYYQNRKAKGANGMSTINIIRNKLIARIFAVVKRGTPYVETFKFAA

SEQ ID NO: 322624 - protein, 392 aa, unidentified
MTIQAQVSVYPQVFVAREYDVFAGLDVDHHSIAATFTDHDRLMQSLRLPYSARQLLNYVGKHFSGQRVVFVYEAGPTGFGLYDELEAAGHACLVVAPPMVPRAPGQRVKTNRLDSRKLSTALRGGQLKSIHVPAPKYRELRHLVQLRDTHVQQLTATKCRIKALLLYEGIAFPSDEGKEKQWSQRVVNELLALPCSESVRFKLDQLIGTLHFNFNSAAAAQKQIRHFCQKDEELRQSIAWLKSLPGIGEIIATHLVARLGDPSLITNVRQIAGFLGLVSSEHSTGDKQNRGEITRAGDSRLRNKLIQSAWVSIRKDPELREFYQRVYQRHPKKVAPRKAIVAVTRKLTTRIYAVLKEQRPFVLRAVSTAPLTTEETAGHKGRLDGQQNEQSR

SEQ ID NO: 322625 - protein, 340 aa, unidentified
MKRTTIGIDIAKNVFEIYVEDGGEPVVERKRLSRKKMFPWVANRPPALVGMEACGGAHYWARELTKLGHEVRLIAPQYVKPWVQTNKSDAADARAICRAVQEPGMRYVGMATEAQQEVQALHRVRSRLLRNRTALVNQLHGLLLEYGGAVPHGRAALRKALATFLADERGTPLLRQLLAEQQAELADWDHRLEAVTTRIEQEGARQPVCQRLQTIPGIGPLSASALWVKLAGQAYQHGRHVAAALGLVPKHAGTGGKVRLGGMSKRGDRYLRSLLIHGARSVITHSREKQDPVSRWVHRLVERRGMNKAVVALANKNARVAFAVLSRDQEYEATQVCRAA

SEQ ID NO: 322626 - protein, 345 aa, unidentified
MEHFAGMDVSVKETSVCIVDDTGKIVREVKVASEPEALLPVLTNPLYRFKRIGLEAGPLSQWLFSALAEAGLPVICVETRHMRAVLQAQVNKTDRNDARGMAQMMRAGLYRPVHVKTLRSQKLRMLLTHRKLLQSKAIAIDNDLRGTLRNFGLKVGVVGASKFEVRIRDLVADLPDLAGLVEPLLIVRRTLREQIGILHGRLLAIVRNDQVCRRLMTVPGVGPVVALTYRATVDVPARFRNSKAVGAVFGLTPSKYQSGEIDRTGGISRCGDEMMRVMLYEAAHIMLVRSTKWSWLKAWAMKIARRRGMKKAIVALARRLAVILHRIWVDGSEFRWTREQAAAAA

SEQ ID NO: 322627 - protein, 402 aa, unidentified
MFYLGIDLHRKQMTISLRDRSGDVRLRRQVSTRWSKLEEFRTQLHEMMAADENYVAVVEVCGFHHWLVKWLRQDERCHQVLVVQPLGRSATKTDRRDAHGLSELLWVNRERLQREDRVHGVRTVQIPTEEEQEERHLTQMRERLVRRRTQTLNQIHKILRRQNLEWEQPTKTFQTVKVRQWLKTLPLGPNDRLAMNQLLAQWRLWDEQLMAAEGWIAERFRKNQDAQLLATMPGVSMFIAVAIVSRIKPMARFPRGRSLANFLGLTPGCQSSGDTERMGSITKIGSRMVRYLLAQAIQHVLRRDGNMRAWFQRIKRRRGSKIARVAVMRRTATIMWRMLSTGQPWRPGKSNSETQSATGEPGQANSRRCKSSPTLVSDCEPDCSSTGSTSLLAGKEGAPCPV

SEQ ID NO: 322628 - protein, 341 aa, unidentified
MSSFNPNSCMGVKPVPSKEGNWRMAQKGLLVGIDVSKDKINVAIRSAAAAATFADSADGRRELLEWLTRHGVCKAVMEATGGYEQRWARLLAKAGLEVVIVDPKRVRHFAKSAGRLAKNDPIDAQMIAWFGEVFDDLTGKPQDEERHELEQLVTARHGLVRLQGLIESWGEHELPKLVQKAHQTLLKAAADQLDKLDAAIATRIKDNPQFAQRAEIIRSVPGLGDVSVSAVIAFQPELGRVDRQAAAALLGAAPFDDDSGERRGQRHIKGGRRKLRNLLYMPVMGAATKNNPVLKAYYQRLLAKGKAPKVAIIACMRKLIGILNVMLARGQKWDPSKHAIA

SEQ ID NO: 322629 - protein, 401 aa, unidentified
MLKLNYMSTLFVGIDVSSKTNAVYAMDFEENKYISSSFGNNQPGADQLVNMIAECMQKHKNLDTVLIVLESTSVYSVHISNFLSASEVLMPYRPYVFCVNPKATSNYRKSYIGMEKTDPTDAYLIADFGRVGRTKKLEPWRGGQFISLKRLTRHRMHLSECITREKTYMVSNLYLKFSELQLLEGDDKPFGSLYGATSSAVLTEFLSPQEIIDMPEEELLTFLAGKSRNRISDLSKTSELLRKAARDSYRLDKCMYEPLSISLASSFNCIHAYQKEIKLIEQAIEKCINGMNPNALLILQSIPGIGPIWASGILSEIGDITVFHSSDALAKYAGLYWPKGDSGDFTSEDNKMSKAGNPYLRCYLGEAANSVRKHIPEYADFYARKYAEVSTKEHSRLHLVN

SEQ ID NO: 322630 - protein, 346 aa, unidentified
MLHAGLDLSRKRLDVCLLSDQGELVEELAAFPDSGGLKNLVERVEAYKEPVRAAIESMTGARFVHDTLERHGWEVEIADAQKVKGLAPLAAKTDRIDARVLAVLSHRDLVPAIWLPDPRVRGERELARFRLHLVKHRSQLKNRIHSALISFGRPCQVTDLFGVAGRQHLARLDLPEPWRGNIDASLLLIDQLEAQVDEVNAKLRSSGADHPYLPLLLTVPGVGWVLAFTIAAEIGEIERFASPQKLTGYTGLCPRVVQSGESDRRGPLTKQGPRYLRWALLEATMHALRHPAYAERYQRNKRRLGKQRGAKVAQIDIARRLAHAIWHMLSRNQPFAPRGAAFRLAA

SEQ ID NO: 322631 - protein, 323 aa, unidentified
MSKSSLDYCILDDRSNVLDQGKTGNDVKSIKSLLSKIKKMKIQLSQVLFSFENTGIYSLPLTIFLAENNCCFAELPALEIKKSKGITRGKSDRTDAKDIALYSLRYQDKIVLSTAPELNILELKLLFAEREKITQAIKIFGSTSENQNFVPRSVFKTVTEINRKTLIQLKKTLKKIEEKINGIIEADDKLREQKKLLVSVPGIGDVTALYLILATKGFSSFQTWRKFACYSGVAPFEHSSGTSIRGKTRVSHLADKKMKSLLHLVALNAVRCDAELKEYYTKKKNEGKHTLVVINNIKCKIISRAFAVINRNSPFVNTYKFAS

SEQ ID NO: 322632 - protein, 411 aa, unidentified
MDIVNARCAGLDVHKATVVAGVRVPGPRPGERRGETKTFATTTRGLRELTDWLIGHGVTDVAMESTGVYWRPVYAALEGLVQVVLVNARHVKMVPGRKTDVKDCEWLAQLLECGLLRGSFVPPRAVRDLRDLTRLRKALIRERGHHVNRIEKTLELAQIKIGCVVTDLMGKTGRAILEALSAGIDDPDQLAEYAQGLLRKKRAALREALVGRLTPHYAFLLQQHLSLIEALDAHLATLQARIETAMVPFADTAALVQTMPGVAARAAQAILAETGVDMSCFPTPAHFASWARLCPGNHESAGKRQNTTTGKGATWLRATLQETAWAAVRSKKSYYRTLYYRLKARRGAKKAIVAVQHAMIVALWHMLKHRVAHHDLGADYFERRNTARIRRHHIRRLERLGYDVVITERAA

SEQ ID NO: 322633 - protein, 410 aa, unidentified
MRRVIGMDIHRTFAEVVFWEDGRLRPTGRVSMTRAGLEGFGRSLGKEDEVVIEATGNAMAVVRVLSPYVARVIVANPLQVKAIAHAHVKTDKIDAGVLASLRAANFLPEIWLPDADTERLRRLVARRNQVVRHRTQIKNEVHSILHAHLIPSCPHADLFGRLGRNWLAGQVMPDDERVAIERHLRELDRLGEDLGMLDRDIAQTAVDDPAVKRLLTITGVNLIVAAGLVAAIGDVHRFPEPQKLVSYVGLNPRVRQSGLGLAQHGRISKRGRSHARAMLVEAAWAASKAPGPLRAFFLRIRARRGHQVAAVAVARKLAVLCWHLLIKEADYQWARPALVANKLRAIELKAGQPARKGSKPGPAYAYNIKALRDREIDLARHAEQAYDRFVSQWQPRRPKRRTGAANEERH

SEQ ID NO: 322634 - protein, 337 aa, unidentified
MYYVGVDQHKKYSFVVVKDQEGKTLDQSKLYHADKENMKDYFSAIPEGSNVALETCGFDHWLSGMLIDLGLTTKLSHTAKTKAIAQEKIKTDKISASVLADLLRVDMLPQAYIPTRPIRDARYTMRYRQNLIYLRTSIKNRVHSVIDNQGIQQNFTDLFGKQGRQFLAQLNLREPYGSIIENYLSLIDDLNRRINKVDNQLRQKLKQDKQAQLLATIPGIGVITAHIILSEVGDINRFGNHHKFARYIGIVPSLHQSGQILHQGHITKQGNKYLRTAFIEAAQTAIRRDPYLAVKFNKIKSKKGYGVAIVAVAHKLVKSTFVILKRQCEYEYRSLNG

SEQ ID NO: 322635 - protein, 416 aa, unidentified
MNAVGIDVSSRKSTVAVLRPLGEVVCLPFDVTHDIAGLASLVEKLKALDGETRVVMEHTGRYYEAVEKALHEAGLFVCAVNPLLIKEYGANSLRRVKTDKADAVKIARYALDNWADLRDFTPMDAIRYDLKTLNRQFQLASKQRTASANNLIALLEQSFPGIRKCFDSPVRSDGTQKWVDFAHSFWHVDCVRKQPFAAFCERYRKWCKRHAYLFKLSNAEEVYALAKRAVVLTPKSKVVKVLVQEAANQLISISRSVEVYRAEMDRLAAMLPEYPVVMAMYGVGKSYGPQLMAEIGDVRRFERKQALVAFAGIDPMPNQSGDKNVRSNKSSKRGSPYLRKTLFNVIRTYLQCAPQDEPVFQFLNRKRAEGKPFYVYMLAAANKFLRRYYAKLRDYFASLDTLQPAAPIPTILKAAL

SEQ ID NO: 322636 - protein, 338 aa, unidentified
MIGVDLAKSVFQLHGASMTGQPKFRKKLSRQGFAEFMSKQPPAIIVMEACGSAHYWAREISSLGHEVKLIAPQYVKPFVKRQKNDAADAEAIVIAAQRPEMRFVELKSTEQQSRAILFRARERLVHQRTELVNALRACLYEFGHIVPQGIHQLGRIKGILDEPNSDLPELMREECGDLIKQIAEKTVRINARTAKIKALAAEADTARRLQTIPGVGPLTALAVEAFAPPMESFRCGRDFAAWLGLVPRQFSSGGKERLGQVSKAGQSDIRRLLIIGAMSRLNWLGRKSIPEGSWLARIAARKPRMLVAIALANKMARTIWALLTKNEDYRDSAQAAAA

SEQ ID NO: 322637 - protein, 348 aa, unidentified
MDHIIRIGMDTSKHVFQLHGVNAAEEPVLRRKLRRNDMVVFFERLAPTIIAIEAAGASHHWARLLRSFGHEVKLIAPQLVKPYVKRGKNDAADAEALCEAMSRPTMRFVPVKTAERQAALMLLGLRDRLVRNRTQLANAIRGYAAEFGLAAAKGIAHLAPLLARIQSDESLPGLARELFAAHAQEYAQLQAQIDEVEGKLMAWHKTNPGSQRLAQIPGIGPIGAAMLIMKTPAPETFRSGRQFAAWIGLTPKDHSTAGKVRLGVITRAGDEGLRSALVVGATAVIRHLRNGKGRSMLSAWVEQLLKRKPPKLAAVALANKLARIAWKLMVTGETYTAKPRPVASAGIA

SEQ ID NO: 322638 - protein, 351 aa, unidentified
MPIVADQYEFVIGVDTHAATHSLSVVTAATGAVVDQSMFATNPSGLERAVTWISRRVGEHATLVVIEGAGSYGAGLAERVLGSGLAVVEPAAMSAAHRRGIGKTDSLDAVRIARSVLAVDISRLRWPRAEGPRAALRVLVVAREQMAGERTRAVNALTALLRITDLGIDARKALTRKQIDAISTWRSRSEDVTMHTCRQEAVRLAKRIRALDAELIDNRKSLDSAVGSVAPELPELPGVGSVVAASVLIAWSHPGRVRSEAAFAALAGTCPIPASSGNTMRHRLNRGGDRRLNRALTTIVLVRMRTHPDTRAYVARRRREGRTTKEIMRCLKRYITRQLFRTLTAAYPAPA

SEQ ID NO: 322639 - protein, 400 aa, unidentified
MSGLKGSFDSFIGIDVSKDKFDACGITGDEAKIFQFSTTMDRKGFEKLKGHLAAVSISSVLIGMESTASYHVNLFSYLVSEGYRVILINPLLISNYVKMQLRKTKTDKKDAVVIAQFLLTNGDALAQRAAPSLISDLRDLSRQRESLVDEMTSLKIEIKQILNITFPELEHMAGIFTKSILKLLQQYPSAFALRDADLSKLSQMLIADSYGHKREAFAAGLIKAAHSSIGTNSPAKEMILKQKIALLLHIEDALQEITGMLIEMSRKLMDEEINLMTSLKGIGEKAAANFLIEMGGDIHRFERSGKIIAMAGLDPAVYQSGKHDGKGRITKRGNRHLRKIIWLMTTKVIQYTDTFSVYYLKRRKEGLPYKMAVLATAHKLIRVIYAMLTHRTVFCPQANL

SEQ ID NO: 322640 - protein, 422 aa, unidentified
MNKRRYRTTEVNEVNWVQLSEQAGEERVVFGVDVAKANFVGTLLTPDRRVLKTIQWHHPSQTPELLHGLLAHLGACALEVAMEPSGTYGDALRWQFARHEVAVYRVSPKRVHDSAEVFDGVPSLHDAKAAYQIGRLHLDGVSRPWDERDEQRRALGAEIGLLKLYQERFARSRNRLEALLSRHWPELLGLLELGSVTLMRLVAEYGSAAQVVAHAKQARELMRRHGRAGLRPEKLEAVLETAQQTLGVPCLEAERVVLQTLAQDMWDNDRAARRIEQALAARVEADETARRLAALVGKTSAAILLHTPGRPQDYPNAGSYLKSLGLNLKERSSGQFKGQLKISRRGPGIARQYLYFTALRMIYRDAVVQAWYQRKVRRDGGLKGKAIMAVMRKLAKALWHLAQGGDFDGAKLFNSKVLGLGA

SEQ ID NO: 322641 - protein, 422 aa, unidentified
MRKIAAMEVLHPRCAGLDVHKDSVVAAIRLAANGEPKTEVRTFSTTTPGVLALSDWLSHHACTHIAMEATGVYWKPVWHILADDTFTLILPNPAHVKNVPGRKTDVADALWLADLLAHGLIRASFVPEPATQAMRGLLRTRKQLVREQASHIQRIQKTLEDANIKLASILTDIMGLSGRALLKALIEGETDPDHLVKLIDRRVKASPEQRHAALCGRISDHHRFLLRLHLRQIDMLNEAVAEIDQRVESDLDPFRAAVRLLCSIPGIGELSAQVIVSEIGIDMSRFPTAGHLISWAGMCPRNDESAGKRRSKRLRKGAPWLKATLIQCAVSAAKKKTSYLHAQFKRLCQRHGPKKAFCAVAASILTAIYHMLRDGTFYQDLGADYFHKGTAYAQARKLAQRIAKLGFDCSITPKAEEEAVSV

SEQ ID NO: 322642 - protein, 364 aa, unidentified
MNKCHLNTELSSLEGTRSEFNRSTAAIKLGIDVHQDFYVVVKQEGGTNPKPAQRFQKEAFLHWVAKLTKEGAEMHAVYEACGFGFELQRQLTALGIHCYVVCPQKLDERNKRVKTDRVDAKALCLKLDRFVEGNRDALALVRVPTQAEEQKRAIHRQREQLVKARKRLEAQGRSLIVNHGIEPVNKWWKRRTFAALQVPAWMKELLQNTQPILLALEEKIRALTAQLQEAAISRQPRGLGLLSSVVIDREIGNWDRFKNRRRVSSYTGLCPGEYSSGKTRVQSCVTKHGNPRLRAALVETAWRLVRFQPEYRAVKKWRHLLAKGALATGAARKKAIVAVARQLAVDLWRIRTGRVAIETLGLIN

SEQ ID NO: 322643 - protein, 487 aa, unidentified
MSKRVQKRQERKRVQPKVDWKALAVVHPDAAGIDIGGSEHWVAVGPDRDEQPVRCFDCFTADLEQMADWLAARGVRSVAMQSTGVYWIPVFEVLQQRGMEVYLVNARHTKNLPGRKSDIAECQWLLKLHTFGLLQNSFQPSDEIRAVRTLWRYRGGLVGQASSTIQRMQKALIEMNIQLSNVLSDLSGVSGMAIVQAILEGKRDPQELAALADPQVKASQEVIAKSLHGNWRSELLFVLGQEMDSYRALRKRIAECDGKVQQHLQRMGSRVDLSVQPIGPRPKGKRARGNAPQTFDLRSELYRLTGVDWSQVDGIDVQVAQTVIAEVGTDLKAFPSEKHFANWLGLCPTNDSSGGRVLKRRTPKVVNRAKTAFRQAASTLIRSHSYLGAQYRRLRTRLGAPKAITAMARKLACLFYRLLTKGQPYVDRGAHYYESHHREQQIRSLIKRARQLGLQVLSGNGQPLGLTGSFPRGPIRMTVPAPWFLVS

SEQ ID NO: 322644 - protein, 410 aa, unidentified
MIGLHQAAPEPAPTAGVDWASTEHAVAIVDAHGSEQERFIVAHTGPGLRQLVRRLRQAGVAEVGIERPDGPVVDALLEDGLTVIVIAPSQVKNLRSRYGSAGNKDDGFDAYVLADTVRTDRRRLRPLARDSEATTTLRMTVRARQDLVTARVAMANQLRAHLQTTLPGAIGLFRDIDSPITLRFLTRFPSQDKADWLSPTRLGNWLRTVSYNHQANLDQLWDHLHHAPRGTTGPQATARAEITLALVAALTSLRTQIKALEAQIGDQLAHHPDAAIFTSLPRSGTVRAARLLAEIGDARGRFPTPEALACLAGAAPSTRQSGKVKVVAFRWAVDKQLRGAVIDFAGDSHHANPWAADLYHRARDRGHDHPHAVRILARAWLHIIWRCWQDGVPYDPAKHHALQRILNHAA

SEQ ID NO: 322645 - protein, 314 aa, unidentified
MKKTVEIFVGIDVSKAWLEVAVHEQKETYRFSNDEAGIASLVKALKKLKPKLIVLEPTGGFEMLVVAELSQAGLPVGVVNGKRIRDFAKATGQIAKTDKLDARVLAHFAAAIRPEVRPLRTEEEEQLTALLTRRRQILDMLTVEKNRRVSVRAKMRADLEAHIHWLSDHLQELDQEIEEFVKGSPAWKEKDTLLQSVPGVGPVTSATLLGMLPELGLLNRQEIAALVGVAPMNKDTGNKKGKRSIYGGRADVRSVLYMAALSAKKHNPFIRKFYERLIRHGKEKKVALTACMRKLLVILNAMVRTNQPWRSQTA

SEQ ID NO: 322646 - protein, 423 aa, unidentified
MEVMQERVAGLDVHKAMIVACVRLMAGGKVNRECRTFETTTAGLLALLAWLAESGCTQVAMEATGVYWKPVWNILSDGAFELMVANAAHIKNVPGRKTDVNDAMWIADLVACGLIKASFVPDQEIQELRSLLRARKQLTREQTSHVQRVQKTLEEANIKLDTVISDILGVSGRRMIEAMIAGVRNPVKLAELADRRIKATPKALYDALHGRLTDHHRFMLRLYLTQYDTLAAAIATIEQEVDALVARMDAEVVAGQATFRSLIILLCTIPGISTLAATTILAEIGCDMSRFPTAGHLVAWAGMCPGQNESAGKRKSSRLRKGAPWLKTMLVQCAWAASRKKDSYYKAQFNRLRAKRGPKKAICAVAASMLTAIYHMLKDGTEHRDLGADHFDRRSTEVKAKRLVAQLAKLGFQVELQPLAVAA

SEQ ID NO: 322647 - protein, 387 aa, unidentified
MLTEAATCAAVIGLDVGKFSHWACHVTRQGEVLRNEPVANTEHDLDGLFAQAEAGTLVVVDQVRNIGSLAISRARLAGLPVAYLPGIAAHGAAKLFAGDAKTDERDAAVIAKTALGIPDSLLPVPKHDERLEAARSMAAQRSHMVTCSTRDKNRLRSILLESCPEFEALADLADPRWLRMMESLGGPWGIVDAGKAAVGAVTRGANRARIDAAVAAAAASTRPSEYRVMAENPQVKVLARRIRESAEEAARLDAEITALLAGDETYACLLTIPGIGPRTASELVISIDIGDFPDHDHLASYCGIAPRNRRSGKSISSVSSSRQGNKRLKNLLIFSCNSLSRGKGRFGDYYRSCRERGMCHGEALKAVARKRLKVIYAIMRDKVPYSA

SEQ ID NO: 322648 - protein, 345 aa, unidentified
MPLIAEVVDAVVGGDTHRDRHALEMTAPTGATISILSVSNDEHGYADMLSWITEHAPGPRVVIGLEGTRSYGIGLARSAQAAGLVVVEVERPKRAERRRGKSDPIDARLAALQTLRMDAGRLPTPRHDGPREAMRILLSARHEISMTRTRQINRLRALLLTGDDRDRELARGPLSDSRLGLIARRRGNPAAPVETQIRRNEARRLATAILQAGREMRANRQSLAQLVAEIAPALLDRFGVGPVSSAQAIVSWSHHGRCRNEAAFAALAGASPLPASSGRTVRHRYNRGGDRALNRALHDITLTRWRACPRTRDYIAKRRAQGKNDREIRRSIKRYIARELFRTLR

SEQ ID NO: 322649 - protein, 408 aa, unidentified
MKTLHRRCAGLDVHKSEVVACLRLVMRGKASYEVRRFATTTRALIELADWLEQAGCTHVAMEATGVYWKPVWHMLEGRFQQILANAAHVKGVPGRKSDMNDATWIADLLAHGLIRASFVPPQPIQELRDLTRSRKQLTREIVQHTQRIQAVLEEANVKLSSVITDILGASGRRILSAIVAGETNPKKLSELGDARLAATRTELAEALHGRIRSHHRFLIGQHLKTIEQLDETIAAFDARIEAALEPFRDALERLKEVPGLSETSAQILLAEIGTDMGQFPTAGHLLSWAGLTPRLNESAGKRRSTRIRKGAPWLKPVLVQAAWAASRKKNSYFAAQFFRLNARCGPKKAVIAVAASILTTAYHMLADGTCYQDLGAGHFARRNPSRAAARLANRIRNLGFHVEIRPAA

SEQ ID NO: 322650 - protein, 343 aa, unidentified
MNTDNLAITSLDLGKNCFHFYGQDNRGRHLFRAKVSRAQVFAFIAQLPPCTLAMEACGGAHFMGRFAVSCGHQPKLIAAQHVRPYVKSNKNDYVDAEAIGEAASRSAMRFVALKTEAQQALSMLNMTREAFMRDRTATVNRIHAFLLEWGISLKPTFKSIRELPKVLEELRAPVPVIRLFEQFHAHFTYLDERVKALTKELEGQVAEDDLATRLMTMPCVGPITSSALAAEIGDGKQYKRGRDYSASIGLVPKQLTTGGKPHLLGISKRGDRNQRRLLVQCSQTFINHLDKQTGHLADWVRGLLARHHRNVVVCALANKLARIAWALAHTHGIYEAGPSAQNA

SEQ ID NO: 322651 - protein, 312 aa, unidentified
MMTDNSVGIDISKDFLDAHRLSDGAAARFHNSPAGFCSLSTWLGDSRPTRVVFEATGAYHRSFERTFSGKIPLVKVNPLQARRFAQACGTRVKTDAVDARMLASFGNALTLEPDHPVDGKQFELKELFSSRGALIKDRTRLTNRLNTQSLALVKRQTKARIDQITRQLKALQQDINTRLQDCPGRTRTNTILRSIPGIGEVAAATILIEMPEIGTLQKKKAASLTGLAPMTRQSGKWRGKATIQGGRKQLRDALYMPALVASRYNPDLRDKYQAMIKNGKPQKVALTAIMRKLIELANTLVKADREWAPIST

SEQ ID NO: 322652 - protein, 452 aa, unidentified
MALIVGIDLGRKSAHDVIVLRRESAQQLGRVFRFDSTPSGIETLFKRIAAVHQEEESIAFVIDSPGKAWIPIAAALKNRGYPVYRPSSYRVRRVRQAGDRKNKSNRIDALALARCLLTYPQDTQEVFLPKKVQAQLDQLVRQRDRIVDSLRRRKQRIQDLCEAINPGLTKAAGGFLLTEAGRAFLRAYLDPRAVVRLGKKRLSTFLDTRYRLPLQEDLLNGIFLACKEATLFYKSIRQAGQMPFDEALLQEEMNWELDQLEREEQRILSLESQLKECNQTLDPQDAFLSLPGIQHITAAGIRACIGDIGRFNSLTNHRGFAGLYPSVRKTGDGQSASMPISKMSCNRYKRYLYLAAENAYKWDVDCAAFYHKRRERGHTHTQAVCAVANGKLLPRIHHLLKQLDQAKANAQHRPRYVFRDLEGNPISKAEARAIIQAKWGNRKYGKKGLATA

SEQ ID NO: 322653 - protein, 439 aa, unidentified
MVIQSLPFSQKYFAEEALKLKVVYPICCGVDVHKTFLVATIITTEEITPHYHKKRFSTFNSSILEFKQWLLENKCKDLCMESTGKYWIPISNLLEDSIKVTIANPKWVSAVKGNKDDVKDSKWIGDLFRLGLVPSSFIPPKEIRILREYMRYRFKLVSCKSSEKNRFQNAFTVCNVALDAVVSDMFGKSASAITDYLVNCETFDPNHCISLLQKSLKKKADEVVDSIQGYQMTEAQKERIRMVREHYDFLDALIVRLDEKINELVVPFESAIRLLCSIPGVSRRSAISIISEIGTDMSQFDSSKRLCCWAGLTPSNNQSAGKKKSVRITRAGVYLKPALVEAAHAAVKSSGSPYYRLKYERLVKRRGKKRAIIAIARMMLTAVYNMLSTGEFFNPCDLYKVDMPEQLRDKQQQKAVKQATKLLISLGLVLPENIAALPA

SEQ ID NO: 322654 - protein, 420 aa, unidentified
MSVTDPDAPARAVVSAAAPTAGVDWASTDHAVSIVGTDGEQTHRFSIPHNAAGLRTLVRKLLSAGVAEVGIERPDGPVVDAVRAAGLVVYVIPPGQLKNLRSRYGSAGNKDDRFDAYALADVVRTDRRRLRPLLVDQPDTLALRQLTRARKDLVGHRVAVANQLRAHLQIVFPGAVGLFADLDSPISLRFLERFPTTDRAAWLSVTRWSAWLSSVGYSGRTPAQTLHERLTTAPAGTTGPAADTAAAVTAAFVATLRTIAAQIDALAARIAEQLDLHPDKLIFTSLPRSGTVRAARLLAEIGDARGRFPTADSLACLAGVAPSTRQSGKVRAVTFRWSADKQLRDALCDFAGDSRHANPWAADLYRRARARGHDHPHAVRVLARAWTDIIWACWTTNTPYNPGKHNALQRILNQDQPAAA

SEQ ID NO: 322655 - protein, 461 aa, unidentified
MRKKQPAAKQKRSAREKDDWKALEIVHPEAAGIDVGGSEHWVAISPDRDPEPVRRFGCFTADLREMARWLIGKGVQSVAMQSTGVYWMPVFEVLEQNGLEVYLVNARHTKNLPGRKSDVQECQWLLKLHAFGLLSNSFQPTDEIRIARTLWRHRGNLVAEAGSAIQRMQKALTEMNIQLSNVLSDLSGVSGMKIIGAILEGERDPWELAALARPEVKATPEDIAKSLEGNWRRELLFVLEQEVELYRFYQEKIVDSDLELRKHLESLGSTVDLNAQPIGPKPKGKKGSRNAPQFDLRTELYRITGIDWAQINGIDVLTAQTVIAEAGADLSAFPSEKQFASWLGLCPTNEQSGGKILNRRTRKVVNRATVAFRNAAATLLRSQSYLGAQYRRLRTRLGAPKAITAMARKLACLFYRLIKHGQQYVDKGTEYYEARYRDQQIRSLAKRAQKLGLQLVIPETA

SEQ ID NO: 322656 - protein, 355 aa, unidentified
MEKISVIGIDLAKSVFQLEALSPDGAVVWKKRLRRAAFMRFMEKQAPRCLVGFEACGGAHYWGRFLGDLGFRVKMMAPKAVKAYREGPHKNDGRDAHAVAEAASRAQVRAVRVKSEAAQAVQALVRVRLLQIKQMVQTGNQLRGILTEFGIVMPKGHHRLQLAIISLGEDPRYQRLPPELREAIAGLRAQLAEQVERVRLATAALAQATRADPACELLRSVPGLGPINAAGLSVALEAPQSYRNARAFAASLRLVPRQWQSADRQQLRGIPKQGASDIRRNLVLAGQSLLTMIARREEPPQGRLLIWAQHLLRRKQRNVAAVAVAAKLARIAWAVLAKGEAYRPRQRIADERTPA

SEQ ID NO: 322657 - protein, 466 aa, unidentified
MENNYILYVGMDSSKGKADAAILKVSDRRSVKPKFLRKKLSFKFVKSEVTSFLETVRSYSDDNCTSICFALEVTGIYSTNVYNFIKDNLNDNESIKFLNTDFVNQWRNAHNIAKSDPLDAQTISTIIGTDSDVQYVNDNVFENKNGYQDLKALVHRHYQIKKIYSQEINRLIAQCDCLFPELQYVFEPKSAAFIAVLSSYPTTHDIINASRLEVFNVVYEATKHRCSMDKIDKLFDLCHDTLVPDNISSYGRSIILDLVENIKNIKGQLKMIERYIRDVASLNPAYKLLLTITGCGPLTAATVIAETGDIKRFKNADCFVSYSGTSPRNKRSGTSVETMGKISKKGSRYLRHAIYMIAEFARRHNPVLKHQFERIKNGNKKRHKLANIAIANKIARYIYSIMKNESGFVIFHEHIMRLPEETQNTFFNSISLDFPENTRKQIYQYSDIDGEVHKFVYTKLEETMII

SEQ ID NO: 322658 - protein, 400 aa, unidentified
MLSIGIDVSKGKSTVCGMKPGGEIVYTPFEVQHTREGMSELVSLLRSSGEEVRVVLESTGSYHCPVVATLLENGIFVSVVNSLRMKRFCSQSIRKVKTDRIDAMQIALYGLAYWQELQPARLPEDTYRELQLLARQYYQMTSLLIKAKVDFNAICDQVLPGMQELMSDHAGRHKLSDFVLRYHHTTHILEMGETRFRKDYCKWAEKKGYRNCERMAVLIFATAQNGIPVLPNAPSTQIVITEAIRVLHTVEASRDAILTQMQALAKTLPEYSLVREMPCIGDTLAPRLIAEIGDVRRFHSKRALIAYAGIDAPPYQSGKFCANNRHISKRGNRYLRKTGYEVMQSYVMHKPANDPIFTFIEKKRSEGKSGKLAMVAGLNKFLRVYYGKVTELYRSLPTIE

SEQ ID NO: 322659 - protein, 354 aa, unidentified
MKRTPKYVGLDVHQATTLAAVREQTGRVIARTLLPTEPHALVEFFGGMRGPIHVAFEEGTQSQWLHDLLEPVVDQVVVCDRRGQPTAGSKSDRGDAEHLAELLRRGGLRAVYHGSPQRASLKEFARTYQNLVEDSTRVMLRLKALFRARGIRTPGKGVFHERQRAEWLGRLPNVGVRFRAEALYAELAVLQQLRPRAKTALLREARRDPAWTVLQTIPFLGPVRVALLLATMQTPWRFRTKRHLWAYAGLAVVTRASAEYELQGTRAVRRRRPPMTRGLNSNHNHVLKDVLKGAATAASVRPGSFQDFYHALLARGMREELARVTLTRKLAALTLRLWKTGERYDAYRLTVPAH

SEQ ID NO: 322660 - protein, 354 aa, unidentified
MIIIGVDYHPEFQQIASVDTDTGEFQEKKLTHCEEAEKFYRAVAASGQKVRVGMEASGHARWFERLLAELQIELWIGDAAEIRAKRVRKQKTDRQDAQLILRLLLEDRFPQIWVPSWKNRDLRQLLWHRHRMVQARTRIMNQLQAVALNEGLRCKKRLWRERGRQQLESFRLAPWASRRRRDLLELLDRLNPTIAELSLTIEQEVEKCPEAQRLMTHPGVGPLTALAFVLIIGEANRFQCGKQVASYLGLVPLEDSSGNRRRLGHITKQGSSMLRFLLVEAAQVTARSLPQWRNKYLHLMMRRGRKTAKVAMARRLAVRLYWMMRQGWDYQQWSKFGSHAGQPGNRDGVPSNTE

SEQ ID NO: 322661 - protein, 360 aa, unidentified
MLEPFNPSKSLTALEQDSTVIAVIEMSRSKWLVAAVILGVERQPLKKIDPDEEMLLKLLHRWRNKAGRAGREIKRIVVAYQAGRDGFWLARWLRARGIEAYVIHPTSVAVLREHRRAKTDRLDTELLKRAFPGWLRGEKRHCSMAAIPTLEEEEEEDARRPNRERENLVTERTRLVNQMKAILVRFGIRTFKPTLRKADEKLEGLRTVEGSRRTRVPRCAANSCACASCASRSARSIRNGYANSRRLQLKRGPHAMVRLLARVPGVGVETADLLVNEILLRHLRDRKAVARYAGLTGSPDESGRRRRERGLARADSARVRCGMIQLAWRFQNDDRLKQSLGFSDNDIRLLCANTAPRTTG

SEQ ID NO: 322662 - protein, 368 aa, unidentified
MKKIAYVGIDYHMNVVAIAVIIEGEKEFYDTIRLKNTDTLIAKYMQKLSHQFTIKACYEASSSGYCFQRKMRAWGYHCDVIAPSLVPKKPGSRRKNDFRDARELAQHYANGLLTIVHPPSEQDEALRGLIRCRQSLKEAEKRAKNQINSLLLSQGLHWQKSKWTLRHRQWLATLHLPHTYLQQVLDEHLALLHYLEARVLHFDRQIEALAQSELYAESVKKLCTIKGIRTLAAMILIAEITDFRRFASPRALMAFLGLIPAEHSSGDKQTGCAITKTGNKRCRTQLIEAALHYVKKPTIRGRLKSALSQVDASTATIALTCMQRLHKRYWALVMKGKEPKVARTAIARELAGFIWALMNQQPAPVTTV

SEQ ID NO: 322663 - protein, 343 aa, unidentified
MQVVRIGLDLAKYVFEVHGVDNHGKVVVRKRLRRDAVARFFANLPACLVGMEASNGAHYWAHVLTELGHQVRLISPQFVTPYVKSNKNDRNDAEAICEAVGRPSMRFVPQKSTDQLAVQAVHRIRRRLVADRVRLVNQIRGLLSEHGIVIARDIAKLRRGLAVIVGNINDELSEMVRALMRELQAELAELDARITAYDRRIKEIFRASEQCQRLGKIEGIGPVTATALIAAVGDRSCFKNGRQFAAWLGLVPKQRSSGGRAHLFGISKRGDRYLRTLMIHSARAALSRASGKQDPRSLWLGKMRQRRHPNVAAVALANKNARIVWAMLTGNTGYVPALSVKAA

SEQ ID NO: 322664 - protein, 346 aa, unidentified
MYTIGVDLGKRHSQWAVMDESGKVLVERKLRNCREIVQRFVRALPGKVSQVGCETCINTYWLVEVLEEIGITVTVGHALHLRLIAEARIKTDKIDARVIGELLRVGFFPKVTLPPREIREVRELLRGRVKLARNVTQAKNRIHGLLTRAGVDYEAKELRGVGVEAWLAGLELRPCQRFMVETFLKTWKEVEGHVERIEAELVRQVKLVGPWAAVVERLQTVPGIGLFSALLLFLELWDMERFASPKKLASYVGLVPGVHQTGQTLRGGALTKQGNVYVRWVLMQCAWAAVRWDARYRGMFEYYAKRKARTRAIIPVARQILTDVYEVWKRGITYKELMEKKQRQPA

SEQ ID NO: 322665 - protein, 342 aa, unidentified
MIYHMGIDTHHNFSFFQHLDAEGAIGISERVATAPDRINELLAQLDEPTTITFEAGRNYWWLHELFAQHPMVSQVNVVDPRRSRKLASELSVLSGYGRAKNDYIDAEMLAEQTRRGLAPTIHVPSAEQLAKRTLCRHRFNSVKNRTRSKNLIHAILELHGYSAKIAALVTPSATRDQFLALLPAYVAFIVEQFVARIKLLDQQIASCETRLAQLLPESQPQMKIVMSAPGFGVVLSRMVLTEMLDIAHFKEPKYLISYAGLAPVDNESAGRKGSIKLNKQCNHYLKYAFVEAAHNARDNLNYRRKYELDVKKQGKIIAKLNLARRLAKTVYWMLTRQQLYRS

SEQ ID NO: 322666 - protein, 440 aa, unidentified
MAMRKREDEVFPNAAGIDVGASSHWVAVPGHCTDASVREFGAMTDDLHAMAEWLLACGVDVVALESTGVYWIPVYELLESRGLKVWLVDARQVKYVPGRKSDVADCQWLQKLMSHGLLRAAFRPAAEVCVLRAVARSREVLLTEQASWVQRMQKALVQMNIQLTEVISDVMGQTGQAIIRDIVAGQRDPEVLARHRHRRIKASEQDIVRALTGHWREEHLFVLGQALGMYDDIARHLHECDTKLQRLLAERSAARVDVGKTPRAGSKARSQFDLRQQLANWAGCDLTRINGLGLDGVMKILSELGTDLSRFANVKHFCSWLGLCPATKISGGKVISARTKRSANRVRQALKMAAMSLSHSDSALGAFYRKLCTRMDKPRANTATAHKLARLVFFMLTRGEAFVDEGQQRYEEQQRERSIAALKRRAATLGFQINPIGAVA

SEQ ID NO: 322667 - protein, 428 aa, unidentified
MDFTQNNRLAQINEQTLIIGVDVAKRKHVARAIDDRGRDLVKRLVFTNSLQGFSNLIEWAENLSEKYARSNIIVGMEPTGHYWLNLAYHLKGQAFQVVVVNPMKVKRSKELDDDSPTKNDTKDAKVIAQVVRDGRYHEPTLPEDVYAELREGMKLYDIIQEDMSSIKAQMHNALDRYFPEFLDVFKDWSGKAALHLLERGYMPEDIRKTSEEDLLLEVKEAAKRGVGIKRIQALKQAADDSVGLTVGLRMARQEIRYLIDQYKALEERLIALEAQLEEIILHVPGSDQMMAIKGVSAMTVAGFFAEVGDLSNYRDPRQVIKLAGLNLKMNQSGLFKGQTTITKRGRRRLRSLLYQVARPLSLHNEGFKQLHYYYRHRPNNPLTGKQSFIALSRKLIKIFYVLGTRKCTFSEERMLRDIPMISTLQEVA

SEQ ID NO: 322668 - protein, 382 aa, unidentified
MLYVGLDVHQKRSSMCILNDDGKVVKQELIKGPWPGVIDRLKRIDEPFRVCYEASCGYGHLHDRIAPLPRASQVSVAHPGQLRLIFKSKKKYDRIDANKIAKLLYLDEVPAVHVPNIDVRGWRKLIEFRQTLLRRRVALKNQVRAILRGEGLTAPRGLWGKKGMTWLGQVELPAGSKLALDLAAEDIAQVNEKMKRVEKELAKIAQKHAGVQLLMTIRGVGIRTAEAFCAYVDDVRRFARTHQVGSYFGLVPCQDSSAGKDRFGHITRDGPPTVRKLLCEATWMGIRHNPQLREFFERVMNDDPDRKKIALVATAHYLCRIMAAMLRSGEVWRDPRKQEPQQEQEQEQKQEQKQKQEQQDGLRPAVEGAPPRKTPRQKAVVF

SEQ ID NO: 322669 - protein, 391 aa, unidentified
MIYIGIDVAKDKHDCFITNSDSEVLFKAFTIFNNLDGFNDLYQKIETVMKDITKVKVGLEATGHYSYNLLGYLIDKGLPTYVINPLHTNLYRKSLSLRQTKTDKVDARTIASILMSDVNLKSYSDISYHNEELKSLTRYRFDKVKERAKLKSSVSRLVCILFPELEKLVPTLHMASVYALLSEFPGAKQVANAHLTRLTNLLSEASKGRYSKDTAITFRDSARASIGSNMPAKSLELKHTIKLIQELDSEIDEIENEIKIIMDEINSPILSIPGINYRMGAMIIAEIGDFNRFDSPDKILAYAGFSPSTYQSGQLDGAYAHMEKRGSRYLRYALYNATKYVCHWDPTFAAYLAKKRAEGKHYNVAISHAVKKLVRVIYHLEKTKQQYIKAA

SEQ ID NO: 322670 - protein, 423 aa, unidentified
MENTVARKRKQIPEGYLVIGVDPHKKRHAAVAITQDFTTRAKFKFDNTREGLETMLHRVRKEMVASGCRGVIFAIETGGHYWRNIAYFLEGKGIPYRFINQFTLKRRREGKDLNRRKNDYRDSEVAAQLLCTGEFTESKLPQGVYAELRTAHNGYRRLVKERTRITNLVKGLLDGLFPEFTHVFKDPCGLTALSVLSNCSIPSVIAGMTEEEFITTIEARHQGRLMRRKLRALHNLARRSIGINAGAGPVSSEISFLVEKLGLIRQHICIMEGTLVRLVDITEEGKYLLSIRGLNYTAVAGLLAELGCFKLYRSAKQMIKMAGSNPTESESAGKRSAHTPMSKKGRPVLRYCAWTAVIPMLRLNEDFRAWAKQKRERPAYANPLNGREVVGAALNRLLRLAFAMVKNQTYYQVPEQELELVAV

SEQ ID NO: 322671 - protein, 399 aa, unidentified
MTKVRTWVGLDVHATKVVACTVDAESGEMTVHRLPGETAAVVAFCAGLPAPVRVAYEAGPTGYGLTRVLQQAGVGCVVAAPGKIERPAQDRIKTDQRDAERLVRLLMINGLHAVRVPSPEEEALRDLVRAREDLRGDLMRARHRLSKLLLRHDVRCDDTSSRWSDRHRSWLAKVDLGARGAQLTLTEYVGAIDALEIRRQTLEAAIGELIPSSPWAQDVARLRCLRGIDTLSAVGVAVEVGDFHRFEQPSLLSSYLGLVPSEHSTGESRRQGGITKSGSRHARRLLVEAAWHYRRPPRLSTTLERRQDGQEQAVIAIAWKAQQRLHRIWRRLDLERGKRRTVVAVAVARQLAGFCWAIVTHDTSDSSIPVPTDTASVRAGGRPPHAHSPQPRSTQHKAA

SEQ ID NO: 322672 - protein, 439 aa, unidentified
MSISLPEMVLAFDFSLDRLDVALRGPAPEWIWGHRAYANNWAGYQQLKQDLLEELQRASPVHLTAVGESTGPYWWHAFYQLSHDAELEPFEPQLALLNPAHVKGYRKALSEQDKTDPDDARLIDHYYRAVGVKQPYQFADRYLRLRTFSRAYARVIHTLAAEKAYFLSVLYLWGSEYQRREVQPFSNLFGATSQFVLDEYADVQTLSDIPLEELTALLAQRSRNTLSEPQDNARKLHQVAQDSYPLPDALREALYQVLQLSLTHIRLLTDNQQTYRRLLGAELATLPEAQRALTFKGLGPVLVAGCLAEIQDTTRFTTGTKFDRRTQRDRPRTYRDGQAAVAKLAGLWWPKQDSGRVQGLQPHLARERNPYLRFWLVQSAYILPRYQPEYQRFYQKKFREAHDHPHRRALMLTARKATRLIFALLHKGRLACLEEGLLT

SEQ ID NO: 322673 - protein, 369 aa, unidentified
MKKTIKNIGLDVHKNSISIGIADDGRDGEVRYYGKIDNDMNQLDKVIRKLISKGAVLRFAYEAGPCGYSIYRYLTNNDMDCIVVAPSKIPQQSGNRLKNDKRDCLSLAKLHRAGELTAVYVPTEEDEALRDLVRAREDGTHAVRTAKQRLGAFLLRHDTVYSGKTKWTKAHFNWLADIAMPHPAQQIVLQEYIDTVEDCSNRVQRLTEQVRQQSQQSRLHELIKSLQSMRGISLIVAATIAAELGDLTRFENPGKLMAFIGLIPSEHSSGEQVKKGAITKTGNSHVRKALVEAAHAYRFPARKSRAIRKRQEELPKDVLDISWKAQCRLCTRYQYLTAKGKKTNVAKTAIAREIAGFSWAIAQALPKAA

SEQ ID NO: 322674 - protein, 354 aa, unidentified
MKRTTKYVGLDVHQATTSVAVRDENDRVIAQTVLPTEGPALVEYFRGMRGTVRVAFEEGTQAQWLHDLLEPVVSRVLVCDRRGESKRGNKADAMDAAALSARLRHGTLRAVYHGSPERAQLKELGRAYRTIVEDATRVKLRLKALFRARGIKTAGRTLYNAPHRAEWLAKLAEPAARFRAEALYDELVVLQRLHAKAALAVVAEARRDPAWRSLRTIPFLGPIRVALLLATLQTPWRFRTKRHLWAYAGLAVVLRSSADYEFAGGQARRRRRAPLTRGLNRNHNPTVKNILKSMATDAARRPGPLQDWYQKMLIGGMREELARVTLTRKLAGITLRLWKTGGAYDPIHLSVPAR

SEQ ID NO: 322675 - protein, 328 aa, unidentified
MDNLTYIGIDIGKRTNTCSAPGKKVRSFANTKSGIQKMLKFCSVVAPEQELFFVMESTSVYSLFTAHTLVDLAKVRVAIVPPACVLGFINSKIKRTKNDNVDAVAIREFGKIMQPNPWSPPPVILQQLQQLRLVLDGLTKTITRQKALLEKLEFAPRKCKAALTAQKRLLADAKAERKKILAEIETLIQSDAELAADSKLILSIDGVGEGTRNMIMALCHTELKALSQRKLLAYCGMCPQENQSGKFKGQTRMNKGGDNRIREMLYMVAVSMTTKHGLMREYFIRHKEKRCKPGKVILVSIMRKVLYLIQAVVKSGVPFDRERYLNAA

SEQ ID NO: 322676 - protein, 433 aa, unidentified
MNSNHPYDLVIGLDRSDRKADLHLINPRSAIAEKQTIDTSPEALHEWLFQLRQKHPQARVAICLEQPAANLILFLEPYSWITLYAINPITLQKFREAFVTSRARDDGKDAQYLAQLLLTHHDKLKAWQPDDCQTRQLQQLVVHRRAVIDERTSLTNRLKALLKQYFPQALELCGEDLWRPLATAFLLKWPTLQRLQKAKSATIKTFYYRYGSRSQKLIDQRLERLARAVPLTDEPAVLESHALRVQLICRQLELLHQTIDQFDGQIALVFRSHEDRALFESFPGAGPVLGPRLLASMGSERERFGSASNLQRFSGIAPVTKQSGGKCYIHRRYLCPKFLKQSFHEYAKESVLHSRWAAAFYWQQRQKGCGHHTAVRALAYKWQRIIWKCWQTRSVYREEHYEAALKKNGSPLVSLLDQIQPGKSPMNTTTKKS

SEQ ID NO: 322677 - protein, 353 aa, unidentified
MKFDKYIGCDLHQATTVVAVLDAEGKVAMETIVATEAAAIIRFLKSLSGPLHITFEETTQARWMYDVVRGYVSEAIVCDPRRNKLLGEGSKADKPDARKLAELLRAGLLRPVYHGHEATRQLKELVRGYETLSVDTQRMMVRIKSIYRAHGIRTFGSAVYQQKQREQWLQLLSEPGTRQRVSWLYEELDHLRPLRKQAKMAMVAEGRKHQAFRLLRTIPQLGPIRCAMLVATVDTPYRFRTKRQLWAYSGLAIVTYMSSEYEIKAGRVVRNRKPVATRGLNRNCNRRLKDLFIGAAVAGSRSEPYRSYVEGLQQKGIRAEMARLTLARKIAAVALRVWKKGETFDPKKLNSTT

SEQ ID NO: 322678 - protein, 342 aa, unidentified
MTITTIGLDIAKNVFQVHGADAAGAVLLRKKLRRNQVIDFFSQLRRCVVGIEACGSAHHWAREIASLGHDVRLMPPQYVQPYVKRHKNDAADAEAICEAVTRPSMRFVPIKAAEQQAVLALHRARELLVRQQTMLVKALRGHLSEFGVVVPKGAHHTGKAVAIIEDDNDNRIPDVAREALRVLAEQHEAPKVRIAELEAKIVAWHRSNVASRRLATIPGIGPITASALAATVPDADHFQSARQFAAWLGLVPRQHSTGGREMLGSISKRGNPWLRRLMITAAQSVLRWKIQRPEQASEWLRGMLARRPHNVVATALANKIARVAWAVMRKEEEYRAPRLAAA

SEQ ID NO: 322679 - protein, 404 aa, unidentified
MEPQIWWVGIDVGRFFHALCAVNGAGEVVWQRKRVPNTTAAMRRALDELRVCAGACTVRFASEEAGGNARALMRLLAQREETVYLAQPLRVHRFHLALGQPHKSDPYDAQVIAQFARQNHAALPRVRPMEPQLEALRVLSRRLEAVSRDLRRCLNRLRATLAEYAPEWLVCSVFSDWSTEAALGTLQRYARISKLRRTPLGRLAQALSRWTRGRFGADHASALQQAFAEVCLPPAVEDAYVQALESLLRQIRTLLAEKRCLLALQAEFGYGPETAAIIVSEAGAVADFPTEPKFATYCGVTPIKRQSGLSAGSAHLSRFTNKRLLRAIFQATVAAVRRDPLSRAYYDRKRAGRHDPRANTTALLALARHRTRRLYKVLCQAEPPSAPADGALREHASQLTKLAA

SEQ ID NO: 322680 - protein, 391 aa, unidentified
MTFYVGIDIAKFKHDCFIADDQGCVIRDSFSFQNDKAGFISLLSILKDLKLQGKIKIGFESTGHYHFNLKLFLETNGFDYVEFNPLLVHKFVRTQTLRRTKTDKKDSFMIAKYLMTVDYKPYTNTFYHISNLKSLCRLRETLITDRTRFLNQITSYLDQIFPEFKPLLNNNLNKSALYILNHFMIPKKISRMTLEDYNKMKNKLKNPISYQKFSQIKDVSLKTVGHSSDALEYALKTSLNTYLFLAKQIETVEEKIVKIYQSLDYHIHTIRGVGILTAAGIASEIGNFNRFSTPSQIQAFAGLDPSKDDSGITINKIGKMVKHGSSYLRKYLMNSAETFYVYNPIISNFYWKKRNEGKHHRVALSHVARKLVNTIFSLENHHMDFNPNFVK

SEQ ID NO: 322681 - protein, 430 aa, unidentified
MSYRIAGIDVHKKMLAVVVSDVEVDGEYHFEQRRFGSNPEELRSLAAWLLEQETEEVVMESTAQYWQPVWEALERYWKPIREKREGANRRSGMLHLAQAQSNRGRRGRKRDFPDAERLVKRLVARELTLSFVPDAEQRLWRTVTRRRYQLTRDKVRLQNQLESLLEEAHIKLSSLVSDLLGASARRMLKALADGETDPMALAALADHNLRATPGQLCDALGACTDLKVVYRHLLKMALEQLELLEHQIGQLDQEIASLLSQHQDAVQRLAEVPGLGVDSAHQIIAEVGPTAATFPSEKCLSSWVGACPGDDESAGVNYSHRSPQGNRHLRRLLNQSANAAARTKGSIFEIVYRRSVPRLGHNQAIGAIAHRHCRLIWLILHRGVRYEERGPSVTKRSKQKRTARMIRQLRSLGYRVELNNSQTVASGQVQ

SEQ ID NO: 322682 - protein, 360 aa, unidentified
MRQSNKNDFSGQNIYVGIDVHLKSWHVTVMTDYGFKRKHSQPPSAQALFEHLSRNYPGGTYRAIYESGFTGFSTYYALLPYGIDCVIAHAADIPTGQNESVMKSDAVDSEKLARTLREGSLRNTVHVPSRDILDHRGLVRYRKRLQDTLSGYKSRIKHLLYSNGVTIPESHSSSCSHWSRRFIRWMQEDVRLLSPTRRTLERQLEHIEALRREVLSITAEIRMLSRSERYEGKVDLLRSVPGIGLITAMTLAVELEDVGRFPSQRDFASYIGLVPTCRNSGEKVRTGEITFRGNNRLRNMIIESSWVAIRMDRDLAAAFGRYCARMKPQNAIIRIARKLTNRIFAVLKSCKPYEYDKCCL

SEQ ID NO: 322683 - protein, 412 aa, unidentified
MEGETVIAGVDTHKDVHVLCLLDGLGRKIWSGSFGADPEGYDRLAEAIGDPGSCMVVGVEGTASYGAGLTRRLVELGYNVVEVLRPKRDKVRPGEGKSDPLDAERAARKAASGRGCSVPKSQDGWVEAVRQLYVARRLAVATSTSCVACAKSMLTTAPSALRERFRGRERPKDLMPLLARGRKAGDALEESVLASLRSVAAVWKEARSQVESLDERIRALLEANAPALLGVEGCGTTTAAALVVAAGDNPGRLKGEAAFSMMCGASPIPASSGKTDRHRLNRGGNRQANWALYEIAIKRMAYDERTRRYVARRTSEGKSRREAVRCLKRYIAREVYHVLMDPNPDGAAPEGPELARMRKAMRVTQKQAAAELGLSAATLGHLERGKRRSTKLERRYYELLCELERALPQTAS

SEQ ID NO: 322684 - protein, 403 aa, unidentified
MNNVAGIDVSKGKSMVSVLRPFGEVVAKPFSVGHTGSELKELAGYLKSLDGETRVVMEHTGRYYEPVARFLHEEGVFVSAVNPKLIKDYGNNTLRKVKTDRADARKIARYGLDNWAELRQHTPMDTIRMQLKTLNRQQSLYAKTKTMMKNNLIALLDQTYPGVNALFDSPVREDGSQKWVDFATAFWHMDCVRNMSLTAFAEHYRKWCKRHGYNFSQSKAVEVHTGAQDLIAMLPKDALTKTMVRQAIDALNAVSASLERLKAEMQALAVQLPEYPVVMAMHGVGDSLGPQLIAELGDVTRFTHRNAITAFAGVDPGADQSGTHEAKSTRVSKSGPPELRRALFLVMDCLLKTQPQDDPVYRFMDKKRAEGKPYLVYMTAGANKFLRIYYGRVKEYLESLEEN

SEQ ID NO: 322685 - protein, 336 aa, unidentified
MVQIYGIDLGMSSFDVSFLSESGGVRHLSGVKNTVHGISKFLLSLPSSAVLCAEHTGVYGDLLLRLCTLNRTCLCFVPGYQIKHSLGLQRGKSDPLDACRIREYAERFYDLLRPCFYPGEEMSELQELYRTRSLLVESRKRLDTLSIGDNCKSSVSLAADHARRAVLAELNTQISGLDHEIEALIQNSSEFSRNYQILTSIVGVGPVTSCELIIKTENFRKLDTAKKCAAYAGIAPYPKESGKMKCGHKISPMGDKQLKTLLFLCARSAKEHNKEIRLYFLKKHKVEKKHFFVAMNNIANKLLRLIYSLIQKQQTYDRDYIQRDPRCVVISDTNKC

SEQ ID NO: 322686 - protein, 363 aa, unidentified
MNYVGVDVHKKYSVLCALDERGRKLREARVEGNRGCGFAQFFRSLEGPSKAVVEACWNWGLIHDELEELDQVEEVVLAHPAKTRLIADAQIKTDRLDAHALGTLLRGNLVARAHVPRRQTRSRKNLLRQRLYWARLRTMLRNRIHALLDRQRGLELPQCSDIFGQRGLFFLRQLQLPEPDGMLLREQLALHDLIAQQMKAQEKRIAAEFKSEVIHRQLLSMPGIGTTLAAVIGCEIDQIERFPTSEKLCAYAGVVPTTHASGGKVAHGRLLPFCNKWLRWALLEASWVAIGCSPYFGALYQQHRARGKKANTAITIVARRMCRIIWQLLSENRDFEKRPFSHRIGPFPGCSAVRLTARSAHGS

SEQ ID NO: 322687 - protein, 343 aa, unidentified
MNEISTIGLDLAKNVFQLHGVDASGAVVLRRQLRRAAVEKFFAGLPPCLVGMEACGSAHHWARVIRGHGHEVKLMPPAYVKPYVRRNKNDGRDAEAICEAVTRPSMRFVPVKSLEQQAALAVHGTRALLVRQRTMAANALRAMLGELGIVAAQGHEGLRELMTRLEQPSEEIPENMRNALLVLARHWQALDADERVLERQIGKAARCDRDARRLMEVPGVGPMIAGTVLAKVPDPKVFRCGRDFAAWVGLTGRDHGTGGKHRPGRISKQGDRVLRALLISGASAHLRQQKARGVTDPWLRALLARRPYKVAMVAFAARTARILWAMLSKGEHYRDRASASAAA

SEQ ID NO: 322688 - protein, 353 aa, unidentified
MANPMANLTIGVDLGDRYSELYVVDAAGACVETGRIRTTVAGLEQWFGGRPPARVVVEAGTHSPWASRVLQRLGHEVLVANPRKLRGLYENDSKDDRVDAEYLARVGRLDPALLKPITHRGEAAQADLAVLSSRDVLVRARTLLINHTRGVVKALGGRLPRCSAEAFARRVGPHVPPAVRPALAPVLEQLQQLTTTIRAFDRAVEHRCAQSYPETARLRQVTGVGPVTALAYVVVLDDPTRFRRSRAVGAYLGLRPRRSQSGEQDPQLRITKAGNPFLRRLVVQAAHYILGPHGPDCDLRRHGERIAARGGKNAKKRAVIAVARKLAVLLHHLWISGAVYEPLRHRPALAQAS

SEQ ID NO: 322689 - protein, 342 aa, unidentified
MSTVTTIGLDIAKSVFQVHGISATGEVLIRRQVRRGQVLKFFASLSPCLIGIEACASAHHWSRELQSLGHQVRLMPPAYVKPYVKRQKNDMADAEAICEAVTRPTMRFVETKTCEQQSILMLHRVRLMQVRQRTMLTNAIRAHLAEFGLVAKIGREGVDELLLMVSNGDERIPELARACILALAEQRVLVKRQILEMDRRITACHRASEVSRRLAEIPGVGPLLASALVAHVPNPKAFSSGRNLAAWIGLVPKQNSSGGKERLGGVTKQGNRYLRSMLTIGALAVIRYAQRHGTRRPWIVQLLTRRATKVAAVALANKMARMVWAFMAKGERYREPVVGQAA

SEQ ID NO: 322690 - protein, 409 aa, unidentified
MDVIYPRCCGLDVHKREVVACVVSTEPDGTWRKEVRAFGTMTPDILALADWLAAHAVTHVAMESTGVYWKPIWNLLEDSFELLLVNARHVKAVPGRKTDVRDCEWLADLLRHGLLTGSFVPDRPQRELRELTRYRTSLVRERTAAANRLQKTLEGANIKLASVATDILGKSGREILAALVAGETDGAALAQFAQGRLREKIPQLERALVGRVGPHQRFLVAEQVAHIDYLDAAMARVSAEIAERVRPDEDAITRLDTIPGVGRSVAEALVAEIGADVGRFPTAKHLASWAGMCPGNHESGGKRRSGATRKGSPWLRACLVQAAHAAARTKGTYLAAQYRRLAARRGRAKAAVAVAHSILVIAYHVLLDGTAYGDLGGNYFDQRDRQAVERRLVHRLQGLGYTVSLIPAA

SEQ ID NO: 322691 - protein, 366 aa, unidentified
MTVTSMPQPTLPAQRVPAPAQEAEDVILGVDTHKDAHVAAVITTLGASLAQQEFPTTAIGYRQLLTWARSFGFLRRAGVECTGSFGAALTRVLRREGIDVIEINQPDRATRRKRGKTDAIDADAAARAVLSGRATTVPKSADGPVEAMRVLRLAKESAVKARTQALNQLKAVLMSIDPDLREVLSGLSNPALVATCAALDVDDRGEAVFTMRLLARRAQHLSDEVKELTRRTTRAVRVCRPQMLDLVGVGPDSAAVLLIAAGDNPDRLVDEACFAALCGVSPVEQSSGKTQRRRLNRGGHRQANAALYRIVQTRIRWDERTQSYLQRRTAEGMSKREIIRCLKRYVARELYRYIQPRVTNRVPSAA

SEQ ID NO: 322692 - protein, 310 aa, unidentified
MDAIVIGIDVSKDKLDVHVLPAAQAFTVARNGAGIEELAARLAALAPAVVAIEATGGFETIVAAALAGAKVPLAVINPAQIRHFAQAVGQRAKTDPIDAAIIARFVEAVKPAPRAMPDREARLLAELVSRRRQIIEMIVAERQREKRVENVRVRKSLVRHIRALEKELPGIDNDIDTLVRGSPVWRAKEELMVSFPGVSNTLARTFLAEVPELGTLNRRQIASLAGLAPFTRQSGRWRGKSMIGGGRAALRAGLYMAALSAARCHPQLKVFYRRLVAAGKPKMVALIAVARKILTMLNAMIRDQKPWRLA

SEQ ID NO: 322693 - protein, 342 aa, unidentified
MGRKIGIDLHKNSFRVCYYQNDKKYDFETYHVSVKGLEHFKKGLKKTDELAVESTGNTGHFYRAVEGKVNRIRVVNPMQFKVISESVKKTDDEDALKIAKFLSRDMIPEVRMKSKAESQLGSLIGTRDKFVKLRTALKNKVHNILNANGIVTKTELLTSDKSLDKVLGHKLDETCLFELEIITKEIRNLNEAIVKIDEQIKDKGSKLDGHKNITSITGIGDTSAAIFLNTIGDVKYFKDDKALASYFGIVPRMRISNETAHMGRITKMGNKIARTALVQCTFVAIRYSPYLRAFYDRLKAKKGSGKAIIATARKLLGIIYNTLKNKWVFEDFANYKLAPQCA

SEQ ID NO: 322694 - protein, 348 aa, unidentified
MQEAITATIGCDLGEKQSTLSILWPDGRLERPKPIKTTPESMRLFFTRPKAHVVIEVGAHSRWVSALLEELGHQVTVANARRVKLISQSHSKSDQVDSELLARLGKADAKLLAPIHHRGMQAQSDLAIPKARDGLVECRTKLINTCRGLVKSFGQRLPKCSGQTFHVKAKEHVPAVLKPALEPIFQALERIHEAIRKENQLIERLAKKYVDVELLSQPSGVGVLTALVFLLTLEDKNRFKSSRMVGPYLGLRPRKRQSGDNDPQLRITKAGDPLLRKLLVQCANYILGPFAKDSDLRRWGMELMKRGGKNAKKRARVGVARKLGVLMHRLWVTGEVYQPVGYAKRLVA

SEQ ID NO: 322695 - protein, 330 aa, unidentified
MKHYTDFFGVDVSKKTIDVSHFQNETFTHHQFSNDATGMKEVFKWLEELNVNFENTLFCMEATGIYCYQLTTFLQDKNIDTWVEHALQIKKAMPLARGKNDKVDSKRIAIYASKNIDRLRLFKPMNTTLEKIKHLATLRERLVETQKRLIVPIKEFEDIGDTAMAKLLAKSIKKSADAIEKDLINLEKKIIEVLYEDEKLSKKYEFAKSVVGIGFVTAINLMIHTNGFTEMNDVRKLACYCGVAPFEYSSGSSVRGKTKVHFMGNKKLKCNLHMASLSAIKLDHDIKAYYERKVADGKNKMSVLNAVRNKLLARVLACVNNGKEYVNKVA

SEQ ID NO: 322696 - protein, 408 aa, unidentified
MNPLFVGIDVSSRNNVAYLMKPDGSKHSSFSVQNNLGGAKLLSERIVSALGSMQLERVVIGLEATSIYGDSLVYALREDGRLGRFQRKIHVLNPKQVRKFKEAYSDLPKNDWVDAFVIADHLRFGRINREVYMDDYRYKALQTLTRARFDVIQNLTREKQRFANYLFLKCSGMAQDKDIQNTSATTIALMEHFETVDDLANADLEELTAFITETGRGKFADPDATAKAVRAAAKGSYRLPKTVNDTVNQAMAVSIASMRALKGQVKVLDKAIEQQFEIIPNTLTSIPGIGKVYSAGIIAEIGDIHRFDSQASVAKYAGLVWNRSQSGDFEAEHSRMIKSGNRYLRYYLLEAANSVRRCDSEFRRYYDLKFKEVNKYQHKRALALTARKLVRLVFRLLKDNRLYIPPEG

SEQ ID NO: 322697 - protein, 425 aa, unidentified
MAIIDGIKGIGRAIKYQIIKEGRRLKTLPGGIDIGSESHHVIIMDDNGKILCDRKVAHKFREFREAIEEFKEIEKQHQGEITFAIEGKNGYGAPFDRMLIESGFKLYNVDNLKLRRFRDVFGAEWRNDRRDAKMLAKMLKLRDYMDTEEETAFIAVQKTPAVHEKLRILSRHQQSLIDEKVRIQNRLRKRLLEVCPDILEYGDTDSKKLLQLLKKYPDFNRYKKITLAALLKIETIGKKTAVSILEGLRNIQYVEELAVIYKAIIASYCRRILELKEEITLLDRELEETGEKSSEVMQLKSIPGVGTKLSSRLAGEIGDIRRFNRESQLAVYCGVACIDDDSGKSKKTKAVYKANRICKATMIEIAGCTIRYVQESKAYYEKKRAEGKEHNHALRCLARQLIKVIFKMLAENRGYICKEELKKAA

SEQ ID NO: 322698 - protein, 391 aa, unidentified
MTYFVGIDIAKYKHDCFIHDHNGVVIHHSFTFSNNLSGFNQLLLTLDSLDKNQKIKIGFEATGHYGTNLKQFLKANHFDFMEINPLLIKQFSKASTLRKTKTDKIDSTLIARYLSTIDYKPTSNQSYHIQALKSLSRLRDSLVKNRSQILVRLTVVLDIIFPEYKPFFDNKLTSSTCIYILENYDSPEKISRMNTESYNKMKKKLRHTISYARFTSLRDLAKNTVGTTDNIYLFELNALLEIYKNINNKIKDIEVKIIEEYRQTHSHIHTIKGISEVSAAGIYAEFGGIHKFTNPNQMLAYAGLESSKNESGQDNFKGHMVKHGSSHLRQIIMNVVDTFALNNPVIYDYQSKKIKEGKHWRVAQTHVARKLIRIIFHIEKNNIDFDPYLLK

SEQ ID NO: 322699 - protein, 466 aa, unidentified
MTPSHTPKGNRENFLISDYQKRNLLLRYIAWCANTKYLNEEVSMDKNDDSRLAEFRQLKREIRGSAQHLVVGIDIAKERHYAFFGTPAGKTLLHRLVFDNNKEGFEKLCFQTDILKTQHGFRNVVFGMEPTGDYHKPLGEYLIQQGHTVVLVAGTAVKNNRELLDGRWDRNDTKDAANVADLITQGKCLFYEYASPSLRELRSLLSLQRRLKKQEQGYRVRTRNHLIAQHFPEIDPYFGYSEGPAIVKWCLDPKEITRFSFDEFVRMVSSSNGGEKQRRRLEEIRQKAASSIGCEAHPSVAFEGRVLVDEVRHFQNLLRETAPRIREVCLRFPEYFFLLTIPGFGPDTSAKVLGAIGDPHRFENQRQVLKTAGLDLSADRSGKKQDVTPVLSKKGKADLRYGLYQAAFIASTRNKQFMTYFTEKLKGREREKGIGTKMRIKLAAKMLIIAWTLMKKKEKFDPGCIA

SEQ ID NO: 322700 - protein, 340 aa, unidentified
MDRIPVYVGLDYHQSSVQVCVLDRAGRVLSNRPCGNDAGAIVSAVQRHGVLAGAAIESCSGAADLADELVNGWGWSVNMAHPGYVRRMKQNPDKSDYTDAQMLADLERVGYLPKVWLAPEEVRELRRLVRYRQQLADERRNVKLRIRALLRDQRVRSPTGRAWTKPWLYWLRSTEEISTQGRWIIDAQLRRIDQLRIEIAEVELRLTRLTVEDVQVQVLQKQSGIGPVTAWTMRAEIGRFDRFRTGKQLSRFCGLSPRNASSGMRQADAGLIRAGNRQLRAVLIEAAHRLIRLDPRWGRFAGKLVSRGKPKCVAVAAVANRWMRWLFHEMQGVGGSKQAA

SEQ ID NO: 322701 - protein, 398 aa, unidentified
MNKKVHYIGLDVHKETIAVAIAPAGDTELRNYGIIGGALDALDKVIKKLQQPGVELRFVYEAGPCGYVIYRHLKKKGLHCEVVAPSLIPKKASDRVKTDRRDAQQLARLYRAGELTAIYVPDEEDEAVRDLVRARHATVMDQRKARQRLKGFLLRLGFRYSGKSSWNDAHQRYLARLTMPRPEQQIVFQEYIEAITVQTERLERLTRAMVNTLAGWKWEPVVRALMSLRGVQEIVAMTLVAEAGNLSRFEDPRQLMAYFGLTPSEHTSSDKRWQGSITKCGNGACRRVLTEAAWQYRLPPKVSPQLRQRQEKQPKAVRDISWKAQQRLHQRYKTLTVHRKKTVVVVTALARELTGFVWAIACQMRAPEKLNKREPIQLPAACGREYQLDPHKTFQKNK

SEQ ID NO: 322702 - protein, 343 aa, unidentified
MISYVGLDVSLKSTSVCVVDVEGSVLIEQSVASEPDTIANFIHTNALEVQRVGLESGPTSIWFWRELAQRGLPVICIDARHARAALSMQINKSDRNDAVGIARIMQTGWYREVQIKSPHSDMIRALLTSRALLVKIRRDLENQIRGLLKVEGLVIGRATKRVFARRVESSLANRSDVAEIVRPLLETRQADQQQLVTLDKGVRQLAVETPLTQNFMTVPGVGPITALAFMAAIDDPRRFKRSRSVGAYLGLTPRRHASGEIDWNGRISKCGNSLVRTYLFEAAGVLLTRVPQSCALKAWGLRIAKRSGMKKARTAVARKLAVILHRMWLEGTEFQWTIESKTV

SEQ ID NO: 322703 - protein, 443 aa, unidentified
MRRCIGLDVHREFAEVAIWEDGLVRSAGQITTTPEAMRLFAQSLGPSDEVALEATCNTHAIARLLERHVARVVVSNPAKTRAIAEAKVKTDKVDAQVLAQLLAAGFLPSVWLPDDETHALRRQVARRAHIVRQRTRLKNGVHAILHRNLVPRCPAADLFGRKGRAWLTEQELPRDEAQAVAALLHQLDFAGEELRLVDLELGRVGLQRGEVARLMTIPGVDATVALSIVAAVGDFHRFSTPHKLVSYLGLNPRVRQSGGQPAQHGRITKHGRAHARGMLVESAWAASKTPGPLRAFYERVRARRGMQIAAVATARKLAVLCWHLVVKDEDYAFARPSLTDKKRRALELRAGLPSRRGQKGRAAAYSLKEVRRRENELAAQGEQAYRQLVADWQAKAPSTKHGVGVAAANGARLSRPSEGQAARQDSAPTPALRSGVDHAHTEG

SEQ ID NO: 322704 - protein, 343 aa, unidentified
MTIKVLGIDIAKNTFQLHGADDAGKAVLKKRLPRNRLSPYVANLHPCTIVMESCGGANYWARVFQRSGHTVKLISPQFVKPFVKTNKNDANDAEAIVEAASRPSMHFVPIKRPEQQDIQSLHRVRSRLVKNRTALINEIRGLCLEYGVIIAPGAARVKKSLCAVVADSGNGLTPSSRDCMQDLYEELVDVEARLKKLDARNRQLCRQNDSCRRILSIPGVGELTATAIVAAVGDAQEFKNGRHMSAWLGLVPRQSSSGDKRVLLGISKRGDRYLRTLLIHGARAALSHYKTTDNDYGLWLDRKKTTLSFNKAAVALANKNARIIWALLNSGEEFNYGVQTAAA

SEQ ID NO: 322705 - protein, 398 aa, unidentified
MSAWRPLAGLIRSLSAFEARDPSQFCRPRLSTPDRHRFVSPNAWLEVSQQMLADQLDYVVGVGPHRDSHVLAVVQVLSGAIVFEATVAANGEGYVHALELVDGHAAGRRAFAVEGTGSFGAGLTRFLTGRGERVLEVGRLRRERHSGGKTDALDAVRAARSMLAQERPARPRAGGERQALQALVAAREGAVNAKRAGLCQLRDLLITTPEPMRSELRPLTRARLLQRLAATRPHGRQDAELRGSMLALRSIARRVLQLTVEERELAREIETLTRKLAPQLLDQPGVGPHAAAQLVLSWSHRGRIGSEAAFARLAGAAPIPASSGQIVRYRLDRSGDRKLNRALHMILVTRKRSHPATIAYIERRLQEGKTRREANRCLKRYLARNLYRLLEHGPPPAT

SEQ ID NO: 322706 - protein, 312 aa, unidentified
MEARYVGVDVSKDRLDVHVLPEGAAFAVARDGKGLAELVERLSALQPQRIAVEATGGFETIVAAALAGASLPLVIVNPAQVRHFAQALGRRAKTDPIDASMIARFVEATKPDLRPLADEATQLLADLVARRRQIIEMIVAERNREKRVAVRRIRKSIARLIAALEKELSEIDAEIDASVRGSPAWREKEDLLASVPGVGPITARTLIAELPELGTLDGKRIASLAGLAPFTRQSGQWKGKAMIAGGRKSVRSALFLASLAACRHNPVLKAFRQRLIDAGKPKMLVAIAAARKLLTILNAILRDKQPWRPENA

SEQ ID NO: 322707 - protein, 411 aa, unidentified
MEAAVITAVGIDVSKSKSTVAVRRPGGEIALRPFEVHHTNSDLKKLASTLKKLGGDIRIVMEHTSTYWRPIALTLKEAGFFVSIVNAMLIHDFSDNTIRKLKTDRADALKIANYALTFWDTLPPFNNEEETRLLLKMQSRANERITATATALRNGLIALADQTFPGVNIAFAPNTKNANGHEKWVDFFLRYRHKDCVCQYSMEAFTESYRGWCKRKNYKFRTDTAHKIYLLAQEGVATLPKCESTKMLITQACKSLNAVCEAKQSTQLEMQRLAAMLPEYEVVMQMEGAGPITGPALMAEIGDIRRFKNKKALVAFAGIDAPPFQSGTFESKSRHVSKRGSPHLRRTIFIVSNIILTRSNPENAVYCFMDKKRSEGKHYYVYTVAGSAKFLRVYYARVTEFLRSKPSPDAC

SEQ ID NO: 322708 - protein, 312 aa, unidentified
METKFVGIDVSKLTLDFDCLPISAPRQFANDAGGIVALVDLLKGSGVERIVIEATGGYETAVASALAVAKLPVVVVNPKQVRDFAKATGSLAKTDRLDAKLLALFGERIMPPLRTLPDEAQRALADLLDRRSQLVAMRAQEKARLASVTAIARKNVQQHIVWLDKCIAKLDGDLEERLRKSPVWCEKATVLGSVPGVGQVTTFALLARLPELGQLNRQAIAALVGLAPFNDDSGTRRGARYIRGGRADVRCALYMATLSAITHNKPIKEMYERLTASGKPFKLAMTACMRKLLTILNAMLKKNQTWKIQPSS

SEQ ID NO: 322709 - protein, 325 aa, unidentified
MNAAEKVVLRKKLRRKEMVAFFKALAPTVIGIEACGASHHWARILRSFGHEVKLIAPQLVKPYVKRGKNDTADAEALCEAMSRPTMRFVPVKTAEQQAALMMVALRDRLIRNRTQLSNAIRGYAAEFGFTAARGIAHIDPLLDRIQADENVPVLARELFAAQAEEYAQLQAQIAEVDAKLMAWHKADECSRRLAKIPGVGPIGTALLMMKTPAPEMFRSGRQFAAWIGLTPKDHSTAGKVRLGVITRAGDEALRSVLVVGATAVVQQVRRGGRGSPWIVDLLKRKPPKLAAVALANKMARIAWNLMVTGNSYAAKSAPAALMGAA

SEQ ID NO: 322710 - protein, 356 aa, unidentified
MVQNDDSRLQEFRQLKNDIRGSTEYLVVGIDVAKEKHYAFFGTAAGKTHLRKLVFDNTKEGFEKLCLYADTFKDRHGLKKALFGLEPTGDYHKPLGEYLITQGHTVVLVAGTAVKRNRELLNGRWDRNDTKDAANVADLITQGKCLFYEYPSPEIRELRGLLSLKRKLKKQEHATRVRIRNHLIAQYFPEMDAYVSYSEGPAIIRWCFDPKEIARLPLPEFARMVSSRSGGEKQRRRLWEIHTKAGASIGCTVTPAAPLEARLMLDMLKQITTIIGETDAAIEKVCMTFPEYPCLLSIPGFGPDTSAKVLGAIGNPHRFENARQLLKTAGLDLSGDKSGNRMSPKFSQLKDQLYRR

SEQ ID NO: 322711 - protein, 423 aa, unidentified
MSERDYSKQVARRQRIGDRTLVVGVDIGSASNAVGFMNKEGKVLGSYPKMPNSREGFEEFVKITERVKAKHGLTDVIIGLEPTGHYWRKFGYFAKEKGYEVRFVRTTALKHHRELDESSSAKSDKQDALTITNITREGKYIDTVIEGGKMRQLRTLVKVREKIQKGNASAKNSLHAALDDYFPELHGIFWSMNARGLWVLLERCPFPEDVLTLKVSSLKEMIGRASRRKAEASQKATALSQAAKESIGLKQIGSADRYRLRMCLEEVKRTELTIKDIEREIKRMLKDIPQAQYLLSIPGIGPISAAVFLGELGDTTSFPGARQIVKYAGYDPQESDSGYRVSRKFISKKGRWLLRKHLFLMSMRVVVLSRYFQGYYQRKLQTKNRFGQLPRKKEILCAVAIKLIKVIFALLRDQRSFEDTVAC

SEQ ID NO: 322712 - protein, 449 aa, unidentified
MTKKPKKNQKAEKVVPLVKPDAAGIDIGATEIYVAVPADRDAEPVRSFATFTQDLYALANWLQQCRIKTVAMESTGVYWIPLFQILEDRGFEVYLVNARHVKNVPGRRTDVSDCQWLQFLHSVGLLRPSYRPAQEICAIRSVLRHRESLVQMAATHVQHIQKALDQMNLQLHHVISDITGMTGLAIIDAILGGKRDPHELASLRHEGIKASEEVIAKSLVGDYRAEHLFTLDQSLTAYRSYQKLIGECDREIRRQVEKLKAPEACSTAPEAEVSIGKPAKPVNLREELKQAFGVDLTKIPGIQVGIAQTLFGEVGPDFSKFRSASAFASWLGLCPDNDISGGKVLWVGTRKVNCRAATALRLAARCLHHSKSPLGDFYRRMRTKLGAPKAITAAAHKLARIIYHLVTTKQEFDESKFAEDHLHARQRQQAKLRAAAKALGFQIVPAPAK

SEQ ID NO: 322713 - protein, 349 aa, unidentified
MELNEVILGVDTHLDTHVGAVISNTGRLLGTRSISTDTAGYLDLLTWANSFGHLCRAGVEGTGTYGAGLAHVLRDHEIEVLEVNRPDRAMRRSKGKSDPTDAENAAHAVLSGRATAIPKGQSGAAEAMRAVSVARRSAVKAKTQAINQLRALLVSAPQEIRDRLLKVKTAQCVEGCARLRSLGKTPMLQTLTTTLRLLAKRWLTLAEELKTLDAMLDSLTNQHARRIRERFGVGPQTAAVLVAVAGDNPERLKSEAALAALCGTSPLQASSGKTVRHRLNRGGDRSANNALWTIAMVRMRSDPRTRAYVERRTKDGMSNKEIHRCLKRYIVRELYPLILADLADSTASA

SEQ ID NO: 322714 - protein, 367 aa, unidentified
MTVTIVDVARPVPGGVDAHLEGNAALGLVTGGVDTHLDLNVAAALDGIGGLLAVAEFPTTSAGHRELLGWLSGFGPVARVGVEGTGSYGAGLARFLRAAGVAVVEVDRPNRQARRRSGKSDPLDAVEAARAALSGRARGAAKSRDGNVEAIRALVVAKRSARSAKIQTLNQIRHLSFTAPGQLRQRLAGVSRHQLAARAAALRPGSQEGADPVVAATKTALRLLGRRVLALDEEKARIDALLTGLVTQTAPQLLAVFGVGVDTAAALLVTAGDNPGRLRSEAAWAHLCGTAPIPASSGKVTRDRLNRGGDRQANRALWGIVITRLRNDPRTKAYMDRRLGEGRSKPEVIRILKRYVAREVYHHLPRT

SEQ ID NO: 322715 - protein, 361 aa, unidentified
MRTITIGVDLAKMLFSICEVDPCGRVLQRKDLRRDAFAAWLAQLPAGTIVAMEACSGAHHWARRCLAYGLVPKLMAAQFVEPFRKSCTTKNDRNDAEAIATAARQGNMRFVPVKSIDQQARLAWHRVREGHKTEALAASNRLRGLLAEFGIVVAKNDHALRRALADLSALPDLPATMLPLFDDLNRHWQQVRDWIADCDKRIANHAKLDERSVRAQQIIGIGPLTADAVVATVGSAREFKNGRQMSAWLGLTPTQHSSGGRTRLGKISCRGDSYLRTLLIQGARSSLQRAQAVSRERATPEQLWIQSLSTRMPFGKLLVAIANKHARQLWAMLAREERYDADAWAKHPMAQRPKSARTATC

SEQ ID NO: 322716 - protein, 310 aa, unidentified
MEITVGIDVSKARLDVHVHPSGDSFAVSNEEAGVAALAERLGRLEGLACIGLEASGRYERLAVAELATAGLPVVVLNPAQVRAYAQAIGQRTKTDPIDARVIALFVEAVRPQPRPLPDVQDQELGALMARRRQVVSMLGAERLRRQQAPKGRVRVSIARIVTALEDDLKALDGDIDKTVRGTPVWRDKEDLLASVPGIGKTIARTLLAELPELGQLNPKQIAALAGLAPYTRQSGRWRGKSFIGGGRPAVRTALFMGALVPARHNPTLKAFRDRLVANGKPKLVAIIATARKLLTILNAILRDQKPWRPA

SEQ ID NO: 322717 - protein, 410 aa, unidentified
MNPLYVGIDVSSKSNVVYFMKPDGSKHSNFSVNNSLDGSRQLSKRIVSAITSLSLTDLIIGLEATSVYGDNLVCFLREDGSLAKYNHKIHVLNPKQVKKFKDAYPDLPKNDYVDSYIIADALRFGRINKEVYRDDYSYKALKNLTRARFFAVQNLTREKQRFLNYLFMKYSSMAQGKVFSDTFSVTALAVYEDFDSADQLAYMDLQELTDFIKEKGRNRFPDPDSVAKAIQKAARSSYRLPKTVNDSVNQVLSISISSIRALESQIKEFDKAIASQIELIPNTLQSIKGIGPVYSAGIIAEIGDINRFPNQAALAKYAGLAWTQYQSGNFEAQNTRLIKSGNRFLKYYLGEAALSLVRCDTEYSCFYHLKYKEVNKYQHKRALALTARKFVRLVFTLLKENRLYIPSGQK

SEQ ID NO: 322718 - protein, 363 aa, unidentified
MHSITNTELSSLEETRRQFNGGRCAIKMGVDVHQDFYVVVEQVGGTNPKPPQRFHKQAFLHWAAKLKQSGAEVHAVYEACGFGFMLQRQLTALGIVCYMVCPQKLDEQNKRVKTDGLDAKALCLKLDRFVQGNRHALAIVRVPSEEEERSRAIHRQREQLVGARKRLEAQGRSLMVNHGAEPVQNWWKPRTFAALTVPQWMRELLLNSQPILLALQEKIALLTVQLQSAATPNQPRGLGKMTSVIIDREIGDWRRFNNRRQIASYTGLCPGEYSSGNTRLQSCVTKHGNPRLRAALVELAWRLVRFQPNYKPVLKWRQILAKGALATGAARKKAIVAVARQLAVDLWRIKTGRLTAEQLGLTI

SEQ ID NO: 322719 - protein, 375 aa, unidentified
MATIARLGIDTSKSLFQLHGVDEREEAVLRKQVRRGQFLGFVAKLAPTKIGVEACGASHHWARQLQALGHEVVLLPPQHVKPYVGRNKNDKIDAAAICEAMSRPRVRECFVAVKSAEQSAAQMLLGTRDGLLHRRTQLSNTIRGHAAEFGLVTPKGLAHIQPLLERIAADQTVPALAKELFATLGEEFAELAPRIAQLDKKLKAFQRSNELCRRLVEVPAVGPVIASSMVVKIGNPAAFRSGRRCAAWLGLTPKDHSTAGKMRHGGITRAGDEGLRAALVSGATAYIQQVKRGRTKPSPWLAQLLKRKPEKLAAVALANKTARIAWKLMTSGQRYDRARAEAREGLGATQYQGSTPSPSLHPHTADHGASTMTVA

SEQ ID NO: 322720 - protein, 357 aa, unidentified
MAALSIADVPANVTVGVDTHKHSHVARAKDGLGRHLGQLEIGTDPGGYADLLAWAQGFGPVVTFGIEGTSSYGAGLTRFLGAQGQAVIEVLRPVRRDRRFGSKSDPIDADAAAGAVLSGKATAVPKAGDAGVEMVRALKIAKQTAIKARTQAVNAVKGLIVMAPDPIREQLRNLKTPALVRTCSAYRVAGASDPTSAIKLSLRSMCRRYVVLDQEVRSLEKELDALTIRLVPQLRQLFGVGQDVAAALMLAAGNSGDRLRSEASFSMLCGASPIPASSGMVQRHRLNRGGDRQANAALHQIVVVRLRYHEATKAYFSKRKADGKSKKEIFRCLKRYVAREVYRTLVDPREEAVRSAA

SEQ ID NO: 322721 - protein, 353 aa, unidentified
MNRKIVKQAAGIDVAQKELVVCMGRMYDDWTPELYTHKTFPNNEKGFIALVLWVKSQVSEAVVVRFVMEATGVYHESLAYFLHDKGHEVSIVLPNKISNYSRTLNVKTVTDKTAAEAIARFGLERKLDKWERPQKIFKSLRQLTREREQVVQIRTMAKNQLHAEQAEAEPNSSTLVRVKKQIVFLNKQELEIKAEIAALCKGDEKIKETITLLSSIPGIGQLTAATVLGETNGFELIRNKRQLTSYAGLDVKEKQSGTSVKGKPKISKRGNKYLRKAMHMPALAAIRHDERFKAIFARLVSRHGIKMKAAVAVQRKLLEMMYTLYKTSTAYDKDYFKTQQADAIQVEQTAGKD

SEQ ID NO: 322722 - protein, 441 aa, unidentified
MDTSLPSDSQPAATPDVFSTLTHYGAIDWGRGKNDLCIVDRDGKIVWEQSIDNSPDVWADLRASLAAMKTPDGSPAVVGFAIETNCGPAVERLLETNLAVFPMNPKSAERYRDRKAPAGGKTDRFDAFCFADALRTDGHGWRSLRPQDPLTHELRLLCRDEVMLIGQRTALVNQIQAALHEYYPTAIAAFDDWTKSGAWEFILAFPTPHYLASAGKRKWENFLHAHKLYRPETAAKRIELFNIARKHASPSTAVTAAKSLLAITCAKQLITLEAQLDEYRARINALFAKHPDHDLFGSLPGAGEKIAPRLLAEIGADREVFDDPEALQCYAGAAPVTKQSGRSRFVVIRRACNLHLRATLHLWADRSRVKAPWAEAYYRQKRQQGMQHAAALRCLAMRWLKILWKMWTDGSAYDGDRHLRDQLKHGSWVISLMPQPAVQSN

SEQ ID NO: 322723 - protein, 422 aa, unidentified
MMEETEDREEIIERVAALDIGKAELVACVRVPSPTTPGRRAQEISTHSTMTRSLLALSDRLRALGVTRVVMEATSDYWKPVFYLLEAQELEPWLVNAKDVKHLPGRPKTDKLDAVWLCKVAERQMLRPSFVPPVQIRRLRDLTRYRLDLINTRTAEKNRVEKLLEDAQIKLSAVVSDIFGVSGREMLAALIAGERDPKVLAQLARARMRAKISVLEEAFVGHFTDHHAFLLRTMLARIDETGADIAAVEAKIAELIAPFAQTVDRLDEIPGVGPTAAHVMIAEIGLDMSRFPTAAHLCSWARLAPGVKESAGKKKGRGSTGHGNPYLARVLGEAAVAAAKTDTFLGERYRRIARRRGKKKAIVAVGRSILVIVWQLLSDPRARFHDLGAEFYDNRTGPDRKKRNHIRQLEALGYKVTLEPAA

SEQ ID NO: 322724 - protein, 387 aa, unidentified
MFAALSGWLVTGNSITIKKEVKERITTRLEPKNKDYYIAVDIGKKNCVVCITDKDGSIIEETKYDNTLQEAERFASHLDKKYCYRKCHAVCESTANMWIKTYEAFEKHGIDIKLANPLKTKAIAEARIKTDKLDAQTLAHLLRSNLIAESYIAPNKIREDRSLLRLRINLVSDRTRVMNRVHSLLDKYDLKCRYEHIFGVNGIKWLKSIELKGNDQIQLANYIHNIEFLNSEITQIEKQISVEASNNENVRILMSMTGIDYFSAMLISSEIGDISRFSTAGKLVSWCGLYPTVHQSGTSLYMGRMKKDGNKKINWIMIQAANTASRTDNNRLKKYYMKIAKRHGHHVAITHVANKMVRIMWSMLTYKQLYNERKKELYETKLKRIQK

SEQ ID NO: 322725 - protein, 344 aa, unidentified
MDIAVLGVDLGKNVCSVVGLDAAGVVVMRRKMRRETLIRLAEKLPACVVGMEACCGAHHLGRAFADHGHEVRLMSPEYVRPYVKAQKNDDRDAEGIAEAATRPTMRFVELKTQDQLDMQTLHRSRDRLVSERTALINQLRAILLERGMVAPKGKRKLAEFLVVLMDEQGGEGLSPRMSLLVADARTQWAELDRRIAAFDAEFVRCVKDNEDARRLTAIPGFGAILASALVAAVGRAESFDRGRDLSAWLGIVPRQFTTGGKPKLLGISKRGNSYLRRQLIHGARAALPYVAERDTPLGRWAKALLQRAHHNVAVVAFANKLARIAWAVLRREERFAASGTPMAA

SEQ ID NO: 322726 - protein, 395 aa, unidentified
MHRYFCLKCADSDSLEYGIFKHTPEAIDEWALSLQKQFNDQPVAICLELKTGPLVYALLKYNFIVLYPIPPMALSKYREAFAPSGAKDDPTDAFLQLDYLLKHSESLNPLNPDTVDTRIIQRMVEDRRTLVGEKVRLTNRITAGLKSYFPQALEWFSDLDTILFCDFIQRWSTLDKARKARPATLTKFFKEHRCIRPSAIDKRLKAIKEAMPLTEDIGVIIPFEQLVKVFSIQLQHLIVAIRDYDLEIAKRFRAHTDSKIFESLPGAGPVFGPRLLSAFGSDRTRFNTADEVNRLAGIAPVLERSGKKCWVHWRYSCPIFLRQTFVEWANQSIRYSFWAKEFYDEKRASGKSHQATLRALAFKWTRILFRCWKDKIPYDESAYLFALKRRKKAVA

SEQ ID NO: 322727 - protein, 477 aa, unidentified
MSINKEDRMSKSSKQAQAHCRQTPHKNIPTPASKPLSIVYPHAAGLDIGKDEIFVAVPPDRDPQPVRAYPTFTPDLIALADWLQACLIGTVAMESTGVYWIPIYELLEARGIKCFLVNAAHLKRVPGRKSDVQDCQWLQQCHSFGLLAGSFRPDSEMLQLRTYLRHRAELIERRSPHVLHMQKVLHQMNLQLDVVLSDIMGLTGQAILRAILAGERDPLTLARLRHPNCHSSEETIAKALTGSYRDDYLFVLKQSMMMYDFFTDMIAQCDAQVERCFAAIKPRHEIPEQTPAPPVLERKKRNSHSKNEPSGNTRQHIVRITGVDFVATIGLSNSLVQTILSEVGTDMSKWPTVKHFCSWLGLAPRNEISGGRILRSRTPKVRHRAAQAFRLAAASASHSNSALGAFYRRLRARIGPAQAMVATAHKIARIFYYMLRDKRPYEQISAQRYEEQFRVREVKNLQRKAAQLGFTLTPQAA

SEQ ID NO: 322728 - protein, 414 aa, unidentified
MLKIVYRICCGMDVHKSFVVACIASTNEQGVTTYKSKRFSTFTGDLRRCAVWLAENNCKDVCMESTGKYWIPIYNILEATCNIVLAHPKYVKAIRGKKTDKRDAKWIADIFKHDLVAGSFIPPADIRQLRDLFRYRWKLTSFTTGEKNRAQNCLTVSNFKLDDVFSDVFGKAASAITSRILENPTEKITDISGFRTKGMKATNEQVLAAVDGEMCEEQAEKLRIIRSHMDSLELCKLNLESLILTTAEKYLPQLNLVMTAPGIQSFAAIGIISEIGVDMSVFPTSKHLCSWAGLTPQNNESAGKKKTTRISRAGAYIKPLLVQCSLCAIRAKQFSEVRNRYLALKKRRGHKKAIIAIARMLLTAIYNMLKKHEPYNPELYRKGDRPPAHREVSVDEAIFILQRQGYLIAAPPTP

SEQ ID NO: 322729 - protein, 464 aa, unidentified
MANQKLWRSRKERKEWARRLQSENPGLEIVHPRAAGIDVGNVAHYVAVRPDRDPEPVRRFECFTADLYRLADWLHQCGVKTVAMQSTGVYWIPIYGILEERGFQVYLVNARHTKNLPGRKSDVQESQWLLKLHTYGLLNNSFQPPSEIRVLRTYWRQRGEHVQGAATCIQRMQKALTQMNVQIANVISDVSGLTGQTIIRAMVAGERDPQKLAELSDPRIHASREEVAKSLEGNWRPELLFILQQEVEMYDTYQQRIAECDEQLQKHLASFVGTVSPQPTESEPKRKKAKPAKNAPRFELHSELRRITGVDLTRIDGIDVMVAQTLISEVGLDMNRWKTEAHFSSWLGLCPDNSTSGDKVLARGTRRVVNRAATALRMAAVTLMRSRTYLGAQYRRLRTKLGAPKAITAMAHRLARLVYRMLKYGQQYVDKGAEYYEHRYRRQQIEFLKKKASKLGFRITLAQV

SEQ ID NO: 322730 - protein, 353 aa, unidentified
MEFTMIARRDAACFVGIDLHKDTLTACVVVGKDREVSFERIACKSRERIREFFSSLPRPSAVAIETVGFYRWLWTELDPVVDQLVLCDARGARALAGRRIKTDREDALNVALLLADGRLPFAWAPPENVQLLRNWTRHRNGLSRQHAKVLHHVKSIMHRVNRPGPTRLDASGLQRYLLAGVERFSADDITMLWQHQRRLVEIEQDRAQSERRISELMRAPEFARLRTILESLPGVGLVVSATAIAEIGDFSRFPDSKAIGRYAGLAPTVYASGNSSRLGRISKTGAPDLRWALQQAAWTAIRCDAGFKKTWLRIAKTAGKKAAAVAIARKILVLMWTLVRKDELYKAREPIAA

SEQ ID NO: 322731 - protein, 349 aa, unidentified
MNEITRIGMDTSKHIFQLHGVDGDEQPVLRRKLRRREMIAFFEKLAPTRVAIEACGASHHWARLLSGFGHEVQLIAPQLVKPYVKRGKNDAADAEALCEAMSRPTMRFVPAKTAEQQAALMLVGLRDRLVRNRTQLANAIRGYAAEFGLAGASGITHVPALLARIEADVALPSLARELFAMQAAEYAQVQAKLAVVEAKLLAWHRADERSRRLAGIPGIGPIGATLLTMKTPAPEAFRSGRQFAAWIGLTPKDHSTAGKARPGVITRAGDEALRSVLVVGATALIRRVREGRSRDGHRFAAWVQDLLRRKPPKLVAVALANKLARIAWKLMITGESFAGRPAPAAAGAV

SEQ ID NO: 322732 - protein, 411 aa, unidentified
MNPVVGLDISKGESQVQAFLEKGKPYRKSFKISHTVDGLSSLVLFLEDVKKESGKKPSIILEATGHYQTPVVHYLEERGYLLIIINPLISYKARGSSLRKVKTDAIDAYLLCELFYKEELEPYKKRGVQLLNLRNLTRQHENITGVMIQTKLQFQAVLEQVFPEYKGVFGDLYSVVSLLTLSEFPSSEDILNASEEVITDKISGLCKSRSSRWAKEKAIQLKAAAVRNPFEKTVYQSHILSLGMYIKMILQYKEHLAKLELEIDALAKDIEEYNIIKSIPGIGEKIAATIISEIGEIDRFNDPKKLVAFAGVDPSVFESGKFSATKNRITKRGSSRLRHALYMAVRCAIRDCRKKKTTDEIIPRNKRMREFYDKKREEGKPFKVAVIACVNKLLHWIFALLTNKTTFQDIA

SEQ ID NO: 322733 - protein, 483 aa, unidentified
MKLLYRRCAGIDVHQKSVSVCVRRRVKGQPNVEREEAVFGTFTQDLERLGQWLKERKVTQVAMESTGVYWIPVWNVLEQAKWKLSLLLVNPMTVRALRGQKTDRIDARRLAEFLQYGLLKGSFIPPKPVRQLRDLTRLRAHLQQDRNRVINRIGRLLETVNIKLGAVASHIAGKSGRAILRQLAEGSQDAEKLSQLALGLLKKKAPDLILALDGRPDEHFRWMLTRLLTKLERLDGEVAELDARLCEQMQPYEEILDRLSTIPGVKKTAARVLIAELGVDMAEFPSAGHLASWAGLCPGNAESAGKRFSGRTRKGDRYVRRVLVQCAWAASRAEDCFLAALFQRLAPKLGPKKAAVAVAHRILVIVWSLLRKGTCYQERGGNHFDLLHPERTARRLLKRLDRMGIEVRLCRRGRPPGSKNRKKLLFEHDSGIAPRLPLPDVMPEDACRKCWNAGLPRCIHLIKRKKKLNPALALGNSDTPEAT

SEQ ID NO: 322734 - protein, 355 aa, unidentified
MSQEKYIGMDVHQATISAAVIDAHGKLIMECLLETKAATIVEFVRGLQGPLSLTFEEGTLAAWLHDLLKPHVDRLVVCDPRKAALMKDGNKSDRIDARKLAELLRSNQLKPVYHGEHGVRTLKELGRSYLTLTQDVTRVMNRIKALYRSWAIPCGGTTVYAPRHRAEWLAKIGEPGVRVRAERLYQQLDVLQPVRQQARHDLLLESSKHPAVKLLRQIPSIGPIRAALLVALLQTPHRFRTKRQLWAYSGFAIEIHDSGEYRCVRGKLQRNRERITVRGLNDNHNKDVKSLFKSAAISASTRPGPLHDFYAARIAKGMRPTMAHLTLARKIAAITLTMWKKGVGFDPQQLHRQAA

SEQ ID NO: 322735 - protein, 439 aa, unidentified
MRRRAYRATDVKDVLVEEVIRNAPEGAATAGVDIGKYEVRAVVRWKDGSFERPWKAENPSQIEAIVGVLRKVAERRPLIVAMESTGTYGDALRAKLDQAGLEVHRVGGKAAHDYAEVFDGVPSQHDGKDAAVIAELAAFGKSSPWPCRAKSDADAEMAYWSDWLDAHQSVQQLWTGRLESLLARHWPEATRLLKLSSVTLLRALAHYGGPSDLAKDSSASSRLASWGRRVLGTEKINQVIASAAQTVGVRQGTQDVQRMRQYATMALAAYRQTQKARLELERLAQANEVIGRQAEAVGVATACVLWVALGDPKDYPCGEAYRKAMGLNLRERSSGKYQGQLKITKRGPSIVRRWMYFAAMRTTQSAFVKPWFEAKKAKDKDRGNGALIAVARKLALALHAVGARGEPFEPSRLFSHKELHRQARRRAKRRERIAELRRY

SEQ ID NO: 322736 - protein, 438 aa, unidentified
MEILYARVGGIDVHKKQVTVTARTPDPRRGTRWETTRTFRTFYGELLAMASWLVTERGVTHVSMESTGPYWWPVYSALREVGGPEVVIEVVNAAHVKAVPGRKTDVKDSQWLAQLMEVGLLRGSFLPPEQVRAMRDFTRYQTKLTEERSREKQRLLKVLEAAGIKLDNVASDTFGVSGRSMLVALVAGERDPQVLAGLARGVLRNKTEDLRLALAGRFTAHHGQMVELHLARIDHLDQMLAQVTDKIGHIGDDPNTGLVAPFTAQIELLMTIPGIGERVASVVVSEIGVDMARFPTAKHLAAWAGLAPGNNESAGKRRSGRRRKGNTHLCSILIEAALAASRTRTRIGARYHRLHRRFGGRPNPGAGKKAAFAVAHTLIKVIWNVLATGQPYTDLGHDFYTRRINPETHTKKLIAQLEALSGKKIIFIDDNGGEPPPA

SEQ ID NO: 322737 - protein, 339 aa, unidentified
MQVSVMGMDIAKQVFQLHGVDEAGGAVVCKRLRRGAVKQFFARLGPTVVGMEACATSHYWARELRALGHEVRLIPPRYVKGYVRRNKTDAADAAALCEALRGRGMHLVPVKSEAQQAVLVLHRVRECLVHQRTMTANALRGHLAEFGIVAARGQAGLDKLMTGLGAVGLPEEARFALELAATQWRELDQKIDALERRIVAWHRGDEMSRRLASIPGIGPITASALAASIGDPKAFKTGRHFAAWLGLTPREWSSGLKRRQGGISKRGDGYLRRLLILGAHSVMRHHGRAGLPAPDPWLMTLRARKPAAVAAVALANKTARIAWAVMAHGETYHRRRAVA

SEQ ID NO: 322738 - protein, 451 aa, unidentified
MSQVVIGMDPHKRSATIEVMAGDEAVLGGGRYGTDAAGYRSMLAEARRWPERMWAIEGCQGIGRHIASRLLADGEQVVDVPPKLSARTRMFATGQGRKTDATDAHSVALAAARMQGLRPVVDDAQLAVLPILADRRRSLGEDHTRMICQLHQLLLELIPGGAKKSLSAAQAKALLARARPREAAGKARRRVAAELISDLERIYQRKKDPSKELSALLKATATTLTDLNGIGPSGAARLLVEVADVTRFPDKAHFASWNGTAPIDASSGDQVRHRLSRAGNRQINRVLHIMAVVQLRHRDSGPGLLRPQSRRRQDTHGSDAVPEVPAVRHRLPPDDHRRTGGGNGPGRTPGGGYWLQRGRLQPQHRRFGEVTSRTRHHRPYARASKPGDPFSAPLPPPPASAGPQPPSSALCLTAARTGAHSQGGDDAPLDTEGSQIRMDRCYWLRSGDWVA

SEQ ID NO: 322739 - protein, 450 aa, unidentified
MQPEVEEIPDAEHELLLARVAAIDVAKASGKVCVRLPGRAGRRVSRVWDAAATSGAVTELAEQLVGQGIEKVTVESTSDYWRIWYYLLEAVGLDVQLVNARDVKNVPGRAKTDKLDAVWLAKLTEKGLLRPSFVPPAPIRRLRDYTRLRTDLTHDRSRQVQRLEKLLEDALIKLSAVATDIMGVSGRAMIEALIAGQRDPKVLAGLARGRMKIKHSALVAALDGRFDDHHAELARILLNQIDALTTQIDALTTRIDELLAAIPDAQPVDPRPSGSTPSPSIDTMPNAPLGAVDRLDEIPGIGPAAAQVILAEIGLDMSRFPTPAHLVSWAKLCPRTIQSGPLTRAGKTGKGNPYLKGALGDAAAAAAKTNTFLGERYRRVVKRRGKLKALVAVARSILVIVWHLLAHPTARFRDLGSDYHTRRIDLERRIRNHIAQLAALGYRVSVEPAA

SEQ ID NO: 322740 - protein, 332 aa, unidentified
MNTIGIDVSSKELVVAVHVEGKARKAKAFENIPAGHRAIIELLAKLKGDAKVCLEATGVYHFDLAVALSRAGIEVMVINPKSAHHFAKVLMQRSKTDVVDANILAIYCERMPFEAWQRPADENINLRAIARRIAALNKLKTQTKNQLHALKATEDTPIFVVEHTEALIAVLEKQIESHRKNALELIQQHEKLKVALALIIGIKGIAEASAVQILAELMILPSDMTAKQWVAHAGLDPRHFESGSSVAKKPRISKAGNKYIRQALYMPALVAANHEPNVKGYYRHLIEKNGLKKIQAICAVMRKLLHAIHGMLNNNAEFDGTRFYALSAQKVS

SEQ ID NO: 322741 - protein, 570 aa, unidentified
MIKNKNPYRGVWGDAGRHLRVFFIRAILYLATTLVAWEKSIMGNRRTRRKRKQHINKVQGQRLAAEFKGQDLSRVLVVAIDGAKKSHKALLADGFGEIITDTFGFPNDLAGAKMFAGSVRKAAVDINAFKIIVGLEPTGHYAENLVAYLLEQGFDVRQVNSFAVSREREAGLTWSKTDEIDLCAIGQLIINGKSSPLGHTEAIYDNMKYAARARRSTIQRTVLLESQIHAYMDRLFPGFLDRDLFSDPFGLTSMAFMARYSSANAACRAGATRIERWLSSRRGVSNPHEITQAVVELAQGALRRPADHEEALIEALRFRLREHDLLEEQIGNFNIRLAEYLVETPGIWLLAIDRVSVVSAAEYLGELGQISRYDGANQIIARAGMVPRETQSGMIGYSGGITKLGHPKLRYILGVIGHNLLTSNRYFQAFYNRLVDRGGKNERLAKTAVAGKFVRVSWAMMNLKGAFEAPTWCEDDLKKDIRTKMERFLKQFGASQIYRNSIGPRLDKVLVSGGQPSTSNSITGSHQLPSASGTHEEHDRASTKPIHIGSLIPVVLGQMAAEQDVEAHMA

SEQ ID NO: 322742 - protein, 375 aa, unidentified
MNDAITFVGMDTSKTTIHVAALIPGREGVWEHQLPNEPTAVRRLFRKLDRESPGEVRYCYEAGPCGYVLQRQIEKLGARCDVVAPSLIPVKPGDRIKTNRRDARKLAEALRGEMLTPVHPPTPEEEAVRGLCRARGALVTDRHRARQRIMKFLLQRGMGWTRGRAWTIAYRGWVRKLAWEHTADRVVFSDLLLGLDHAEERLKQMESKLEETAQEEPYRERVGWLRCFRGIDTLTAMTILTELHDPSRFPTPRALMAYLGLVLSEYSTGDKEHRGGITHAGNGRARSSLVEASWHYRHKPSVQGKLLRRRQGQPAWVLAIADRAQLRLHKRYWSLVLRGKLPVKAVTAVARELTGFIWAVLQGPEVWGEDVAIQN

SEQ ID NO: 322743 - protein, 490 aa, unidentified
MKSQGVKKFQKNQKTSKKASGKATPGKWDEMNRKQRREMMRQMQSGDLSLEVVHPDASGIDIGNESHYVAVPPSRDSPPVRCFGCTTAELKKMAEWLTQCGIRTVAMQSTGVYWIAVYDILEAAGMEVYLVNARETKNLPGRKTDVQESQWLMKLHTYGLLRNSFRPSQEIRILRTYWRQRHDLVRSTGRHIQRMQKALTQMNIRLANVISDITGVTGQAILKAILDGQRDSRELAAYRDCRVEASEEEIAQALEGNWQEDQLFVLRQEQAGYEFCQKQITECDQQLAKYLARLEDRTQGATLPEETRKGRRKKKKKGNPQFNLREELFRMTGTDLTQIDGIDVMAAMTVVSEVGLDMSKWKTENHFVSWLKLSPDNKISGGKVIGKGRMPTNNRATTVLRMAATNLRESDTYLGAQFRRFRTRLGPPVAAKAMAAKLARLLYRMLRYGMKYVDQGAELYESQHRKQQVIHLKRKAAQLGLEIIEVADAA

SEQ ID NO: 322744 - protein, 322 aa, unidentified
MTRIICGVDVSSAWLDASIGRTGNPQRFANTSEGIAELAALCHAHQVDLVAMEATGGYERQAFALLSERGLPVAILNPRAVRQFAQSMGKLEKTDSIDAAMIAWFAEIKRSQPNVLSQPGQQQLRALVTRLRQLTDLRTAQKNQQRLITDPRIQASFTEILALLNRQITGLAEAIAEHIHADPLWSELDLAFRSIKGVADRTVARIMAEMPEIGTLSNKAASKLAGLAPLAQDSGKHQGKRAIRGGRATVRDLLFIVASVCGRHEPDFVAFRERLAAAGKPPKVIRIALAHKLLIRLNAKARDTRHKLQTNPAHSIATAQAA

SEQ ID NO: 322745 - protein, 346 aa, unidentified
MEHYVGIDVSLELSSVCVVDGRGKIVKEAKVASEPEALVCFFKELGFQMKRIGLEAGPLSQWLHAGLAQAGFETVLLETRHVKAALSAMTVKTDRKDACGLAQLLRMGWFQPVHAKSIGSQEIRALLVARKQLLGRLLDVEMSIRGILRGFGLKVGQVTRKTFEARIWELVTGHATLERIAEAMLSARATLKAQYEKLHKAVLAIVREDAVCRRLMTVPGVGPVVAVTFKSAVDDPSRIAKSKAVGALFGLTPKKYQSGEKDVTGGITRTGDEMVRTALYEAANVLLSRLTRFSKLKRWGMDVAKRRGSKPAKVALARKIGVILHRMWIDGTTYRWAKTKPIAAQG

SEQ ID NO: 322746 - protein, 369 aa, unidentified
MKKSIKYVGMDVHKKTIDVAIAEGDRDGEVRHYGTINHDPDSMAKLLRKLASTGGELRFVYEAGPCGYQLYRHLTGNGLRCTVVAPSLIPRKSGNRIKNDRRDAIALARLHRAGELTAVQVPAPEDEAMRDLTRAREDVKIAERKAKQLVSGFLLRHGFVFSGRTPWSNAYWRWIAEIKMGHPAQQIALQEYVHAVKACGEQVDRLTAQVHELLLQWHWAPVVKAFQAMRGVSVIVAVTAIAELGDLGRFETPSKLMAYLGLVPSEHSSGESRKRGGITKTGNGHVRRVLVEAAQAYRLPARISRTLLVRQQGVPPEVRKIAWEAQLRLCSRYQRLVGRGKPANLVVTAIARELAGFMWAIAREVPAVA

SEQ ID NO: 322747 - protein, 372 aa, unidentified
MEERTKIHVGLDVHKDSISVAAAEPGRGPARLIGKVAHDVNKLLRVLAKIGSAEQLHIVYEAGPTGFGLQRTLKERGFVCEVIAPSQIPRRPADRVKTDGRDCMQLAECSRAGQLSAVWIPESGDEAIRDLSRAREDAVNSRVQARHQLKGFLLRHGIRYTGKTSWSLAYYRWLTTLKFDASAAQTAFTEYWQAVKSADERVERLTTALQSSITGWRFEPVVDALQALRGVAAITAIGLVAEIGDLSRFSHPRKLMGYLGLVPSEHSSGERTSRGSITKTGNAHARRLLTEAAWNYRFKARISREALGRQEALSESIRTTAWKAQLRLTKRFAALRERGVQVNKACVAVARELAGFIWAIGLQAQREKEQTA

SEQ ID NO: 322748 - protein, 342 aa, unidentified
METVRKKSYKHFIGIDVSRNTLDFAVMHGSKLLFHRVIPNDKQDITRYLEELKKVHGIKLAKAIFCMEHTGIYCNHLLHCLQKLKANIVLENPLHIKNSLGTARGKHDKADSIRIANYVYKSRDEVKLWQKRRPIIDQLARLSTLRSRLMKMKKGMATTLKEQGGFETKKVAKQNTDLCKTTLTALTEDLNKIDATISGLISGDENLNRLMTIITSVPCFGPVTALQIIIITNEYKDIRNPKKFACFAGIAPFREDSGTVLKKAKVSHIANKKIKALLHICSLTAISYPGELQDYYKRKSEVEGKHKLTVINAIRNKLILRVFSCLNQDRVFEKDYKRPFTV

SEQ ID NO: 322749 - protein, 407 aa, unidentified
MEMLHSRCAGLDVHKNLVVASARITAEGQIRRESARFGTSTRELLRLQEWLLSRGVTHVAMESTGVYWKPVWHILEGSVELVLGNARAMRNVPGRKSDQSDAAWIADLVAHGLIRSSFVPPEPIQALRDLTRTRTQMMHERGRQVQRLQKVLEDANIKLASVLSDITGVSGRKMLVALANGASDARMMAKLADPRVKAPEQEIMHALEGRVTAHHRFMISFHLRHIDELDSLVASLEERIEEEIAPFRRAVDHLITMPGVKEDAAAAIVAEIGVEMSVFPTDGHLCVWAGLSPGLNETGGKKKPARTKKQRWLKAKMTQCAWAAVKKRDSYLSARYHRILGRRGKQKAIVAVAATMLRAIYHMIQNDVDYQDLGADHFSRFDRERAAKRLRKRLEKLGYSVELRKAA

SEQ ID NO: 322750 - protein, 426 aa, unidentified
MKYTQNEKILQIKETTLIIGIDVGSEKHYARAFNFRGVEYGKLLIFDNNAEGFAKLRVWIAKIAESNGFTEVMLGMEPTGHYWFNLAENTKKMGMRIVLVNPHHVKKSKELDDNNPTKNDRKDPKTIAMLVKDGRYIEPYIPEGIYKELRVAMDSRWRLVKELSAIRNRIGRWICIHFPEFTKVFRAWEGKAALLILKECPTPKKVVEKGIEGIIALWKKHKIRAVGIKRAERLLESAKTSIGTSEGLISAENELSMLLEDYESKMRQLERTMALIEELAMQIPGFEKMLEIKGVGLVLAAGFLAEVGDIFRFSHPKQIQKLSGLSLKENSSGKHKGQTTISKRGRKRLRYYLTFGIMPLLSNNEEFRALHQYYTTRKERPLKKMQSLVALSNKLIRIFYVILTKDIAYDPQKMMSDIKRPEVKVA

SEQ ID NO: 322751 - protein, 391 aa, unidentified
MSTYFVGIDISKYKHDCCIINAADQSIVAKFTINNDKDGFNKLLTSLQSLSTPEDIRIGFESTAHYALNLELFLEKAHHSFMEVNPVLISEYKKSTSLRRTKTDSIDCESIARWLMTVEYKPHSKGFYHAYSLKSLTRLRDRLIRQRSFYLVKITNVLDHTFPEFKPFFQEHFSKTALYLLENYGSAEKMARMNSVSYDNLRRISRGRFTPQKFIELKALATNTVGVNNSIFDTELNCLLTLYKEAAKQISVLETQINELIEEVHPHYMSIPGIGALSAAVIYAEYGDISNFTSPAQMLAFAGLEPGINDSGTESHKGRMVKRGSSQLRYTLMNCALPLIRFDVTFAAYYAKKRSEGKPHRVAISHVTKKLVRVIFALERQNIDFVAASLR

SEQ ID NO: 322752 - protein, 386 aa, unidentified
MEALLYCCCGLDVHKDIIEACILRGETQTPEILRQSFSATPDGLKNLVEWTESNDCYSIAMESTGVYWVPVFEAFERNVKYNEALWVVNAHNMRNLPGRKSDIKDAEWIATLLRHGLLEKSFVPCEYIRTLRGFTRLRRSFVQERSRYLNRLEKFLQNHGFKFSSVMSDIYCLAGRELLAILRDKGTIAFEDVVEKCHRLRHSSQEIHAAVCGSLKPEEQCLLKHLLNKIDNSQKAIDDLNTDMQLLTAEISDQIALLKSIPGISDDSAVEIIAEISAAPQEHFSNSEKLCAWAGLSPRNDQSAGTIKSRKIMHGNPYVKAILCQTAWVSVYARDSTFHDWFWAHQGKLGRKKAIIAVSRKMLALCYLLISRNTAYAYGASHPAPA

SEQ ID NO: 322753 - protein, 355 aa, unidentified
MKYYTSTTEYNCGIDLHARQMYVCVMDRQGKKLVHSNVKDNDFDYFLKLVQPYRHDLTVCCECMFGWYWLADACQAAGLKFVLAHALYVKAIHGGKNKNDRIDSEKLTHLLRSNLIPPAYVYPAQKRPLRALLRQRIYYVWRRAELLARIHSHQLAHNRIPAKQTRRVRDSWEEQLLGAEDHPLRQIALKNDLAMIRHFDHQIFQLEEELQRQTKQVACREYALVQTVPGIGENLGLTILYEIGDVERFPTVKDFLSYCRLVKGTVASAGKIKGLRGAKLGNPYLRWAFGEAAVIAKRDHFRIRPLAQRLEARMEGNKFKANTVVAIKLARAVYFMLKNKTVFDPERLVAALARN

SEQ ID NO: 322754 - protein, 364 aa, unidentified
MKRYVGVDLHKTQFTVYMQREGNTEGYFRKYPTTEKGYEAFFEEIKRKQEAGEDVIAAVESTGNTRYFKNCLEREGIEVIVINSLKFKVIRESVKKTDRHDAKTIAEFLMKGMLPESKLCSEKSEELRRVVKARSALVQTLVSLKNQVHGILTANGFESKKGWLNSKKGRQRILDTLLENQYGLVAQSLIESIERVEIEVKKFEKLMDDLTVEDRTVEILKSIPGVGRITAVTARAYIDDIKRFADYKNFSAYCGLVPRVYCSNTTERYGGITKRGPKVLRTAIIQMVIGMIKVKSERGNILMNRYEVLKGRKGSGKSIVATARKLTKIIWTLLQNDTPYDPMRMQEKVLINITKQMREIALAS

SEQ ID NO: 322755 - protein, 409 aa, unidentified
MELRPIYKRVIGLDVHQAQISACAIIEQPDGSVLVERREFGGFKRDRKALAQWARGIEPDVVVMESTGIYWKSPFAALESQGIVAWVVNARHVKAVPGRKTDVADAQWLATLARAGLLRASFVAKADLRSLRHMARQRQKLSGMLASEKNRLHKLLTDAGIRLGVVVSDLHGQSARAMVKAIIAGKSVPEVLSLASKRLRASREEIFDALQAEDLTGVHRFVLTEIMAHIEELEARMDRFDKELLRLLVELGYETPLRLLQTLPGIDLIGAAMLLVELGADMSVFGSAARLASWVGICPGNNESAGKRKSGRIRKGNVWVRRLLCEFAQAAARSRCALKDKFAALSVRKGHKRSIIALAHKMLRTIYAMLSKNTHYVDKTVDYEALMVARNAPRWIKMLVKHGFVPAPT

SEQ ID NO: 322756 - protein, 336 aa, unidentified
MQYVGMDVHWRQTTICILDENGRRVKMMNVRGPWQKVLEELRRIEGVWLVCYEASCGYGWLYERLKRMAQKVVVAHPGQLRLIFRSKRKSDRVDAEKLAKLLYLDEVPPVYVPSVEVRSWRAMIEHRQKLLQERVRTKNQLRSLLRTHGIVAPRGLWTKKGLAWIEAQEWPTSMDRLQRDILLERLGSLRGQIGRVEAVLEEIAQSHAGVKLLREIPGVGIRTAEAVLAYVDDPHRFRSIKSIGSYFGLVPCQDQSAGKNRLGHLTRQGPATVRKLLTEASWQAIRRSRRIRAHFERIRQGHPERKRIALVATAHYLLRVMLAMLRTGEVWRAEAA

SEQ ID NO: 322757 - protein, 489 aa, unidentified
MAKTKRKKSTFERLRRGELNRNQRRSLARRLAGNDPGLTIIHSNAGGIDVGNESHFVAVPPDRDANPVQEFGCWTADLKRMAEWLKACGIDTVAMQATGVYSIPLYDILTGHGIQVVLVNAQHSKNVPGRKSDVQECQWLMKLHTYGLLRDSFHLEERMEGVRTIWRLRDRHVKDASRAVQHMQKALTKMNIQLANVLSDITGVSGQAIIAAILEGERDPWKLADLKHEMVKASREEVARSLEGNWRDDLLFELRQAVDSYHFVHQQMRACDRQLESFLASLPTRILERPDHPEGAPPATAKKAKKPRKPKKARRNEPTVDLTTALKRICGVDLTSIDGIDVITAQTIISEIGTDISKFKTEDHFASWLGLTPAKDITGGKIIGSGRRKVQNRVAGALRMAATTLLESKTYLGARYRHLRQRLPSYAAAIKAMARYLAVLVYRVLTHGEAWVDRGAAKFEQRRTEWELRSLTSKALAKGFQLVPIPATS

SEQ ID NO: 322758 - protein, 340 aa, unidentified
MEKRYIGIDLHRNQFTCCIRLENDRTYLTEWRVEDLPRFVKKLRPGDEVAVEITSNTRLFHDAVAPQVARVVVVNTNQFRVISQSVKKTDPNDARLLSLYLSKGLLPEVRMKDKQHGQLASLTQTRDTLVKQRSALKNKVNNILSARGLNLAKEALSSEKKLAEVLELPFDEIVRIELRVIVEQIRSLNKSIAELEKTIGEEGSKLEGHKGLSSIKGIGKITGAILLSVIGDVNDFADEGRLASYFGIVPRVSNSNATERSGRIHKRGTKLGRTALVQSALIAANYSPYLKNFYERVKARRGAGKAIIALARKFLGIIYRTLKNKWVFEDFPNFVLAEES

SEQ ID NO: 322759 - protein, 357 aa, unidentified
MRIIGCDLHTRQETIAMVDTETGEVVEKTLQHEGEKVREFYSALPRPVQVGIEATGSMLWFLNLMEELGIDSQVGHPAKIRAAEPRKQKHDRRDADLLLKLLMENRFPSIWMPSKELRDLRALLCHRHQWVRTRTRVQNALQAMALTNGLRRGKSLWSQEGQHAIASLPLGPHAAHRRTALQALYRELDADINALDKRVLEQALERPEARRLMTHPGVGPVTALATDVFLGDPVRFEDAKALASYVGMIPSEYSSAGRQRLGGLSKQGNPLLRFLWCEAAIHAVRRDPLLQRFYRRKLVQKGMGKARVAVARKLGIRLYIMLRDQIDYEEFCRRGQMRQKNGAARAGIPEVGYGPSL

SEQ ID NO: 322760 - protein, 369 aa, unidentified
MKKNNKNRKEDARRNALQARSRKTKLTVGIDLGDEWSQCCFLDEEGEIVEECRVKTTREAVRARFGELKPALIAIEVGAHSRWVSQLLSELGHEVIVANARELRAITGSDRKSDRVDAEKLARYARVDRKILRPLRHRGEEAQVDLLVIRGRAVLVKTRTQMVNSVRGMVKSFGYRMPKCSAEKFAQLKNLVPAVVKESLGPIMEALEQVQKKIEEYDERVKKLATEKYAETKVLRQVWGVGEITSVSFVLTIEDKERFGKSRDVGPYLGLRPRRSQSSESDPELRITKAGDCFLRSLLVECGQKILSEKAPDTALKQFGLRIEARGKKKAKKRAVVAVARKLAVLLHKLWVTGEVYEPFPGAQERKAA

SEQ ID NO: 322761 - protein, 395 aa, unidentified
MDSLDRIDAPAALEEDATVFVAFELSKAKWKLGIVTPGTRKLSRYTVAGGAVAAVAARIATARAKAARAKALDDGRPVRVVSLYEAGYDGFWLHRWLVAQGVANHVVDPASIEVNRRARRAKTDRLDLDQLMRTLLAYCRGEPRVCSMARVPSVAEEDARRRTRERARLVKERGAHVNRIKALLHGQGIGDMQPVRAGFVAGLAQRRTGDGHALPPALVAEIAREHARLRLIVEQIGAVEADSQAVEALAPAGSPAAKVRQLTQLVSIGATSARVLVNEVFYRRFDNRRQVGGYLGLTGTPYDSGSSRREQGIGKSGNPRARTVAVELAWLWLRHQPQSALSQWFRERVGALKGGVRKTAIVALARKLMVALWRFIETGLVPSGARLRPAAQTQG

SEQ ID NO: 322762 - protein, 367 aa, unidentified
MTSMPRPARSGQNPGDAPREEVVIGVDTHKDLHVAAVITGIGGLLGSQSFPATATGYRQLLDWAFGFGPVNRAGVECTGSYGAALARHLRQAGVAVAEVNQPDKATRRRRGKTDAIDAEAAARAVLSGQARAVPKSGDGHAEAIRAYKMARDSAVKSRTQAINQLKAILVTADPAVREPLAGLSAKALVRACTSLADPPGASAATAAAIYTLRVLGRRIQQLSAEASDLQHHITAALTACAGQLLTPIGIGPDSAAALVIAVGDNPERLRSEASFAALCGVSPVQASSGKTQRHRLNRGGDRQANAALHRIVISRLRWDPRARDYLERRQAEGKTRRETIRCLKRYAAREIYGLIQPAKHADLPEAT

SEQ ID NO: 322763 - protein, 360 aa, unidentified
MKKVSKPMRKMEAADKPEMTVGLDMGDRYSRYCLLNADGDVVEEGRMQSSETALRRHFEGEPPMRIALECGTHSPWVSRLLSALGHQVIVANARKIPAITGSESKNDRNDAEKLARFAAYDPQLLSPLEHRSSERQLDLNLIRARATLVRARTMIVNALRGLVKSAGGRLPASSTESLPARAPAAIPPALAGVARPLVEQIALLNAQIAGMDKQVEALAAKYPEIKLLRTVPGVGPIVAAAYVLTLERPDAAGNRSAGAFLGLRPGQSQSGDSDPQRRISKTGDGCLRSLLVQSAQYILGRFGPDSELRRWGLKLASTGGKRGKKRAVVAVARKLAVILHAMWRNGERFQAFRQPVAKAA

SEQ ID NO: 322764 - protein, 436 aa, unidentified
MEEVRDEPLYRDRVCGIDIGKAGMAATIRVPSDKDPARRASKTREFATTRRGVLALADWMRCWQVPAVVMEATSDYWKPVFYRLEAEGFECVLADAKQVKHLPGRPKRDTSDSAWLAACFERGAVRSCFVATPEFRLIRLHTRYRRDLTDERTREKNRAEKLLESAAIKLSSVVTDLHGVTGRDIMDHLIAGERDPRALAQLARARARRKITELEHALDGAEFFTADHAALLTTMLERIDRVNEEIARLSQVIERLLAPYEEQLAQAESMPGWGRRSAEDAVAETGAGMTRFPTGGHLSSWAGRTPLDHQSGKRAGRARHKKGNKYLAAVTGETAVSAGKTATREGARYRRLARRRGKAKAQVAVGNTQLKVYHKLLSSPGMRYEDLGPDYYERQTAIRRKIAYHVREIEALGLDVTLTRPAPEPGPDGTRSTQAV

SEQ ID NO: 322765 - protein, 459 aa, unidentified
MNSRRRANNKREEGVPLPVIQPKVAGIDVGSREHWVCGPARRDGEPNVRVFGTTTDQLNALTDWLVEQGVESAAMESTSVYWIPLYELLESRKIQVVLVNARQLHHVPGRKTDFSDCQWLQLLHSCGLLRGSFRPGDAIVRLRALQRQLGNLVAERTRCVQWMQKALDQMNVQLHRAVSDLTGTTGMAIVRAIVAGERNPVTLAVHRDRRCHKSVDEIARYLTGNWREEHLFNLAWALKLYDAVEQMIASYDARILQEMEALQAPQRRNQPVPRHPNPAKESALKSRGEQEARTQLWRFAGVDLTRIDGISATTAQIVLTEVGANLSAFPSENHFVSWLRLCPRTPISGGKPIKKRRNALGASRITASLRMAAVAMQRSKTALGAAFRRIARHKGAAVAVFAIARKLAQLIYRLLRFGQDYIDIGAAAYEERFRVRRLSSMAQAAKQLGYALVLAPATA

SEQ ID NO: 322766 - protein, 340 aa, unidentified
MGYYVGLDVSLKSTHICVMGGDRRVVWQGVSDTQIEMISARLARWGKQIKLVGLETGSLTPWLYHGLCGHGLPMVCMDARRASDAMKARAEKTDKADARALAEMLASGWYSSVHVKSLDSHRLKALLGARDQLVRVKRQLYGQLRGLLRPFGIKIARRAGAKRFDADVRAACNREDVLYIAVSALLDTLASVEGQIAGLDKQVRNLAQKRKPCWHLMSVPGIGPITALAFVTTIEDPHRFSSNRCVASYLGLTPKRYQSGERDVSLSISRQGDEMVRHYLYEAANCLLTTVTGASALKSWGLKLVKRCGAKRARVAVARKLAVLLLRLWKEESHFEAQPA

SEQ ID NO: 322767 - protein, 370 aa, unidentified
MKEYSEAFIGFDTAKKKHAVAIADVGREGEIRYLGEIDSSPLTIERMIRKLAGRYEKLHFCYEAGPTGYGLYRQVRGLGHDCTVVAPSLIPKKSGERIKTNRRDAVTLARLFRAGELTSVWVPDTVHEAVRDLVRARETASQDLRRKRQQLLSFLLRHGRIFSGRQHWSRAHLRWLAQQKFDHPAQQIVFQDAVDAIDDAAARLRRLDEQVAAIVPSWSMAPVVEAYQAMRGVSFVVAVTFVAEIGDLRRFDNPRQLMAFLGLVPSERSTGERVRRAGLTLAGNKRARRVLIEGAWSYRYPARVSQTLQARLEGLPKAVREIAWKAQIRLCARYRRLNATGKKLPVVIAAIAREMAAFLWAIARHVAPAA

SEQ ID NO: 322768 - protein, 395 aa, unidentified
MPIDKKQWQNRKERKELARRLRSEDPNLEVVHPHAAGVDVGNGAHYVAVRPDCDSQPVRRFECFTADLHRLAGWLQSCGVQTVALQSTGVYWIPLYDILEESGFEVYLVNARHTKNLPGRKSDVQESQWLLKLHTYGLLNNSFQPTSEIRVLRTYWRQRAEHARGIGTCILRMQKALTQMNLQLANVISDLSGVTGQKIVRAIVAGTRDPRKLAELSDPRIQASKEEIAKSLEGNWRQELLFVLKQEVEMYDTYQRRIVECDQQLQEHLTSFADTVAPQVKAGETQKKTAKQKNRNAPQFHLSGELHRITGVDLTRIDGIDVMVAQTLVSEVGLDMSRWKTEAHFASWLGLCPDNRISGDKVLSRGTRHVVNRAATAMAFGAPSLLRKRRYCAPR

SEQ ID NO: 322769 - protein, 339 aa, unidentified
MSYIPVGVDIAKHVMQVHMIDRHSGEIIDRQIKRAVFLEFFANREPCLIGMEACGGSQFFARELEKLGHKVRLLPGKFVKAFVMGNKNDVMDARAIWMAVQQPGKSVAVKTEEQQAIMALHKLRRQLVKFRTAQTNAIHGLLLEFGETIRKGRAALDANLPGVLERMSKKLPQALIEMLRDQWHRLSDLDNQIDDIEKQLKTWMKQDEACQKVAAIPGIGPMIATAAVAAMGDAKAFRSGREFAAWLGLVPRQTGTGGRVKLLGISKRGDAYLRTLFIHGARSVMTHSKEPTEWMEQLSQRRPTNVAIVAMANKLARTVWAVLAHDIPYQKGFVSVRPY

SEQ ID NO: 322770 - protein, 314 aa, unidentified
MDHNQVVYGVDVSKAKLVIAQYDVQTLSAVDNRPEAVAVWLADLPQGAVVAMEATGAYHRLLAHLAHAAGMHVYVLNPQVLKHYAQSIGQRGKTDNGDARMIVRYAAHEQAKLRRWQPPAAAVDRLSQLLERRHTLVGARQTLAQSLALPMLKAARQSLLASLEQMLRRLDTLIRHQITRLGMITLYERLKSIVGIGPVVAAQLVAVFNTLNFAKADSFIAYTGLDPRADDSGDRRGRRRLSKRGPPLLRCLLYNAGMAAANSKLFKPVYQQLRERGLQTTEAIVVLARKIARIAFALYKSGECFNAQKHFKMA

SEQ ID NO: 322771 - protein, 334 aa, unidentified
MEQITTVGIDLAKRVFAVHGVDGNERVALRRIVRREQLLELMASLPPCVVGMEAGSGAHEWARQFQALGHTPKLMAAKFVAPYRKRGKNDGNDAQAICEAVGRPDMRFVPVKSLEQQALLSLHRARQGFITERTAVINRIRGLLAEFGVVLPARAEFVRRQASAAAEAIPLLARRIITDLLAHLRVLDERIAEYDGELDHQAKVSEPAQRLMKIRGIGALSALAIVATIGNARDFKSGRQFAAWLGLTPRQYSSGGKTRLGHITKHGDAYLRCLLVQGARSALHTANRHADRISCWARSIESRRGYHRALVAIASKNARIAWALLHRNETFRTA

SEQ ID NO: 322772 - protein, 276 aa, unidentified
MKTYAGIDLHSSNNFIGVINAKDKRLYSKRHDNRIEDVLKVLGKFKASLQGVVIESTYNWYWLVDGLMDQGYTVHLANPNAIQTYDGLKHTDDKWDSFWLAHMLRLGILPEGYIYPKHQRPIRDLLRRRLMFVRQRTSQILSLQSMITRNRGLNFSGAQIKRFRDDFIDKLFSDRHLVFTAKKNITTIRFLDQIVSEIEIEVASQIKLKKKFISLLTTPGIGNILGLTIMLEVGNIGRFPKAGNYSSYSRCVESKKTSNGKKKFDSPMPAAAKGLV

SEQ ID NO: 322773 - protein, 356 aa, unidentified
MSRDVKYIGMDVHKEAIVIAVLNDGGKLVMESIIETKASSILQFIHGLRGELHVTWEEGTWAAWLYDLLQPHVHQVLVCDPRRNALLKEGNKSDKIDAHKLADLLRTGMLRPVYHGEHGLRTLRELARSYQTISQDLNRVMNRIKALYRGWGIACGGTQVYAARYREEWLHKIEHAGVRRRAELLYQQLDGLQVLRRTLRSELLAESRKHKAAKLLRQIPCIGPIRAARLLALMQTPHRFRSKRQLWTYSGLGIETRDSAQYCFVRGQLQRAKKPQQIRGLNRNHNREMKDIFKGAATRASCGVGPLRDFYVALLDKGMKPEMARLTLARKMAAIALTLWKKEERFDAEQLKTQAA

SEQ ID NO: 322774 - protein, 358 aa, unidentified
MVQRKELNFEGQNIYIGIDVHLKTWHVSILTESGCLKKHSQQSSAQALFEHLKKHYPNGKYQAVYESGFSGYSTYYALKEYGIKCMIIHAADVPTSQYENVMKTDAIDSEKLAKSLKGGLLRGIYVRDKEELDDRSLIRLPKTLQKQLGGYKSRVKHLLYNNGISYPDCFENSRSHWSNRFIYWLENEVRLLSSTRLSLDLLIDQVKLFRKNLLKATRMVRDLSKKPQYSRQYENLISIPGIGLVTAMCLLTEIGDVSRFHNQREFASFLGLIPSCHSSGENIYNMEKTFRGNKHLGPLVIESAWVSIRHDRAMSMAYGAYCKRMKGQEAIIRIARKMSNRILSVLKSGKKYQYDKVR

SEQ ID NO: 322775 - protein, 411 aa, unidentified
MNPVVGLDISKGESQVQAFVDKGKPFRKSFKVSHTLDGLGLLVEFLDDVQKETGQKPPVILEATGHYQTPVVQYLDERGYLLIIINPLISYKAKSSSLRKVKTDAVDAYLLCELYYKEELEPYKKRGIQLLNLRNLTRQHENITGVMIQTKLQFQAVLDQVFPEYRGVFGDLYSVVSLLTLQEFPSSEDILKASDETISNKIKELCQSRSIRWANEKALKLKEAAARNPFEKTVYQSHILSLGMYINIILQYKEHLSRLESEIDALAKEIEEYNIIKSIPGIGEKIAATIISEIGEIDRFNHPKKLVAFAGVDPSVFESGKFRATQNRITKRGSSRLRHALYMAVRCAIRDCRKKKTTDEILPRNKRMREFYDKKREEGKPFKVAVIACVNKLLHWIFALLKNRTIFQDIA

SEQ ID NO: 322776 - protein, 345 aa, unidentified
MELHTIGIDLGKTVSHLVGLDQGGEVEVRKKFSRKQLLHFTANLQVELIGMEACGGSHFLGRALREQGHEVGLMPAQYVKPYVKTKKSDYIDAEAIAEAVGRPRMRFVPIKTDDQLDLQSLHRVRERWVMRRTAVINQIRGLLLERGITLRKGRRYVDAALPGILEDADAKLSGALRMLLAQLKLELDHLDLRIDEADALIKKTARENEACQRLVAIPGIGPVTATALIAAIGNGGAFRKGREFAAWMGVVPREHSTGGQQKLLGISKRGNSYLRRLFVQGARAVMQQRTKQSSGLSAWLAQLTSRTHRNVAAVALANKLARIAWAVLARNEQYRPPVLANVAAA

SEQ ID NO: 322777 - protein, 320 aa, unidentified
MAATEVFVGIDVSRDSLEIATRPTGDCWHVGNDPAGISALVARLRAVGPGLIVLEATGGLEVAVLAALGSVGLPVVAVNPRQVRNFAKAIGKLAKTDALDAQVLAHFAEAVRPAVRPLPDAATRELSALVTRRRQLVEMLTAEENRRKTAASAIRVDIQEHIAWLRKRLHGVDRELGQAIRSSSLWREQEDVLRSVPGIGPVVSATLLADLPELGTLGRKQIAALVGLAPLNRDSGTLRGKRTIWGGRATVRAALYMGALVGSRCNPVLYAMYTRLVAAGKTKKLALTACMHKLLTILNAMLKHRTPWARPTAASAHTTS

SEQ ID NO: 322778 - protein, 351 aa, unidentified
MNYIGVDYHKKYSYIVVKNEDGYIEGRGMVNNTREEVQRFLEPYRPGMAVVEATRNWGLIYDWLEEVLDDVALAHPLKVKAIAEARIKTDKISADILADLLRADLLPRAYAPSKQTRELKNVLRQRMFFVRVQTMVKNRIHDILDRHPEVLSQAPEVSDLFGTAGMQWLGQTVLPGEDNKLLTSELGLLKFLKEEVSQSNGAVKKLAKKDRRTRLLQSIPGIGPFFSVLILYEIDDISRFRDEKKLCAYAGLVPSTHASGGKVFHGKITKTGSKWLRWAAIEAAQTAVRSDSEFHAYYQRIRVRKGTNAAKVATARRLLTIVYRLLRQGRFYERRTTNVCKIVTPAALVTD

SEQ ID NO: 322779 - protein, 416 aa, unidentified
MLFIGDDWAEDHHDVEIEDEDGRRLARVRLPEGLEGITRLHALVAEHAPPAWAKLPPEQAAGQVVVGIETDRGPWVTALRAAGYLVYAINPLSAARYRERHATSGAKSDAGDAHVLAEIVRLDRDHHRPIAGDSDLADAVKLLARAHQNAIWERTRHVLRLRSTLREFFPAALEAFEDLTAADALVLLERAPSPAQAAKLTRAQLTAALRAARRHHIEVKAEALQAVLRAPALRQPPVLDSAYATVVAGQVRIIAALNTQISGLAEVMSEHFGRHPAAEIYLSQPGLGVVLASRVMGEFGDDKTRFVDARARKNYSGQSPITRASGRKSVVLARYATNRRLGAALHMQAYAALTGSPGARAYYDELRGRNIGHHAALRQLANRLVGILHGCLKTGTVYDEDTAWQHRRPQTADVAA

SEQ ID NO: 322780 - protein, 429 aa, unidentified
MNYTQNEKIEQVTDSTMVVGVDIGSQIHYARAFDNRGRELTKRIFSFHNDLEGFNSFNLWAETLKTENKKTAVLIGCEPTGHYWFAFAKYVNDHQKRLVMVNPFSVKKIKELDDNSPKKTDSKDPKTIAKLVVDGRYSIPYMPEGIYAEIRDLVYSRDRIMKQHNISANRIQRWLAIHFPEYLGLYTRFDAISGLAVLEKAPLPKDVIALGVNGIRKIWHDKKMRGRGVTEDRAKTLVEAAHNSVGLDGGIGTKSELYMLLEEHRLWTSQLEAVNKVLEEIILKVPHVEKLLAIKGVGSITIAGFIAEVGDIRRFDSPKQIQKYAGLELVENSSGKHKGRRRISKRGRRKLRKILYQVMVPLLARNKEFRGIYDYYVTRVKNPLKRRQAMVAVSCKLVRVFYAVLTKGVEYDRFKMMSDIHRKSDIIAA

SEQ ID NO: 322781 - protein, 366 aa, unidentified
MTSVAPAAERIYVGMDVSRDKIAVAVLGPGEDVPAVEVISHDGEMVRRLIGKFADRSVLAACYEAGPGGYELYRLLAAAGVACDVVAPALIPKAAADRVKTDRRDCVRLALSHRAGLLTAIRIPSEQEEAVRDLVRTRADLVDDRKRMMQRIGALLQRHGRVWRAPRWTYQHRAWLDQQSFTEPALQAALRTYLAALDARDAELAVLESQLRGCWASVDPLASMVRQLGCYRGIAELTALTLAAEVADFRRFASAPAFMGFTGLTSSEYSSGARTRRGAITKAGPQLVRGALIEAAWSCRHRPAIGATLRRRQAGCAAETLARSWKAQQRLHATYAKLTRRGKIPSVAVTATARELAGFVWAEMTS

SEQ ID NO: 322782 - protein, 467 aa, unidentified
MDDKAKERRKVDQLSAMNPNAAGIDIGAQSHFVAVPPDRDERAVREFGAFTSDLYKLADWLTSWGVETVAMESTGVYWIPLFGVLEERGFEVLLVDPRRLKNVPGRKTDVVDSQWLQQLHTYGLLGGAFRPDEDIRQLRSYLRHRSMLVDYASHHIQHMHKALTQMNIKLQHVVSDITGKTGMDIIQAIIAGERNPEELSKLRDYRVKASETTIAKALHGHWRDEHLFELTQAAELYTTYQDKIAACDRRILALLNTFDDRSQGPPPPKTGKKSRRSQHNAPSFDARSHLYRMTGVDLTGIDGIEAHTALKLIGEIGLDMTRWPTVKHFTSWLGLCPGNKITAGKVISSRTKPSANRAAAALRLAANSLHRSDSALGAFFRRMKARMGAPAAITATAHKLARLVYSMLKHGTQYVDAGQDYYERQYQHRVMKNLTQRAKQLGYKLVELQPDSPSELPNPTVTIQAVT

SEQ ID NO: 322783 - protein, 476 aa, unidentified
MNSKTKRANNQVNSVMNIQEQREMVEKANRILSEMRSFTWRDLETQGKFSKNEKLSFISDDMLIVGCDIGSETHYVRAIDTRGRELSKKALAFENDAEGFQKARDWAVQLAAANDKKQIVLGLEPTGHYWFCLAAWMISNGISVVQVNPYAVKQTKELEDNSQQKDDRKDPKLIANLVKDGNYGMPYLPEKVYAELRRLSMFREQLMEDRNRHMNRLHREMKIYFPEYKDAFGKIDGAFCIAVLKEAPFPEDILRLGAEGLRDIWHKAKLRGRGYSRAEEIVKYAETSIGLEEGTAAGKEAVRWFAEKITELDEELAEIENKLEGKCGEIPHAENVLEIPGIGGKILAGILAEMGDITRFDDVKEIQKLSGLGLVSCSSGKHKGETRISHRGRKRLRYWLFQAARSAVAHGEEYKWIHAHYTTRAGNPLQKMQSLVVIACKLLRVIYTMLKTGKKYDPEKLLKDIRYPESVQSAAA

SEQ ID NO: 322784 - protein, 381 aa, unidentified
MTTAVPHHEQRNPTEATLFVAFELSEKTWKLGFTTGHGQKPRERTVTARHHEHVLNEIAQAKRRLGLPATAPVVSCYEAGREGFWLHRFLQARGITNHVVDSSSIEVNRRRRRAKSDGLDVRKLLSMLMRYAQGERQVWQVVKVPSVEAEDQRHLHRDLETLKQERASTTTRIQGLLSSQGIRLTSLSKLPEQLEALRLWDGSPIPPGLRRRVLRVYAHHTFLSEQIAEVEAERRAQLQTSTEAHIDKVRQLMQLKGIGINGAWLLVMEFFGWRAFKNRREVGGLAGFTPTPYQSGESAREQGITKAGNRHVRWMTTELAWSWLRFQPDSALSCWFRERFGSGGKRLRRIGIVAVARKLLIALWRFLETGVFPAGAVLKEG

SEQ ID NO: 322785 - protein, 346 aa, unidentified
MEHYAGIDVSLELSSVCVVDAQGKIVREAKVTSEPEALLAFFASLGFAVKRIGLEAGPLSQWLHAGLKRAGFDTVLLETRHVKAALSAMMVKTDRKDARGLAQLIRMGWFRPVHAKSMGSQEVRALLVARKQLLGRLIDVELSIRGILRGFGLKVGVVTRKGFEARIRELVTGHITLERIAGAMLSARATLKVEYEKLHKIVLTIVREDAVCRRLMTVPSVGPLVAITYKSAMDDPNRIAKSKAAGALFGLTPKKYQSGEKDVTGGITRAGDEMARTALYEAANVLLARITRFSKLKRWGMDVAKRRGSKRAKVALARKIAVILHRMWVDGTTYRWTDAQPIAVQV

SEQ ID NO: 322786 - protein, 411 aa, unidentified
MDVFCGIDWAEDHHDIALADGDGKLLARRRISDDAAGLAALLDLLAEHGDSPEDPVPVAIETPRGLLVACLRATGRKVYPLNPMSVARYRDRHSVAGRKSDHGDAFVMANVLRTDMHAHRPLPADSELAQAVAVLARAQQDAVWDRTTAHNKLRSHLREYFPGFLAAFAGARDGIMRPEARVILAAAPDPASAAKLTLARLRALLKKAGRQRGIDAEAQRLREAFRREQMRQLPLVEQAMGKQSIALLRQLDAACASADELEQAATESFNQHPDAGIITSFPGIGALTGARVLAEIGDDRSRFKDARGLKAYAGAAPITRASGKSRSVTQRKVKNNRLAAAGYTWAFAALTASPGARAHYDRRRDAGDRHTAALRNLYSRLLGCLHHCLQAGQHYDEATAFPAQQATPAAA

SEQ ID NO: 322787 - protein, 343 aa, unidentified
MDYYVGIDVSLELSSLCVLDATGRIVREAKVASEPEALISFLTGLALPLARIGLEAGPLSQWLHAALVEAGFAAVLLETRHVKAALSAMIVKTDRRDARGIAQLLPMGWFRSVHCKSPPAQEVRALLVARKQLQAKMRDVELSLRGLLRGFGLKVGEISKGQFAARVRTLVTGHTMLERVAEAMLQAREALRAEFSKLHRAMLAIVRMDEACRRLMTVPGVGALIAITFTAGVDDPARFRHSKDVGAHFGLTPRKDQSGETDITGAVSRVGDVMVRTALYEGAHILLTRAVRFSALKRWALAVAKRRGMKRAKVALARKLAVVLHRMWVDGTSFRWGRESALA

SEQ ID NO: 322788 - protein, 372 aa, unidentified
MTQTNILFIGMDVHKESIVISLADDDRSEIRRYGSIGGTLADFKRTLRKLVSTGKELFFCYEAGPTGYELYRFIVSQGHQCIVVAPSLIPKKPGDKIKTDNRDADNLTRLLRSGDLTAVFVPNAEDEAIRDLSRAREDAVLVLKCAKQRLKSFLLRHNIRFDGSANWSEKHLHWLAESVNMPYPAQKVVYQEYLNSVTEANDRVKRFDKEILFHTKQWRLYPIVESLMALRGVRMVVAVTIIAELGDLTRFTNPKQLMCFLGLTPSEHSSGDKKRKGAITKTGNQHARRVLVEAGWAYRFHAKVSKEMQKRQDGTPLKVRDIAWKAQLRLTKRFRMMANNGKPRNVIVVAMAREIAAFMWAIAQEIPISPKQ

SEQ ID NO: 322789 - protein, 376 aa, unidentified
MFVGVNMSLTTSPTQETGMKILAIDLGKSKSVACVYSVETAESRFYKVGTSPGQLHELILKVRPDRIVIEVCSAAGWVADLVGTIGIEFQVANTAAPAWRWSNTKRKTDRDDALRLAQLSALGQLPRVTIPKRDVRQWRALIRYRHHLVRRRTQLRNRIRALFDREGLTLPTGKQCWTNAGIAMLREWARSLDEAPDQELWRGELACELEILQMAELLIARVEAKLDRLAEANTACQLLQSIPGVGPRLAEIVVAVLDDASRFQKGKQVGSYAGLTPRQYQSGDCDRQGRISRQGNPLLRSLLVEVSWVGLQYNPWMRAVYEQVRRGSPTRKKIAIVAVARRLLIRCWAMLRDGVPWRPPNTEPSPNGTWGVAGAH

SEQ ID NO: 322790 - protein, 340 aa, unidentified
MTELYVGSDLHSNNNVIGLIDEQGKRVFRRRIPNDREIVRDVLSPYKGDIVGIAVESTYNWYWLVDTWMDEGYKVHLANPSAIQQYNGLKHADDKHDAFWLAEMLRLGILPEGYIYPKQERPIRDLLRKRGHLMRLRTSLVVSLQNILSRNLGRKMKVNDVKGLQQDRVTPLLEGSEDLAMAGRISKETIDFLTHQIDQIERRIEKTVRLKEAYRFLQTLPGVGKILALTIMLETGPISRFETVGDYVSYCRKVPSQWISNGKWKRSGNTKNGNRYLSWAYAEASDFARRYYPEPRAYYQRKRQETNAVVAHSALSHKLARAAYYVMRDQVPFDSEKLFR

SEQ ID NO: 322791 - protein, 413 aa, unidentified
MLKIVYPICCGMDIHKSFLVACIATTNSQGVTSYTSKRFSTFTGDLRRCAEWLSAHNCKDVCMESTGKYWIPIYNILEQTCNIVLAHPKYVKAIRGKKTDKKDAQWIADIFKHDLVSGSFIPPADIRQLRDMVRYRYKLTNFIVGEKNRAQNCLTVSNIKLDDVFSDVFGKAASAITTHLLENPTEKITDVSGFRTRGMKSTDEEILAAVDGELCVEQAEKLRIIRSHMDSLELCKANLESLILSLAENYLPQLELVMSVPGIQSYAAIGIISEIGVDMSVFPTSKHLCSWAGLTPQNNESAGKKKTTRIGRAGAYIKPLLVQCALGAIRKKSNPEIRRRYENLKKRRGHKKAIIAIARMLLTAIYNILKKNEPYNPELYAHINTPPKQRTVSVEEAIFILQRQGYLVTPSAT

SEQ ID NO: 322792 - protein, 393 aa, unidentified
MICVGIDVAKDKYDCFILSSEGEVLADVFTIPNNAEGFDTLLQTIRRCARPEDKIKVGLEATGHYSYNILGFLLNEGLDTYVINPLHTNLYRKSLSLRKTKTDRVDARTIAAMLMSDVDLKSYTDTAYHNEELKSLTSNRFDKVRERAKLKQSVSRLVTILFPELEKLVSTLHMASVYALLSEFPGGKQVSEAHLTHLKAVLYDASKGRYGSDMATTLRDAARCSVGSVMSAKSLELRHTIRLIHELDAEIEDIEAAIQSMMGEIQSPITTIPGMGVRMGAMILAEIGDFSRFDSPDKILAYAGMSPSTYQSGQLSLSGAYSHMEKRGSRYLRYALYNATKYVCLWNPTFAAYLAKKRAEGKHYNVALSHATKKLVRLIYALEKSKWPYSTAA

SEQ ID NO: 322793 - protein, 337 aa, unidentified
MSTIHILGIDLGKHCFHAVGNNHTGKDVIRRKFSRSQLLRFLSVLEPTIIAFEACGGAHWLARKCEAYGHRVRLIPPQYVKPYVKGNKNDFIDAAAIAEAASRPSMRFVSAKSEEAQVIAAIHRVRDGYIKERTACMSRIGAILLEFGLSFPKGHAKMKALFQWLAEQDIKLPPSLVAELLSIHEHYKYLNEQVSTQDRKLKAITENNENAELLKSIPGIGDLTATLCVANISSLSNFGGGREMAAWLGLVPRQYSTGGKSKLLGMSKRGNKHLRALFIHGARSVLSRIETTGKVFGDWLVNLRATKPFNVVVVALANKLARIAWAVLYHRQAFKAV

SEQ ID NO: 322794 - protein, 339 aa, unidentified
MASTYCGLDVSDKATHICVVDGEGKVIWRGVCATDPQALAAALAKRCPDVGRVVLETGALSAFLYHGLIERNVPVVCVCARHAKGVLSTRVNKSDSHDAEGLAQLARTGWYKAVHIKDSATHLDRAQVKVRDQLIKSHRAMAGQLRGLLKLFGLRLGKVTTPGKRAERLVALFRQKPELRPIVSPLIEAMASLEKQIRLSTRGLEARATADPVCQRLMSVPGVGPIVAFRFKSSIEDPARFECGQAVGAYAGLTPRRSQSGERDVTGHISKAGDPMLRTALYEAANSLLSRVKRPCALQTWGKALAATKGAKRARVAVARKLAILLHNLWRTDTGFQWA

SEQ ID NO: 322795 - protein, 382 aa, unidentified
MQASTAGTPTADHNGTIFVSIELSQKTWLVTLHSPDRDRISRHKLEGGDHVELLALIEKVKVRATEKLGSVPGVVSCYEAGYDGFWLHRRLQAAGIVNFVFDAASIAVEQRSRRAKTDRIDGELMLRTLMAYLRGEPRVVRIVRVPSVETEDARRASRERDRLIKEQTAHTNRIKALLRLSGVAVGNPRRRDWLSFLEQQRDWQGHPLPPHLLAEVKREHVRLTMVREQIAALEQAQAAQTCPVPAPMAERRSSLQRLKALGPAFTATLVDELFYKDFRNRREVASYCGLTPSPWKSGGIDREQGISKAGNRRARNKAIELAWLWLRHQPDSALSRWFRTRTANAGKRAKRIAIVALARKLIVALWRYLTTGLIPEQAIMKA

SEQ ID NO: 322796 - protein, 502 aa, unidentified
MKTSTPMSTPVALHDILAEVTQTCRPHDPQTGHAPHAMVVFPPSPSARPTPLDATALGTRPAEDAQPYALFIAIDWADDHHDLCVLDPVTQQRTHQRLEHDPAALHAWLADLHRRFPGRKLAVALEQKTGSLFNLLVEDNGLDLYPMNPAMVAKYRKALHPSGAKDDPTDADLILDLLTLHREKLAVLRPDDPLTRQLQRLSRQRRETVHLRTQFSNRLTALLKQYYPLFLRICGDDLFAPMACQLLLDYPSFDALKQADSEALRHFYTTHGSWKPAVIAHRLQVIRDAQPLTTDAAIIQPAILDATMLARLLQQVNESIAAYDRAIAGLFPQHPDAPIFASLPGAGAVFAPRLLTAFGTDRTRFDTAAQVQNTTGISPVTQASGTMRVVHWRPACSKFLRQSFQEYANESIRHSLWARAYYQMQRDRGKRHQVAVRALAFKWIRVMFACWQTRQPYDELRYLRSLQQRHAPLLEYLSKNDQVFGQETTPSSSPKTRRKTAM

SEQ ID NO: 322797 - protein, 349 aa, unidentified
MAEVSTIGVDIAKSVFHVHGVDTDGTVVICKRLGRTKILKFFADLPPCLVGMEACATSHQWAQELKRLGHDVRLMPPTYVKAYVKRSKNDAADAAAICEAVTRPSMRFVPIKSAEQQSALMLHRARDLLIRQRTQLINALRAHLAELGLVAAKGREGLHQLVTIVMESCDEKLLSGARFACQAIVMQLHAAQTQINGLDKCIVQAHRVNADSKRLDAIPGFGVILSTAVVATMTDPKAFKTGREFAAWIGLVPRQNSTGGKERLGSISKQGDRYLRRLFVVGAIAIVRTARMRPEKYPWVIKLLARRPAKVVAVALANKMARVAWAVLAKGESYRAPTRSSNAALAAAA

SEQ ID NO: 322798 - protein, 417 aa, unidentified
MEGKDLIYCGIDWAERTHDVALVDDSGQLLAKRHITDDAAGYKILLDLLAEYGDTEESPIPVAIETSRGLVVAVLRTGKRQVFAINPMAAARYRDRHSVSRKKSDPGDALILANILRTDMHAHRPLPQDSDLARAVAVLARAQQDATWNRQQISNQLRSLLREYYPSALAAFEPWKNGLCRREAHELLRAAPTPTRASRLTRTQLQAALKRAGRQRGIEAEADRLREIFRAEWAHQPPLVEDALGKQMLALLVQLEAACAAADNLAEAVEEAFPQHPDAEIILSFPGLGIQLGARVLAEIGDDRNRFADARGLKAYAGASPITRASGKKSSITRRWVKNDRLNHAGYLWAFSAITASPGAKAHYRRRRDDHGDWHAAAQRNLFNRMIGQLYHCLQYGRRFDEAVAFPVSASAVAHVA

SEQ ID NO: 322799 - protein, 429 aa, unidentified
MSNLFISVGIDIGADFNFMSLALPNQTFIGKPFKIVHSNFSSLEKAVATIQEAEETYSMKARIIMESTGIYHYPLFCYLSDKGFCVLVINPIISKNSTNLNIRKVANDKFSSKNLALIGLKPDLKVSVIPSNAVLDLRNLMREYYNLMDNRCAYVNKLKGLLKVSFPQYIGIFSKVTVQTSLALLEKYPSPTDFLSAKKKSVIKIIIKVSGFGKTYAETKYQNIIEAAKSAGIFGYFVPSNSVQIRLYVNFIKQYDEEIANVLSLMHNLIDKHADETFVRQIRLIETIPGAGFLSAVTVICEIGDFSVFKSPKQLFAYFGIDPAVKQSGNFTGIKVKMSKRGSSIARRAIFTIALVGVGITRKGNANNPVLREYYLKKCHSKLKMVALGAVMHKVCNIIFAVLRDNKEFSFISIEEHIKFYQEKFASGI

SEQ ID NO: 322800 - protein, 388 aa, unidentified
MYHLGIDIGKKFHEACLVNQQGEIVVAPFRFANTRSGFNLLREKIAAFPNKDCQVGLEATGHYWLNLYSELKRDYQVRVINPLQSDSLRNLYLRKVKTDKQDCLIVADLLRIGQLAETVVLDPKIKELRQLSRFRHELISQVKAQKQRIVGILDLIFPEYQGLFSSPFVKNSRRLLKKWSSPEELERVSPKQLERFLNKLPGKHLAKEKVKTFLKEAKQSIGQTEILDALTLQMKLLLEQLEFVEKQIETVEERIKIILVQVPQKLTTIPGIGEVLTGVILGEIGDIARFSSKKKLVAYAGLDASVRESGQFVGTRNHISKRGSPYLRKAIWQAAVLSCRFNPKLREFYQKKIKEGKKPIVAQGAIARKLTHIIYAVLKTDQDYNVNL

SEQ ID NO: 322801 - protein, 318 aa, unidentified
MKVRGLCGSRMGLDRDRIHGGADMAQVRSWVGLDVHAAKVLAATVDRETGELGVRRLSGKTAEVVAFCAGLAGPTRVAYEAGPTGFALARALQAAGMQCVVAAPGKIERPAQDRVKTDRRDAERLVRLLMVDGLHPAQLTMVDYLGAIDALIVRRDTLEGHIERLVPTSPWVQTVARLRCLRGIDTLSAVALCAEVGDWHRFARPGRLMSFLGLVPSENSSGERRAQGQITKTGSRHARRLLVEAAWHYRRAPAKGAALRRRQAGQDPRVLALSWKAQQRLHHTWRRLDNDRGKRRTIVAVAVARELTGFCWAIANAD

SEQ ID NO: 322802 - protein, 344 aa, unidentified
MKHYAGIDVSLEASSVCVVDTEGRIIREGKVLSEPDALIAWFGDLGAPVERIGLEAGPLSQWLHAAMAKAGLAVELLETRHVRTAFKTMPVKTDKKDARGIAQLMRLGWFRPVHCKSLPAQEVRAVLAARKLLQSKLNDVEMCIRGILRGFGLKVGPTSPRTYEARVMALTEGHPTLEVIATALLRARAAFAQELRGFERRVRDLARDDERTRRLMTVPGVGVLVSLTFVSAIDEPERFRSSRMVGAHFGLTPSRYQSGETDYSGRISKVGDTRVRAALYEAANVILTHRVRSSDLKTWALAVARRAGMRKAKVALARKLAVVLHRMLRDRTDFVAHKGAPMAA

SEQ ID NO: 322803 - protein, 400 aa, unidentified
MHLTANISIPQKNFIAIDLHSDNAVICVRRNALNKAGELVGKNIWCGRVSIRDGLDNFIKVLVPHCQDFDHVAVVESTYNWYCLADAFEERGWLLRVADPSTVSQANLKSSDDRTEAQYLAERLRVGSLKHYLPLNYSSRALRDLCRYRMAMVQDCASLKIKLINLYRNQLSKNVRVADLLERCQPHMQPNYRFNSDILEEFKDRNIRLRVAFEISRIAMLEEMIEECNAEIQKQCKDQELVKLCKTIPGCGPVLSAVICTEIGTMQRFKSAGDFVSYCRLCSTSKLSNGKSKGLGNAKNGNAYLRWAFTEVAQYASRNPVIREILQRLLRKYGGLRVKAIRTLAAKIARVTFYVLKNKQRFNAAKCFGMELTKSIVKKLPHKPLREDAAVVLPAVAGQA

SEQ ID NO: 322804 - protein, 535 aa, unidentified
MTSVTAINCVVASFRRKSGLDPDGEVVKESLTEPSLADEFIEIKDGWTMARRKKKSTYERLRDGERLKHWEHKEVARQFQSEDPGWEVVHSKVAGIDVGNGSHFAGVDPRLTQQPVREFGSWTAGLQAMADWLKNYGVKRVVMQTTGVYWIAVQEVMEANGFQVAVVDARGTKNLPGRKSDVQECEWLRKLDTFGLLRESFQAPDKIRAIRTVWRLRQRLVTDAGRSIQQMQKALTSMNVQLANCISDISGVTGQAIIRAIVGGERDPMKLAQLRNGMIRASEEEIARSLEGNWREDLLFELEQVLEAYDFQQKQIAGCDERLKKYIGEQPTRELGGGLESAGGEGVAEQKKRGRKKKAQPKPLKNQPAFDLSGELRRVMGVDLTKIDGVKVMTVQTIYAEIGADFSAFRTEKHFASWLMLAPKRDVSGGKVIKHLSFSGNNRVANGLKMAAQSLKESDSYLGARYRSLRGRLGGERAVKAMARYLACLIYRMMTKGEAYVDRGAAYFEKRRQDRDLLYLQGKAAAMGMQLVARA

SEQ ID NO: 322805 - protein, 409 aa, unidentified
MRRSKGKRSASSIVGCAPKCAEPHAETPEGVLTASIQRRQTVNKNITSFVGLDVHKDSTAIAEAEAGRETPRFIGTVGPDLGQLLKALKSLGKPETMLVVYEAGPCGYGLARQLRSRGYSCEVVAAGKIARRPGERIKTDRRDALTLARLARSGDLVKVMVPDERDEAMRDLSRAREDGVRARLKARQQLKALLLRHGHRYGGKSSWTLAHERYLAAVSFAHPAQDIAFAEYRQAVREGHERVERLTEALRTQSEQWRLKPLVAALSSLRGIDFVAAVTLAAEIGDFSRFAHPSELMGFLGLVPSEYSTGDTRRQGDITKTGNSHARRVLVEAAWNYRFPARISRILQIRQEGQPKVVREIAWRAQLRLAHRYRRLSSRKLHPNKICVAIARELAGFLWDIARQVKVAA

SEQ ID NO: 322806 - protein, 351 aa, unidentified
MLMIGVDYHPSVQQIAFTDTQTGECGERRLNHSDGEAERFYRELKQRGVSVRVGIEATGYSRWFERLLAELGFEVWIGNAAEIKTQRVRKQKTDRADARLLLKLLLENRFPRIWVPSPENRDLRQLLWHRHRLVQMRTRIMNQLQAIAMNEGKRWKKRLWREQGRAELAKFQLAPWASRRRQDLTELLDRLNPTIEELTTAVEQEAKKRPEVLRLMTHPGVGFLTALAFVLIIGTPERFPCGKQIGSYVGLIPAEDSSAGRQRLGHISKQGSALLRFLLVEAAQAAVRSDPDWKRRYIHLAMRRQKSIAKVAMGRRLAVRLYWMWRKEWDYQQFREFGSYAGKLVTGHGVN

SEQ ID NO: 322807 - protein, 460 aa, unidentified
MNRNRSKSRVDRTMPMVHPNAAAIDIGATMHMAAVRADRTPEPVRSFGTFTADLHRLVDWFTECGVETVVMESTSVYWIPIFELLDARGFAVFLVNARDAKHVPGRKTDVSDAQWLQRLHSFGLLRASFRPKGQIAELRAYVRQRERLLEYAASHIQHMQKALTEMNLQLHHVVADITGATGLRIIRAILAGERDPEALAGLRHYSCHSSAETIAKALTGSYRTEHLFALEQALSLYDAYHEKASACDVRIESVLKELIIHRGHDHGSAPPVSRRRNRTDQANALAFDVRAALFGLLGKDVTMIDGLGPYLSLKLIAECGDDLTSWPSAKHFTSWLGLAPSNKVSGGKMLSSRTRRSGGRAAALLRLAAVTVGRTDTALGAFYRRLSSRIGKAKAVTATARKIAVLFYNAVRHGMDYVDPGASSYETRYRTRVINNLHRRAKTFGFVLQPLEPKAGAAVS

SEQ ID NO: 322808 - protein, 341 aa, unidentified
MSIVVAGFDVHRSQITFDALDEESGELTRGRIDSTPEAVTGWVERFPDREVHVAVEAGTGWLFVCEALQAAGAVPHLAEPTETSALRGPRRRAKTDREDARWLRTLLCEGRPPEAWIPPAHICELRTRTRLRKTLIDERTAWLQRVRATLFHHGVSGAPERLLGAGGREFLDGLCLPASARERIDVAFAMVEAIERQLAPIERELRQLARRQPGCKALMAHYGVGELTAPVILCELGDVTRLSASRKAVRMSGLDIGVHRSDRRSRAGKLTRQGSPQLRWALYESAQAACRPTSPDRADYLALKERGLSHPRASLTIARKLARRCFHTLRELGPRALEPVG

SEQ ID NO: 322809 - protein, 356 aa, unidentified
MSRDIKYIGMDVHKEATVIAVLNGSGKLVMESIVETKASSILQFIHGLRGELHVTWEEGTWAAWLYDLLQPQATQVLVCDPRRNAFLKEGNKSDKIDARKLADLLRTGMLRPVYPGEHGLRTLRELGRSYQTISQDLNRVMNRIKALYRGWSIPCAGTQVYAPRYREEWLHKIEHAGVHRRAELLYQQLDGLQALRRTLRPELLAESRKHKASKLLRQIPCIGPIRAARLLALMQTPHRFRSKRQLWTYSGLGIETRDSAQYRFVRGQLQRAKKPQQIRGLNRNHNHEMKEIFKGAATRASCGVSPLRDFYVALLDKGMKAEMARLTLARKIAAIALTLWKKEERFDAEQLKLQAA

SEQ ID NO: 322810 - protein, 430 aa, unidentified
MGLIVPSTIHPAREDQPLPYEWFVGIDWGSQRHQVCVLDRDRRQVGERVVDHDGASLARLADWLWTLSGGQPQRVAVAIEVPRGAIVEGLVERGFHVFAINPKQLDRFRDRHSVAGAKDDRRDAFVLADSIRTDQPSFRRLQLDDPQLLRLRELSRAEETLLADFRRSANRLQDQLHRYYPQMLKLCSAADASWLWELIDLAPTPAHAALLSEEQVQRVLKAHRIRRVKAQEVLTCLQAPALPVAPGAAEAAQAHCAFLLPCLRVLAEQLQACSQQVSALLRALAQEPGEGEGPSDVAIVLSLPGVGRKITAWLFAEAAQPLAERDYQVLRTHGGVAPVTKQSGKRRLVVMRHGCNPRVRHALYHMARVAMQHDAHFSSVYAALRAKGQRHGQALRNLGDRLLRILMAMLRERTCYDATRIRREPVVQMG

SEQ ID NO: 322811 - protein, 420 aa, unidentified
MRSIALDVHRDFCEVAIKDESGLRLAGRVKTAPEELELFARSLAPDDQVALEASEPAGSIARILEPHVGRVLIANTRKLRAIAESKVKTDELDARTLCELLAAGFLPAVWSPDEFTRALRRRLQRRAKLVRARTRAKNECHAVLARNLKGKPPMSDVFGKKGRRWLAALQLPADESETVACCLREVDFLDSEIALVERELAARALSCQEIRRLMSVPGVSLVSAATFVAVVGDARRFSSPKKLVSYVGLDPRVRQSGEAPARHGRVSKQGSPEARHMLCEAAWVAIRTPGPLRAFYERVRARRGTQIALVASARKLSVLFWHLLTREEDYAFERPTLTRRKLRGLELKVKDGRRSWPSGHAVGTKEEREREREFAEQVETAYRRLVADWQPKARRSGAGATRGRASSSHLLDEETAARQG

SEQ ID NO: 322812 - protein, 346 aa, unidentified
MEYFIGIDVSLEASSVCVMDQGGAVVKETKVLSEPDALIAFVHGLDHEVSCIGMEAGPLSQWLYKHLTEAGLTIVLMETRQVKGALKAMPIKTDRRDALGIAQLLRMGWFRPVHCKSVSSQEIRALLATRKTLQGGAIAIELSMRGLLRGFGLKVGLVSKGLLDARARELAEGNSTLKALVTSMLRGRAALRAELIRIDKRLRDVARTDDACRLMMSVPGVGPLVALTVKAGIDDPGRFRSSKMVGPHFGLTPRRDQSGERDVVGGISRAGDAGVRTALYQAATSMLYHSSKNSWLRAWGMRVAQRRGMKRAVVAVARRLGVVLHRMWADGTVFRFSLADHPAKSV

SEQ ID NO: 322813 - protein, 343 aa, unidentified
MEAITTIGLDIAKSVFQVHGIDAEGNVIFRRQLKRRYVLTFFQKLPPCLVGIEACASSHHWSRELQALGHTVRLMPPAYVKPYVKRHKNDATDAEAICEAVTRPNMRFVATKTPEQQSCLTLHRTRHLFIRQQTSVINAIRAHLAEFGIVAPVGRQGVEQLLGVAADTNDKRLPEVARACVAALGAQLRMLKAQILQFDRMIRAWHRSNEESRRLDDIPGVGPALATALVASVADPKAFRSGRDFSAWIGLVPKQNSSGGKDKLGNISKRGDRYLRSLFTTGALAVIRYAKIHGTKHRPWLTALLTRRPTKVAAIALANKIARIAWAMMAKGERYKEPAALAA

SEQ ID NO: 322814 - protein, 405 aa, unidentified
MSTQVFCGLDWATQTHAVCIIDTAGQVLERFEVSHDHDGLAALAHRLARYGANLRIAIERPSGLIVDALVEAAHQVFAIHPNAVKASRPRYRSHGAKSDASDAYLLADLLRTDGHRWSALSPQSDSIRALRALVRARDDLVATRIALANQLHSTLDAFWPGGARIFAAVDSPIGLAFLKRYPSPASAAGLNESRLQRFCRAQHYSGRRSPAELLGRLQAAARGMAPALTAQAMADVVLSLVDVLTPLVEQIAALTHRIERFIESLPDGQIIMSFPRAGHICAAQILAELGDVRERFPSDDRLAAEAGVVPVTYQSGKTRCVSFRWACNHRLRKAITCMADNSRHTNLWARGLYAAARQRGCDHPHAIRILARAWLRVLWRAWTDRKTYDASLHLSALKATSSGGG

SEQ ID NO: 322815 - protein, 377 aa, unidentified
MTKIRFVGLDVHAETIAVAVAEKDGEVRSHGIIPNRLESIRKTMAKLGPSKDLKCCYEAGPTGYVLYWQLTQLGVACEVIAPTLVPVKAGDRVKTDRRDAEKLARCYRAGELTPVWVPDAEHEALRDLVRAREAAKKDQLRARHRLGKFLLRHGKRPTDAGKAWTKKYLEWIKTHVRFAQAALEATLQDYLDEVDHVAERIGKLEKAIDAAVAQASPEIRAVIDALQALRGVAQISAATIVCELGSLSRFESPRQLMGYSGLVSREHSSGGKIQRGAITKTGNAHLRRVLVEAAWAYQHRPNVTGYLLRRQKSLELADETKQIAWKAQHRLHKRYKALAARGKNKNQIVTALGRELLGFVWAIAVHTEAQYRQAQAA

SEQ ID NO: 322816 - protein, 394 aa, unidentified
MEPLCSLPDIGQNQRKKVFKKGEIMSIKRILVNQIDTNLEYEVIGIDLAKNCVSAILLTTDGEIFGIDRLDYQELEKSAQELSPTIFAMEPCTEMNYMVQKLEDWGHQCIVISGKNVKDYVESHFSNQKTDLNDAQALAFLTKDTQLRTVKAKDPEQLKYASLTTLREQYVKQYRQTMVSLKGICQVWGLNISKGISGKARLKDMIENHADFPAELRTALVGMVAHAQAVQKDLKSVTKILEELAKKDKACQLIQTVPGLGTICSCRLRATVGDIKRFKHPKDFPAYYGLVPRSMATGHNEKKGKITHRGDKTMRSLMVQGAGIVINQATKGNLNSKQLTKWILKKQKEKMPWGKLVCAVAAKLLRIVRAILISGKPYNPKIAGVAKCSLPKAS

SEQ ID NO: 322817 - protein, 340 aa, unidentified
MTITTVGIDLAKNVFAVHCVDQNGKAVLVKPKVSRAALPELIAGLPPCVIGMEACSGAHYWARLFRRYGHDVRLMAPKFVSPYRMAGRTGKNDAADAIAICEAVQRPYMRFVPVKDESQQAMQCLHRTRQGFIQERTATYNRLRGLVSEFGIIAPQSTDALRHIVSDQRETLPVQVRLCIDDLLAHITNIEEKIAEYDRVLSRVAKTDHRSQQLMELKGIGPTTASALVASIGNAHDFKNGRQLAAWLGLTPSQYSSGGKSKLGRITKAGDSYLRTLLVQGARSVMIGAENRTDSFSRWVCSLIGRRGYWRAVVAIAAKNARLCWASLHYGDDFKLYSAT

SEQ ID NO: 322818 - protein, 348 aa, unidentified
MQYASVNTEYFCGVDLHGDTIFMCIMRKDGSIVLHKEVPCDGKQFIAPLKPYRGEITVGCESTFNWYWLADLCDDNSIPFVLGHALYMKLIHGGKSKDDAIDCRKMADLLRTNFFPIAYAYPREMREVRDLNRRRIKFVNHHSALSRHVKVLLYQEGHHDFPSGLVKGKDIRKQLLAYKVSQSVAMSIEYDLQLMEKLDELISKIEWHTKKKANHFDSHSYALLGTMKGLGIVLSGIILYETHTIDRFKTAQRYSSYCRVVKIDRSSGGKRLAPKNAKIGNPYLRWAFGQLATSAQRFYPEIKTLTERLVRQVGSKRAYARLAHKFAVAVYYMLKNKEPFDVARFVQA

SEQ ID NO: 322819 - protein, 326 aa, unidentified
MHIASIGIDLGKTTFHLVALGERSRVLFRKKFSRTQLLAYTANLRPSLITLEVCSGAHFLGAALREQGHEERLIPAQFVKPYRKSNKNDFLDVEAIAEAVTKQNMRSVPIKRQEQLDVQALQRVRDRLVQRRTALINEIRGFLLERGITFPAQPIHLRKNLPAVVEDAEQNLTPRLQGLLDRLWQEWKQTEIDIQTITDEIERVSNEDERCQRLRQIPGFGSLVSTALVAAIGNGERFAVGAISRPGLGSCLDSTPQEASKKLFGMSKRGNIYLRRMLIHGARAVLFRIKHDTAGLGQWVHRLSQRAPRNKFPKSLSPSETLNTVL

SEQ ID NO: 322820 - protein, 368 aa, unidentified
MRIIGCDLHARQQTLAMLDTTTGEVVKITLKHEGDSVREFYSRLPRPVRVGIEATGSMQWFLNLMEELEIECLVGHPAEIRAAEPRKQKHDRRDADLILKLLTENRFPAIWLPSKELQDLRSLLRHRHQWVRMRTRIQNALQSIALANGLRRGPSLWSRDGQSRIASLPLAPHTAYRRSELQAMYEKFEAEIEKLNQRVQEQACGRPGARLLMTHPGVGPVTALATDVFLGDPARFADSKALASYAGMIPREYSSGGRQRLGGLSKQGNPLLRFLWGEAGAHAVRRDPELQRFYRRKLVQKGLGKASVAVARKLGIRLWIMLRDQIEYHEFCHRGQKQQKSSGACAGMPETRYGAKSHRPVDKATRLP

SEQ ID NO: 322821 - protein, 343 aa, unidentified
MKLIRVGVDLAKNVFQVHGIDRSETPVWRRKLSRANWLETLLETIEPGCLIGMEACGGAHHWARRLQGHGFKVRLIAPQFVKPYVKSNKNDANDAEAICEAMSRPNMRFVSVKTVEQQDIQAVHRVRFELSNQRKAKANQIRGLVGEYGLVAPKELAQLRVAIPGWLEDAENGLTDRFRRLLNGLWHDMLALDQRMTELDREIAQIAATDPVAKRLQQLCGVGPMIATAMVATVGDVKHFANGRQMAASLGLTPRQNSSGGKERLLGISKRGDAHLRTLLIHGARSALRTAKDKDDRLSRWVTRIAQNRHPNVAAVALANKTARIAWAMMKNATDYQPDRVAK

SEQ ID NO: 322822 - protein, 331 aa, unidentified
MTPFIGIDIAKDKFDVCVLREGHEPQAATFDNTPSGFKQLQRFLKKRQAQRSPAAMEATGVYYEELAHFLHQQGYPVSVINPLQIKAYAQSQLRRNKTDRVDAALIADFCRTQQPPLWNPPDPSWYVLRTLVRHLADLEEDRQRQRNRLAAVKSAARPTPLVVQHLQQQIDFLSQQIKTVKQQIQDHIDQYPDLQAQRDLLDSIHGIAQLTAAKLLAEYGDLRQYANVRQVVAFAGLNPKHHQSGSSVRGKTRISKIGQPAIRAALYMPAMSAIRTNPLLQPFVHRLQQRGLSNMEIIVAVMRKLLHFAFGVLKSGLPFDPHFGEKRAAFA

SEQ ID NO: 322823 - protein, 339 aa, unidentified
MLYVGIDVAKNKHDVTALNVPGKTVLKPLTFSNNKAGFELLDLSLRQLNQDCLIALENTGHYAFNLLNFLHEQGYKVYTYNPLLIKEFAKSLSLRKTKTDKKDAHGIALKLLSNPNREQFQHDNRQVELKILARHIHRLKKKQSDWKVQYTRCLDIIFPELDKIVGKHSEYTYQLLTRYPNPQKRIEAGFDKLIEIKRLTASKIQDILSVAPRSIGTTSPAREFEIIKHYKRLIDKAETCVNDLMAEFNSVITTVTGIGNRLGAVILAEIRNIHAFDNPAQLQAFAGLDSSIYQSGQIDLAGRMIKRGSPHLRWALIQAAKACARFSPAFKAYLKTKLE

SEQ ID NO: 322824 - protein, 277 aa, unidentified
MGLYCGIDLHSNNHVLTVIDEADRRVYERRLPNRLAITKAALEPYRAELVAVAVESTFNWYWLVDGLMEAGYTVRLVNTAAVRQYEGLKHTDDEHDAFWLAHLMRLGILPTGYIYPKSERGLRDLARQRMRLVQHRSSLITSVQNQVWRSTAVRLRSETIKGRGKQPWPEISDPDLALSVKVGRAAIDTLTVQIERLEKLILKRVDLWPQFRMLKTVTGIGPLLAMTIALEVGDIGRFSGVGEFASYCRCVDSQRLSNGKKKGEANRKCGNRYLELE

SEQ ID NO: 322825 - protein, 442 aa, unidentified
MNSLPVLNPKAAAIDVGSEHMHVSVAGGPPRVFGSTTTELHALRDYLLEQGVNTVAMEATGIYWLCPYEVLEKAGLNPIMVNGKYVRNLLGRKTDMSDCQWQATLHAHGLLRAGFVPPDHIRRLQDYLRLRADHISSGATSEQHMQKALERMNIKLHDVISDLTGVSGLKMVRAILEGERDPEKLLALCDPTIQKKKAKRVCEALRGTWKDEHLFALRQALAAWEFYRAQIAECDQALEEVLKKMTEHKADPHGEVPKSDRKKKSNTPQIDGLLEMLWKICDGKNATKLPGISEYTLLRLISEVGTDLKAHWEDEKRFTSWLGLAPGTHQSGKRRRSQKRSTNKAGRILCVIAQAVGKTNDRALGGFYRRIRSRSGGLVATKALARKLGEMFWRVMVHGISYVEQGLVKYEQKVLQTEQMTLARRAKKLGLELIAIQKPMKT

SEQ ID NO: 322826 - protein, 400 aa, unidentified
MKYYTSTTEYNCGIDLHARQMYVCLMDRQGKILVHTNVRDNDFNFFLKLVEPYKHSLTVCCECMFGWYWLADACQDVGLTFVLAHALYVKAIHGGKNKNDRVDSEKLTHLLRSNLIPPAYVYPADKRPLRALLRQRLFYVWRRSEFLARISSHQLAHNRIPVKQTRRVRDSWEEALLKAEDHPLRQIALKNDLAMIRHFDTQIGQLEAELQRQTKQVASRDYALLQTVPGIGESLGLTILYEIGDISRFPTVKDFLSYCRLVKGTVASAGKIKGLRGAKLGNPYLRWAFGEAAVIAKRDHHLVGPLSQRLEAQMGGNKFKANTVLAIKLARAVYFMLKNKTVFDPERLVASMQKCFSPGRRQPGSLTGRAKKAMPPPVPEDASCAPSTALCVGQASSPAH

SEQ ID NO: 322827 - protein, 356 aa, unidentified
MSEGSCVGLDVHARSVVAGVIDVGSGGVRSRRVPPGSEATVAWLKTLPAPVRVVYEAGPTGYGLARACAEAGISCVVAAPSKIRPAADRVKTDRRDAERLARLLRLGEITAVRVPGPEEEAARDLVRAREDARGDLMRARHRLSKLLLRHGAVYDATAWTRAHDAWLRKQRFQGGPLAIVFDECYSRMMDAKTRRDTLDKAITELAASEPYVDVVERLVCLRGVSTLTAFALTVELGDWNRFRPESLGPFLGLTPSENSSGQRRRQGGITKTGNTHARRLLIEAAWHQRSAPRLSITLERRRTGKSLAVRAQADSSARRLHGRWHALEARGKPRLIVVVAVARELAGHCWALATME

SEQ ID NO: 322828 - protein, 355 aa, unidentified
MNQEKYIGMDVHQATISVAVMDSSGKLIMECILETKATTILEFIAGLRGTLSVTFEEGTSAAWLHDLLKPHVSHLVVCDPRRNALLKDGSKSDRIDARKLAELLHGNQLHAVYHGEHGVRTLKELGRSYLTITKDLTRVMSRIKALYRSWAIPCSGATVYAPRHRAEWLAKILEPGVRLRAERLYQQLDLLQPVRQEARRDLLVESPKHHAVTLLRQIPPIGPIRAALLVALLQTPHRFRTKRQLWAYSGFAVETHDSGEYRLVRGKLVRNRERITVRGLNHNHNHDLKNLFKGAAISASTRPGPLCDFYVALVEKGMRPTMARLTLARKIAAITLTIWKKGVEFDAKQLNRQAA

SEQ ID NO: 322829 - protein, 317 aa, unidentified
MDQIIERAFGIDVSKDFLDLATSPTSPVQRLAHDSAGIEAIVEHAQRDRPDRIVVEATGGWESAVVATLAHAGLPVVIVNPRQVREFARASGQLAKTDQLDARMLCAFALAVKPPLRPLKDEQAQLLAALVTRRQQLLQMRTAEKNRLALSTPGLVQRNLKEHIKWLDRHLKDTDRDIEQLIKVTPLWCDTERLLEQIPSIGRITSRTLIAQLPELGSLNRKQIAALVGLAPFNHDSGTLRGHRIIWGGRAEVRQVLYMATMSAIRCNPPIRGFYRRLRANGKPGKVALVACMRKLLTVLNAVVRDRQPWSLAMLDS

SEQ ID NO: 322830 - protein, 337 aa, unidentified
MLYVGIDLHRRTSRIVTMDEGGKVLSQRTVASDRASVAEAFDRIPRPVEAVFEATWGWGWLADLLEEMGVPAHMAHPLQTRAISSARVKNDAIDARTLAHLLRTNMLPESWIAPPEIREARRQVRMRVALGRIRTGVKQQVHAVLGEHGIRLEVSDTFGVKGWKELEALELPEFSRLRLDSCLRLIRSLDWEIEHADFELLTRFGADDRVARLRAIPGIGFLTAVTVIVEVGDISRFGSAAQLCSWAGLTPREHSSAQNIKRGHISKQGSRWLRWVLVEAASTNKACKGEDLRDFQQCIAKRRGKMIARIAVARRLLTLCFYALKSEDGCRAYPLLR

SEQ ID NO: 322831 - protein, 413 aa, unidentified
MEVMYPRCAGLDVHKDVVVACARVAVDGRVTQEVRSFATTTKALCELSSWLEEQRCTHVLMEATGVYWKPVWHMLEGTFELVLANAQHIRNVPGRKSDVNDATWLSDLLAHGLVRASFVPPTPIQEVRDLTRTRKQLAREVIQHTNRIEKVLEDTNIKIASAISDVLGKSGRAILNALVAGETDPEKLLALCSGRLKASRKVLIEALRGRVTDHHRFLLKLHLGQVDLLQQGMRDLEARMGESLEPFRHHIENLTTIPGISDVSAHVIAGEVGLDMSRFPTAGNLISWAGLCPHLDESAGKHRSTRIRKGAPWLKTTLVSAAWAAVKTKGTYLQAQFRRLRARSGAKKAIIAVAASMLTAAYHILRDGVPYKDLGPEHFTRRNKEHAAKRLKKRLEDLGFTVEVRPAEARVSS

SEQ ID NO: 322832 - protein, 356 aa, unidentified
MSHEVKYIGMDVHKEAIVIAVLNVSGKLVMETIVETKASSILQFIHGLRGELHVTWEEGTWAAWLYDLLQPQVQEVVVCNPRRNALLKEGSKSDKVDARKLADLLRTGMLRPVYHGENGLRTLRELARSYQTISKDLTRVMNRLKAVYRGWGIPCGGTQVYAPRYREEWLNKLPQAGVRRRAELLYQQRDGLQALRREVRGEFLAESRKQKAAKLLRKIPCIGPIRAGLLIALMQTPHRFRSKRQLWTYSGLGVETHDSAQYRFVRGQLQRSKKPQQLRGLNRNHNHAMKEIFKGAATRASCATGPFRDFYAALLANGMKPEMARLTLARKIAAITLTLWKKEERFDAEQLKTQAA

SEQ ID NO: 322833 - protein, 338 aa, unidentified
MRLYCGIDLHATNCWVVILDVSFTVVRAVKVPNDLSEVLAVLEEHRDAVEGIAVESTFNWYWLVDGLQDAGYRVHLTNTWAVKQYEGLKYSDDRHDARWLAHLLALGILPEGYIYPKEERPLRDLLRRRAFLVRKKSSLLLSMHGAFECRTGMRVKANDLKKWSAEDVEAHLEDPTISLGITCLVEPMQVLGEQIHRIEKVVLKQARLRDEFDLLQTVWGIGTVLALTIMYEVGQIARFASVGDFASYCRCVKTDRLSNGKRKGSGNRRNGNPYLSWAFSEVAHYAARFYPEAQRYFQRKRAATNGIIGNRALAHKLARASYHVMRDQVPFDPDRLFA

SEQ ID NO: 322834 - protein, 299 aa, unidentified
MFFFWGRPSCKTLRLLVSTSASILSTFTVSDKSGKALLCTKFTRTKLIEFLAGCTPATVVMEACGGAQFMARPITDLGHEPKLIYPQFVRPFVKSNKNDFVDAEAICEAASRPSMRFVQPRTEVQQAMRALHRVRESLVRDKVKTTNQMHAFLLEFGISMPIGVTVIKRLSTVLAENELPPYLAQLLMRLHAHYLYLVEQITELETALEQELSRDETEQRLQTIPGVGPITANVLSSQLGDGKQYSCSRDFAASTGLVPRQYSMGGKNTLLGISKRGDKNLRRRLLTNLDDSILQGEGR

SEQ ID NO: 322835 - protein, 357 aa, unidentified
MPKTTPVFVGLDVHKETISVAYAAGGTAEPPQFVGQIGTRPCDIDKLVRRLQARSSRLVFAYEAGPSGYVLHRHLTGKGLDCRVVAPSLIPKKPGDRVKNDRRDAVELARLLRSGDLTGVYVPSVEDEAIRDVCRARDATRVTLKAAKLRLKSFLLRLGFNYVGRADWNDAHRRYLAQVVCPTPTQQIVFQESLRAVDEQVERLARLEDQLLSLAPSWRLYPVVEALQALRGVQWMVALTVVAELGDLTRFDNPRQLAAFVGLTPSEYSSGASRRQGRITKTGNPRARRVLVEGAWAYRYPAKISAHIQRRIDKLPKSHRTSKSGHEGTLQMRPLRIAGRQYRAPRSRWQALDRIVV

SEQ ID NO: 322836 - protein, 340 aa, unidentified
MEIEILGIDLAKRVFQLHGADRRGHVLHRAKVGRSAFIDAVQELRPRVIAMEACSSAHHWARRFQELGVEVRLISPQYVKPFVKTNKNDRNDAEAIVEAASRPAMRFVTVKSVEQQDIQAVHRVRESLVHQRTALINQVRGLLGERGITIAKSPTAFRRAMPDILKEGEGELTRFCQTLMMELFQEFHALETRIALAETYIKSFMKQSALCKKISAVPGIGPITATAIVAAVGEAKEFKNGRHLAAWLGLVPKQYSSGGKSCLRGISKRGNTYLRTLLIQGARAVLIYVASKNDARSRWLQELILRRGYNRAAVALANKNARLVQALLSGDARYAEATAA

SEQ ID NO: 322837 - protein, 347 aa, unidentified
MKFYTTQHPYYCGIDLHARSLYVCILDANGDTILHREIKALPQPLLDLLAPYIGNIVVGVECMHCWYWVSDFCAEHGIDFILGHALYMKAIHGGKAKNDRIDSYKIAHLIRGGNFPQAYVYPPQMRAARDLLRRRTRIVRHGADLKAHVKNTTSQYNLPPNNLNLRYDFAREAMRNRFDDDCVQRNIDLDLNIIAFYKHELSSVECFIEKHAKHHSSSDYHILTSFPGIGRILALTILYEVGDIARFSTVQDFASYSRLIKCKAESAGKTYGTQGNKIGNAHLKWAFGEIAVLYLRGNDKAKAHLLKLQKRMSKAKALSALAHKVGRCVYYMLKNQKVFDEKRFLAG

SEQ ID NO: 322838 - protein, 405 aa, unidentified
MEQVFVGLDWAEDHHDVFVEDDIGKRLGGGRLPEGVEGVARFHELVAGHVDDPADVVVATETDRGLFIGALVAAGYTVLAVNPMSTSRYRERHSTSGAKSDPGDAKVLADLARTDAHNHRPVAGDSELAEAVKVLARAHQTMIWSRQRHTNQLRSILREFYPAALEAFDELAGRDALAVLAIAPTPTIAKLLSRSKIAAALRRGGRQRRIDERAIEIQTALRAEQLEAPAVVADAMGASVAALVAVIAEMQTQIERLEAELAERFEQHPDAKIIRSLPGLGMTLGARVLAEFGDDPNRYADAKSRKNYSGMSPITRASGKQHVVLARYARNRRLADACYQWAFATLTASPGARHFYDQRRAAGDTHTRALRALANRLVAILHGCLRHHTIYDEHTAWAHRTHIAA

SEQ ID NO: 322839 - protein, 345 aa, unidentified
MNIASIGIDLGKTTFHLVALGEHNKILLRRKFSRSQLLAYTANLPASLIGLEACAGAHFMGTALREQGHQVRLIPAQLVKPYRKSNKNDFIDAEAIAEAVTKQNMRFVQIKTQEQLDWQAMHRVRDRLVQRRTALINEIRGFLLERGLTFAARPIYLRKNLPTVIEDAEQNLSPHLRWLLDRLWQEWKQTETEVEAITDEIERISNEDARCRQLRQIPGFGPLVSTATVAAIGNGSAFRRGRDFAAWVGVVPRQYSTGGKQKLYGISKRGNIYLRRMLIHGARAVLFRVKYDSGGFGQWVHRLAQRAPSNKVVAAIANKLARIAWAVLSSGQDYRHQPLQQLAAA

SEQ ID NO: 322840 - protein, 336 aa, unidentified
MTIIRIGLDTSKHVFQIHGVDENEQAVLRRQIRRSEVAKFFAKLPPTRIGIEACGASHHWARALRALGHEVVLLPPQYIKPYVKRGKNDKIDAEAICEAMSRPTMRFVPVKTTEQQAGLTMLGVRDLLIKQRTMLINAIRGHAAEFGVTVAKGPKQVAELLRRLASDDAVPALAREMGGVLARQLDRLDIKLTAVEKRLIAWHQQDQTSQCLATIPGVGPISGVSFALKVPDPRAFRSARHFASWIGITPREDSTAGRHKLGRISRAGDEDLRRLLVIGAPAVMRAAKPGRSSPWLLALLARKSKKLAAVGLANKMARIVWAMMVSGETYRQPAQA

SEQ ID NO: 322841 - protein, 455 aa, unidentified
MQGCLTFFLSGCSDLVYLKGCVSLSQFLNDFVVGIDVSSEFSIVAMLAPTGELIRKPFRIDHNPVGFHKLLDILKKEEERLKRKPIYFVESTGIFHLPLFFFLKSNDLKGFVLNPLCVHSTKNFDLRKVKNDNKDSEAIARLAKYQDVKVSMMPEPQILVLRMMTREYYAVSDMLTMMKNRLCTDLYLLFPGFLNVFSGPFGKTALAVLRSYPSPRAIREADTDVLTLLISKTSRKSSEWASKKVALLHDCAQLASSMPSEFSMLDTKIKFHIDGIEHMQASLNGIEAQVKTMIKSKEFPTNAKRNIELLDEIPGVGFFTAATLIAEIGDFSLFNSPKALTAFFGLDPSVNQSGKFNGDRNKISKRGTRIGRRILFTVAMASIRRTRNGKEINPVLRDFYASKCVSKKKKVALVAVMHKLLHYIFAVLRDQKPFEFRKPEDHQSWRNTELQPAAA

SEQ ID NO: 322842 - protein, 368 aa, unidentified
MFYLGIDQHARQITVSLRDESGDVVQARQVSTLPEKVHAFFQQLTRERLTAGESFVAVLEVCGFNDWLIRMLQEYHCHKVILIQPEDRKKCKTDRRDAAALSELLWVNRDRLLQGKPVRGLRQVDIARGTDQENRRLTTLRKDAGQTRTRLVNRIRHILRRHNLQWQMPTKKFPTKSGIAWLKQLALPEIDRLEMNHLLADLEQVQGRRQELEQVIARRCGVSAEAVLLSSMPGVSYFTAVALACRVGRVERFPRAASLANYWGLTPGCRNSGESNQRLGSITKAGSSMARWLLAEVTIKVLRRDARLREWFKRLKRRRGASIARVAVMRKLATVIWHMLSRRMTYAACRAAGEAGTKARQEQGCGRE

SEQ ID NO: 322843 - protein, 423 aa, unidentified
MNVVYPICCGVDVHKTFFVATLITTEGIEPKYKKRRFSTFNNEILAFKSWLLENNCRDVCMESTGKYWIPVSNLLEDSVNVTIANPKWVKTISGNKDDAKDSKWIGDLFRIGLVPGSFIPCKEIRILREYTRYRFKLVSHKSSEKNRYQNVFTVCNVALDAVVSDMFGKSASSITDYITSSDTFDPEHCVSLLQRSLKKKADEVVASIDGFQMTDSQKARARMVKGHYDYLLEHIQKIDSMIDELVKPYESYIDLLCTNPGIRRNSAITVISEIGTDMSQFRSSKRLCRWAGLTPGNNESAGKKKSVRITRAGVYLKPALVEIAHAAVKDKKNPYYQIKYERIAKRRGKKRAIIAIARMILTSIYHMMSTGEVWNPSDLNQIDMPPELREKEVQKSLRRAAKLLVAHGLIDPDLIKFTETSAA

SEQ ID NO: 322844 - protein, 404 aa, unidentified
MDVVFPYCCGLDVHKNSVVACVITPDEKEIRTFGTMTRDLLNLADWLTSKGCTHVAMESTGVYWKPIYNILEQYQLELLVVNAKHIKAVPGRKTDVKDAEWIADLLRHGLLKGSYIPDREQRELRELVGYRKSLVEERAREVNRIQKTLEGAGIKLSSVATDVVGVSGRAMIEGIISGIDDPAVLADFAQKKLKKKKEQLEQALFGLVGKHQRLLLAAQLRHIDYLDQEIARLDQQIEERMRPFEAELALLDTIPGVGRRTSQVILACIGADMSRFPSAAHLSSWAGVAPGNNESAGKRKSGKTTKGNTLLHTTLIQAARAASRTKNTYLSALYHRVAARRGANRAAVAVAHSILVSVYYMLIRRVPYHDLGGDYFEKRNSKAVVNRAVKQLEQLGYRVSIEVA

SEQ ID NO: 322845 - protein, 427 aa, unidentified
MDLIYDCCAGLDVHKRTVMVCVNRYDRGAGKVRKEVREFGTMTEDILALGDWLREQGVRHLAMESTGVYWKPIYNLLEDAFEVLLVNAQHIKKVPGRKTDTKDCEWIAELLQHGLLRGSFVPPRPMRELRDLTRHRVQAVGDKTRVVNRLQQVLEDANIKLGSVASDVVGVSGRSMIEAIIAGEEDPEELAELARRRLRGKIPQLKHALRGRVTAHHRFLLETLYEQLKSLEATIERLTRRISAVMAQETRSTEEKESGVLPFDRAATLLTTVPGIGRVAAETILAETGTRMAQFPSAAHLASWAGISAGNNESAGKRKSGKTPKGNRWLRRILVQVAQAAGRSKNTYLSAQYRRIAARRGRKRAAVAVAHTILVIVYHMLRTAAPYHDLGPNFFDQLDPQRLTRYLVKRLEALGNKVTVEPLEPAA

SEQ ID NO: 322846 - protein, 351 aa, unidentified
MVVFGVDPHKHSHTVVAVDEASRKLGQLTVSSAQDGQLRLLRWARQLGSDRRRWAVEDGRHVAGRLVAQLLGAGEAVVWVPPKLMAQTRASGRTRGKSDPIDALAVARAALREPGLPAAQLPGAALAVRLLVDHRDDLVAERTRMINRLRWHLHALDPELAPPVRTLDRLWVLDRLAGQLAGLEGVRAQIAVELVAAVRQLTGRINQLERDLATQVAPLSGQLRQVVGVGALTAAKLIGHTGGVGRFGRSARFAMHAGVAPIPVWSGNQTRHRLNRGGNRQLYAAIHRVAVTQLRGHPPARALMERRMAAGSTKPEALRVLKRHLADVLYAAMCIDEQTTSLKHAGQPAAA

SEQ ID NO: 322847 - protein, 425 aa, unidentified
MNYKQNEKINQVKESTLVVGIDIGSTTQYARAFDWRGIELGKVFTFSNSREGFESFKAWMQHLQDKYRKSDVIVGIEPTGHYWFDLGAYLEDEGILLVMVNPYAVKQTKELDDNSQSKNDRKDPKVIAKLVTEGRYSAPYTPDGMYADLRIMVANRKRLIREMTQIKNRFARWFAIYFPEYTDVFGDYEAQSSMLLLKKVCTPEAIVELGAEKINQIWRDAKLRAVGMKKATTLCETAKRSIGLKKGSSAARYEMKLLLEDYEYKKAQLDAVMEEIEKLCRKIPESEQMLAIKGIGVITVAGFLAEVGDVRRFESPRQIQKLAGLSLRENSSGKHKGQTTISKRGRSKLRAVLFNAAIPLIAKNPEFKSLHEYYTTRANNPLEKKQSVIAISCKLIRVFYAILANGVTYDAQKLLSDIHRQPQVA

SEQ ID NO: 322848 - protein, 389 aa, unidentified
MPSVSERPEAPTAIQTHLAASFVSLELSRSIWLITSLSPGSGEKMSKHSVRAGDVAALLARFSELKRKASERTGKSFPIVVIQEAGLDGFWLHRVLQSEGVESHVVDPSSIATSRRRRRAKTDRIDGEALLRALLAYKRGEPRVCAMVKAPTPEEEDRRRLCRERKVLIAERVKHVNRVKGLLFSQGISGYEPLRRDRRQRLDELTTGDGRPLPVHLKTQIRRELDRLELLLDQIKEAEAERDALLAAPQPAAPAPAGRMLLEFKGIGAELAAVLWLEALFRHFDNRRQLASYAGLAPTPWQSGSVDHEQGVSKAGNPRLRTSLIQLAWLWLRHQPQSALTLWFKERVSGNGGRFKKSTIVALARKLLVALWKYVTAGVVIDGAVMKDA

SEQ ID NO: 322849 - protein, 342 aa, unidentified
MHVKTIGVDLAKNVFQVHGVDSAGKVVITRQLRRKQVLEFFSKLPGCLVGMEACGTGHYWAREISKFGHTVRLMPPRYVKGYVKRSKNDAADAAAICEAVTRPSMRFVPIKSTDQQAVLMLHRTRDLLIRQRTQLINALRAHLAEFGLVAETGREGLAQLGAIITDESNHEALPSAMKQALQAIVDQLAALELQVGALDRAIHAHHRANDMSCRLETVPGIGVIGATAIASTVADPSGFKSGRDFAAWIGLVPRQHSTGGKERLGGISKQGDRYLRRLLVIGATAVVRHARQHPQRHPWITRLLAKKPAKLVAVAVANKMARIAWAIMAKGGYYRPPELAAA

SEQ ID NO: 322850 - protein, 455 aa, unidentified
MSRKPKDNKKKIGAPVLHCLNRNAAGVDIGATEIYIAVPVDRDPQPVRHFSTFTEDLHAAADWLKACNIETVAMESTGVYWIPLFQILEARGFTVFLVNAHHVKNVPGRKSDVSDCQWLQYLHSVGLLNGSFRPEQAVCTVRSILRHRNDLVQMASSHVQHMQKALNQMNLQLHHVISDITGLTGLAIIEAILAGERNPRTLAALRDRRIKASEDTVAKSLVGDYRREHLFTLGQSLEAFRHYQHLITACDTEIEQYLEAFESKVGPPEGSTPVSPEEPKGREPSFDLKSHLYRIFGVDLTKVPGINVLTSQILLAEIGPDLSRFANGSAFTSWLGLCPDNRVSGGKVLSVKTRKVKNRAATALRMAAHSLHHSQSYLGHFYRRMRAKLGAPKAITATAHKLARIIYHMLATRQAYDETIFELQEQNNRWRLELKLRKQARELGFEVVAAKPVGL

SEQ ID NO: 322851 - protein, 422 aa, unidentified
MDGLPELVKDDDKEARGLATPEQVDVWVGLDVGKEEHFAEVLDNDGERVFARSIANDEAALEALLDRACEHGTAGLVIDQPGSIAQLALAVARRRGVPVAYVPGLVMRRAADLYPGEAKTDRRDAYVIADTGRTRRKQVHWLDAGSDELLERLRALNGFDIDLAADQTRLTNRLRDALTSVSPALERAVGSRLNHAGVRDLLAKYPTPSALRAAGRARIARAVKARSPRLAAKVTDDVVAALDAQSLTLPAEATIGRVVAELAVELDRVFVRRQALGTEVEEVFMAHPFGELLSSMPGVGARTGSRILAEIGDGSRFDNGDKLASYAGLAPVTRQSGKSVNGGSQSRRGNHRLKNAMFLAAFASLRAPESKAFYDRKRAEGKKHNAAVICLARRRCNVILAMLRDRQLYVAGYPSTALAEAA

SEQ ID NO: 322852 - protein, 346 aa, unidentified
MRYSTTVGVDLAKNVIQVSVVNGRGKETLNRSMSRKKFAEFLGKQKRSVVAFESCATAHYWARAAERHGHEARIIPAKAVAPFRQGHKTDSNDALAVAEAARRPNIKEAPVKTVEQQGLQAMLRARDRLIQECIAQSNHLRGILLEFGIAIPQGFASLLRTLPEVLEDGDNELPDFYRPTLHRLYHRMLELREDIDAMTKEVGELVKQHPVCSKLTVLEGIGPIGAMSLYATLGSGHAFSKGREASAYVGLTPKQYSSGGKANIVGLSKKVGNRKLRSVLIQGALAYVYRMKEPRSCKDRWLKELIERAGPRRAAVALANKNVRTAWALIAQGTEYQRRLQLEVAA

SEQ ID NO: 322853 - protein, 370 aa, unidentified
MTFVGIDLHTNKFTCCYRNEKSPFDEKDSKRIETFELTAIGLAQFYKTLTEDTYVLLEATITSFSFVRLIQPKVKEVIVANTYELKQISFARNKTDKIDADKLCRILKMQVLSGEKTIFPVTIPPKEIQELRGLFSTYRLFKKQSTQFKNRIHSLLKENLYGLTQEQIFGKSSRKKIREKEYDPVLGFQINHLFGLLENLEAGIEILEDKIKEQAAPFINEIEILTSMKGISVLIAIAIISDIINVDRFKNSKSFTSYLRSAPRVESSNTTKGNKGTNKKGRKLSATLITQVLYHVLDASPKLDKWYTRLTRYKKAGLVRTGLRRRVFSEIYQMLKKHEYHYGRDVKKHREKIIQYKKLLEKRNILFKSA

SEQ ID NO: 322854 - protein, 321 aa, unidentified
MQQQSQWVGIDVSKATLDVYIRPIAQQFQVQNQALGIADLVKRLQAFEIEQVVVESTGGLELEVAQALQDVGIAVSIINPRQGRDFAKASGKLAKTDRIDAAVLAHFGEALQPPISLLASDQNRALQDAVTRRRQLVEMLSAEKNRQASLRGTMRQNVDLHIEWLEERIGDLDEKIEELSQSQVEWQSRIALLKSVPGVGPVIATTLMAALPELGAVSDKRISALVGVAPFNRDSGKFRGSRMIWGGRANVRAALYMGTLVAVRYNPVLKAFYERLLGQGKAKKVALIACMHKLLRILNAMIRDLKPWRVPEGLQSDEICC

SEQ ID NO: 322855 - protein, 398 aa, unidentified
MTARVTQLFPIIYVGIDVGSDIHSIAIANDSGELLKEFEIKHNYQGFKKLLNVLAKYDSSECLIAMEGYNGWARPLDEILLKKGYKLYNVNNLKLNRFKEIFPASAKTDKIDARKIIELFILKKHLTIAKDVLQEIRVSNNTHQKLKKLTRRRKQLIKERASITNRLGGELQAQVPELKAIAPRVDTNWFLTLLTLKEDIRDLKHLKAKTFKKIKYIKDEYIEQILKWQKESNFSEEIEYISEIIYEDAIRVLELNSKIKKLDKQISMTLEDSKMAKRIITIPGFANITASELSGEIGDIDRFKSEKSLALYLGVTNLDKSSGKQKGSKTNKASNRHAKIAILTATRLHAMRVKESKDYLDKKIKEGKKYQQAIRSLARHLVRVIWKMIVEDRDYEIR

SEQ ID NO: 322856 - protein, 319 aa, unidentified
MFVGIDVAKAEIVVSVLPALERFSVANDERGMRTLVERLRPMQPQLVVLEATGGYELLSVAALVAAQLPVVVVNPRQVRDFAKATGQLAKTDRIDADILARFADVVRPTVRPIADTEAQELEAVLTRRRQLLEMLQAERNRVGQVFGKGKKTVRKSLQLHITYLEHELQRTDTHLGDMIKRSPAWRERDALLQSVPGVGPILSRTLLADLPELGTLSRRAIAKLAGVAPLSRDSGTRRGRRFVQGGRSTVRAVLYMAALVASKHNAVIMQFYQRLVAAGKPKKLALVACMRKLLTILNIMVRTQTTWNQSINAEVLVSA

SEQ ID NO: 322857 - protein, 458 aa, unidentified
MRRKGKRTKGMEVAHPFAGMSQVNPNAAGVDIGAVEIVVCVAGENNTQIVKAFGNYTVDLQSIGTWLKEHKIKTVAMESTGVYWIPLFEVLESMGFKGLLISSRSLRRVPGRKSDIEDAQWIQTLHSYGLLESSFRPQADLVALRTMLRHRAQLLEHRAPHIQHMQKALLQMNVQLSQALSDVMGETGQAIIRTIVKGERAPQLLAAFRDPGCKKSEEEIGKALTGTWRDEHLFVLKQSLELYDFYTQQLEVCDQEIDRQYALIRPDWETGELPPIPKKKQKTHSKNGPENAKEIRLHLKRINGVDLSLVDGFGVSLAQTVTMEVGSNVSEKFPTEANFCSWLGVAPKHEISGGKVLKDKTLKTKNRAGQAFRMAAQSVKNSDSVFGVMYKRFRARQGPAQATVSTAHAIARVVYRMLKYQVEYETISVNEYEKKYEEQQVKYLKKKAAKLGFQLVPA

SEQ ID NO: 322858 - protein, 396 aa, unidentified
MLKQRKASVQNEPAVGKLAERSEARFPTAAGDRSFNPRSNKTAKKPDRRRFHEISPNSRKSRRSAGRRASSHSQGRDIVMDVAFTSFVGIDIAKRTLDVHVLPERRSLQHSNDSKGRRQLREQLPPPGLCLIVVEATGGYERALVAELIDAGYHVAVINPRQARDFAKACGHLAKTDRIDAAVLARFGEAVELRIQAKIPEKQLELQDLVARRRQLVQLRAGEMNRQQQAISKPVRKSLQETIDLLTKQIRRLEKHIAALVQSDDEWKQKTQIVQSVPGVGSQVSASLVSDVPELGRLNRQQIAALIGIAPFNCDSGQFRGQRTIRGGRISVRCSLYMAALSARRFNPVIRAFADRLAALGKKPKVILTACMRKLLVILNTMVKNKTVWNPEISTI

SEQ ID NO: 322859 - protein, 451 aa, unidentified
MKAKKVSALRSKRGLHRVNGAEPQVVGLTPQTTDERKTDTMKTYILRQPEPVEPQKVIRAARPKTAAPATTAAPPMSVHGPVLFIGLDVHNDSIAVSLAPSGTTEVRRYGIIGGEHDDVLKLVKKLEAAHPGTALKVCYEAGPRGFALCRCLREHGADCILVCPSKVPRKPGERVKTDRRDADDLARLYRAGELTGIYVPEPEDEAMRDLLRARFQVGRQQHRARQQLKMYLLRHNLRYGGTTAWSPAHLRYLAKIKMPFPVQQIVFQEMLDVISEATARLERYDQEIERAVPGWRWAPAVRALMSLRGMALLHAATLVAELGDFNRFEHPGQLMGYLGLVPSEHTTGKDRQQGGITKMGNAPARRALVEAAWQYRVPARLSPHLKKRQEGLPKAVTDIAWEAQRRLHHRYTHLTRVGKKKSQVAVTAVARELTGFVWAIARQVQPVAANP

SEQ ID NO: 322860 - protein, 372 aa, unidentified
MNNTTVYVGMDVHKESFTLADYTIETEKSSHTRRTIADYKEVLKYLEYLRTIYGNDANFICGYEAGCLGYSLYHQLTKYNVNCVILAPTTMLEIRTYKRIKTDKRDAELIAKCLAQHNYSPVHIPTAVDEQTKEFLRMRNDHKIALKKIKQQILAFCLRHGYHYEGKKHWTGAHLKWLEALELAELYKEILDEYMLTYTTLSDKIERLDKRIEELASTDEYREPVKKLRCFIGVQTHTALSVIVEVGDFKRFESAEKFAAYLGLVPGEDSSGDDTTRLGITKAGNGHVRFLLTEAAQCYGRGQIGRKTKELKSKQAGNSPQVIAYADKANERLRRKFYKMVLGKCKKHNVATTAVARELACFMWGMMTDNIA

SEQ ID NO: 322861 - protein, 397 aa, unidentified
MSNFFVGIDVSKDYSSAQGLDREGKRLFYLEFAMNGEGFSQFLKGLKTHCEDLSRVTVGMESTGCYHINLFAFLCSEGIVCVVINPLLISNFARLSLRKTKTDKKDALTIAQFLLAHRSELSQVSYSQSRQDLKDLARERESLAVMIAGLKNDVRRLLQMTFPELEHRCKLFTETMLRFLIKFPSARTIRTAKPKEISKALIHAEGKRKRVFISAEEIINLAKASVAPDSVAKEWILSEKIETLLYLEEKKGRTTEALVEACRSMRVDELDLVTSVDGISAITGSTFLAELGDIETFRSYKHVIAFAGLDPSIHQSGQYEGISRLSKRGNRHLRRVIFLMTLCAVRSQNVFREYFLKRKEEGLPPKKAILATAHKLLRVLYAMLTRKSYFRREVVEA

SEQ ID NO: 322862 - protein, 411 aa, unidentified
MEVVHVRCAGLDISKRDAKVCVRVAGAGRRKAVETVTTWGSTTNQVLALREHLISERVSCAVMEATGDYWKPFYYLLDDAGFEVLLVNARQVKNLPGRKTDVSDATWLAQLGAHGLVRGSFVPPEPIRQLRDLTRARTAITRERGREIQRLEKLLEDAGIKLSSVASEITGVSGRAMLEALVAGDDDPAALADLAKRRLRSKIPALTEALTGRFTDHHAFLARVHLDLIDRHTTAIEEITARIEVVIEPFQGFRELISTIPGIGPINADVIVAETGADMTRFPTAGHLASWAGTTPGCNESAGRVKSTKTRPGNPYLQGALGAAAMACAQNPGTYLGARYRRIASRRGPMKANVAIQHSMLIAIWHMGRDGTLYQDPGAEFFTQLHPERVKNRALHQLEAIGYHVTLDRVG

SEQ ID NO: 322863 - protein, 376 aa, unidentified
MQAAQVKGYEVKAVLYMAMELSNSKWKLGFGNGTKLRRKSIKARDRQGCLEEVALAKVKLRLPTDAPVVCCFEAGRDGHWIYRWLESEGFEVLEIDSSSIETARGRKHVKTDRIDVEKLLDLLIRHSCFGLRRAFRVVRVPDVAAEAGQRLHREDEYLLRQRTRISNRIKGLLIAQGLDEMSLRGDFARYLERARLWNGEGLSAELKRELMHMHAQYAVFDSQLRELAIAYTEELHSDTPLAEKRRRLERLKSLGPKTSRILSAEVFGWRSFANTKEVGAFAGLTPTPSQSGDSDTEQGISKSGNRRVRRVMIELAWLWLRWQPDSALSQWFNRRFAQGGKRMRRVGIVALARKLLIALWRYTEHGVIPEGALLKG

SEQ ID NO: 322864 - protein, 349 aa, unidentified
MIARPDAACFVGIDLHKDTLTACVLRGRDREVSYVKLACKCRDQIRSFFASLPQPSAIAIETVGFYRWLWTELEPLAGQLVLCDARGARALAGRRIKTDREDALNVALLLADGRLPLAWAPPENVQLLRNWTRHRNGLTRQHAKVLHHVKSTLNRLNFPGPVRLDAAALQRYLLAGVERFSTDDLTMLWQHQRRLIEIEQDRAQSERRISELMRAPEFARIREIIESIPGVGLVTAATVIAEIGDFSRFPDSKAIGRYAGLAPTVYASGNSSRLGHISKTGAPDLRWVLQQAAWTAIRCDAGFKKTWLRIAKTAGKKAAAVAIARKILVLMWTLQRKDEPYKSRDPVAA

SEQ ID NO: 322865 - protein, 348 aa, unidentified
MTVYIGVDFHARQQTISYLTTEEGAIQHLVLLHDNPVTVRAFYAQFAGQRVVVGFESSGYAAWFEELLEELGCELWIGHATYIRQFAKRRQKNDRRDADLILELLHTGDFPRIHRYSRTTREMLQQLRYRQRLVKMRTMAMNMLLFMASSRGVSLRTQLQSKRGQAKLQQLPLPATLGTQRDELLSLLQTLDEKISTIERWLAKETKEDEAVQRLQTHPGIGLLTSICVRYTLEDASRFANTRKVSAFAGFDPMQDQSDERKRMGAISKQGSRWLRFYLVEAGQVATRKDADLQRLYQRVARRRGHAKAKVAVARRLLVRAFIMLRDEIDYAEFQRRGVAARSSRGTA

SEQ ID NO: 322866 - protein, 367 aa, unidentified
MKKVSTAAAKQNRNFSEEKLTIGLDLGDRSSWYCMLDESGAVLLEQRLATTPKTLKEVFGSLPRCRIALETGMHSPWVSRALSELGHEVIVAHARNVRLIGESRKKDDRLDAQTLARLARIDPQLLCPVKHRSAKAQADLTVIRARAGLVRARTALVNTARGLAKSYGERLRGCNVRNMNPEKAEGLSPELQTALEPLLAGIESLSERIRECNERIEQLAQQSYPQVALLKQVKGVGTLIALTFLLTLEDAHRFRKSRDVGCYLGLQPGRRNSGQSEPQMHISKEGDPYLRTLLVQGAQHILGPFGADSDLRRWGLKLAERGGRNGKKRAIIATARKLAVLLHRLWVSGEVYEPLRNSNQIAMPAAA

SEQ ID NO: 322867 - protein, 391 aa, unidentified
MRFVGIDVAAERHYPAIVDETGAVLQKPYAVSEEAAGYRQLRELLGQPEDCLVAMEATGHYWRNVFTFLVAEGFSMALLNPLRARRFAEEDLARTKTDAIDALGIARFAAQKRPVSTALPEPAVEHLRELVRMRERTVLQLGDRVRHLHQAIDLTFPDFIRYVRRLETELATAILSRYPTATALRRVSPKKLAMICFDGRRRIGATLALAIIAAAKISVGQHHDDPYKLQIRYACEDIVTLRQRARDLEREIEQKLDAHEVGKLLTTIQGIGPLTAACIIGETGDPARFRSAAALASYVGVVPRLHQSGKRKFSGRVGIPLGNARLRRALWMPVLVAIRINPWLGAYYRRLRAAGKRPKVAMIAAMHKLLTAIYSVAKNRRPFVARLSVDL

SEQ ID NO: 322868 - protein, 343 aa, unidentified
MQTITTIGLDIAKSVFQVHGVDAGGQVIVRRQLKRRYVLTFFQKLSPCLVGIEACGSAHHWSRELQALGHTVRLIPPAYVKPYVKRQKNDAADAEAICEAVTRANMRFVPTKTPEQQSGLVLHRTRHLFIRQQTAVINAIRGHLAEFGIVAPVGRHGVEELLNVVTDPNDRRVPEMARACLSAFAAQLRRIQEQVREFDRLIRAWHRSDEMSMRLDQVPGVGPVLATAVVATVADPKSFRSGRNFSAWIGIVPKQHSSGGKNRLGNISKQGDRYLRGLFVAGALAVIRYAKIHGTKHRPWLTALLARRPTKVAAIALANKLARMVWAMMARGERYKEPVALAA

SEQ ID NO: 322869 - protein, 334 aa, unidentified
MWHVGIDLHRMTVVLAVVNDSGEAMNPITIPCSDTATIVNTVAALGTFRAVIEACGTYRWLYDLLRPHGMVLLAHPMRLRAMIQRRSKTDKLDAQLLANLLRINQIPLAYIPPEPYQQLRDLTRCRARLGRHLAEVKIQLRALLARQNRESPYRTPFGPRGLGWFRGQEFGPVENMVRDELLERFRHYAKQMLLFDKRLEELRQTFPQVEALADIHGIGLYSALLIVAEFGEVERFRTAKQVGAYTGLTSRVHQSGGHCYQGSITRQGSPWLRWVLVQAAMKAVHRDVALKNFYSRIRKRSSTKIARVAAARKLAEICWKRLRRWERAHAGQAA

SEQ ID NO: 322870 - protein, 355 aa, unidentified
MNDAKYIGMDVHTATISAAVRDSSGNLVMEATLETKAETILEFVHGLRGSLRVSFEEGTCACWLHDLLKPHVTEVLVCDSRKNALLRVGNKNDREDARKLSELLFLNKLHAVYHGETGIRTLKELARSYLTMTCDLTRVMNRLKAIYRGWGIACAGQQVYAPRYRAEWLAKISEAGVRRRAEIYYQQFDVLAALRQEVRRELFAESRKHPAMRLLRQIPSIGPIRAALLIALMQTPHRFRTKRQLWAYCGLALRTYDSGEYRFVGGQLKRTKKAVTIRGLNKNHNHDLKNIFKGAATRAAATAGPFQKFYEARIASGLKPPMARLTLARKIAAITLLVWKKGVRFDAEQLKQQAA

SEQ ID NO: 322871 - protein, 431 aa, unidentified
MSKYFNSPVVGIDISEGFHVVSILSPDGSLYCKTFNIKHNLSGFNYLLDKIEEVEKKFSMKTGIFMESTGIYHISLFHFLKNKKLEAFLINPLITNSSKNKDIRKEKNDKRDSLNIARLGKFQEIKAYDYFEPEIFSLRSLIRDYYKQVDIRSIYKKKFSADIHLVLPGYKKIFNSMTCQTSLEILKKYPSPQALLSADKNEIINILLLHSRKGRVWSNNKYDELIKMAEEAKTIGFVVQGLITRIINNITMIETLNEQIEAILIEIRSTINDKNFPSDLKHNIELIDSIIGIDFISAVALITEIGNHKRFNKPKQLVAYLGVDASVNQSGKFIGTRNKMSKRGSKIARRVLFAAAMASIRSKRNGKPMNKVLKDYYEQNQKNKAKKVALGAVMHKITNYIFAVLRDQKEYIERLPKIHKHMYLFNLEKSA

SEQ ID NO: 322872 - protein, 409 aa, unidentified
MKLFCGIDWAQDHHDVAVIDADGQLVAKKRITDDPAGFAELIELLTVAGDRIEDPVPVAIETPRGLLVASLRATGRPVYAINPLAVARYRERLSVARSKSDHVDAMTLAHILRVDAYLQRRLPADSELCQAIAVLARAHQDAIWARTKAHNELRSLLCDFYPTFLATFTGRFALGIASPEARAVLAIAPTPAQAITLSATRIAAALRRAGRSRGIDQAAADIKAALRKPQLRQPLRVENAMGKHTLALLAALDTACTNVEELGQATAELFQTHPDHAIITSFPGLADSTGARVLAEIGDDRTRFADARALKAYAGSAPVTRASGRSLSVTHRRIKNDRLAAVGWIWAFAAATNCEPARDHYRRRRDHGDRHAAATRHLFNKLLGQLYHCLQDQQTFDDTKAFSPTAAAA

SEQ ID NO: 322873 - protein, 452 aa, unidentified
MATKRKKRVQDLPVLHLDAAGIDVGASEVYVAVPADRDTEPVRSFATFTRDLHTLADWLQRCGIKSIAMESTSVYWIPLHQILEERGFEVCLVNAQHVKNVPGRKTDVSDCQWLQYLHSVGLLRSSFRPSAEICAIRSLWRHRASLIQMAAEHVMHIQKALDQMNLQVHRVLSDITGLSGLRILDAILAGERDPVTLARLCHSRVKTSHNTVAKSLEGDYRSEHVFALRQSLAGYRYYQGLIADVDKEIQRHLADLKTVADTDAEPQQRTKKTAYQRRHYEPKTFDLRGELYRIFGVDLTDIPGISAVTAHTILCEIGTDVSQFRNASAFASWMGLCPDRQISGGRVLYTKSRRVRNRIALALRMGANSLHHAHNYLGEFFRRISRRLGKPQAITATAHKLARIVFHLLSVREPYNESIFHQCDRDAQRRAEIRLRKHAAQLGFQVVAATNT

SEQ ID NO: 322874 - protein, 392 aa, unidentified
MGWLSDSVPPPADTHAVWLDRGMNVCDRYFKSGCPPHTSPLRVQTGMRVITIGIDPHKSSHTAVAVDGAGHKTGQRRFVVNAGTFTQLMRWCEPWPERRFAIEGAGGLGRALAQQLAAAGEDVVDVPSTLSARARLLATGGDRKTDPADALHVAQVALFRQDLRKVTPEDQSTILRLLTERHDDLVNERTRTTNRLHAVLRDLLPGGAPTGLSADKAATLMKGIRPITATDNCRRDIARDLLAHLRRLDQQAKANEAQIRDALAASQTTLTSLPGLGTVLAARILGHIGDIDRFPTEHHFASYVGAAPLDASSGKNIRHRLNTGGNRALNSALHIIAVCQIRNPGRGQDYYLRKIAEGKTPAEARRALKRRLSNVVYRIMKRDRRSHLATAA

SEQ ID NO: 322875 - protein, 425 aa, unidentified
MSEKIVVGIDVSKAFSDICILSPNNDIIKRMKISNDVIGMQSLISVLEKVENEYEDRAVIIMEATAHYHQILANFFRKHNYEVIVINPIQSGALKNINIRKIKSDKTDAYNIALLYRIKNYNETITHSDTVNSIKKLCRQHKELTDEIVEHINRLIAFLDISFPDYKKVFPDLQGKTPLSLLEKYPTVQDVLSPENKQDMIQLIKENSHKSYSYAEAKYEKLLQAAEKSIEVCIVNLSSAVLIQTTVSVIFSLQEALKAINDEIKRLSLLDEKFHKEIVLLQSIPGVGEYTACVVLSELGDVSNFSKPKELVAFFGLDPGVSQSGTYNRKNNKISKRGSPHVRLILHMLAKFNVYPNRNREYLNPVMRAYFEKKIAEKPYKVVMCAIMRKMVQIIFAVLRNQKSFELRTPEEHQKLIRENSKLVA

SEQ ID NO: 322876 - protein, 340 aa, unidentified
MQITTIGLDLAKSIFQVHGIDASGQTAVRKKLRRAEVLRFFQALPPCLVGMEACATAHYWAREIGACGHDVRLMAPSYVKAYLRRQKNDAADAEAICEAVQRPTMRFVPVKSAERQGVLVLHRTRELLVRHRTMLINAIRGHCAEFGIVAPQGARRAVELIEHIRQTEAGDISQLIRASLLTLADQLDAIAVQIHALERRLLVWHRQDQDSQRLATIPGVGIISATALAASVPDPKLFRSGREFAAFLGLVPRQNSSGGKARLGRISKMGDRYLRKLLVVGATSVIRRARTGALAAAPWIRSLLERRPARVVTVAMANKTARIVWAVLARGEVYRAPASA

SEQ ID NO: 322877 - protein, 408 aa, unidentified
MKRYYIGVDWGDRLHQVYVGDHEGKKIREMKVPETVEGLAEIGRWLDEQRADGFELWAAIEKPAGRIVDFLLDHGVEVYPVNPKAVDRVRDRYRMSGSKSDAFDAYVLAEFLRTDQAHLKALRPSSENAQELKMLCRDQRRVVRLKSRLLNQLTTTLKEYYPRPLDAFENIETEVALDFLTRYPTPAHLSALKRKEFNRFATQQHHLSKQRCEELWEELQKPQLGVPEHVVRAKAQLVEVLIDQLRASIKAVKTYHHKVESFFASSPAAHLAKTLPGGKSGTLVAAIWAELGDAQGRWESSGHLQAEAGAVPVTKASGKSHVVHFRFACNKQLRYSMYWFSFVSLNNSEWAKLYYRGQRDKGHNHPQALRALGAKWLKIIFVMWRDHKPYDEQFHLANIALQKMRQAA

SEQ ID NO: 322878 - protein, 330 aa, unidentified
MIGVDSASEKFDWHALNPEEIELGYAETKNSSTAIHAEFEALCQKHKVRPHQVLVCIENTGLYSLRLAYELSLAKFAVWMQDAFHLNHSIGRVKGKTDKLDAYRIAKYAVRNINDFSNFVPDSKAIAELKTLMKQRKRLVKTKNILLVPINEERKHSPHDLSDCYEETDAVLEIIKAKIRVLDKKIDKALKTNPIYSQTYAILQSVPGIGPVTARLIITKTNHFANGYHARRLCSLIGVAPFPRESGKCLKKKPSNGSGSDRELKSCLYLGMLGQIKKDTKLSKYYAKKIAEGKHHNSVINAMSNKVIHMVVACQRKGVMYDENFKCNLA

SEQ ID NO: 322879 - protein, 353 aa, unidentified
MRTYYVGMDVHRATIAIVVLNGAGKVVEQLVVETSATRVRCYLKQLQGRVYVTFEEGTQAQWLYDVVQPLVTEVIVCNPRHNKLLKAGNKSDRIDAQKLAALLRNGALQAVDHRDHGVRALKELVRNYDCLVSDTTRVMNRLKAMFRGRAIACGGHEVYRQDRREVWLSKLTERGAKERAGSLYRQLAALRALRQEAKLAMVREARRAAAYSWLMSVPRLGAVSVAQLLAVVGTPHRFRTKRQFWSYVGLAVVTSSTADMEVVEGVLRRSRRPVATRGLNRNHNHLLKRVFKNAATSACQSEPFKQHYERRLQQGMEPALARLTVARQLSAITLSLWKRGEKFQAERMKRPAV

SEQ ID NO: 322880 - protein, 452 aa, unidentified
MAGKNRLRRHWEIIHPDSAGIDVGSREMMWVAIPADREGETVRRFGMFTDDLEAIREWLRAERITTVAMESTGVYWIPLYDVLASAGVEVCLVNPRELKSVPGRKSDLKDCQWLQELHAFGLLRASFRPDDQACRVRSLVRQRQELIDAAARQVQLMQKAMIQMNVRLTEVVADITGKTGMGIIRAILSGERSPQTLVEFRDRRCKYDADTFGRALVGTWRSEHLLALSHAVTLWDTYQRLIGETEAAIKRAVDARPSSAQAGHADDGERTPRRKSKSDYTVDIVASWKQTSEVDLTEIDGISDSTASIIMAEVGLNIDRFETPGRFASWLGLCPAHDISGGKVLRRRTRSCANRVSKALRLAAQAAGRTETALGAFCWRIAARAGKPVAITTTAHKLTRIVWTMLTKGAAYIRASAASAEERYRQRQIHSLITRARSFGLQVTCPVPSEAS

SEQ ID NO: 322881 - protein, 366 aa, unidentified
MKKNSTVAKNRNKIFKQPRLTIGLDLGDRSSHYCMLDEAGNILLERNLATTPKAMQQVFRKIPRSRMALETGTHSPWVSRQLTGMGHEVIVAHARNVRLIGESSRKDDRLDARTLARLARIDPGLLGPVRHRSAEAQLQLTVIRARAALVSTRTALVNAARGLTKSYGERLRKCGTEQMNRESAKGLSPQLREALDPLLGEIESLNQGIAEYDRRIEQIAKQARPEVARLKQVKGVGTLIALTYVLTLDDPHRFRRSRDAGCFLGLRPGRRNSGTSEPQLHISKEGDRYLRTLMVQGAHYILGPFGQDSDLRRWGLKLAERGGKNAKKRAVVAVARKLAVLLHKLWVSGEVYEPLRNNHNAVSAVA

SEQ ID NO: 322882 - protein, 477 aa, unidentified
MPLLGRNHNHTNMKSKTPKSKKEKKKISVDQGWEAINPQAAGIDIGAKEHFACVPAKATPKNVRSFGTCTADLNALADWFKECGVTSVAMEATGVYWMPVFQILEERGLAVILVNARQTKNVAGRKSDVQDCQWIQRLHTYGLLQGSFRPEDAYCVLRTYLRYRDELVSARSTQCQHMQKALQQMNVQLVQVLSDVMGVSGMTIIQAILEGKRDPVKLANMVDRRVRATPIQIQKALEGDYREEHLFVLQQAFSLYGTYEEKINACDEQIVRETATLSDKVDPQHKPLPPRKEGRPASKDKMQGQDMREVLYRKFGADLTAIEGIGVTTALVVLTEVGPDVSGFKTEKHFCSWLGLCPDNRISGGKVLSSHTRRVINRASDALRMAAVTLERSHSALGGFYRRMKGRLGAAEAITATAHKLARIIYRLIKHGESYVRQGMEAYERKFRERKLHALRKTASSMGFNLIAKQELTSPVS

SEQ ID NO: 322883 - protein, 387 aa, unidentified
MQTDTSATVVATTVPGEAITLFASLELSKSKWLVTINSPGSEKFSKHVVAGGEAVSLLDLLARLGAKAEQRCDGPVRVMIIQEAGLDGFWIHRLLIDSGIESYVVDAASIAVDRRHRRVKTDAIDGETLLRTLMAWARGERGVCSMIRVPSPQEEDHRRLTRERGTLLKERIQHTNRIQGLLSGQGIRDYDPLGRDRFDRLEALRTGDGHRLPPMLKMEIRRELDRIELVTTQLASVERARDALVRTQTMGRENPAALLIKLKGIGAEFASLIWLEALFRGFGNRRQIAAYAGLAPSPWQSGSIDRDQGISKAGNRRLRHTMIELAWFWLRHQPDSALSRWFQARVGARKGRIRRIAIVALARKLLVALWRYVTQGIVPEGAVLKAA

SEQ ID NO: 322884 - protein, 412 aa, unidentified
MRVVHERCCGLDIHKKFVVACLLATESDGTVHKEVRTYSAMTNDLLALADWLRGEDCGPVVMESTGSYWRPVFNLLEEQCEVLVVNAYHVKAVPGRKTDVKDAEWLADLLRHGLLRASFIPAPAQRQLRDLTRYRIHLVDERARLINRLQTVLEDANSKLASVVSDVRGLSAREILQRLLEGETDAQALAELARGKLRAKRDALAQAVVGRLQEHHVFLLREQLAHLDYLDAAIARLDAELAARLAAEQEALALVQTIPGVARRTAEVLVAEIGTDLTRFPSAEHLASWAGMCPGNAESGGRRLSGRTRRGNAWVRRTLAEVANVVSRMKGTYLAAQYRRIAARRGKGRAVLAVGHSVLVAFYHMLTRHQAYRELGADYFDDRQRDQVQRRLVHRLERLGYAVTLEALTTPS

SEQ ID NO: 322885 - protein, 520 aa, unidentified
MATSRTRKRPGARRLYHSVAKPSGLLHPRVQQVGPEHFGIVCFDCAKVRSKFLLADFYGRVLIPPTTVTHNRPDLDAAVAQVRQAFAEHQLSDGLVAIERTGRYHRLVQRAFAAAGFETRIIHPFVTKQYRQPVDPGNKTDDTDLSAIHRATVTGCALLEATRDAAWTTLQLLVRQRRDLVRKGAALNCQIREHLEAAVPGFAACFDKLWDSPVPWHLLQHFPSAAHLGAAGLTALCQSLRQAGIRFQRRTVQAVLDWAERAAPGDVAADQHLRIALDYYGDRQQKTQQIQALERDLAARLAQTPYVLLLSFPGINVVSAADFGGEAGPMDHYATAKAITGRAGLCPSRYQSDRVDKANGPLVRAANRTLRAAILGIADNLIVCNHHFQVLATQWAAQGKNPRHTRVKVGLRFCRIAFQMVAGRQVFRHPAIQGRHYILDKLTAFHRDHDTGMAEVLRDLQAAVAQVPPREHAAEARPLQEELQKIQDGRRRGPQLLGDILPIVLARLGVGVVPSEQSGE

SEQ ID NO: 322886 - protein, 351 aa, unidentified
MENGITVGMDMGDKKHYICILDAEGVVQHRGTVTNTAKAIRKRFETLEPCRVALEAGTHSAWVSRTLEDMGFEVLVGNPRKLRMIWDSDEKSDERDAEMLARIARFDPELLYPIHHKGAEAQNDLAIIKSRDMLVKSRSMLITHVRGIVKCTGARIGACSTEAFHKRLAEDMPKELEPALEPIMKNIEDLTQRIRHYDKLIEKVAEEKYPEAAVVRQITGVGALTATAFVLTVENVERFEKSRDVGSFVGLTPRRDQSGQIDKQLRITKAGDAYLRRLLVGCAQYIMGPFGPDCDLKRFGLKLAERGGKNAKRRAVVAVARKLAIKMHSLWKSGETYEPFHNEIRKEKKIA

SEQ ID NO: 322887 - protein, 366 aa, unidentified
MQKISTSQRSGSRIFKGRQLTIGLDLGDRWSWYCVLNEVGDIVLERRLTTTPEAMKQVFGRMPRSRVALETGAHSPWVSRLLTALGHEVIVAHARNVRLIGESRRKDDRIDARTLARLARVDPQLLSPVQHRSAQAQIHLMVIRARAELVKARTALVNSARGLVKSYGERLDKCGTQQVGQDLAKNLSAELREALEPLLREVESLNTQIKEYDRRIEKMARETYPEVELLKQVKGVGDLIALTYVLTIDDPHRFRKSREAGCFVGLQPGRRNSGQSEPQMHISKEGDRYLRTLLVQGAHYILGPFGEDSDLRRWGLKLAERGGKNAKKRAVVAVARKLAVLLHRLWLGGEVYEPLRNSQRAVSAVA

SEQ ID NO: 322888 - protein, 396 aa, unidentified
MFVGWDWASTTHDVTVIDHAGRIVDRWAPEHTETGLDQTLARLARHGPPEQLPVAIERPSGLVVERLLAAGHPVIHPNAFHVTRPRWGAAGAKSDPGDSYKLADYLRTDGHRLRRLRPLDAATRQLQALARVRDDHVAAKTAASNQLGALLEAHWPGAKQVFSRLGSQIALAFLNAYPTPESAARLGEARLAAFCRRHSYRGGRSPAELLQRLRAAPTAPVGLAPEVLNELVGAQVRLLRTLLGTIADLDRALGAGLLGHAKTELLAPLPRIGEVNLAQVVAEVGPILDRAGDVEHASAECGATPVTRASGKTKAVAFRWAANTKARQALTTFASNSRHSSPWAAALYADARRRGKHHPHAVRILARAWLRVIWACWHTNTVYDPAKHGAEKRLAA

SEQ ID NO: 322889 - protein, 461 aa, unidentified
MQIIHRCCCGLDVHKKLIVACLISLNEAGEFQKEIRHFPTMTKDILALADWLTSAGCTHVAMESTGVYWRPIWNLLEGQFELLLVNAQHIKAVPGRKTDIKDAEWIADLLQHGLLRPSFVPPAPQRHLRELTRYRSTLLAERARLVNRLHKVLEDTNLKLTAVVTNIMGLSARDMLDALLQGETNPEVLAKLARGKLRKKREDLEQALVGRVDDHHRFLLTSLLTHIDFLDEQVADCNGKIEQFLSAPSDEKAELVSSASDDQRQEQALVSSTPVGTGSMLAQDQVPEEGPKVPLSYQQAIALLDSIPGVNQRIAEIFLAEVGTDMQRFPTAGHLASWVGICPGNHQSAGKQIRGTTRKGDRWLRHALIEAAQGAMRTKGTYLSAQGRRLTHRRGKKRAVVAVAHSILIIAYHVLQRQQPYQDLGSNYFDERERSAVARQSVHRLEQLGFKVTLEAAGEAA

SEQ ID NO: 322890 - protein, 424 aa, unidentified
MNLTQNNRLKQVTSDTLIVGVDVGSQTHFCRAFDWRGFELSRRVFKFSNTGMGFLTFLRWTEELMNRTEMKKVIVGCEPTGCYWLTFQKFLQDHDIQLVTVNPFTVNRSMELDDNSPEKSDLKDPKTIAHLIKDGRYSTSYLPRGVYAEIREASVCRDQIMKQHIRLSNQIQGWLQKFFPEYFECYAAWDSISGLMLLKEAPLPQDILKIGAGGVNQIWRDEKVRAAGIKRAQTLVEAAQNSVGLEAGEAARLEIWILVNDYILKAEQLKRLDEYLEEKVKEVPNVEKLLAIKGVGMSTVIGFIAEVGDIGRFTDPKQIQKLAGLEIVKKSSGKKKGQPRISKRGRRKLRRTMYESSRALMTWNPAFQDVFLYYRNRQKNPLGGMQAKIAVACKAIRVFYVVLQTGCDFDEEKFRKDIIRPEAA

SEQ ID NO: 322891 - protein, 407 aa, unidentified
MIFVGDDWSEGHHDLWLSDVEGTRLGSVRLVEGVDGLARFHELVAGFVDDPSEVVVGIETDRGLWVEALVAAGYRVFVVNPKSMSRYRDRYRLSGAKSDVSDAMVLSDVVRTDRHHHREVAGDTEQAEAIKVLARTHQNLVWERTSTTHRLRSTLREFYPQALAVFSELAHRDALAVLAKAPTPVQGAALSVSQIKAVLKRAGRQRYLDVTAEKIRDGLRTSGLAAPASVTAAMGAVCETLVTLITTLNTEIERLESLLTDHFEQHPDAHIYLSLPGAAEVLGARMLGEFGDDPNRFTDAKSRRNYAATSPITVASGKSRYVKARYVKNHRLNDAVIRWAFCSINVDPDCRAFYDQQRAKNHGHYTALRALANRLVGILDGCLRTNTEYNPDTAWGHRRNEGTSRAA

SEQ ID NO: 322892 - protein, 350 aa, unidentified
MIIIGCDYHPGFQQIAFVDTETGEYGEQRLEHSEGAEKFYRDLAAQGKKIRVGMEASGHARWFERLLAELNFELWIGDASEIARKRERKQKTDRQDAQHILQLLMENRFPKIWIPSGENRDLRQLLWHRHRMVQMRTRIMNQLQAVALNEGLRCKKRLWRQHGREQLESFRLAPWASRRREDLLQLLDRLNPTIADLTQVIEQEVEKCPEARRLRTHPGVGALTALAFVLIIGRTERFQCGKQIAAYLGLVPLEDSSGNRRRLGHITKQGSSMLRFLLVEAAQVTARSNPEWRNKYFHLAMRRGRKIAKVAMARRLAIALYWMWRKGWDYEQLRKFGSHAGKLGTGDGVQ

SEQ ID NO: 322893 - protein, 344 aa, unidentified
MDATTVGVDLAKNVFEIVVANERGHIVERQRLSRARFDRFFVNRAACRIVMEACGSAHHHARRLSSQGHDVVLLPAQYARAYVRRNKTDAADAAALIEAARCPDIRPVPIKSVDQQALQQLHRLRSQWMAARTSRINFLRACLREFGVCVPLGAQRAIQAVREALSNQATAVPAVLHSILLELLAEIDLLEQRCKHIERELKRLNENDSVVERLLQIPGVGPLTATALRASVVDIHRFPSARHFASWLGLTSREHSSGERRRLGRISKQGDPYLRTLLIHGARAVLLAARCAQRRGTSLDRLRTWALDLQERRGHNKAAVALANKLARIVWATWRYERDFSSIP

SEQ ID NO: 322894 - protein, 386 aa, unidentified
MNHSTNILPRSVDYDQTLVLAIELSNKSWVLAAQVPGLSQTKAKRTIEPDKNDLLAAINGYRTRAAAAGHQVKRVITSYEAGWCGFWLARWLMAHDIEVHVVQPSSVPVDRRMRRAKSDGIDAELLLRTLLAWLRGEPRVCSMVPIPDEADEDARRCVRERSELISERVGLVNRIGAILATLGAGDYNPLLQSRRRRLTELRTGLGNPIPPNALAKLVRLLTRLELVLAQIAELELERDAAAKTDTPDQAGKMIQQLIRLRGIGVQSATVLVREAFVRRFANGKALGSYAGLTSTPYSSGGIDRERGIGKAGNRRLRTVMVELAWLWQRYQPSATQVVWFRQRVGSTGRRVRKVMVVALARKLLIALWRFVIDGVMLEGAVMKPSI

SEQ ID NO: 322895 - protein, 452 aa, unidentified
MKKAQRIAKLPVINPNAAGIDIGATQIFVAVPPDRDAESVRCFGTFTTDLEKLADWLVACKIQTAAMESTGVYWIPLFQILEKRKIEPVLVNAQHLKNVPGRKKTDVEDCQWIQHLHAVGLLRGSFRPADEICTIRSLWRHRENLIQLASIHVQHMQKALDQMNIQLHHVISDVTGTTGLAIVDAILLGERDPAKLAKLRDPHIRASEQTVMESLVGDYRQEHLFVLRQSLESYRHFQRLIQEVDLEVKQMVKELPSQVDVQERPLPKATNPRKTPWRNEPPQLREDLYRAFGVDLTQVPGLNTLTTQIVLTEIGPDFSRFPTSGDFCSWLRICPNPKITGGKIISSKTRPSKNRAALALRMAALGLHRSQSFLGNYFRRMKARLGTPKAITAAAHKLARIVYHMVTTRQEFDATIFEALERRSRDHKHLRLRAQARELGFDLVKINAEAVS

SEQ ID NO: 322896 - protein, 350 aa, unidentified
MIIVGVDFHPEFQQIASVDTDTGEFQEKRLTHREEAEKFYRALAGAGQKVRVGMEASGHARWFERLLAELQFELWIGDAAEICTKRVRKQKTDRQDAQLILRLLLEDRFPKIWVPSCENLDLRHLLWHRHRMVQARTRIMNQLQAVALNEGLRCKKRLWRESGREQLESFRLAPWASRRRQDLLELLDRLNPMITELTQAIEQEVEKCPKAQRLRTHPGVGVLTALAFVLIIGRAERFQCGKQIASYLGLVPLEDSSGKRRRLGHITKQGSSMLRFLLVEAAQVTARSIPEWRSRYFHLMMRRGRKIAKVAMARRLAIRLYWMWRKGWNYEQVVKFGSHAGQLGTGDGVQ

SEQ ID NO: 322897 - protein, 432 aa, unidentified
MSDDVMIAVDPHKASNTAAVLDPVTKTLIETARFANTEEGYGRLTGFARRWEQRRWAVEGCRGAGRSLAQRLVADGELVLDVPAKLAARVRVYSRGHGRKTDRHDAVSIGLAALDGSGIAPAGPDDVLVSLRLLCDRREELSALRTQAVCRLHRLLAELTPGGMRRELTAGKAGALLARIRPGDDVARVRLQLARDHLADITALDARLKAAAAQISALVAATGTTLTTLYGIGPLIAGRILAEAGGVARFATKDKFASYNGTAPIDVSSGEQVRHRLSRAGNRRINHALHMMAVTQIRYPGTPGRVYYERKRKEGKTPKEALRCLKRRLSDVVYRQLVLDQHGRIEACGSPTTQPPTPPTSISPASGSPGAAPASPPPRPKASRRSSSSTGKTTASSASRSSTPAPASALTSSRRPRSSADNGCPGHRAGAG

SEQ ID NO: 322898 - protein, 357 aa, unidentified
MNKVNELDFSSTTIYCGVDVHKKQWRVNTHDGNFELEDFSQDPKAETLYKHLSRKYPKANYKIGYEAGFCGFGAQRTLKRLGAVCYVINAADVPTTDKEKKQKKDKVDARKLCDYMQSTKSKSIYIPLVAWEHGRSLVRTREQVVNNQTRSKNRIRHLLHFSGIDLPERYAAGHYWSKAMITYLEGIDYGSRELSTAIGLLIKDYTQSRSLLLAATRAIRKLSKEPAYAPGIIWLRSIPGIGLVNAVIILFEIQDIRRFKTLDHLYSYAGLVPDTADTGDTKVTRGITERRNEYLRTALVESSWTVVRKDPALLMKYKDYCKRMNKNKAIIRIAKHLLSRVRFVLLNEKEYVVGVVA

SEQ ID NO: 322899 - protein, 337 aa, unidentified
MKYSGIDLHSNNSVVVVSDEADRVLVRRRVPNDAAAILGLLAGHREELVGVVVESTYNWYWLVDALQEDGYRVHLANTVAIKRYEGLKHSGDEDDAAYLAQLLRLGILPCGYICPPAARAVRDLARKRVQLVRSRTAQVLSVENMLSRETGAGMRSRAVQRLTAQAVEGFGFDQDVQRALCANVAVIRTLNREIDKLEQRLHQCMRLRPEFRLLTSVPGIGPTLATLIMLEVGTIERFAAVGNFASYARCVDSARISNGKKKGQGNVKNGNAYLAWAFVEAANFAHRYCAEARRFYERKKARTNGIVATKALAHKLARACYHMLTEQKPFDVKRCFA

SEQ ID NO: 322900 - protein, 345 aa, unidentified
MSIVGGLDIHRKQITFDYLDTETGQVRRGQICPADREHLRAWLARFAGCGDVAFAVEGCTGWRYVAEELAAAGVTAHLAEPADTAFARGRKRHAKTDKTDCRHLRMLLAEGRLPECWIPPSRILECRALLELYHDLRAEHTAWAQRIHAVLFHQGAPALGEGTLRTGPGLAALRDVSAAHLSPAGQLQVATALEVTEALEARLHAVRHRLLDAARHLAGAKVLAARLYGVGPFAALAMTCWLGGAGRFSSSRQAVRFAGLDVTVWSSDRKGPPGRLSRQGPPVLRWAVYEAGKTHARSSAPDHAYYAAVKDRCNGKRAALSEARKILRQACHILAELGDDALAAV

SEQ ID NO: 322901 - protein, 346 aa, unidentified
MTIVETTRPVTGGVDTHADVHVAAAVDGSGGVLGVASFATTPAGFGALHRWLAGFGAVGRVGVEGTGAYGAGLARFLRGQGLAVIEVDRPNRQERRRHGKSDELDAIEAARAALSGRASGIAKSADGDVEAIRALLVARRSGRNVRIKYLNQIRHLGFTAPDELRERLRDVHRDRLARTAAALRPTAGSDTVVYATKLAIAMLGRRVLALEADAERLDRELETLVRRCAPSLLAVYGVGIDTAAILLVAAGDNPHRLKNEAAFAHLCGVAPLRASSGKTDRYRLNPGGNRQANHALWRIVFTRMSGDERTRKYVARRTAEGRSTREIMRVLKRYVARELYPHIARA

SEQ ID NO: 322902 - protein, 421 aa, unidentified
MRGIGLDVHRDFCEVAIAENGRVRSAGRIPTRVPSLELFAASLVSSDVVAVEATTGTDKIVSVLQRHGIRVVVANTRKLRSITEAKAKTDRLDARTLARLLVSGLLDEVWTPDERTRALRRLTNRRERIVRARTRAKNEAHGVLSRNLCERAPVTDAFGKAGRQWLAGLALPVDERLTLDGCLRQVDFLDAEVAALDREIAKQALAWPEVLRLMTVPGVNVQTAATLMASVGDIRRFSSARKLVSYLGLDPRVRQSGNAPARHGRISKAGASEARHMLGEAAWKVTLTPGPLRAFFERVRARRGNQVAATATARKLVVLFWCLLTREQDYAFGRPAMTRNKIRKLELLAGAPPQKGRHGIAGGKSKAVFDAERELSRQAEAAYRRLVNDWHATGPSKVGASATPGRAPQGPSKDQAARQTQ

SEQ ID NO: 322903 - protein, 346 aa, unidentified
MRFYQQQHRFYCGVDLHARSMHVCIVDQEGQTKVHKNIDATPDRFLPLVRPYREGLVVAAECMFAWYWLADLCAAEGIPFVLGHALYMKAIHGGKAKNDKIDSQKIALLLKGGMLPVAYAYPKAMRATRDLLRRRNKLVHIRAEALAHIQNTVSQYNLPPLAKKLTFAANREGVAERFADESVRRMAESDLALIGHIDEQLQSLELYLVRHAKVDDPQAYHLLQTIPGIGKVLALVLLYEMHDAGRFGDHRHFVSYCRLVRPSHESAGKKSPSKGHKIGNAHLRWAFGEAACLMLRELPAAQVYVARLEKQHGKGKAISILAARIARTAWLMLKRKEAFDANKFLK

SEQ ID NO: 322904 - protein, 398 aa, unidentified
MLSIGIDVSKGKSTVCGMKPGGEIVYTPFEVQHTREGMSELVSLLRGSGEEVRVVLESTGSYHCPVVAALLENGIFVSVVNSLRMKRFCSQSIRRVKTDQIDAMQIALYGLAYWQELQPTRLPENTYRELQLLARQYYQMTSLLIKAKVDFNALCDQVLPGMQELMSDHAGRHKLSDFVLRYRHTTHILEMGETRFRKDYCKWAEKKGYRNHERMAALIFATAQNGIPVLPNAPSTQIVITEAIRVLHTVEASRDAILTQMQALAKTLPEYSLVREMPCIGDTLAPRLIAEIGDVRRFHSKRALIAYAGIDAPPYQSGKFSANNRHISKRGNRYLRKTGYEVMQSYVMHKPANDPIFTFIEKKRSEGKSGKLAMVAGLNKFLRVYYGKVTELYRSLPQ

SEQ ID NO: 322905 - protein, 341 aa, unidentified
MQAVTTIGLDIAKSVFQVHDATGNVVIRRQLKRRYVLAFFQKLAPCVVGIEACATSHHWSRELKALGHTVRLMPPAYVKPYVKRQKNDAADAEAICEAVTRTNMRFVETKTPEQQSCLMLHRTRHLFIRQQTAVINAIRAHLAEFGIAARVGRHGVEDLLHVVADSSDRRLPEVARACLAALGVQLRMLKAQVLAFDRRIMAWHRSHETSKRLDEIPGVGPALATALVASVADPKAFRSARHFSAWVGLVPKQHSSRGKDRLGSISKQGDRYLRSLFTAGVLAVIRYAKIHGTKHRPWLTALLARRPTKVAAIALANKIARMAWAMMAKGERYKEPAALAA

SEQ ID NO: 322906 - protein, 411 aa, unidentified
MPETIQWWLGIDWGSEKHRLCEVDADGKILHQKWVEHSGSALAEMVDWLRQITGDVPERLAVAIEIPRGAVVETLVENRFQVFSINPKQLDRFRDRYTPAGAKDDQRDAYVLADALRTDRHCFHAVRLDEARLLRLRELSRLEDSLTADLNRTTNQLWQQLHRYFPQPLALCSGANEPWLWDLLEIAPLPAQAAKLSPARLRQILGHRHIRRFDAQQLKTILAATPLRLAPGAADAASEHTLLLLPKLQLLYRQREQVNQRIATLLNELAAPGDDDGQSKEHRDVTILLSLPGVGRKVAATMLSEATQALGDRDYHALRCYAGAAPITWQSGKKKVVIMRHGCNDRLRNALYYWALNTLAWDEKSKRTYREMKGRGMTHGRALRGIADRWLEVLISMLKHKTLYDPKRRAA

SEQ ID NO: 322907 - protein, 345 aa, unidentified
MKKVIAGMDLHSTNVVIGIMDMDGKRLASRKVACEIEEVVKVLAPYKKRLEKIGVESTYNWYWLVDGLRALSYPVVLANPAGMQQYNGIKHADDTNDAFFVAELLRLKILPTGYIYDPKMRPVRDLLRRRLMLVHQRTALMLSFKSLYTRTTGQEMTLADLKALEIKEAQELYDHPANQLIAGMQIKHIEQLSQSIEKIEKVILASARELPCYAKLASLPGVGKILGMTITMEVGDIKRFADAGNFASYCRTVEAKCTSNNKKKGENNSKCGNKYLAWAFIEAANFARRYDEQCRKWYDRKEAKTNKVIATKALACKLAKAAWHVMSAEVDYDAKRVFGQPAPIK

SEQ ID NO: 322908 - protein, 345 aa, unidentified
MELHTIGIDLGKTVFHLVGLNPRGEVVVRKKYSRAQLLRFTANRQVHLIGMEACGGAHFLGRALREQGHEVRLIPAQYVKPFVKTNKSDFIDAEAIAEAVGRPTMRFVPIKSDDQLDLQSLHRVRERWVMRRTAVINQIRGLLLERGMTVRKGRRHLEAALPAVMEDAAGKLSATLRLLLAQLKLELDQLATRLEEAEALIQLTAQESEACRRLDAIPGIGPVTATALIAAIGNGAAFGKGREFAAWLGLVPREHSTGGRQKLLGISKRGNAYLRRLFVQGARAVLQQRSKQSSGLSAWLKQLTARAHHNVVCVALANKLARIAWAVLATGQAYRPPAITAVAAA

SEQ ID NO: 322909 - protein, 345 aa, unidentified
MEHYAGIDVSLEQSSVCVVDGMGRIVRETKVASEPEALADFFRRLGVAVTRIGLEAGPLSQWLHAGLTAAGFEAVLLETRHLKAALSAMVVKTDRKDARGIAQLLRMGWYRTVHRKSPDAQEVRALLVGRKLLQAKLRDVELSIRGILRGFGLKVGEVSKGKFAARIRELAAGHEMLEAVTTAMLAAREGLMAEFMRLHRRMLTIARADAVCRRLMTAPGVGALVSITFRTAVDDPGRFGTSKAVGAHFGLTPKRYQSGETDVVGGISKSGDAMVRTALYEAANAMLSRHTRFSALKRWAVDVAKRRGLKRAKVALARKLGTVLHRMWVDGTEFRWGKEAQAAAA

SEQ ID NO: 322910 - protein, 421 aa, unidentified
MARSDAREGRREMLFIGDDWAEAHHDIELEDDSGGLLVRRRLPEGLAGISTLHELVAEHLDPTGETGQVLVGIETERGPWVQALLAAGYRVYAINPLQVARYRERHSTSGAKSDPADAHLLAEIVRLDRAHHREIAGDSELAEHLKVAARAHQTMIWSRVRQVNALRSLLREFYPAALAAFGTDLADRDALAVLAAAPSPEQGRRLSQARIETLLRKAGRQRNLAATAAKIKTALASEQLTARPGVVPAYAASASALVAVLTVMVAQTEVLAGQVEQGFGQHPDVEIYLSQPGLGTILGARVLAEFGDDPDRYADAKARKNYSGMSPITKASGTKRVVLARYARNRRLGDALLRQAYSALRSSPGARAFYDQHRARGATHYQALRAVANRLVGILHGCLASRSCYDEHRAWRTNTEHAIAA

SEQ ID NO: 322911 - protein, 371 aa, unidentified
MLLPRQRFKLARGTKDKEHAMSEKLNTAIAVIGIDIGKNSFHVVGHDQRGAIVLHQKWSRGQVAARFANMPPCLIGMEACVGAHHLSRKLKALGHDARLMPAKYVRPYSKGQKNDFRDAEAIAEAVQRPTMKFVATKTADQLDLQALHRVRERFVSQRTGIINQIRAFLLERGIAVRQGQRFLRAELPRILAAPSDVLSPRMVHLIENLAGDWRRLDERIESLSSEIEAIARQDAGCERLMSVPGIGPIISSAMVAAIGSGEVFTKGRDFAAWLGLVPRQMSTGGRTILGRISKRGNRYLRVLFVQAAWVVLIKPKSWERHGLKSWIEAAKKRLHRNVLAIALANNLARIAWSVLAHGRSFEASKSNEAIA

SEQ ID NO: 322912 - protein, 321 aa, unidentified
MATADVVVGIDVAKEQLEVMVLGVAWTAQAFPNDPEGHTVLAAALAPLGVRLVVLEASGGYETAAACALQAAGLSVAVINARQARDFAKSLGRLAKTDRIDARTLADWAEVLLRQPDLGRYIRPLPIEEQEHLAALVTRRRQLVAMLHSERLRLAQARRLPIRTSVEIMITTIKAQIDDVEAQMKRHIETHHVAAAKLLRSMMGIGFVSCANLIADLPELGRLTRRQISALVGVAPYAKDSGRMRGLRRIAGGRFELRRVLYMAALVAKRSNPVMKAYFERLVAAGKKPKVAIVACIRKMVTILNAMVRDQKQFTLEASAA

SEQ ID NO: 322913 - protein, 440 aa, unidentified
MSKRAYRATRVNDVNWDQLAQGKEGLDITLGVDVGKYSLWAVCRWADGRFERPWRVQNPGEIPTLLTLLKRVSAGRKLVVAMESSGTYGDALRQALADNQIELQRVGGKAAHDYAEVFDGVPSQHDGKDAAVVAELAALGKAMPWEYQPADPWEQELAYWVEWMVAHRQMLTIWQGRLEGLLARHWPEATQVLKLSSGTLLRVLKRYGTPQALAADGEAAKLLARWGGAFLAAEKIEQLLAGARASVGVRLGEWQQRQIQNYAQQALAARQEANRAQRRLRSLAAGHAVLQAQGKVVGVPTACVLWVSTGDPRKYHAAGAYRKAMGLNLVERSSGTYQGKLRISKRGSSRTRQWLYFAVLRLVQKCGVRSWYEAKKAHDEADARRALVAVMRKLAVALYYVGVHNEEFQPGRLFGRIRRRRDSPGEQKSRTKRRSRAEQI

SEQ ID NO: 322914 - protein, 345 aa, unidentified
MSIVTIGLDLAKHAFQVHGVDETGRALVRRQLRRDGVEEFFAAQAPCLVGIEACATAHHWARRLTALGHHVRLIPPTRVKAYVQRGKKNDATDAAAIAEAVTRPHMAFVPIKSEDQQAVLMLHRTRDLLVRQRTMLINALRAHFAEFGIVAAKGRMKAGQLAAGLAEVAIPELARTALRELAGQIETCDQRIAVVEKEIFGWHKANEPSRNLATIPGIGPITASLLAATVTDPKAFKNGRQLAAWLGLVPRQNSSGGKDRLGGITKTGDRAIRRLLVMGATSVIRLARTKAPGDADWLKALLARKPARLVTVALANKMARIAWAVLARGEVYRNEFPIPVTALTP

SEQ ID NO: 322915 - protein, 350 aa, unidentified
MTTLARQITGGVDTHLDVHVAAALDERGALLGVESFETTPKGYDKLLTWLRSFGTVELLGVEGTGSYGAGLTRHLHSEGVRVVEVDRPNRQRRRRHGKSDPEDAISAARAAQGGDATGEAKTRDGNVEAMRVLRVARASARKGRTQALNQMRSLISTGPDCVRADLRHLNVYRMLERASSYRPGTKRDLVSINKLTLRMLARRAIELEEEIKEIDAVLKPMVKETAPELSALSGVGTDIASALLVAAGDNPERLRNEASFAHLCGTSPIDASSGKNQRHRLNRSGDRQANSALWHIVITRMVSDPRTREYIARRMKEGQTKKEAIRCLKRYIAREVYNNLPMEHLALDSP

SEQ ID NO: 322916 - protein, 342 aa, unidentified
MYYIGLDVHKKTISYCIKEANGTIHREGTINATRNDLDRWMTTLPQPWMVAMEATIFTGWIYDYLQPHAHQVKVAHPVMLRAIAAAKKKNDRVDAGKLADCLRCDFLPECHMVSTEIRDRRRSLRYRHLVVRQMVQVKNRISGLLLETGVSHNKQRLHKVGYFRELMATNPDIDDSIRPLLQLSRETVVRLQRTDYARVSSLLRDPLLAERIKRLRTVPGVGPITALTWALEMGEVSRFRSVKQAISYCGLCSDEKSSADKVMRTPLSKQRNKHIQRVLVEAAKLAPRLDPDLAAVYERAKQKGNANRATLAVARKMVAWLLAVDRDKRDFVPSEDHTRQAA

SEQ ID NO: 322917 - protein, 292 aa, unidentified
MGGQAIYVGVDVSKARLDVAVRPSGESFAEANDKAAVGRLVKRLKALACTRVVIEATGGYESIVVGALYAAGVPVVVVNPRWVRHFAKGMGWLEKTDRIDAQLLALYAERAELKAQQLPDEATRRLAELCARRIDVLEMMETERNHLEHASSAVRRAINSHIDYLRKQLKRIERDIDGAVRGSDLWRHQNELLDSVPGVGPTLRACMLAWLPELGQLNRGEAGKLVGVAPLPDDSGTIRGVRRIYGGRAVHGHDGSDAAQSSSAGLLRWLTRQGQATQSCVGGDHAQAAADS

SEQ ID NO: 322918 - protein, 405 aa, unidentified
MRIIGLDIHRAFAEAVAWEDGRLRRLGRVDMRRDLLDAFAAKLSLDDVVVIEATGNASSAAAVVAPHVKKVVIANPKQVRIIAYAKIKTDTIDASVLAQLYASGFLPEVWIPDEPTQALRRQVTRRNQIVRQRSRLKNVIQSILHSHQIPSCPHADLCGTKGRSWLSEQVVPQDERLAIDRHLREFDRLGEDLQVIERDLARSALADEGVKRLMTIPGVDMTVALAMKAAIGDVSRFDDPRKLVSYLGLNPSVRQSGPGPAYHGRITKQGRGHARGMLVEAAWAAARAPGPLRAFFLRVRARRGQHVAAVATARKLSVVIWHLLMKGESYAWARPSLHAKKLRDVELKAGSKAVRGQKGAAHAYNIKSHREEERPLGGAGRGRLCTLRRWVEPARSETGAHGRRK

SEQ ID NO: 322919 - protein, 387 aa, unidentified
MYYIGIDISKFKHDCAVIDDSGEIVTPSWSFTNDAKGFSQLKLLLNSLDTETGIGLESTGHYGMNLKLFLESNNFSFMEFNPLLINRFVKSKSLRKTKSDSIDCMMIAHYLMTVEYKPYPSSFYHTEKLKSLTRFRDSLIRLRSRQLVELTNILDKVFPEFKPFFGSRFSVTALYILSNYSSPEKIANMNSKSYEALRKLSRGRFSTVDFAKLKQLAKNTIGTTEDYLLLQMQIVLDIYRQLDSKVDETEVSIKECVSDMNPPMLSVPGIGIESAAVILAEFGDFSKFKNASQMLSFAGLEPGYFQSGTSETTGKMVKHGSSYLRYALMNCAQTVVNYEPTFAMFYSKKRAEGKPHRVALSHVVKKLLRVIYTLQTKNIAYDADFVR

SEQ ID NO: 322920 - protein, 383 aa, unidentified
MQASTIGTPTTGHCGTIFVAIELSQRSWLVTLHSPDRDRISRHKLESGDCAGLLGLIESVRERAARKLGSKPRVVSCYEAGYDGFWLHRLLTEAGIINFVFDPASIAVDQRARRAKTDRIDGELLLRTLMAYLRGEPRVVRIVRVPSLEEEDARRASRERDRLVTEQTGHTNRIKSLLRLLGLAVGNPRRADWVSWLGRQTDRRGCLVPPHLLAEVTREHARLMLVRQQLAALEQTLVAREASAVPAQMIERRDHLFRLKSIGPAFAATLTNEVFYKDFRNRREVGSYFGLTGTPWQSGGTDREQGISKAGNRRARQKAVELSWLWLMHQPDSALSRWFRARTLNASKRIRRIAIVALARKLMVALWRYLTSGLIPEGAVMKA

SEQ ID NO: 322921 - protein, 417 aa, unidentified
MKEEFTFYVGVDWGVEFHQACILDAHGEKICQRRIEHSGPGMLEFCDFLQALTNGEVSALAVAIEVPRGPIVEALLEHNYAVFSINPKQLDRFRDRHTVAGAKDDRRDALVAADSLRTDQHCFRRVRPEHPDVIRLRELSRTEETLGIDLRRCVNQLSQLLLRYFPQLLRLCSTPDEPWLWALLELAPTPQQAAKLTEKRLKQLLAKYRIRRWTAEKVGEILTAPPLPLAAGSAEAISEHALLLLPQLRLLHLQRKQVADRTQQLLDQMATSTNDFPRSQEHRDIPVLLSLPGVGRIITATMLAEGSHILSLRDYHALRAHAGIAPVTKQSGKSRQVLMRYRCNQRLRNAFYHWARTSIQHDPRSKHHYARLRQVGHDHGRALRGVADRLLAMLIAMLKSGQTYDPNRRSTANRTAA

SEQ ID NO: 322922 - protein, 369 aa, unidentified
MKEEVVYCGVDVAKAYLDAAIGKQKRRLANDATGHWQLINWIKQIEAQVQVICEPSGGYERGLIRALVGAQVKVSLVQANRVRQFARAAGILAKTDSIDAEVLCAFGEAMRPQTLSASKLAQEQLRELESQRRHLSRLLVMEQNRGARLAECSVRVLNRSLIKQIQKQIEKIDLLIKEHIEGSQELSAKAQKLTAISGVGPRTAALLLAQMPELGQLNRREVAALVGVAPFNRDSGKMRGKRTIFGGRRAVRTGLYMAALVAARHNPILRTFYRRLRTARQTAQSCPDRHHAKTLNRAQQLPQTRSNLCLTARQLLTAGRRTASLHFMKIRSLQAGLVGSFAPLSRRYPARLCRLPRCFPARGVLASGG

SEQ ID NO: 322923 - protein, 355 aa, unidentified
MKFYCGIDLGARKTHVCLIDENDHKLLDMKIDNNLGVIEAALRPYRSSLEVVVESIINWEWLVYGLQKYGYEVKLAHTLGLKAITWSKKKTDTWDAFTLAKLLRGRLIPEAYIYPYELRPVRDLVRERIRLVAKRATEYGAINRTLLKYNIQGFDRNAVKHLSEQDMHELYHHPFVRTKATMELQRIELLTEQIRLIEKALFKKARQDSMFSLLQTVPGIGDILALTILYEVGDIDRFEHTRAFCSYCRVVPGIHQSSARAYRSPNSKQGNRYLKWSFSQAAIMAIRFYPQIRRLYERLAAKRKKAARLVARSIIAHKLAQAAFHVMKHQVAYKEELLFRFSKDYAEGKAVTPSE

SEQ ID NO: 322924 - protein, 361 aa, unidentified
MSMITKQSGKRKQTQVDFTGKACWVGVDVHKSSYAVAILDEEGQRQEFSTPADPKRLLVQLLKMGMHIQTLVYESGPCGYELAWTCQESGIPVFVVAPSRIPRPVSKSGKTDRLDSMNLVGLLARGMLKSIAIPSREEFAVREMERARQSLVRARRRVRQEIRSFLLRNALTEPPNLSRWSQIAVRALHDMPLPEYLQNSLAVYLGEHASILASLSRISAQLAEAAVAQGHGERVKNLQTIPGVGPTIAHTFTCEIFRPERFKRAEDICAYVGLAPMTNHSGAGKERAWIRPVGQRYLRSILVESAWRLVAVEDFYRNFYNRIRARTGLAQKAITAVARKLLVLIWRVAIEGRAYRPTTAY

SEQ ID NO: 322925 - protein, 409 aa, unidentified
MDRTKYLYVGMDIHKETHTAVLLNYLEEKLGEVKITNNLRGFHKLEKYVTKQQGELIPIFGLEDVTHYGRNLSIFLLDRDYPVKEVNPSLSYMERMSYASTRKNDTWDAQCISSVLMRRSHLLPDANPQDYYWTMRHLVNRRNALVKASTKLMQQFHEQIQTAYPNYKGFFTELDCQTSLAFFESYPSPNYLENVSEDELGAFLRVPSHNTCSTNRARKILDLVAQEQLKNLDYQQERDYLVQSIAQQIRFILREIESIEQLEKKMYAELGYQLETIPGINTVTACALVAHVGDIHRFTSPHKLANYAGVAPLHFGSAGKGKDVQNKSQGNRHLYSTLYFLAIQQIYLTNKGEARNPVYRAYFEKKISEGKTKIQALICIMRKLIRVIYAMMKKKVVYELPVLKTVAAS

SEQ ID NO: 322926 - protein, 367 aa, unidentified
MKNTIVHHEGAASLEAVASKVKPKGAQIKIGLDMHARVYVAVAQYDHLLPKAARRLSPNEFVPWVEALLGQGHSVHVVYEACGFGFSLYRQLMAAGAQCYVIAPRKLDEECSRVKTDPRDATTLCQRLSRYLEGNTRELAVIRVPTEEQEQARHVSRQRTQLVCHRQKLEAQGRSLLISHALPAPAHWWKEQPWRRLGQHLPAWMRARLEMARPALLSLQAQINALTSELEAFASFPLPRGLGKLTSVVLTREICDWHRFNNRRAISSYTRLCPGERSSGSKRLARCVTKRGNPRVRAALVECAWRMVRFQSHYPPVQKRLAILAKGSRTLGAVRKKAIVAVARRLAVDLWRLHTGRCTAEQLGLKL

SEQ ID NO: 322927 - protein, 368 aa, unidentified
MRKSIKSRQTSGAQAHPSGETIGIDVGDKTSRYCVLSEEGQVVEEGNLRNTEPSLKKRFGSLGRTRIALETGAQSGWISRLLEGYGHEVLVANSRELYGISQSDRKNDRNDAEKLARYARLDPELLNPIHHRSEQQQTDLCAVRARDALVRSRTLLVNNARGLAKIQGLRLPPAVTPTFGERSLAGLPMPLRAVLKPLLEQIDQLSRHIAQYDTLLEQISAARYRSETELLRSVPGVGPLTSLTYVLTLSEAQRFAHSRDVGPYLGFQPKQKQSGARDPQLGISKAGNSYLRKLLVQCAHHILGHFGTDSQLRRWGLKLAEGGGQNAKKRAIVAVARKLAVLLHRLWVSGRPYQPFFGQLDPSAMAQA

SEQ ID NO: 322928 - protein, 366 aa, unidentified
MKKINTVQIFRNEIFGKQKLTIGLDLGDCWSSYCVLDEAGKIILEQRVATIAEAMKQTFERIPRGLIALETGTHSPWVSRLLMELGYEVIVAHAQKVELITKSNRKDDRHDARTLARLARIDPELLGPVRHRSAQAQIHLTVIRARAELVSARTALVNAARGSVKSYGQRLPKCGTQQVSRELAAKLSPELRDVLEPLLKEIESLNERIQEYDERMEKIAKEVYPEVSLLKQVKGVGTQIALTYVLTIEDPYRFPKSREVGCFLGLRPGRRNSGKSEPQKGISKEGDRYLRTMMVQGAHYILGPFGEDSDLRRWGLKLEERGGKNAKKRAVVAVARKLAILLHRLWVSGEVYEPLRNSHKAMRAAA

SEQ ID NO: 322929 - protein, 351 aa, unidentified
MDHIGIDVHKKESQICILTEDGELLERRLRTEPGRFADALGGRPPARILIEAATESEWVARCLEALGHEVIVADPNFAPMYAQRRRTVKTDRRDARALAEACLLGAFRRAHRLSDAQRNVRARLTVREALVRTRTGYISIIRSLLRQHGWRVRSGAPESLSHRVRALPPPGRLLSEIAPLLAVLRHVNAQIAYCDARIETLTATDTRVRGLRTVPNVGPVTAAAFVATLDEATRFRRSHEVEAYLGLVPRERSSGETQHRGRITKAGPSRMRRLLVQAAVSTLRRPDPRMAPLREWAMRIASRRGKKVAVVALARRLAGILYAMLRDGSEYDPRAVQAARRHATMPSLTRA

SEQ ID NO: 322930 - protein, 362 aa, unidentified
MKNHSKENAWKARPEQTVGVDLGDRFSHYCVLNGDGEVTEEGRIRTSEEGFRQHWEGEARQRIVMETGTHSPWISRRLQSWGHEVIVANARKLRAISQNESKNDRQDAEMLARLGYSDPKLLRPIRHRSVERQRDLNLLRARDTLVRARTMLINATRGLVKSAGRRLPAASSENFAAKVAAAVPAELAAATQPLLQQITALTAQIRGLDRTIEKLSERYPEIHILRTVPGVGPVIAAAYVLTLDGVDAVKQSRSVGAFLGLRPRQSQSGDSDPELNITKTGNLYLRRLLVQAAHYVLGRFGPDSALRRWGLKLATGGQRSKKRAVVAVARKLAVLLHHLWRTGQNYRHFPETFPAPASATVS

SEQ ID NO: 322931 - protein, 339 aa, unidentified
MKDQDVSDVIKTKNRTAMGYIGIDVSKATFVVAYSADKGGKIRTFDNTTAGIKQFIGTLPKDGSIHCVMEATGNYSAMLLYLLNVAGITVSMENPLKIKNFAKAMLSTVKTDKSDARLIALYGEKMNPQPFKMQGEAILRLRQKRTVIRQLTKQITAMSNLRGSLVCLPVPDKGATHTVDETIKFLEKRRDRLQSELTELVEVEFSRQLALLTTIKGIGITLATALIITTGGFTYFQNAKQLSRYLGICPTYEQSGTSVNIRGHINRNGDAYTRGLIYVAAWNASRFNAKCGETYTRLRQNGKPGKLAMIAVANKLVRQAFAVVAHDKEYVDGFVSNRH

SEQ ID NO: 322932 - protein, 318 aa, unidentified
MKQVDEYAGIDVSKAQLDVALRGSDRHWSVANDETGISELVTALQAVRPVLIVLEATGHLEMPLTAALLAAGLAVAVVNPRQVRDFAKATGHLAKTDTLDAQVLAHFAQAVHPPARPLPDANTQALAAVVTRRRQVVEMLTAERNRCASAASAVRPRIERHIEWLVQELADLDTDLRQRVQASPAWCAQAQILQSIPGIGPTTACTLLAELPELGQLDRRKIAALVGVAPFNRDSGPRLRQRHIWGGRTAVRTTLYMATLVATRCNPIIKVFYQHLLDSGKPKKVALTACMRKVLTIANAMLKHNVPWNPVHASQTAL

SEQ ID NO: 322933 - protein, 400 aa, unidentified
MNAVGIDVSKGKSTVAVLRPFGEVVASPFDVIHNDSDLKQLVDLIKALPGESRVVMECTGTYFEPIAQFLHNNGIFVSVVNALLVHDYGGNSLRKVKTDKKDALKLASYTLDRWTELEEYVPADEQRKTLKILNRQYNQSNKIQTMMKNNLISLTDSVFPGINKLFTSPERQSDGHEKWVDFLNAFPHKDCIAGLYLSVFKTKYKSWCKKNKYNYSDSKAEEIHTFAKSIIAVLPLNYSVKLLVTQAVMQLNTILETVSSIRKEMDRIASSLPEYKTVMAMYGVGKVYGPQLMAEIGDTRRFRNRRAITAFAGLDAPPYQSGQLDITSRHISKRGSAALRKVLFQITQVFILNKPENEPVYQFIDKKRSEGKHYYSYRIAAANKFLRIYYAKVNQTLKLL

SEQ ID NO: 322934 - protein, 377 aa, unidentified
MKAPSTRPAAVLGLDVGKSSHWACLIDRDGEVLASAPVRNREAELDALFASAPAGTLVVVDQFRNIGSLAVRRARAAGLGVAYLPGLAASRAAGLFAGEAKTDERDAAVIARTALGVPDSLSGVPGRGEALEAARALSSQRDHVVACATRDKNRLRAVLLESCPALEAAVDLSDRRWLELLAGFGGAWGIARSGAEGPRAEAAREAAAASTAPPPALVEAENRQVRFLAARISEALDEAGALEAETAALLEGDETYACLLTVPGIGPRTAAQLAVSVDIGRFPDHDHLASYCGIAPRVRSSGTSVRSVRASRRGDARLKSLLIFSCNSLVRSSGRYGEYYRACRTRGMGHGRALKAVARKRIRAIYAVMRDRVPYRE

SEQ ID NO: 322935 - protein, 349 aa, unidentified
MNYMGIDHHKQYSHMTVVDEKGKIIKTDHVLNRRREVEEFLEGCKEGLIAVIEAGRATYTMLDLLEELGVDVKMAHPLQVKAIAQAKIKTDKRDSKILAHLLRADLIPEVYRRDPENRATQRILRHRMGYVRMQTQIKNRIRTLLAKQQEEIREMAESENHLFGIRGMETLRQLKLPGKDNEMLESLIMTYGHVQRRIKQSNALVKEVYDSCEEARLISTIPGFGKFFSVLVATEIADIGRFASAAKLHSYAGVIPSTHASGEKSYHGKLVKQGNKWLRWAVVEAVWPAMRADFDVRVFYLKYAKRKGANPAKIAVARRLLTIIYRVLTEKRTYIPYKREHKRLPSCLN

SEQ ID NO: 322936 - protein, 327 aa, unidentified
MYVCILNSSGDILVHRNIQTDQQRFLSLIAPYREDLVVSVECIFTWYWLADVCAREGIPFVLGHALYMKAIHGGKAKNDKLDSHKIALLLKGGMLPQAYVYPADMRATRDLLRRRMNLSRQRAHLIAHIQNTVHQYNLPALGVRLGKPTERGGVAEHFPPGATHTMVKLDLDLIATYDQHLSALEWHLVKQAKIHDAQAYHLLGSVRGIGKILTLVLLYEIHDIRRFPTCGQFLSYARLVRCPKESAGKVVGKSNKKIGNSHLRWAFGEAAVLFLKGNPEVQTWIEKQASKHGKGKALAILAKKLAQTVYAMLRKNHCFDETEFMAN

SEQ ID NO: 322937 - protein, 341 aa, unidentified
MNNLPVFVGLDYHQDSVQVCVLNQKGDVLLNRSAGNDHLELARLVNPLGQVQRVGMEACCGSADLGQKLVEQLGWNVSLGHPLYIARLKSSPDKSDFSDGRLLADLTRVGYLPQVWLAPAHIRDLRQLVNYRQSLVKQCTALKLRVGAVLREQRVKIGSDRGARWSKGWIASVRDNHDLSEQARWIVDDLLDEIKHCGKKVALAESRLRRFTANDAVVKQLMEQPGIGEVTAWVMRAYIGRFDRFKTGKQLARYCGMSPCNASSGRKTSDAGLIDGCNKMLRATIVQASHRLIRTHERWGNLAGSLKKRGKPACVVVAAVGNRWLRCLHHAMKASSAATAN

SEQ ID NO: 322938 - protein, 346 aa, unidentified
MLHAGLDLSRKRLDFHLLDEEGESVEVGAAAPDADGLRSLAARLGRHGQPLRAAIESMTGARFVHDQLELHGWDVEIADAVKVKGLAPLACKTDRIDAWVLAELARRDLVPKLWLPDPAVRGERERARFRLHLVRQRTALKNRVHATLIAHGHPCPVSDLFGARGRALLERLAIPEPWRGTLQASLRLIDELEREIDALERELRRLGAEHRYVPLLATIPGIAWVLGYTIASEIGDIHRFASPRKLVGYSGLCPRVEQSGERDWRGPITKHGPRYLRWALIEAAQHAGRHPAYQGLYQRKRAQHPGPRGSKVAAICVGRKLAEAIWQMLSRNQPFAPAGATLDLAA

SEQ ID NO: 322939 - protein, 346 aa, unidentified
MPIVGGLDIHRRQLTFDYLDTATGEVKRGQVAPADRARLRAWLARFAGREDVAFALEGCTGWRYVAEELAAAGVAAHLAEPADTAAARGRKRHAKTDKTDSRHLRELLAEGRLPECWIPPSRVLDCRALLETYHDLRAERTAWVQRVHAVFFHQGAPALAGGALRAGRCDLEALRAAGACWLSPAGQLQVATALEVLAALEARLEDLRHELADAARHLTGARVLAARLCGAGPVTALAMTCWLGGAGRFSSSRRAVRFAGLDVTVHSSDSRRWPGRLSRQGPPALRWAVYEAGKVHARGTAPDHACYAQVKDRKDGKRAALSEARKIVRQACHILTELGDDALSAA

SEQ ID NO: 322940 - protein, 312 aa, unidentified
MLTPSVYLGADVSNLNIDLGCPHFSVAASIPNTPAGYRTLIKTLVRRPVPVHVVCEATGPYHQGFVAALHQAGVVVSVVNPRLPRDFARARGQLAKTDKIDARLLADYGQTMQPAPTPKPDASLALLAELVTRRAQLVEDRAREKVRLGQTACAEALASLKLHLRHLDGQIGKLLDRITELVEATPALHAKVARLVEVQGVGALTASALLAALPELGTLSKNEVTALAGLAPFNRDSGAYRGTRSIRGGRSAVRLTLYMAALSAARSNPILKAVYHRLRAAGKAHKVALVAVMRKLLVYLNSLLKNIALNPA

SEQ ID NO: 322941 - protein, 388 aa, unidentified
MSSTKYIDKDVHTESISIAVRNSVGKLVMECVIETKASTIVQFINGLRGDLRVPFEEGTWATWLYDLLKPHVTEVLVCNTRKNASGNGSKSDRIDARKLSEQLYMNTIKSVYHGEHGLRTLKELARSYLTISKDLTRVMNRLKALYRSWGIPCGGKEVYAPRHRAEWLAKITEAGVRRRAEHYYQQLDFLRPLRQEARRDLLLEAKKHKPWKLLRLIPGIGPIRAAIVIAVMQTPHRFRTKRHLWTYSGLALETHDSAQYRVAEGQLQRSKKPTTVRGLNKDHNHDLKEPMLPACESPEPPYALPDNRRKPLGQEPPIGPCIATLEWTIIRLAVSETDGRRHDSEMGTTGARKQSLRPISWAECREKKIGIEPKGSTFFLTFPLIGLF

SEQ ID NO: 322942 - protein, 378 aa, unidentified
MNRIIKIGMDVHTTNYTLCIFEPSFEHDGTVHCITQVKPEVKNIIHVIETFKKKHENEELNIVCGYEAGCLGYSLYHELKEKGIECVILAPTTMKTEKGGRKLKNDYRDAKMIAECLAYGGYSAVHIPNELDNSVKEFIRMRDDIKENLKSIKQQIIAFLTRNGKQFEGKSFWTRKHIDWINTVSFSEPLLQDTLKEYMIEYNHLCNRIETLDRQIEEISLKEEYVEKVQQLQCLIGIKTHTALSLIVETSDFNRFKKGNMYSAYLGLIPGDDSSGGHENKLGITKAGNSHLRRLLVEAAQGYTRGRVGFKSKDLKSRQEKCSSEVVAYADRANERLRRKYYRMTLRGKKFNVAKTAIARELACFVWGIMTDHIDLCN

SEQ ID NO: 322943 - protein, 479 aa, unidentified
MTPYKDAFPEPCPPALTIPEPSVLLPSPSLPLYNPHAAGIDIGEAEHWVAVPPDRAPPPVRRFGTFTADLDALADWLLDCDVTPVAMESTGVYWIPLFELLEARGLQVFLIDPRQAKRAPGRPKTDRLDCQWLQRLHTYGLLAAAFRPADQVCVLRSYLRHRQMLLTYGAHHIQHMHKALQQMNLTLSQVVRDLTGATGMAILKAIIAGERDPLTLATLRNPHCQHSEDEIAKALQGTWRVEHLFALQQAVELYQFYHQQLTVCDQHIQTQLATFADKSAGQPLPPKARRHKKANEPHFDARTPLYRLAGVDLTTIEGIEEGTALVILSEIGTDMSRWPSVKHFCRWLGLSPQHKISGSKVLSRRVRPGAQRVAVALRLAARTVHKARTALGAFYRRLRSRLGAPKAITATAHKLARLVYSLLKHGSAYVKQGLEAYETQYRERTVKAMARQAKALGYTLVALGTPEVQSLAAVAAPTS

SEQ ID NO: 322944 - protein, 397 aa, unidentified
MIAVGIDISKSKSKVAVLNSDGSVRTKPFDVHHNCQELDALVAYIKETGEQPTILMEPTSHYHYPVLKVLQDAALPVCLINPYQMKKYGDTELRKAKTDKKDALRIAKYALEKSYLLTPYTSTDQKFEDLKFLSRQYSQRINNVKYAKVQLINLLDETMPGITDLLPLKSRNPDNCVLLLFIKRFKSFDYIRKIGKTRFLSSYETLVRKTTDRYAASKGLAIYELALGSITTRGDNSFMALAQEQCVDLVSLAQKSADALILQMQNIAETIPEYKVLRAMNGVGDRLGPVILAEIGDIRRFHSGKALNAYAGNDAPPYQSGQFESRNRHISKRGNPALRKACFEVMQALKLTRPQDDPVYLFLLKKEQEGKPYNVAKMAGVNKFLRIYYARAMELYK

SEQ ID NO: 322945 - protein, 444 aa, unidentified
MKALPVLDPKAAGIDVGSERLHVSIGGDVPKVFGTFTGDLEALRDWFKEQGVHTVAMEATGVYWLYLYEVLEATGMEVVVVNGRHVQNVPGRKTDMADCQWLATLHAHGLLRGGFVPPAEIRQLQDYQRLRADHIIGAASQVQKMQQALERMNVKLHDVISDLTGVSGLKVVRAILKGERRPGELLALCDEQIQKKKSVAVKESLRGCWKREQLFALRQALELWEAYQQKISDCDLEMQALLEQLAEPKGPEGGQGILGPVKLAPAKVPGKNAPAIERFQELLARICGGCDVTRIPGLGMYLVLQLISEVGTDMSRWKTEKHFVSWLGLAGGRKQSGKRKGSVKAHRNRAGRMFCAAARSLAQTVDKALGGFYRRLRGRLGGLAANVALARKLALLFYRLLRYGADYVEKGLKAYEARVLETEARLLRKLAKKQGFTLVPAAPG

SEQ ID NO: 322946 - protein, 391 aa, unidentified
MIYIGIDVAKDKHDCFITNSDSEVLFKAFTIFNNLDGFNDLYQKIESVMDDVTKVKVGLEATGHYSYNLLGYLIDKGLPTYVINPLHTNLYRKSLSLRQTKTDKVDARTIASILMSDVNLKSYSDTFYHNEELKSLTRYRFDKVKERAKLKTSVSRLVCILFPELEKLVPTLHMASVYALLSEFPSAKHVATAHLTRLTNLLSESSKGRYGKDTAITFRDSARASIGSNMPAKSLELKHPIKLIQELDSEIDEIENEIKIIMDEINSPILSIPGINYRMGAMIIAEIGDFNRFDSPDKILAYAGFSPSTYQSGQLDGAYAHMEKRGSRYLRYALYNATKYVCHWNPTFAAYLAKKRAEGKHYNVAISHAVKKLVRVIYHLEKTKQQYIKAA

SEQ ID NO: 322947 - protein, 404 aa, unidentified
MNAVGIDVSKGTSMVAALRPMGEVTIAPRSFPHTPAELENLGYLILGLGEDTRVVMEATGRYHEPVAAALHEMGIYVCVLNPILIKQSGGGSVRKVKSDKKDALKIAKYGLDNFHKLREHTPMDATRQQLKLFSRQYNLYMNTAVSLQNNLISLLDKTFPGANELFKSPQRADGSQKWVDFVATFWHCDCISRVSEKAFIVRYQKWCKRKGYYFSQEKAEDLYASSAGNITTLPKNNNTKLLMTAATAQLTATANTLASIRAEMIRLAKELPEFDTVRAMYGVGDITAAQLMAELGDVRRFDNRGSIVGFAGVDPSVNGSGKSERKSNPSSKRGSPHLRKTLYQVVSTHLKRSPTDEPVYRFLDKKRSEGKPYYVYMTAAANKFLRIYYARVKECLNALDKTES

SEQ ID NO: 322948 - protein, 378 aa, unidentified
MPSENIIHLAIELSVSSWLVAVRLPGAEKSRLHRITGGDTTALLALIAELRARASAKLGQAVEVACCFEAGRDGFWLHRLLTAQGIAAYVLEPTSILVNRRARRAKTDRLDAEGMLRVLAAWLAGDGQICSMLRVPTPEEEDAKRPHREREHLVQTKLRLENRIKALLFTQGIRSRPSLRSWERDMAELRTGDGRALPPLLRTELDRLRRQLVVILELIRELEAERAAAIEAAADDAMVQKIIGLQRIRGIGPNVAAVLVREVLYRSFANRRQLASYVGITPMPHQSGGMDRDRNISRAGNPRARTMLIQLAWLWLRYQPGSTLALWFRERVGALQGRARRIAIVGMARKLLIALWRYVETGVIPDGVEITMPEAATA

SEQ ID NO: 322949 - protein, 341 aa, unidentified
MNITVVGLDIAKNVFVLCGLNQAGKPMLQRRLSRAKVLGFFANLPVCLIGIEACPGAHYWARELLRFGHQVKLVPAQYVQPFVRGDKTDARDARAIAEAITRPDMTFVQINTDAQQDLQMVHRVRQRLVKERTALLLQIRGLLNEYGIVFPQGSQRVAAVLRELLADTQSFSGLALVIWHDLLVQLQTKEQQVADYDARVQQLCRDTPQAARLQQAPGIGPLTATAFVAAFGNASHFASGRKLAACLGLVPREHSSGGKQQLLGITKRGNAYLRTLLIHGARTLLRHADKKTDRLSCWACSLKARKGFNVAAVALANKLARIAWAMLSRDADYDANLLQQA

SEQ ID NO: 322950 - protein, 416 aa, unidentified
MSLALPEALFFTGIDWAAETHAVCVMDAGGKIVAEFTIEHSADGIALLTGRLARYGTPGGMPVAIERPNGRLVDLLLEAGHPVVPVSPNAIKTWREGEVLSGAKSDAGDAAVIAEYLRLRQHRLRTAAPYSDETLALRTVVRSRGDLVEMRVAATNQLSALLEAHWPGARAIFADVESPISLKFLTRYPTPAAAAHLGEKRMAAFLVKHGYSGRRTAAELLARLRAAPAGTNRESLTEALRDAVLAAVGVLAALNAAVKNLDRSVAAHLGEHPDGAIFTSLPRSGQVNAAQVLAEWGDCRQAYDGPDSVAALAGCTPVTSQSGKHRSVQFRWACNKRFRVAMTTFADNSRHASPWAAKTYSDARASGKDHPHAIRILARAWIRVIWPCWLEGIPYDPARHGAAAALARQTAQPIAA

SEQ ID NO: 322951 - protein, 399 aa, unidentified
MLYAGWDWASESHAVTVLDQDGKVVQRFSLRHDEAGLTDAMERLSSIAPPAELPVAIETTSGLVVDRLVRAGHPVVPIHPNAFHATRPRWGASRAKSDPGDSFKLADYLRTDGHRLRRLKPIDTSTEELQALVRMREDHLAARVAATNQLRALLQRHWPGAAEVFARVDSEIALAFLEDYPTPQAAAHLGEARVRMFCRRHSYCGRRSAAELLKRLTAAPTAASALGPHVVAEAVRAQVRVLRTLLGTIADLDRAIGAALLVHPKAGLLEPLPRIGELNLAQIVAEVGPILDRAVDVEHACAEVGAGPVTRESGKGRSVHFRWAVNIRARQALGIFADNSRHSSPWAANLYAAARARGKRHPHAIRILMRAWVRVMWACWHSETPYNPALHGGERRIAA

SEQ ID NO: 322952 - protein, 355 aa, unidentified
MNGLRYIGLDVHQETISAAVLDREGKLIMQSVFATRAAAILDFLDGIKGTLHVTFEEGVHSAWLYDLLQRRVARVVVCDPRKNKLLKSGNKGALIDARKLAELLRNNSLSPVYHGGMSALEVQHRTRSYTMLTGDTTRVMNRLKAVFRSQAIACPGRKLFRPDKRDSFVAQLATPGLRQRAESLYRELDALHPLRLRAKREMLAECRKHPAMKWLRSVPFLGKVRTAVLIGRVQTPHRFRTKRQFWSYCGLALQTHDSAEYRVVHGQLQRKSRPAQVRGLNWNHNHELKSLFKSAATMAAFRKGIFREFYSGLLAKGMRPEMARLTLARKIAAITLKIWKEGETFNAEHVKTQAA

SEQ ID NO: 322953 - protein, 404 aa, unidentified
MFYAGIDWADQKHDGLVLDETGRKLGSIRVAHTPEGLAKLDEWLAQLLGEQSRGQMACIIETNHGLLIAFLLEQGWPVYPVNPRTVDRKRSASGAKTDAIDAYLLAKTGRADFADLHRLTPDSEKVAELKTLTRDQDSLIQMQTRVVNQLTACLKDYYPVALKLFAKLQQKSTVLFLQTYPTAEIAMGASREQIARTLKQAGHTRAEATAAKIVETLHQPHLSASGVTTRTKSRLMLALVAQLLPLLEQIAAYDEEIERLFLSHEDHEVFSSLPGAGKRLAPRLLAEIGDDPSHYESAASLQALGGTSPVLFQSGTYSKPHRRRGCIKPLRNALHQFAWQSTQQEPWAKAYYERKRAEGKSHSVAVRALSNSWARIMFAMLTSHTPYTSATFETARHLHASKAA

SEQ ID NO: 322954 - protein, 348 aa, unidentified
MIIIGVDFHPEFQQIAAVDTDSGEFQEKRLAHREEAEKFYRAVAGQKVRVGMEASGQARWFERLLAELQVELWIGDAAEIRTRRVRKQKTDRLDAQLILRLLVEDRFPKIWVPSWENRDLRQLLWHRHRMVQARTRIMNQLQAVALNEGLRCKKRLWRKHGRQQLEAIRLAPWASRRRRDLLELLDGLTPTIAELSQAIEQEAEKFPEARCLMTHPGVGPLTALAFVLIIGRADRFQCGKQIASYLGLVPLEDSSGKRRRLGHITKQGSSMLRFLLVEAAQVTVRSVPEWRSKYFHLMMRRGRKIAKVAMARRLAIRLYWMWRKGWDYERVKKFGSHAGQLETGDGVQ

SEQ ID NO: 322955 - protein, 372 aa, unidentified
MKNYYVGLDVHSRESVFVVQDDAGVSLARGAIPTTASGLLQLRDSCGLAAGTSVALETGTSAFFVARELVRLELKPVVIDAHEVRRKAHRPEQKSDTRDALELCEGLRRGFYRSVVHVPSPAISNLRTTLSRRRHFIRIQTAEVNAVKRLMRGAGRSSGHRGSLRTDAHWQGLLDGDVVPAELKEHVRHHYAVWRQAAEQVRALDLSLGDSARERRAAVKRLETVPGVGPIVALTAIAVFAEVSRFESAKHAASYAGLVPSTFQSGERDAHGHITKRGSAELRAMLCEAAHHARRAAHPLHPHFARVCTRRGYKTAVVAVAHRLCRILFAMLRDGTDFSVSRTGVEQGDFKRTTTYSYRLRPKPAGRLPVAG

SEQ ID NO: 322956 - protein, 400 aa, unidentified
MNQRQTRVWVGIDAGKGHHWAAVVDETGTTLWSKKIDNDESAILTALGEILELADEVSWAVDISGTSSALLLALLAAHGQQAVYVPGRTVNRMSGAYRGEAKTDARDAYVIAETARHRRDFATIDVPAQLAADLALLTAHRSDLVADRVRMINRLRDVLTGIFPALERVFDYANHKGALVLLTGYQTPAALRRRGRARLTAWLANRGVRGADAVAATALEAARAQQTALPGEDIAAQIVADLAGQILALDDRLKRIDQQIHTTFRGHPQAEIIESLPGMGPILGAEFVVAAGDLAAYADAGHLASAAGLVPVPRDSGRRTGNLHRPKRYSRRLRRVFYLSAQTSMMREGPNRDFYLKKRGEGCKHVQAVIALARRRASVLWALMRDGRMFTSTPPTAQAA

SEQ ID NO: 322957 - protein, 299 aa, unidentified
MSSVSSAAGAIHLGMDTSKNTIVVGILMPGDEVPVIDRIWNEEGSVRHLVSRLGDPAALRCCYEAGPCGFELYRLLSSMGVACDVVAPSLIPRRAGDRVKTDKRDASRLARLHRAGELTPVRVPSPAEEAVRDLVRVRAALLADRKRAQQRLTAMLLRHGRVWRSGSYWTQAHERWIAGQRFEEPALAVALAHYRAALDTRRAELDAIEAELAPWAGREPLAGTVARLGCYRGIAELHSLALAAEVVDWRRFPSARAFMGFTGLVPGEYSSGDKTRRGSITKDLMGLRPAHCAETGFRV

SEQ ID NO: 322958 - protein, 390 aa, unidentified
MQNHDVIVGVDVGKSFHWLHVCDEAGRTMWSRKVDQDERQLDEVFTALGAGGERVLVVVDQPKNIGALTLACASRAGCDVGYLPGLAMRRAAGMLPGNAKTDQRDAQVIALTARVMPEALRPAGVDPKRAEMDALTSFDHDCMTERTRQLNRLHALLAEVNPMFEAAVGDQIDSPFVLGLMEHFGGPWGMRTAGQAAVRRWASKQKRVPNDVLDKAITSAWAMGHQPGGALIHEQLAIPAAARRVAELAVTRKANQARINQMLDSHPTYQALLTMPGVGPATAAVLVTTVDIALFPDHDRLASYAGIAARTRQSGTSIKGETKTRSGNKALKNALYLSAFAAMSWDPAARAFYDKKRAAGKRHTTAVIALASKRLKIMYAIMRDNTPYRP

SEQ ID NO: 322959 - protein, 320 aa, unidentified
MDQTEYVGVDVAKDKFDVATFINNRYKHSVYPNDAKGHAEFAAWLTQNSTSPWVCMEATGHYSEGIADFLLKKSIKVSVVNPYQIKNFAKASLARNKNDIIDGRVIREFCKCMQPRVYVTTSEAQKQLKGLMKLLDMLKGQLVQLNNQLHSLHEGMATNLLIKWIKNLEKEVSLVEQKMTALINEEPMLNRNMRLITSIKGIGKLTAFRVLALMPDVSSFQTAKQFAAYIGITPKQHQSGKLFGKTTISRLGDSRLRKALYMAALVAKRHNKGLAAFVTRLQNNGKTPKTIVCAVMRKLAHIIFGVLKSKLPFNENLSCI

SEQ ID NO: 322960 - protein, 461 aa, unidentified
MARTRARQRSPRATPPSALPQVNANAAGIDIGATSHFVAVPADRDAEPVREFATFTGDLYRLAEWLRACGIETVAMESTGVYWIPLFQVLEERGFEVRLVDARQLKRVPGRKSDVLDCQWLQQLHTFGLLAGAFRPDDQICVLRSYMRQRAMLVSYAGQHVQHLQKALVQMNLQLAVVLEDITGATGLKIIRAVLAGERDPHRLAALRHGKCKHDEATIAAALQGDWREEHLFALEQAVELVETSQAKIAATDARIQAHLQRFASRATGAPPPPGPRPRADRHDLGFDATAELYRVTGVDLTAIAGLQAHTVLKVLSEIGLDMTRWPSARHFGSWLGLAPNNRVSGGKVLSRRTTPTANRAATALRVAAQALHRSKSALGAFLRRKAAHLGMPKAITATAYKLARILYALLATGSAFVEPGQDAYERAYADRVVKRLSRRASELGYTLVKHDAPHALATSG

SEQ ID NO: 322961 - protein, 358 aa, unidentified
MYKFMKKFFIGVDVSKDTVDVSFFDDDRMKSPEYLAQYSNSPKGFREMVKDLRMCCHGVSSGQWLFCCETTGRYDHPLCHWLVDHGMVVWRESALQIKWSSGIQRGKNDRVDSLRIAEYAWRHQDKMQKFVKPSESLSNLKAAFTHRRRLVEKRTATRCQLKSMSSEKGLSASVARMIVRDLSREIERLSASITTMDESIQKIIRSDSELDRNYRHIISVKGVGPITAVALIVCSGNFKAITSAKKMACYCGVASFRSQSGTSINRKASVSNLSNRQIKSLLSMAARSASRSNPVFAEYFNRTLSRGKPVALVYNNLRNKIITVVYKLIERDCDFDVDYMRMHSTGQRANEPAIREAV

SEQ ID NO: 322962 - protein, 370 aa, unidentified
MLYLAIDQHSKQITVCVRNEEGDTVLSRQVSTRPKKIEAFFKELLEMDPEFMAILEVCGFNDWLIEKLHQWNCHEIVVIHPERPAKRKTDRRDARKLGDLLWLNRERLAANEPVRGLRRVYIVTQREREDRQLTALRKTLGQRRTRTLNKIHRIINRHNLIWDYPTKSFQTQAGRRWLGEVQLPELDRLEMDMLLKEWTTWDEQIAQMHERIVERANHREPGEIFSAAQILMTAPGVSHYSALTLSSRIGPIGRFPRPRSLANYFGLTPGCRNTGKTTDRLGSITKEGSKIARFILGQLVLHFLKHDPQMRSWYRRIKKRRGSKIARVAVMRRITTVFWHMLTYKEAYSIGGPPPRLRQLSPSATRSDAA

SEQ ID NO: 322963 - protein, 335 aa, unidentified
MKKRYFMGIDVAKATFDFCLLSSTGACLWRGQFSNDACGIARFLAQLLARSRKPAQIHFALEATGVYGKALVAALHQAGLAVSVLNPAQVKYFAFSVLRRTKNDTVDAEIIARFCRERKPLATRPLRPIEEQLKVLVHERESRVGEQTRERNRAKKDPFQIALPTLISRQRQQRLKQLAKEIAQLDAAIDSLIASDECLKNQSQLLCSIPGIAQLTAAKVLSELAAKEFQSARQLAAYAGLTPAERRSGRFLYGKTHLSKIGNAFLRKALYLPAAVARRWCKPLKPWIAILESRKLHDLAIRGAIMRKLLHIAFGVLKHQKPFNPLLVSFAKTLL

SEQ ID NO: 322964 - protein, 386 aa, unidentified
MPKPNDCSRSVTAFEQNSTLIAVIEMSLSSWLVAGVVPGIERQPLKKLEVDEDALLKLLLRWRDEAVKAGRKIKRIAIAFEAGRDGFWLARWLRARGVEAYVIHPTSVAVSREHRRAKTDRLDTELLKRVFLGWLRGEPDHCSMSAIPTLEQEDARRPNRERENLVGQRTRIVNRMKSCLIRLGIRNFKPTLRKAPERLEALRTPEGAPLPPNTRAEMYRDMARLRFVEDQIKEIEAARLQQLEQAPAEGPHAMIRLLARVIGIGVETADMLVNEILSRNLRDQKAVARYAGLTGSPDESGKRSREKGLSRAGNARVRRGMIQLAWRFLKFQKESALAQWYRVATKDARGAMRKTMIVALARKLLIALWRMVTTGEMPDGVAMRAA

SEQ ID NO: 322965 - protein, 369 aa, unidentified
MTIVADQPGPHPSSPERPGHPGWVVGVDTHTDTHAAALVDHLGGVRAEVQITADPAGYAQLVAWATGQLPAGQPLRWSVEGTRSHGHGLTRHLRTAGHTVFEAPKPVNSRRRRGGKSDPIDAVHAARATLAIDQDPTTHHAIPRADGHREALRILLITRRHDTDHRTATISLFKSLLLGATNLPETLRGLSTARQLRAVQNLPEDPTTDLETQIRLQALRRAATTITELNRAVYANEKQLRTLVEQACPGLLDLPGVGPVTAATLLTTWSHHGRVRNDAAYAALAGISPLPASSGKIIRYRLNRGGDRTLNAALHTIVTARRRMGHPPTSDYIARRTTEGRTTNEILRCLKRYTIRQLYRYLQANTITA

SEQ ID NO: 322966 - protein, 362 aa, unidentified
MGVIIGMDPHKRPATIEVIDERAVVLAAGRYGTDKAGYTQMLAAARTFAGRVWAVEGCNGIGRHLAHRLVHDGEVVVDVPPELSAQVRVFAAGNGRKTDEVDAHAVALRTPGLVQVQVEEDLVVTGMLADRRDELGRARTQVVNRLHRLLPELLPGGAEKFLSARQARALIASVRPRDLAGKTRRRLAVELEMIDKKTHKKTRALDKELTGLAAARGSALMDLHGIGPSGAARLLADAGDIHRFASRDRFASWNGTAPLDASSGSQARHRLSRAGNRRINRVLHIMAAGWLRNQTKGRAYYDARRAGGMPSMMAMRALKRRLPNVAFSCMLADQKRREAGPGGQSGTPADSSVTGPDPGHRP

SEQ ID NO: 322967 - protein, 315 aa, unidentified
MTQHSADTVGVDISKDFLDSNIHPSGEAKRFANNAKGHRAMIAWLAPRQVVRVVFEATGAYHRSFERTLAAAGFPMAKVNPRQARRFAEATGKLAKTDRVDAAMLARFGALLTPHTSEPVSETLDEMKELYNARAALVGDRTAALNRQKEMRSAVLKRFATQRLKQIDHQLEVIDQTLNQLCSADPALKTKFDILLSIPCVGQTTAFALLIEMPELGTLEAPQAASLAGLAPVARDSGNWRGKRSIRGGRAGFRQALYMPALVATRFNPDFKAKYQALIAAGKPPKVAIVAIMRKLVILANTLLKEGRVWSPKQA

SEQ ID NO: 322968 - protein, 391 aa, unidentified
MICVGIDVAKDKHDCCILDSEGTTLADCFTIPNNLDGFKRLLQTIKDCTQKSDKIKVGLEATGHYSCNILGFLLDNDLPVYVMNPLHTNLYRKSLSLRKTKTDRVDAKTIATMLLSDVDLKSYTDTAYYNEELKSLTRYRFDKVQERAKLKQSVSRLVTILFPELEQLVSSIHGTSIYALLSEYPGAKQISEAHLTRLANILVTTSRGHYRKDRATHIRDAARTSIGSVMPAKSLELKHTIKLIQELTSEINEIEDAIRKIMDELKPPILSIPGMGFYSAAMILAEVGDFSNFNSPDKVLAYAGCSPSTYQSGKLTNCYAHMEKRGSRYLRYALYTATKYVCYWNPVFTEYLTKKQAEGKHYNVALSHATKKLVRLIYALQKSGKAYLAIT

SEQ ID NO: 322969 - protein, 346 aa, unidentified
MYVGIDVHLNQWHVCVRTSCLSPKPFTMPPSAARLYEHLCRNYPEGSYHSAYEAGFCGFAPHYELTALGIDNIVFNPADINDSQKERVRKCDTVDCSKICRNLEQGNLKALFVPDKSLLADRSLVLARQTLVKERARTKQRIKSLLYYHGIAYPAEFADNRSHWSKAFVEWLGRVFDDVQSGNAVRMAIFTDNLRFINEKLLALDRLICKMIRERHSRTDALLRSVPGIGALTAAKLCVSLGDIRRFRSSDHLAGFIGLVPDTRSSDDKEVVLGLTFRGSRLLRPALIESSWRAITLDPALGAAYTALRNRGKHPNVAIVRIARKLVNRIYFVLSKETPYEPARLR

SEQ ID NO: 322970 - protein, 441 aa, unidentified
MAELHVLDQRAAFVDVGSEQMHVSIAGGAPVVFGTVTTQLHALRDWLLQQQAHSVAMEATGVYWLPLYGVLEAAGLQVVMVNGRQTRNLPGRKTDMADCQWGATLHAHGLLRPGFVPPEHIRRLQDYVRLRNDHIMEAGGCVQQMQKALERMNVKLHDVISDLAGASGLAVVRAILEGERNPEKLLALCNVQIQRAKGEQVKEALRGTWAQEHLFALGQALQTFEHYQRQIADCDRQIQALLPEPPDAQPPSQAHQDKARKRPGGNAPRIPGLRKILTHMCDGRDATVLPAHTEYTVLQIISEVGTDLTKWCTEKHFTAWMGLAPGTRQSGKRRGNVKRSRNRVGRLFCVMARSLARSKDIALGGFYRRLAARRGGLVANIALARKLAILFWRTMVKGVDYVEHGLASYQAKVRETKQRTLRRLAKELGHELVPVASPLSH

SEQ ID NO: 322971 - protein, 371 aa, unidentified
MEHTRFVGLDIHKERLSIAVAESGRSGAVEYLGEIANEPGAISKLCCRLRRPGKPLAFCYEAGPCGYGVHRQLTSLGHRCDVVAPSLIPTKAGDRVKTNRRDATMLARLHRAGELTPVWVPDADHEAMRDLIRLRSVVRQIATRARQHLQGFLLRHGRKHRGGTAWRMAYRRWLSTLSFEHPAQQIAFQDYVDAVTDAERRLKRVEEQIIGLLPEWNLRPVVDALQAMRGIALINAVVLVTEVGDFTRFLNPRQLMAYFGLVPGERSSGETVRRGGITKTGNTHARRALVEGAIAYRMKARIGRHKVDRIEALPKVIRDIGWKAQVRLCTRYRRLSARGKTANVVTVAIAREMVGFIWSIACTIQSAPQIA

SEQ ID NO: 322972 - protein, 334 aa, unidentified
MALNTLAIDIGKHSFHLFGIDDDGVIVSRKVSRLKLVATVDRLDPKIIAMEACGSAHHWGRMFQEAGRMVRLISPYFVRPFVRGSKNDATDAQAIFEAAGRPTMRFVPVKSLECQDLQSLHRIRDRLVHNRTSLINHTRGLLAEYGIVLPQGATRFTLQVRQAVVEAELSDLARELFEELLDQLGDLDRRIAHIDKHLIAICRDKAACRRLVGIPGIGPVVATALLAAVDDGRQFGSGRDLAAWIGLVPRQYTTGGKPRLGGIGRRANHYLRRQIVHGARAVMSQAGRRSDPRAEWMKAVAARRGFNRAVIAVANKMARAAWAILVRGEAYAAA

SEQ ID NO: 322973 - protein, 350 aa, unidentified
MTISHYIGFDVHKKSISYCVKTADGKIVEEGKLRATRQVLREWAQKRREPWHGAMEATLFSGWIYDVLKPFAAQLQMGNPSMMKAIGAAKKKSDRLDARKIADLVRCNLLPVCYVAPVEMRELRRLLRYRNTVVAHAVRMKNKMSGLLMEVGVEYNKQQLHGKKYFTELMGRLDEVPESVKDMLRLSRSALEMFETTQRQLLDRLQKEALLIKRLEVLRSIDGVGEVTSLSWALETCDPQRFASIADAVSYCGLTSALVSSADKQQRGPISKQRNPHLQTVLIEAAKLAPRWNQPLAELHQRELKRGDRNRATLAVARKLVAYLLAVDKSGKPFQVRNPATGEREAAPMA

SEQ ID NO: 322974 - protein, 350 aa, unidentified
MIIVGCDYHPGLQQIVFVDTETGELKEQRLEHCEPAERFYRELASRGEKVRLGMEASGHSRWFERLLGELHIELWIGDATVIRAKRGRKPKTDRQDAQHILKLMLKDDFPRIWVPSWENRDLRQLLWHRHRMVQARTRLMNQLQAVALNEGLRCKKRLWREKGRKQLEAIRLAPWARRRREDLLKLLDGLNPTIAELTQAIDQEVEKSAEARRLMTHPGVGPLTALAFVLIIGRAERFQCGKQIAAYLGLVPLEDSSGERRRLGHITKQGSSMLRFLLVEAAQVAARVIPPWRNQYFHLAMRRGRKIAKVALARKLAIRLFWMMRQGWEYEQVKQFGSHAGQLGNRDGVR

SEQ ID NO: 322975 - protein, 370 aa, unidentified
MSQSSTLFIGMDVHKDTIAVAYVAQDHGAEVTSLGTIGTRQCDIDQLIRKMQSKAKHLIFVYEAGPCGYWLYRYLRKKDYDCWVVAPSLIPKKAGDRVKTDRRDAMQLARLARSGDLTAVYVPKVQDEAIRDLTRAREDAISDLKDAKFRLKAFLLRHDIRYTGRANWGPAHLRWLSEVVCPTPTQQIVFQEYVRAVHEHTERLQRLEQELHEHVKAWRLYPVVEALQALRGVQFTVAVTLVAEMGDLTRFDTPRELMKFLGLIPSEYSSGEQRRQGSITKAGNTHARRVLVEGAWAYRYPAKVSRHLQLRLETQPKIIQDISWKAQVRLCKRYRRLVSRGKHANVVTVAIARELAGFMWAIAKEVPITA

SEQ ID NO: 322976 - protein, 343 aa, unidentified
MDHFAGLDVSVKETSVCIVDDTGKIVREVKLASEPDALLAELRNPAYRFKRIGLEAGPLSQWLLSALAEAELPVICVETRHMRAVLKAQINKTDRNDARGIAQMMRVGLYRPVHVKTLRSQKLRMLLTHRKLLQSKAIAIENDLRATLRNFGLKVGIAGKVKFEARIKELVENQPDLAVLVEPLLIVRRVLREQIGILHRRLLAVVRDDEVCRRLMTVPGVGPVVALTYRATVDVPARFRTSKAVGAVFGLTCSKYQSGEIDRSGRISRCGDEMMRVMLYEAAQSMLFHSTKWSWLKAWAMKIARHRGMKKAIVALARRLAVIMHRIWVDGTEFRWTKEVVTA

SEQ ID NO: 322977 - protein, 343 aa, unidentified
MKKLKADEQALLRLLHRWRDEATKAGRNINRIAVAFEAGRDGFWLARWLQAHGVEAYVIHASSIAVSREHRRAKTDRLDTDHLKRAFIGWLRAEPDHCHMAAIPTLEQEDAKRPTREREKLVGERTRIINQVKSCLARFGVRGFKSKLRKAAERLEALRTPEGVALPPNTLAELRRDLLRLRVIMDQIKAIEVGRLERLKKAPKARPNAMVRLLARVIGIGIETADMLVHEILSRNLRDRRAVARYAGLTGSPDESGKRRREKGLARAGNARVRRGMIQLAWRFLKFQKDSALAQWFRMRTADARRGTRKSAIVAVARKLLIALWRFVTSGEIPIGVTLRAAA

SEQ ID NO: 322978 - protein, 346 aa, unidentified
MEDNLLLAIDLAKNSFQVCYMRNNGEVLLNKAISRNSLIKLLTGKKRFSLVAMEACGGAHYWARLAKGNGHDVKIIQPRSVKGLQLKQKTDKNDAYAVGVAALLPHIFSCNLMSEDEQGLQCLDRARALQLAQRTALSNQMRGFLNEYGIVLPKGIAPLVKRIPEILEDAENGLPDSLRQVLASQADILAMQTEQIEYYDCLIAEHIKQNKICQKLSKLEGVGPIVALGLMIRLGDGKEFTHSRDASACIGLTPKQHSTGGKERIGHISKSCADKRLRSLLYQGAMSIVYKVTLRAPTTEKERWLKSIVERRGKKIAAIAMANKTVRTAVALIKSDSDYQPLPIQA

SEQ ID NO: 322979 - protein, 418 aa, unidentified
MNAEGHTRGTRRYIALDIHKHYCVVAGVDREGQMVLQPVRVEHADLEGWLKKNLRSTDYVVIESTTNAWHVYDLLSPLVERVVVANPIKVKQIATARVKTDIRDTLILARLLAANLVPDVWVPPMPVRQMRQLLSQRRQLVETHTQILNRMHSVAHRHHLKHERGKRFNEQNTGWQKDTRLSQIEQFQLSLEMENRAYIEKQIERIGVEVKKICHQKPWSDSMAYVMSLPGFGVITAMTVLAAIGEIERFETPKKLGSYSGLTPGLEQSGTKNRGKGITKEGRRELRWALVEAALQAVKSDPLLKHRFNELQKRMHRNQAIVSIARHLLELVWYVLIRRQPYRHFSHERIAYKYLTWAWQMDEAARDGLTRQQFARYYLMRLGIGHDLMRIALDPKHPRRISSEAELLALRPELNHIE

SEQ ID NO: 322980 - protein, 325 aa, unidentified
METRSLCCGIDVSFTSLDVCYQNNLGELFHLRVGNNNEGFAKIMEHTGTQYHFVMEATGVYYIRLAFFLHGKGCSLSVVNALSIKRFIQMHGERNKSDKKDAGWICRFAIEQQPPLWQMPEGAYFQGKQLYNTIREYQEQIKRFNNQLHSLGLLPIQSKDAIRSIERMKASLKKEVKSLEGKLQELLQAWQPEQLKNISSVKGIGKRAAAMLIIFTQGFKHTHSHRQLISFAGLSPTEYSSGSSIVGKPKICKRGGKPLRDVLYMCAMNAMKTNQACKALYERLRAKGKTGKQGLIAVCNKLLKQVFAVMKSQTLYQPNYCSPKP

SEQ ID NO: 322981 - protein, 437 aa, unidentified
MDTLFAKVAGLDVHLKGIQCAVRCRQESGKLFTQVRSFGTMTRDLRALADYLQASGVTHVAMEATGVLWKPVWNILDGRFALVLVNPRHLKKVPGRKTDVTDAEWIAKLLQYGLLRGSFVPPRPVRDLRDLTRFRAQLAGEHTRVANRIHKLLEDANIKLGAVASDLLGKSGRKMLRALLSGQENVDELADMALGRLRDKIPQLKLALEGHCTEHHRYMLGRLLSHLGYLERQTEELSRRIEERLAELVPLSVQQRLDRIPGVNHKTIENILAEIGVDMTVFPDEHHLVSWCGMCPGNEESAGRRLRSRTRKGNRWLRRALAEAAWAACAAKRSYLRAQYRRLASKRGKKRALVAVGHSLLAQLPQHRAGNRLKVRVPSIFQSLFGWFLSQIFTGRMISIGTPSASYRTLWSGSGVALRRIRRTPFWPVGRTIVAIW

SEQ ID NO: 322982 - protein, 362 aa, unidentified
MTSMLAGVVDYVIGVDTHRDSHTAAVVDGHTGGVIRHLTVATDAFGYRKLQSFADSAAPGTRVWAIEGTGSYGAGLTTSLLEHGEWVVEIDRPARPARRDGAKSDDLDAVRAAREALSRDHLAAPRSRGDREALRVLVSARQGAVVGRTKAIGQLKALIVNAAQSLRDQLRRGTTDEQLQRCARLRTSPSQSIEHRATVRAIRGTARRALALEAEASEYETEIEQLVVRICPALLARPGIGTITAAQFLISWSHPGRIRSEAAFASLGGAAPIPASSGAVTRFRLNRRGDRQLNRALHTVALTRLRIHEPTKAYAARRTLEGKSAREIKRCLKRAIAREVYRIMENEALGVERVSPLPLDAT

SEQ ID NO: 322983 - protein, 353 aa, unidentified
MIIIGVDFHPEFQQIASVDTDTGEFQEKRLSHREEAENFYRTLAGQKVRVGMEASGHARWFERLLSELQFELSIGDAAEIRTKRVRKQKTDRQDARLILQLLLEDRFPQIWVPSWENRDLRQLLWHRHRMVQARTRIMNQLQAVALNEGLRCKKRLWRERGRQQLESFRLAPWASRRRRDLMELLDRLNPTIAELTQAIEQEAEKCPPAQRLRTHPGVGALTALGFVLIIGEAERFSCGKQVASYLGLVPLEDSSGNRRRLGHITKQGSSILRFLLVEAAQVTVRSLPEWRRKYFHLAMRRGRKIAKVAMARKLAVGLYWMWRKGWNYEQWTKFGSQGRKSGSHAGEPTASTR

SEQ ID NO: 322984 - protein, 414 aa, unidentified
MEKVYDICCGVDVHKKLIVACLRSGRKNEIRQYGATTRELLEMASWLYEARCEMVAMESTASYWKPLYNVLETWELPVMVVNAHHMKAVPGRKTDEQDAEWIADLLQHGLLKASYIPGKEQRELRELVQYRKSLIEDRGRELNRLQKMLEGGNIKLSGTVTQINGKSARNILNFITDGGYFDDAKYDEMLANKEIASNLKASKEQIIDDLNGVLSPIQRRVMKELLSHLDELNEHIRNLDDDIDRFMKQEDKNAADAIQEIPGIAATSAQVILSVIGNDMSRFPSDRHLSKWAGLCPGNNESASKRKSGKTTKGNKMLRTTLVNCAHSAAKVKSSYFSALFARISAHRGKKRAYVAVAHSMLIAIYHVLNDVAFRDLGADYYNQFNRERKANGMLKKLKALGYEVTIAAVPELA

SEQ ID NO: 322985 - protein, 389 aa, unidentified
MPQKNDLSRSLVAFEQDRTLVVVLEISLSTWLVAGLLPGVARQPAKKLGADEHELLKVIHRWRAEASRAGREIDRICVAFEAGRDGFWLARWLAARGVEAYVIHSASVAVSREHRRAKTDRLDSELLKRAFLGWLRGEPGHCGMAAIPTVEEEDARRPSREREKLVGDRTRIINRMKATLVRFGIRGFKPTLRKASERLEEVRTAEGVPLPENTRAELGRDMARLRVVLDQIKAIEADRLRKLEATSEIESGPSAMIRLIARIVGIGVETADMLVREVLSRDLRDRQAVARYAGLTGSPDESGSRRREKGLARAGNARVRRGMIQLAWRFLQFQPESGLATWYRERTADRRGSTRKTMIVALARKLLIGLWRLVTTGQVPEGVLLRQGA

SEQ ID NO: 322986 - protein, 381 aa, unidentified
MKKDSIAKLQVTKSQIRRMAAKQRLTVGLDLGDRSSRYCILNEAGGKASEDELPTTKAGLDSLFGKMAVCRIALEVGTHSPWVSRHLAAMGHEVIVANPRKVRLITQSVKKNDRMDAEQLARLARVDPQLLGPIRHRGAEAQGDLAVIRARGELVDCRTALINTARGLAKPMGERLKSCDADYVKESLAEGLSEATQNAIRPLLKSVEEITRQIGAYDKKIQEIEKRYPETKVLKQVHGVGTLIALTFILTLEDAERFAHSRDVGPYLGLTRKLRDSGESQPELGISKAGDVLLRRLLVQAAHCILRDGAPDSDLKLWGLTKVQAGAGKKGSKRRKKRATVAVARKLAVLLHRLWVTGEVYDPQYNRKAVEAAKGRGKAAA

SEQ ID NO: 322987 - protein, 347 aa, unidentified
MRFYTGQHRYYCGIDLHARTMYLCILDHETGKTLLHRNLRSEPERFLQAIEPYRDGLVVGVECIFCWYWLADLCADEDIPFILGHALYMKAIHGGKAKNDKIDAHKIATLLKGGAFPFAYVYPRGMRATRDLLRRRLLFVRRRSELFTHIRIVFHQFNLPAPAAAFHHPRNRLGVAEAIPDPIVRANVEADLAMAEQLDEIIRSLVGTIRDRAKLDAPDTLELLQTIPGVGPILSLTLLYEIHTIERFPRVGNFLSYARLVKSQKSSAGKVMGTSGSKIGNAHLKWAYSEAAVLFLQKNPPGQRLINRLRSKHGRGKALSILAARIGRASYFMLRRSTPFDMDRFLN

SEQ ID NO: 322988 - protein, 326 aa, unidentified
MATIGIDVSKKKLDLCWLRDAQAGKVKTRVFPNAHDHYPALLAWLLKQTNEEAGDLQVYLEATGIYHEPLAYWLHQSGVTVYVLNPARVRYYARSLGDQGKSDKKDSKRIAYFAQANPELTPWQPEPEEVRTLRQLAKRLETVQKDIQREQNRLEKAQFNRDTQAEHSITHVLALLRREAKRLIKEVDDHIDRHDGLKRDRRLLESIPGIGEVLSVHLLVTLRSRRFKSGRQVAAFMGLVPVEWTSGSSVRHAPRLSKNGDPALRQKLYMGAVVAMRHNPSIRRQYQRLCAAGKRKMSALGAAMRKLVHIAYGVLAHQKEYEPQPM

SEQ ID NO: 322989 - protein, 379 aa, unidentified
MFERTSVGLDVHARTVVSCALDAQTGEIIMHRMTPDHGEILAWILSLPAPVRVVYEAGPTGFGLARFLLAAGIDTVVAAPSKLQRPSGDRVKTDAKDALHLARLLKLGEVTGIRVPSQDQEAARDLVRSREDLRGDLMRSRHRISKLLLRQGIVYSGGQAWTGTHELWLARQRFDAPARQLTYESSLEAMHEISDRRDRLDQAITSMAYSSEYTPVVRALQCLRGISTLTAFGLAVEIGDWDRFTGSTIGAYLGLVPTEHSSGQSRSLGSITKTGNSHARRLLVEAAWHHRRPYNNPSRLMRSRWEEATSEARTRGHAGNRRLHERWISYLERRKRPVIANVAIARELSGWCWSLATGTPLGQSLISTGSWSLIQGQQA

SEQ ID NO: 322990 - protein, 350 aa, unidentified
MWYSGIDQHQSFCLITTYGPDGPPVKQARVASTPLALQQYVAEFPGPHQAVVESTGGWYWLADTLAALGVELVLAHATRVKAIAAPKVKTDKVDSDTLALLLRADLIPRAHMIRPDARGLRDLMRTRLRVVEKVVSAQNRIDRLLEKFHLEDVAQLNDELYQLQARCHAAQIQLLEEQIRTLERALYPFLIPNADVQRLLWIPGLGKVTAFTVYTEIDGIARFPSVQHFFSSCRLVPGADNSAGRTRHRSGAKAGNRYLKLAFSHAGIRAVQYYPEIRAFFQAQARKKPIRIARTLVALELARIGYQVADEAGGVQRALPGSPAQSPEARAVATPGQPIRLTGSREGPHA

SEQ ID NO: 322991 - protein, 347 aa, unidentified
MKTYVGLDVSLDETAICVVDEVGKVLAERKVPSTPEAIAGFITGRTSEVVRIGLETGSLSVWLHGELRARGLPVICIDARHAKAALSMRINKTDRNDAAGIAQIMRTGWYREAHVKSGPSHLARALLASRALLVGMRGDIANQIRGLLKTFGVIVGKPVGGFRKKAGEVTATDLAESPELARLVETLLAARDEVSRQIAALDREVLRTVRANDACKRLMTAPGVGGVIALSVWAAIDHPARFRKSSSVGAYFGLTPRRYASGEIDRSGRVSKCGDKDVRTHLYEAANVILTRIRRPSTLQAWGLELARRSGFKKAKVAVARKLAVILHRMWCDASEFRWTAGDPTAA

SEQ ID NO: 322992 - protein, 310 aa, unidentified
MIIHPGYVGIDISKAHLHIFDASRGRQQRCANAAKDIASLIRSWKRQPPFILFEATGHYDALLRRTLAKAQIPFARVNPARARDFARAAGYLAKTDSIDAKMLAAMAQCLHPEPAQPVDIDRERLARLHKRRDQLVAMRQQERTRASECACPDTNADISRHLTWLDREIDTIEVRIETLIAASTNLAAAADLMRSVPGVGPVTAAALLALLPELGARSPKTIAALAGLAPFNVDSGQCRGLRRISGGRKRVRDALYMAAVAASRSKSRFATFYKTLRNAGKPPKLAFIALARKILTTLNAILRDQIAFQP

SEQ ID NO: 322993 - protein, 338 aa, unidentified
MTIVNWARLFVGLDYHQDFVQVCVLDEAGKIVSNRRVENDWRKIIAAVPAGVAVQAALEACCGAADLADELLKAGWSVSLAHPGFVARMKQNPDKTDYSDARLLADLMRVGYLPKVWLAPAELRELRRLVRFRQQKVNERRNVKLRIRAILRDHRIQDLDGNPWTRKWLKCLAALEHIGPDTEWILQQHLTHLSRLNGEIRQVDRRLEERVADDAVVQKLRQQKGIGLVTSATMRAEIGRFDRFQTGKQLARFCGLSPRNCSSGNKQADAGLIKAGNPQLRAVIVEAVHRIMHHHPRWMKLAQQLKSRGKHNCLVVAAIANRYMRWLHHRMQPEALAA

SEQ ID NO: 322994 - protein, 320 aa, unidentified
MTSRGAEKMKNDTIGVDVSKDHLDAHRLADGATRRFANDKGGHKALIKWLAETPANRVVFEPTGPYHRAVERVLGASGVPFVKVNPRQARRFAEATGKLAKTDRLDAAILARMGALLELQARPARSEVLFELKELYVAREALVKDRTAAKNRGKALTLSLLKRQNAQRLEQIDRQIATVEAAILQFVQADASLADRFAILTSIPGLSNITAFALLIAMPELGSLEAGQAANLAGLAPIARQSGRWTGRSFIRGGRADVRQALYMPALVAARFNPDMKAKYAHLIETGKPAKVALTAIMRKLVVLANALLKANRTWTPKIA

SEQ ID NO: 322995 - protein, 347 aa, unidentified
MKIIGCDFHPSFQHVCYVDTSTGETGEQRLSHPDQARQFYLGLRGQKVRVGVESMGNLGWFQRLLSETGHELLIGDAARIRAACVRRQKTDRRDAALILRLMVEDRFPSIWQPEATEAELSQLLSHRCRMVRLAVRLGNQLDALAKNEGLVNVSSTSRAGRKRVEDLPLSSWRAVQRNDLYALYDTVHKRVLELDRFAREAAEAHQQACLLMTHPGVGAITSLAFVSVIGDWHRFPRGKQVASYLGLIPTESSSGQKRRLGSISKQGNSMMRWLLVEAATIAQRQDESWHRQYLRLSVAKHHGVAKVAMAHKLAVRLYWMLRSGKPYEEIVERNRHAGQSECPRGQK

SEQ ID NO: 322996 - protein, 369 aa, unidentified
MNTTTFVGLDVHARSIKAVALDAMTGEVRSATFAYDAAAVAEWAGSLDPAAKCVYESGVTGFDLQKKLTALGVDCVVGAVSKMIKPSADRKRKNDRNDAEFLARMLSVGNVVEVCVPDDECEAARDLVRALDDAREDLKRCKQRLSKFLMRHGYAFSETTPTGRRKGNWTAAHWAWIRSIEFPEKADDDVLAYYVDAVRQAMENKKRLEKLVEAEASKPRWKKRVDSLRCLKGVDAMTAADIVFEAGEFSRFKNARSFAAWLGLTPSEHSSGESARQGGITKAGNKHLRRVLVEAAWHYISASPHPKDLAKGQAPDPAARRHAAKGIRRLVKRREEMLGRGVHKNKANVATARELACWCWAVGRMIENG

SEQ ID NO: 322997 - protein, 397 aa, unidentified
MYIVGIDIAKRKHEAAVIDGEGTVIIKPFSFTNNCSGYNRLLAMLTKAKLPLDEVSFAMEATGHYWLALFTRLQKEGFRVQVINPVQTNSIRSFYIRQAKTDPRDALLIAEVIRFGHFSESTLHPENIYELRELCRGRHAIVSMQADVKRKVVALLDQVFPEYETAFTNMFGDTSMAILQTCPTPKELSEMPFEELCHLIEVSSHKRFRMAKAQELQALARNSFGFAMAGDVFSTMIRLYAKHLVFLKQQVREMDRKIAEIMETLDTPITTITGIGPTLGAYILSEIGDISRFSSAAKLAAYAGIDPTMRQSGEYNGVRNRMSKRGSPYLRHAIWLATSSAVLHDPALKLYFQKKRDEGKPYMASVGHACRKMVSIIYAVMRDNKAYTPCIPNEISA

SEQ ID NO: 322998 - protein, 346 aa, unidentified
MYYCGLDIASKSSYLYVTTKMGRKVASGEMETTREAFESRLGRYVKDGLAVVIEAGNQTAWIYDVLVAMGAKVTVANPTKIKLIAESRCKTDKIDARILCELLRLNALPRPVHMPGPRARELRGLLVARRQLISNRTKLCNVARGMLRQEGILLPARALSTLIGWKNLLSQGFKESHLAVVVSSYFDSFKTLTASIRKIDLELAECERKDPRAARLQSMPKVGRIAALTFLGAVDDPKRFSSSRKLVGYSGLAPTVRSSGERTVYGSISREGRSELRGVWVQIAHLVAYDTSRATQPLRTWFNRTAKRRGKKTATVALARRLLVIAYHLLRNETDYDAARLKRRVA

SEQ ID NO: 322999 - protein, 314 aa, unidentified
MTDKLYIGVDVSKDWLDIARNDRGEVKRIDNTTQAVADFLARLEQPPALVVFESTGGYERPLRAGLLAAGVAFARVHPNEIAAFKARRGARAKTDQIDARQLAAFGASELATRGLRPLVEGDDDLREMTTRRRQLVDLLQAERCRAGIAATGVVRQSLAALIATLEKACDDIEAEIGAHIAKSAELAKIAELLRSLKGVGPVTVHTLLGELPELGRLTGKEISALVGLAPRTKQSGKRSFRATTGHGRPGVRRVLFNAARAAIRWNPVMREFYQRLVVENRRPGKVALTAVMHKMLVVLNAIAKENKPWKHAVA

SEQ ID NO: 323000 - protein, 412 aa, unidentified
MKDLLEISCGLDVHKEKIVACILTGPLGKPTRSEIREFSTLIPDMIALRNWIVSKNCHHVAMESTGIYWMPIYEILEDAFYGDITLLVVNARHMKNVPGKKTDMRDSEWISTLLRAGLLNGSFIPEKKIREFRDLNRYRKSVIRDITSQKNRIEKFLQSSGFRLSSFISDIFGASGRNIILHLIEHGQIDKTALDSCLKTKTRNRIDEILMSVNGTLSEHQKAFLRILMTHYDSLKKHLAEIETSLEEDMAPFALQVEQLNSIYGISTTASCAIIAEIGIDMKPFKTAEHICSWAGLCPGNNESAGKRKSASVTKGNPYIKSMLCEIAWVIAGKRNTYLSAWYWRIKQKKGAKKAIVALARKLLVIIYTMLKQGTLFDESCFETRRKHCEQKQLSRYIRELEKHGYHVEAQS

SEQ ID NO: 323001 - protein, 370 aa, unidentified
MAQSSTLFIGMDVHKETIAVAYVAQDHGAEVTYLGTIGTRQCDIDQLVRKMQSKAKHLVFVYEAGPCGYWLYRYLSKKGYDCWVVAPSLIPKKAGDRVKTDRRDAVQLARLARSGDLTAVYVPKVEDEAMRDLSRAREDTISDLQDAKFRLKAFLLRHDIRYVGRANWNPAHLRWLSEVVCPTPAQQIVFQEYVRAVTEHTERLQRLEQELHDHVKAWRLHPVVEALQALRGVQFTVAVTMVAEIGDLSRFDTPRELMKFLGLIPSEYSSGERRQQGSITKAGNTHARRALVEGAWAYRYPAKVSRHLQLRLEIQPKIIQDISWKAQVRLCKRYRQLVARGKHANVVTVAIARELAGFMWAIAKEVPVIP

SEQ ID NO: 323002 - protein, 482 aa, unidentified
MKKRNIYQNQSQELLFLFENAGSNDKVMCVPMDYAKNDHLVMFCNGHGDILRKPFSVKNTPEGLTYIEDQVTRSCTKRGIKKEHVFFGGEDANSFAKNFVSTLRNKGFLVANVNAHDAKKQRESVQASTDRIDLMGIASMLLNCRGNCSPAQSGIYRNLRLLVRHRRKLVQMLTEVKNRVHGIVDELFPGFLKEQNTGIVAFTESSLYLMEDRFSPKQICRRKRKKLIEILNRFGTSHAEQTAAKLQQYAAKVLHAPVEYVGTMQLSLSQHVKHIRCLKESIAQMEKEIALNLAQTQGAFLTSVRGIGLVLAAGVTAEIGDPNDQKPLNNLSSYAGIVPRVKQTGGIEGKTYTGPVARRCNRILKDYVVQSAHHLGWHGPPDLMNDYKRRDASGQHANFGMGRRYLRMAMCLMRTSQVYLPSVLRKDDYALEEKASYYLMNWPSLRAKWKKVGALEEAFVLNRPLGMWRQIVQEFYDIKLKL

SEQ ID NO: 323003 - protein, 412 aa, unidentified
MEAIIERCCGIDVHKKTITACLMVGKPNEKPTVTIKTFSTMTRDLLACKDWLESEGCTHVALESTGVYWKPVFNILEDSMEIILANARHIKNVPGRKTDVKDCAWIAELLRHGLIKGSFIPPRPIRELRDLTRYRKKLIQQRSSELNRIQKFLEDANIKLSSVVTDINGVSAQDMIHHLIKQDMTPQEMAELARGRLRNKITELEKALEGAMRKHHRLILTISIQMIASYDQVIDELDREIDERMKPYRENSELLQTIPGIKKRAAESIVAEIGVDMSRFPSDRHLSSWAGVSPGNNESAGKRKSSKSIKGNKWLKATLTECAWSTSRNKGTYLKARFQRLAARRGKKRAALAVAHTILIMAYHIIKEQCTYKELGGDYFDRLNEEHLIKRLTTKIQALGYKVDLKKVPAAA

SEQ ID NO: 323004 - protein, 322 aa, unidentified
MSQPNPLCVGIDVSKATLDIAASNAIEQFSVANDADGFDSIIAELRQHDIALVLMEATGGLEAAVACALQAEGFEISVVNPRQARDFARAMGYLAKTDRIDARDLAQMAEVINRHPERSRFIRALPDAERQVLNAMVVRRRQLIAMQVAERNRLYPAHPQSRKSINIIIKALEDELARIDEDMSNHIQCHFKELSERLSSVKGVGTMTAAALLAEVPELGSLSRRQISALVGVAPVNQDSGTMRGRRTIFGGRAGVRTVLYMATLVATRFNPVIKAFYTRLVAAGKPKKVALVACMRKLLTILNAILRKNEEWNELYHHVAP

SEQ ID NO: 323005 - protein, 332 aa, unidentified
MEWTVAIGVDTHKRTHSAVALDRVGTQIASCEIEATSSGYARLLSWASELGEPAFALEGAGSYGSGLASLLVAVGLPVYEVERPRRRDRRRGKNDLIDAARAAERLLSGDGLSALRGGGPARQELRLLLLERRSAVRARTAALNQVHSIVLTAPTRLRERLDGLTSDQLTDRCRRLRPRDQTERVLVSVLNRLTARARQLTRELAQLESELERIVTTLVPDLLAQPGIGPVCAAQLVVSSGDPERMRNEASFAALAGTSPVEASSGPNRRQLNAALHVIARTRIRCHPETRAYRDRLSARGKSKREAMRCVKRQLARHCYRLLLANPALGTT

SEQ ID NO: 323006 - protein, 441 aa, unidentified
MSVLRARIPDCLHCATLPITIKPRRGEEALHSRVSISCGLDVHKSSISGAILKSDGTFATQQFTTSIDGLLALKEWIVTNHCERVLMEATGVYWIPVYSVLEPHVEVHVVNPLFIKYVPGRKTDTLDSVWIGEIALNGMFKASYIPPKNIRELRELTRTYRKLIEERTNHKNRIHKILMRNGIRLSDVLSDIFGKSGMIVINGLIEGNPIDQTLKKIKNSRILKKKDEIKRVICGEISENDIFVIRQSMECISQHDCQISLYEDRILKNMFPENGNIEILVSVPGIGFTIGSSILAEIGNICQFNNSKQLVSWAGLSPAVYESAGKSAHGHITKRGSKYLRTNLIEAAQSIARGKPNRLKHFFSRIQSRKGYKKAIVALARKLLTIIHHLLSNNEKYFEPSGKEKKIKLPDMCPDTEMNHEDMIQILTHAGYIVHKTHPDI

SEQ ID NO: 323007 - protein, 364 aa, unidentified
MKIIGCDFHPSFQQIAMVDTESGETTERRLLHGDGEAQQFYESLSGPVLVGIETSGNTLWFERLLEKLGHQLLIGDATAIRAAAPRHQRCDPRDARNVLQLLLEKRFPTIWVPTLAERDLRQLLKHRHTLVQMRTRAKNQLQHIAMNQGMQKKRQLWSKAGLEQLKSLALEPWTKRRRDDLLKILEQMDSHIAELSKAVAAEAQHWPQAVLLMSHPGVGPIVALATVLTLGEVSRFARGKHVASYLGLIPREDSSGEHRRLGSITKQGNSFMRFLLVQAGMSAARGDAELGRVYKRLAQRKHHGVAKVAVARRLVLRLYWMLRTNRRYPEVVRMQGSSSHPVAEVKADRLSEHPASRCCTHPGR

SEQ ID NO: 323008 - protein, 344 aa, unidentified
MKEVITIGVDLAKNVFQIHGVDAEGAVVVGRQLRRSQMLAFFRKQPPCLVGMEACATAHHWARQLIELGHEVKLMPPHYVKPYVKRGKNDAADAAAICEAVTRPTMRFVAVKSAEQQSVLMLHRTRELLVRQRTMLVNAIRAHMAEFGIVAPVGIPRVKELFAVIADADDDRLPAIARACLEGLAKQFLSLHEEIAIAERRIHAWHRASEVSQRLETIPGVGPITATALAATITDPSVFRSGRELAAWIGLVPRQNSTGGKERLGHISKQGDQYLRWLLVAGAMTIIRHAKRRGTSNLPWLANLITSKPTKVAAVALANKMARIAWVLLRTGQDYQKPALTHGT

SEQ ID NO: 323009 - protein, 416 aa, unidentified
MFKIIRFNCCGLDVHKTWIFACIGITDANFRTEYFEARFSSFPKDLRQLAAWLQKYGCTEVCMESSGKYWIPVFNALETTCKVTLAHPKYTKPQKGNKTDRKDARWICDLFMCNMIKPSFIPPPDIRHLRDLIRYRTKLTNMLTSEKNRAQNCLTVSSLKLDDVFSDVFGKSARSITEYILAHPGEKFNVAPFVDKRCKTPIDQIQDAVDGAICPEQAVKLRECLNHIDELNTHQDRIEQEIFTLVEPYSVHLNLIRTVPGMNKDPMTAILILSEIGSDMSVFPTAKNLVSWAGCCPRNDKSAKHVKSTRISQAGSYLKPRLVQVANALLNSKDHPEIRERYRRIKSHRGHKKAIIAVCKMLLTAIWNILSTGEAYNASGYLIQTPRPTDETKVLTQKQALELLRLRGYVIKEESA

SEQ ID NO: 323010 - protein, 438 aa, unidentified
MEEAGDEPLFCERAAGIDIGKQVISVTIRVPSDTRRGGRQQETREFGTTRRQLLEMADWLRCWQVERAGMEATSDYWKPVYFLLEREGFDCLLYQASQVKALPGRPKTDRLDSAWLARITEQGSLAGSFVPPEDVRRLRTHTRYRRRLIQARTAEKARCEKLLEDAHLKLSSVISDIHGVSGRDMLRAIIAGERDPETLAQKARTRMRRKIAQLREALDCSFFTPDHAFVLQMMLGNIDHYTAQIGVLDERIAILCEPYERQVAQLDGIPGFGVTSAQDLIGEIGVDMSAFPTAGHLCSWARLAPRVRESAGRRKGKNATGRGNPYIGGTLGEAAAGAGRTQTFLGAKYRRLCTRMPKKKAQGAIMRDQLGIAHALLSDPGAGYRDLGTGYYEQRERTRRRASSHVRSLERLGYKVTIEPLAPDADAETGELITRTAS

SEQ ID NO: 323011 - protein, 371 aa, unidentified
MKSIIYIGMDVHKKTYSLCALLKETGEIIGETKIPADVSLIIKFIENAKKSVDSDDVQIKTGYEAGCLGYSLYWQLAEKGIECDILAPSTMHRSAKNKVVKNDRRDAKNIAANLANGTYKSVHVPTDEDVEIKEYIRMMHDFKIELKKVKQHINAFLLRFGHQYPGKSKWVPAHIKWLKELELSDMHREILDEYLSQLEILSEKIERFKHRLEELSQKETYNEKIGQLRCIKGIDTIAAMTMHAETSDFDRFPTANAFASYCGLTPGEDSSGESYHRLSITKQGNSMIRTTLIEAAQVLVRGAIGKKGKKVKSKQKDQDVKVIDYADKAVIRLQKKYHRMIFRGVKRNIAITAVARELACFVWGIETGHIS

SEQ ID NO: 323012 - protein, 340 aa, unidentified
MQVTTIGLDIAKNAFQVHGIDAAERVVIRKPLRRAQVMKFFETLPPCLVGMEACATAHYWARELAKLGHEVRLMPAKDVKAYVKRKNDAADAEAICEAVRRPTMRFVGVKSAEQQGRLMQHRARDLLMRQRTQAINALRAHMAELGIVAAQGREGLKTLLAIIADDRDERLPIDARASLIVLAAQLQALQTMIGSIEKRIIVQHRASEASKRVATIPGIGVLGASAITATVTDPSAFRSGRDFAAWIGLVPRQDSTGGKQKLGPISKQGDRYLRRLLVVGAHAVLRRAKQGPQNYPWLAQLLARRPFKVVAIALANKMARVAWALLARGSTYRAPRLAAA

SEQ ID NO: 323013 - protein, 349 aa, unidentified
MGEVSTIGLDIAKNLFQIHGVDADGTVVIRKRIGRARVLEFFADLPPCRVGMEACATAHQWARELRKLGHDTRLMPPTYVKAYVKRGKNDAADAAAICEAVTRPSMRFVPIKEVEQQSVLMLHRARDLLIRQRTQLINALRAHLAELGLVAAKGREGLHQLVAVVTECGNERLPGNARFACQAIVTQLHAVQIEISGLDKRITQTHRANADSKRLDTIPGFGVILSTAVAATMADPKAFRTGRDFAAWIGLVPRQNSTGGKERLGSISKQGDRYLRRLLVVGATSVINSARARPYKYPWVIELLGRRPTKVVAVALANKMARIAWAVLAKGKPYRAPTCSSNAVALAPA

SEQ ID NO: 323014 - protein, 348 aa, unidentified
MALTIVEDTRAITGGVDTHAGTHVAAALDPVGGLLGVREFPVTPAGYTGLLGWLGGFGTVALVGVEGTGSYGAGLARHLAAAGVRVVEVDRSDRQDRRRAGKSDPLDAVSAARAAQSGRARGAPKGRDGAVEAIRALMVAKRSARSERTQTINQARSLIVTAPDDLRARFAGHTAAALVSELAALRPRPGAAVGYATRIALRELGRRAGFLDAQLGRLDELIVPLVTARAPGLLALHGVGPDTAALLLVAAGDHPERLRSEAAWAHLCAAAPIQASSGKVTRHRLNPGGDRQANHALWRIVLTRMSTHPPTLLYVERRTQEGLSKKEIIRCLKRYVAREVYHHLRAAG

SEQ ID NO: 323015 - protein, 400 aa, unidentified
MRVIGMDIHRSFAQVATLDNGVIVQERRVELIRDRFLQFATALRKDDEVVIEATGNSTAVERLLRPYVKRVVVANSRLVKAIAWARVKSDKGDATTLAKLHAGGLLPEVWVADDTTTIRRRQIAERMGVQAQLVRTKGRIRAILHANLIPKYDGHLFGPEGRKWLAHLPLAPEEQAVLGRYVHELERVSAQLAELDKELAQQSLDDPRALRLITIHGVSSVVSSTILESIGDIHRFPTPEKLSSYFGLTPRIRQSGDHPARHGRITKQGNSDARRMLVEAAWSAKLAPGPLRAFFTRVQNKRGAPAAAVATARKLAVMIWHILSSDQDYAYARPAFTAMKMRKVALRAGAPKAYGKAGPVHDYWIKEIRDRETRYVEQTERAYERMVSAWKEKPLRPGRG

SEQ ID NO: 323016 - protein, 346 aa, unidentified
MNSTTVAVDLAKNVFELAVADAEWRIVERHRLNRTRFARFFVHRAPCQVVMEACGSAHHWARRLVAEGHTVRLLPAHYVKPYVGRSKTDRADAAALIEAARSSQIRAVPIKTLEQQQLQSLHRLRSQWLSTRQRYLATLRGILREFGIVIPLGPSVAKAQVGATLAAADSAIPEGLRPALAQMLQEIAPLEEKILSVERQLATLTRADERAQQLREIPGVGLLTSTALLSTVGDIQRFPSARHFACWLGLTPSERSSAERRRLGKISKQGDVYCRTLLVHGARSALLAAHRAQRAGKPLDRLRHWALNCERVRGHNKATVALANRLARIVWATWKYQRSFDGNWAA

SEQ ID NO: 323017 - protein, 338 aa, unidentified
MSLYAAIDLHSSNSVLAVMDGEGKPVLCRRRPNDLPRLLADLAPYRDELVGVAVESTYNWYWLVDGLMDHGYAVHLVNTTAIPQYDGLKHGDDDSDALHLAQLMRLGLLPEGYIYPRAQRGTRDLLRRRFSLVRQAVRLMLSIQSSFSRSTGKQLSADQLRQLTPSQLVDLFPDLSTRFGVLIQFKLWLTLQEQITTLERWIHKDVVRPDLLGRLQSVPGIGPILGTTILLESGAIERFASVGDYASYCRMVESVRLSNGKRKGHGNRKCGNRYLCWAFMEAANYAVRFDPSIRRWYERKRARKHRVVAIKAVAHKLARACYHMLHEGTAFDLTRAFG

SEQ ID NO: 323018 - protein, 407 aa, unidentified
MEILHPRCAGLDVHKDVVVAAVRCVSMPTHQEVRSFGTTTKELQALSDWLESHGCTQVVMEATGVYWKPVWHLLEGNFELVLANAQHVKNVPGRKTDVGDASWLAELLAHGLVRGSFVPPAPIQELRDLTRSRKQLVRELSQHVLRIQKVLEDANLKLGSVLSDITGKSGRAMLAAIVQGETDPEKLASLAQGNARKKKAELIEALRGRVTPHHRKMLKLHLGLVDTLQTAIDEVDVSVGKALEPIQARATLLTTIPGVSDIVANVIVAEIGVDMSRFPSPGHLVSWAGLCPRSDESAGKRRTTRVRKSGTWLKTMLVTAAWSAVRVKDTYLRAQFLRIKSRRGAKKAILAVAASMLTAVYFMLRDDKLYADLGSQYFDRHDKGKTIGRLVRRLQDLSCEVEIKPAA

SEQ ID NO: 323019 - protein, 453 aa, unidentified
MPKKRQNREVKLPVLRPDAAGIDIGAEEIFVAVPADRDSQPVRRFPTFTQDLNALADWLTKCEIRTVAMESTGVYWIPLHQILESRGFEVYLVNAQYVRNVPGRKSDVSDCQWIQYLHCVGLLRASFRPPAEICAIRSLWRHRESLIQMASQHTQHIQKALDQMNLQIHHVLSQITGWSGLRILDAILDGDRDPVALAELCNWRVRTSRDIVAKALEGDYRPEHVFTLKQSLAGYRYYQNQIAEVDEELNKYLRDLPNAVEGQASPPPRTKTRVYQKQHNDPAFDLRGELYRIVGVDLTDIPGINELTAHTIVSEIGTDVSRFRNASAFASWLGLCPEKQVSGGKVLYTKTRPVKNRVANALRLGAHCLYHANNYLGEFFRRMRRKLGAAEAVTATAHKLARILYHVLRTKEAYNESVFLRHDQEAIKRAEDRLRKQAAKLGFQIVPQQPSEV

SEQ ID NO: 323020 - protein, 346 aa, unidentified
MNFYTTEHRYYCGVDLHARSMYLCIIDAKGTILLHKNLKTQPAAFLAAIEPYRDGLVVAVECMFTWYWLSDLCSREKIPFVLGHALYMKAIHGGKAKNDRIDSNKLAVLLRGGMFPKAYVYPPKMRSTRDLLRRRMYLTRKRAALITHIKCTFAQYNLPEPEQNVSRVSQREGVAEQLPDPGARRNVQLDLDLLDFYDQTLTKLEQELTVIAKDHDPNSYFRLRSVPGIGKILSLVILYEIHDINRFPSVQDFASYCRLVKPAKESGGKRLGSGGAKIGNAHLKWAFSEAAVLFLRKNEAAKIYRAKLVKRHGKAKSLTILAHKIARAVFFILKRRTVFEAETFFA

SEQ ID NO: 323021 - protein, 411 aa, unidentified
MVKENFIYVGIDLHKETHTAVMIDCYNQKLGEITFPNRPADFPKLVAKVKKCNTDGKTIVFGLENAYGYGRALAVWLIDKGYLVKDVNTAISHRQAKHRGAMYRKSDSDDAEAIALATLNMLDKLPDAYPNDAYWSLGQLVHRRDNIMKQRTRLVNQLHEQLCITYPSYKQFFNDISRPTALYFWEHYPSRKYLKGKSVEDLRAELVPVSHNKCSTKTCEKILDAVASDKVKNNAYQDARDMVTLSIVSDLQHYDKQLAEVDKMLEQMYKMLGCTLTTIPGVNVITAVKILAEIGDIKRFSNANKLAQFAGIAPLHLSSSGKGKDVATKQGNRRLQATIYFLAIQMVQVSSKGTPRNSVVRAYYEKRKAEGKTSQQALICISRRLISIIYGMLKHGTEYRMPVVESAGENR

SEQ ID NO: 323022 - protein, 337 aa, unidentified
MKITTIGLDIAKRFFHVVCCNEQGRLVKKKMLKRAQVLSFFQQHTTCLVALEACATSHFWAREIRKCGHEIKLIPLQHVKAFLVGNKNDYNDALAISIASKQHHIKSVCIKSVEQQDNQAQHKARELAVRQRTALCNQIRGLTAEYGIILNQGVNTIRKSIPLILEDENTGLSGAFKAVLKQLETQLSNLDSCIETYSTLIVETAKNNDICQRIQTIPGFGPMVSSAYFNEVGNGSNYKRGRDVSASLGIVPRQHSSGGKDTLLGISKRGNSYLRCLLIQGAKAVVSRAKTKNDKLSQWINRLVQTRGHNRACVAYANKMARMAWAISASGESYSPV

SEQ ID NO: 323023 - protein, 411 aa, unidentified
MIKENYVYVGIDLHKETHTAVMIDCYNQKLGEITFPNRPADFPKLVTKVKKCNTDGKEVVYGLENAYGYGRALAVWLIDKGYLVKDVNTAISHRQAKHRGAMYRKSDSDDAKAIALATLNMLDKLPDACPNDAYWSLGQLVHRRDNIMKQRTRLVNQLHEQLCIAYPSYKQFFNDISRPTALYFWEHYPSRKYLKGKSVEDLRKELVPVSHNKCSTKTCEKILDAVASDKVKNIDYQDARDMVTLSIVSDLQHYDSQLAEVDKMLEQMYKMLGCTLTTIPGVNVIIAVKILAEIGDIKRFSNANKLAQFAGIAPLHLSSSGKGKDVATKQGNRRLQAAIYFLAIQMVQLSSKGTPRNPVVRAYYEKRKAEGKTSQQTLICISRRLISIIYGMLKNGTEYRMPVVENAGEKL

SEQ ID NO: 323024 - protein, 416 aa, unidentified
MNAVGIDVSSRKSTVAVLRPLGEVVCLPFDVTHDIAGLASLAEKLKAIDGETRVVMEHTGRYYEAVAKALHEAGFFVCAVNPLLIKEYGANSLRRVKTDKADAIKIARYALDNWADLRDFTPMDAIRYDLKTLNRQFQLASKQRTASANNLIALLEQSFPGIRKCFDSPVRSDGTQKWVDFAHSFWHVDCVRKQPFAAFCERYRKWCKRHAYFFKLRNAEKVYALAKSAVVLTPKSKVVKVLVQEAANQLISISRSVEVYRAEMDRLAAMLPEYPVVMAMYGVGKSYGPQLMAEIGDVRRFERKQALIAFAGIDPMPNQSGDKNVRSNKSSKRGSPYLRKTLFNVIRTYLQCAPQDEPVFQFLNRKRAEGKPFYVYMLAAANKFLRRYYAKLRDYFASLDTLQPVDPIPTTLKASL

SEQ ID NO: 323025 - protein, 338 aa, unidentified
MEQEVATVGVDLAKNVLQVHAIALDGEVLIRRKLRRSEIVRFFADLPPCLVGMEACASAHHWARELIAIGHEVRLMPPAYVKPYVKRGKSNAGDAEAICEAVTRPTMRFVAVKSVKQQAVLMLHKSRDLMVRQRTMLINALRGHLAEYGIVTGLGAGGVTASLGALQEEQDRLPVHARSALQGIAAQLRALGSEIDRLEARILAWHRNDETSRRLATIPAIGPITASTIAAAVPDASLFRSGRQFTTWLGLTPRANSSGGKERLGGITKQGDGDLRRLLIVGATAIVRMTRKNPARQPCMAGLLERKPTKIATVALADKTARIAGALMTRKEVYVVAA

SEQ ID NO: 323026 - protein, 349 aa, unidentified
MIWIGVDAHKRIHQAVAISETGIVSEQTVPNTAAAWAALLEWAQQWPERQWAVEGAWYLGRGLAQFLAEHGERVREVSGRLTAQRRTLNRRRGKSDRLDAHAVAQLLREEGPKLPEVVALDDDVAAVQLWSRVQAELTKDQTRLINRLHDLLLLCDPQYGSKLPALTTKAGITALRTYQAPGAGALARERERIIRQTADQLALLYEQNRELTKKLERVSTTRFSPLRQIEGIGALIACSFIAELGRPRAGFGEEQLAALSATAPLEASSAGEIRHRLNRGGNRRLNLAFHRIVLTQGRMYAPARAYLARRKTEGLTKREARRALKRLLVRRVYRAWCACFEINIERVAA

SEQ ID NO: 323027 - protein, 342 aa, unidentified
MQVTTIGLDIAKQVFQVHGIDQDGQILIRRQIRRGEVLTFFRRLPQCLIGMEACSTAHFWARALAALGHEVRLMPAAYVKPYIKRGKSDALDAEGICEAVTRPSMRFVAIKSPDQQAVLMLHRTRDLLVRQRTMLVNALRGHLAEYGIIAPQGLSGVPKLVELAEKARGTALPELAWRCIGLILAQLDEAHTRIGQIEREIMAWHRTNELSQRLETIPGIGMITASALAATITDPTAFRSGRHLAAWIGLVPRQSGTGGKVRLGSISKQGDRYLRRLLVLGACTLLRHARNRASATAGWITALLARRPASIVKVAIANKLARVAWAVLQDSRGYRAPAAAAA

SEQ ID NO: 323028 - protein, 424 aa, unidentified
MKVTYQTCCGVDVHKSFLVATIVKTTGDIEPSYQKKRFSTFNNSILEFKQWLLDNDCHDVCMESTGKYWVPVFNLLEDDINVVIANPKWVKAVKGNKDDTKDSKWIGDLFRLGLVKGSYIPCKKVRILREYTRYRYKLVSCRSSEKNRYQNALTVCNVALDSVVSDIFGKSSTSIIDYLLEQSGSSINHEEIASKLLRSLKSKEDAVIESVEGYQMTDAQKYRMRLVRAHMDYITAEINDVDKMIENMISSNTDFENAVQFLCTIPGVKRDSAITIISEIGTDMSQFSSSKRLCCWAGLTPGSNESAGKKKSVRITRAGVYLKPALVQCAHAAVKSDKSPYYKKKYESLVKRRGKKRAIIAIARMILTAIYQMLSTGEQWNPSDLYKIDMPVALVEKQKAKAIKQAKKLLQREGLLPPDEPLAS

SEQ ID NO: 323029 - protein, 404 aa, unidentified
MNNVAGVDISKGKSMVSVLRPFGEVVAKPFSVRHTGSELKDLANYLKSLDGETRVVMEHTGRYYEPVARFLHEEGIFVSAVNPKLIKDYGNNTLRKVKTDKADARKIARYGLDNWVELRQHTPMDTIRMQLKTLNRQQSLYSKTKTMMKNNLIALLDQTYPGVNVLFESPVRENGSQKWVDFATTFWHVDCVRSMNLTAFTERYRKWCKRHGYNFSQSRAVEIHTDAQDLIAMLPKDALTKTMVRQAIDALNAVSASLERLKAEMRTLAAQLPEYPVVMAMRGVGDSLGPQLMAELGDVTRFTHRNAITAFAGVDPGADQSGTHEAKSNRTSKSGPPELRRALFLVMNCLLKTRPEDDPVYRFMDKKRAEGKPYLVYMTAGANKFLRIYYGRVKEYLASLQIAD

SEQ ID NO: 323030 - protein, 341 aa, unidentified
MAQVTTIGLDIAKHVFQAHGADAAGQVVFRRRITRGKLIAFLAAQSPCIVAMEACAGAHYWAREISKLGHSVRLMAPAYVKPFIRRQKNDAADAEAICEAAQRPSMRFVPVKTEEQQANGIVFRARDLLVRQRTQCVNALRGHLMEYGYVFPKGITHVEALVALVEDPQSALRDSVRVILKLLVDTFTALEAQISALDAEINQRSKSDPTARRLMTIPGVGPITSTAITALVPAAEGFPAGRDFAAWLGLTPLQKSTGGKQKLGAVSKRGERTIRRLLIIGASAVVQQASRRGAPKGSWLAQMLARKPKMLVTVALANKMARVIWALLVKGGTYRTPAAAA

SEQ ID NO: 323031 - protein, 460 aa, unidentified
MLITRGFGQHMIPRINLLLQVPGTHNREGGDIMLKINPLSTLYVGIDVSSKSNYVCALDFYKNKYINSSFANNQPGAEELAQKLLECLKKHPDLNTVVAALESTSVYSIHIANYLSSCEELMPFKPYVFVLNPKCTANYKKSYIGLGKSDPIDAFVIADYARAGNIETEPWRGSQFLALKRLTRHRLHLVECITREKTYLVSNLYLKFSELQMLDKDDQPFCDIYGATSSSVLTEYLSPEEIIEASEEDLVSFLANKSRNRIKDISRTAELLKKAARDSYRLDKALYEPLNVSIASSFNCIETFKKEIKAIDAAIEREIKGLNPNAFIILQSINGIGPVFAGGIVAEIGDISAFTSSDALAKYAGLCWRSNQSGDFDGEDTPMIKAGNRYLRYYLGEAANSMRKHNVEYGAYYRKKFNEVPKHQHKRALALTSRKFVRLVYGLLARNQLYSGVSLDTSNE

SEQ ID NO: 323032 - protein, 405 aa, unidentified
MWYAGIDWADQHHDVVVVDEQGKQVSKKRVAHSAEGLSELMAYLKGVGDVTDHPEHLACVLETTTGLLITALLDAGLPVYPVNPNTLEKWRKPSGAKTDSIDAFLLARKGRSDLDQLRRLEPDSPLVQELKQLTRDQDGLIEMQTRLVNQLTACLKAYYPVALTLFTKLQQGVTVAFLQTYPTLDAVLQASEAEIATVLRTAGHPRAQAKARTIWQQVHTAQLRADALTTRTKSRLLLAVLQQLAAVVEAIATYDQAITRLFLSHPDAALFSSLPGAGQRLAPRLLAEWGDDRTRYQEAGAVQALAGTSPVAFQSGNFAKAHRRYACNKVLRNAFHQFAWHSTRQEPWAHAYYQRKRHEGKTHTVALRALANQWVRIIFAIWSSHRPYDAAIFLAAQHAHAPHAA

SEQ ID NO: 323033 - protein, 360 aa, unidentified
MTIAEESAARRVVGGVDTHKDLHVAAVVDDQDRVLATHCFATTRQGYRQMLAWMRSFGAVQCVGIESTGSYGAGLLRFLQQASVEVLEVTTPDKHDRRRRGKNDDLDAQNAAHAAFAGKRTVTPKSRDGMIEALRVLNACRKTAVAARRIALQMIHNTVVCAPDSLRDVLRSMTRMQLVRTLAAWRPDLTRYRDVESAYRISLKSLARRYLELHDEIADLDVMIGAIVDELAPNLVARNSIGHAGAAQLLLTAGDNPERLRSEAGFAALCGVSPVPASSGKTVRHRLNRGGDRAANSALHIIAIGRLRTDARTKVYVAKRIAEGHSKLEAIRCLKRYIAREVFTLIVQRQSEINRTRIAA

SEQ ID NO: 323034 - protein, 384 aa, unidentified
MEQHAIGGADDVDGPALSIQVQGPERSIFDQHRKRSHVMRQIVRIGLDIAKRWFQVHAVDEAGKEILNRKLPRDKVLGFLGSLPACDVALEACSSSHHWGREIGQLGHRVRLISPNYVKPFVKRGKSDAHDARAICEAASRPDMRFVRVKTEKQQAALMQHTSRQLLIDQRTAVANSLRGQLAEFGVIEKQGIENLADLVRRLDEDDSDIAHIPETALAVMKILADQLRAVEANLAMLDEQIEAWRQSSASAQALKTIPGVGTLISAALAAYVPDPSAFSSGRDFAAWLGLVPRQNSSGGKDRLGRITKQGNPYLRRLLVLGATASLRWLNKRTDPLAMWTRQLLQRRPARLVTVALANKLARIAWAIMTTGELYRREALSVVA

SEQ ID NO: 323035 - protein, 345 aa, unidentified
MELHTIGIDLGKTVFHLVGLDLRGEVVVRKKFSRTQLLRFTANVHVALIGMEACGGSHFLGRALREQRHEVRLIPAQYVKPYVKTNKSDYIDAEAIAEAVARPTMRFVPIKTDDQLDLQSLHRVRERWVMRRTAVVNQIRGLLLERGITLRKGRHHVDAALPLILEDADANLSGAVRLLLTQLKLDLDQLSVRIDEADAVIQKIAHENEACRRLVAIPGIGPVTATALIAAIGNGGAFHKGREFAAWMGVVPHEHSTGGQQKLLGISKRGNSYLRRLFVQGARAVLQQRTKQSSGLSAWLAQLTSRTHRNVAAVALANKLARIAWAVLAKNEQYRPSVLTDVAAA

SEQ ID NO: 323036 - protein, 403 aa, unidentified
MNSVGIDISKGRSTIAVMRPFGEVVISPFEVRHTGSELSKLAKQLKSLDGETRVVMEATGNYHASVAKLLHDAGLYVSVVNAKLVHDYGNNELRRVKTDRKDAVKLANYGLDRWLTLPRYIPEEDTRLLLKNCYRQYRQYSKVQTVLKNNLISLLDTVFPNANRLFSSPIRGDGSEKWVDFVAEFWHCRCASEKSERAFTSKYLRWCRKHGYNFREAKAHTIYAEASGHIGVMPKSETTKLLVKQAVSQLRATSTALAALKHEMQSLASQLPEYPVVMDLFGVGPTLGPQLIAEIGDVRRFYSKKALVAYAGLDAPPNDSGDVTGRHKSMSKIGASSLRRTLFLVMSVYLQTAPLDEPVYQFMDRKRAEGKPYRVYMMASANKFLRIYYATVKAYLESLEHTA

SEQ ID NO: 323037 - protein, 425 aa, unidentified
MIPAVIERCVGIDVGKKFLLACVMIGPPDGEARSEIRQFGTTVAELQQLRDWIQQQGVTYAILESTGSYWKPVFNVLEGAVRVALANPQEVKARKGHKTDAKDAWWLAHLLRHGMVTPSFIPPRPQRELRDLTRRRKKLIHTATSEKNRVEKILEDANVKLSSVLSDIFGVSGQRMLEALLAGKGDAVEIAQFAQRRAKQKIPQIVASLEQHQMSEHHRMMIRFSLEHLRFLEQQLIELDEKIREKIQQAGYDKQWELLLTLPGVQQPTAATLLAEMGPDPKQFPNEKHLSSWAGLCPGNNRSAGRNKSGATSGGNRWLRGALTESAWGIAKKKDCQLRDKFWRIAAKSRPKAVVAVAHDVLVLAYCVLKRGTAYEPKRGVPLSEAQRQRLIRHHVRRLGKLGISVRTAPAPAPGRKSRSTCAGS

SEQ ID NO: 323038 - protein, 399 aa, unidentified
MLNPQALQLRVGVDVGSRCHHVAVGLTDGSLLEDFEIPHTAEGFREFFARIEGHAKRHPYPIAVAMEGYNGHVRPLDSLVKARGWRLFNVNNLKLARFKEIFPAAAKSDRIDAAKTLELFQLRDHLPMAGDVLQEVMATPEENDILKRLSRRRRRLVNERGRVLNSLHADLQAVAPGLLQITREVGNLWFLNFLTCRKGLLKLARVRRASLLKVPGIGTTYADAIQTWQSRAFFAPDARLVGDMIQQDAARILELKQQIKALEEQMARIAESSSIAGQLASIPGYGAVCTAELAGEIGTIERFGSEASLALYLGMATLDNSSGKYRGSKAPKHVNARAKAAMMTAVDHHRKRVPQSQRYYEKKRAEGKRHNQAIRALGRHLCRVIFKMLTQERPYWIDP

SEQ ID NO: 323039 - protein, 343 aa, unidentified
MNEVTTIGIDLAKSVFQVHGVDATGRTVIRKQLRRHQVLAFFRKQSPCLVGMEACATSHHWAREIAALGHEVRLMPPRYVKPYVKRNKNDAADAEAICEAVTRPTMRFVAVKSVGRQSVLMAHRTRELLVRQRTMLVNALRAHMAEFGVVARVGLPQVKKLLAVIADGDDERIPALARTCLEGLVRQLLSLEREINGAEKRIHAWHRASEDSLRLETTPGIGPITASALASSITDPHIFRSGREMAAWIGLVPRQNSTGGKVRMGRISKQGDQYLRWLLVAGAMTVIRHAKRRGTTDPWLAHIIANKPTKVAAVALANKNARIAWVLLRHGGTYRKAASAKAV

SEQ ID NO: 323040 - protein, 351 aa, unidentified
MLYAGVDTHKKYSRVVVTDSHGARVAQGTLQNTQGSFRDFFSQFNEQTKVVLEAGSTWGIIYDILEDIGADPVLANPLKTRAIAEAKIKTDTIDAHTLSTLLRADLIPTVHVPSQKVRSHKNLLRQRFWLVEMRTRIKNRTHNILDRNHVTLPDCSDLFGKAGRQLLDQIEIPHPDNHLLTANLELLDRINEQIRAAEKWAKEALEDHPGLAILRTIPGLGKILAALVAVEIDDISRFSTPDKLCAYAGLVPTTYASGGKVRHGNLLPTCNRWLRWAYVEAAWVAQRTSPYCHSYFEGIKRRKGANCANTALARRLCEITWHCLTEKRSYQERTPARKEINQPAAFVSSWS

SEQ ID NO: 323041 - protein, 447 aa, unidentified
MVRSKKTVVEMPMLNPNAAGIDIGSTEHWVAVPTDRDKENVRCFSTFTCDLHQIARWLQKCKIKTVAMESTGIYWLNLFLLLEDYGFEVYLVNARYVKNVSGRKTDMSDAEWIQTLHSCGLLTNSFQPDNYTRKLRCYSRHRQNLIRQASRYIQHMQKSMELMNLKLHKVIRDIAGKTGMAIVGAILQGEHNAETLAELRDRSIRASKETIVKSLQGTWREEFIFTLQQAYDAYNFTQRQISECDEKIHKALKEKSCEINQGREAIIEKKSTRKKNRHTPKFDLDSYLKAHFGVDLTQIDGIDSLSGMNILAEIGSDFSKWPSRKQFLSWLNLVPNNKKSGGRLISSHMLNRKNTAGLIFRKCGSCLWKSKGPLGDYYRIQRAKNGGKAAAIATGNKLASIIYTMVTRQVEYDETILQSMKRNSQLRRLNNLKKKVEHLQKTLEEAA

SEQ ID NO: 323042 - protein, 410 aa, unidentified
MKLTYPICCGVDVHKTFLVATIITSDFESPKYKQKRFSTFYRGLLEFKQWLLDNNCKDVCMESTGKYWVPVWNALEDSIHVVIANPKWVSAVKGNKDDKKDSKWIGDLFRMGLVPSSYIPEKDIRVLREFTRYRSKLVSMRSSEKCRFQNAFTVCNLTLDAVVSDMFGKSATDIENYLLESDSVDPNHCVSLLRGSLKKKSEEIINAVEGFDMTAEQKERARIAQVDEVIGRLVSEYEGAISLLCTIPGIDRRLAITIISEIGTDMSQFGSSKRLCNWAGLSPGRNQSAGKKKSVKISRAGVYLKPALVEAAHAAVKATAANPYFRIKYGRIMQRRGKKRAIIAIARMMLTSIFAMFSTGEVFNPSDILKFDMPEELKKKQTLSALFSHWQVDFSSLGGGLALLRPFLYR

SEQ ID NO: 323043 - protein, 343 aa, unidentified
MGQYIGLDVSLKDTAISIREDGKRIWRGKCPSDPGIIAQAVRKHADDPLSVVFETGPLATWFFHALTGEGLRAICIEARHAQKILGETLNKTDANDAEGLAKLAETGFYKAVRVKSFEAMLIRSLVAARTQLLAITTQLTNQIRGLMKTFGLVVPKSKGRVFIEKVNDLLDGHVELKGIIYPLLEAWQAVRERASTLSRQLLLAARQCQSTRLLMTIPGVGAITAVSYVAAIEDPKNFPKSRSVGAWLGLTTRRYQSGEMDFNGHISRRGDQRLRGLLYEAATSLLTRTRAETVSDLKTWGLQLRERLGFKRAAVAVARKLAVIMHSMLKTGQTFIPMREELA

SEQ ID NO: 323044 - protein, 315 aa, unidentified
MTEQHPTFIGIDVSKARLDIAVRPGGQYWHCPNAPEHFPALTAQLREIGPTLIVLEATGGLETALAAALAQADLPLAVVNPRQVRDFAKATGKLAKTDAIDAHVLAHFAEAVRPQSRPLPSAQLAELDALADRRAQLVKMQTAEQNRLASAPACVRADIQAHLDWLAQRIDQSNQDLRRLIESSPAWRAKDDLLQSMTGVGPVLAATLIAAVPELGSLNQRQIAKLVGLAPLNHDSGQHRGKRMVFGGRGQVRALMYMPARNAARFNPTIKALYERLKAAGKPDKVAITACMRKMLVILNAMVKTNTHWAPPAAA

SEQ ID NO: 323045 - protein, 401 aa, unidentified
MNAVGIDVSKGKSTVAIIRPFGKIIAKPFDVSHYPDQMAELTEYIRSLDGESRVVMEHTGKYSAPVAKFLSEAGIFVSVVNAKLIHDYGGDTIRRVRTDKVDSLKIAGYCLDKWAKLERYEAVPDNRKMLKTYNRQLSEYTKIKTMLKNNLISLLDQTFPGANDLFTSPARGSDGHEKWIDFVAAFPHCHSVATLSRQTFTTQYEKWCRKNGYNFCVHKAEQVYSAALNCLPTLPNNDFTKTLITQTVNQLNNLCQTVAAVKSEMSKIASSLPEYDTVLAMHGVGKVLAPQLIAEIGDIRRYPKRSSLARFAGIEPPENQSGTYNQHSRRISKQGSPHLRRALFQVMCCVLQLKHRNEPTFQFIDRKRSEGKPYKVYMIAGANKFLRIYYARVTECVGVAA

SEQ ID NO: 323046 - protein, 310 aa, unidentified
MNSITVGIDVSKDRLDVAVRPSAELFAVERNARGVEALVARLLELSPRIVALEATGGFETVVAAALASAGLPVVVVNPAQIRAFAKAIGQRAKTDPIDAAVIAHFAEATNLEPRPLPDEATRLLADLVARRRQIVEMIGAERQRERRVTVPRLKKSITRLLKALEKELASLDTDIDDAVRDSPAWRDKEDLLASVPGVGPVIARTLMAELPELGQLGRKQIAALAGLAPFTRQSGQWRGKSFIGGGRTPVRSAVFMGAMVAKQHNPILKAFFDRLVAAGKPKMVAIIAVARKLLTILNAILRDGRPWQIA

SEQ ID NO: 323047 - protein, 321 aa, unidentified
MYIGMDISKLSFDVAILNDEHYYHHHFDNDLAGFKACQGWVKSFRTSALFCMEATGIYGLALAKYLVSHQQKVIVANPIQTHAFAKMEMMRNKTDKADAMSIARYCQHLDRQGRSDKSLYTPKEADFERLQFLVTRLDQLNKMRSQENNRFDVSLDKAAARSVKAMLTFIDKQLSNIKKAIAKIVKQNDSLNTQVHLLTSIIGLGDKTAWSILAYIGDISLFENAKQMSSYAGLNPRIEQSGSSVNRTRLSKMGNARLRKSLYMPALVAVRFNPRMMAFYTKLLAKGKPKKVALVAVMRKLLVLAYGVLKSGEKFDVNYQN

SEQ ID NO: 323048 - protein, 341 aa, unidentified
MKKNLFFIGLDISEADFAASIYKTPGQPIVTKEAIPNDPKGFEMLLLWLSDYHIDKKNCRICMEATGVYSQAIAYYLLFQGFPVSVEPPLKVKRAFDPVGHKTDPVDSKQIAEYAYRFQDELTSWQPRDEILEKIRQLLSVREQFTKQKVALDNSIQAYSKQRVQVALIKKAQKETLNQLKKQIARIDKELEKLIKQDPEIFQRTNNLDSIPGCGMLLAAHLLVITENFTKIQNSKQLAAFIGIVPYQHQSGSSVFKRAKIRYFGPGPSRKLLRLAAQSVATHNATFRRYYLRKLDQGKAKPLVLNNIANKLLKVACTIIRNNTRYIKDYRSIHPMYLKSA

SEQ ID NO: 323049 - protein, 449 aa, unidentified
MEMINPNAAGIDVGSEEHWVAVPADRDEQPVRSFGCFTADLYALADWLEQCGIETVAMESTGVYWISLFQVLEARGFEVKLVNARHLKNVPGRKTDVLDCQWIQRLHSYGLLSGSFRPEDQVCVLRSYWRHRDSLVSYASAHIQHMQKALIQMNLQLHKVITDITGVTGMRIIRAILEGERDPIKLARMKDHRIKSGIKQIAKALEGDYRPEHLFALKQALELYDTYRDKIDVCDREIEECLARFNSKIDSDQATGAKLNRKNKNQPTFDLRSHLYRITGVDFTAIDGFDVLIAQTIISEVGLDPSTFPTDKHFSSWLCLCPDNRITGGRLKSSKTRKNANRAANAFRLAAQSLARSPSALGAFYRRMRARLGAPQANTATAHKLARIFYYMWKNGVPYHDRGADYYEQTYRDRILRNLKKKARALGYNINLQPIAKQEVTETIAAVVS

SEQ ID NO: 323050 - protein, 344 aa, unidentified
MPIITVGIDLAKAVFAVHGVDEAGKATLVKPKVARDQLVPLIAQLPPCLIGMEACSGAHHWARVFAEHGHTVKLMAPKLVSPYRMSGKRGKNDAADAAAICEAVTRPSMRFVPVKDEHQQATLCLHRTRQGFIEERTSTYNRLRGLLSEFGVVLPQSPERLRKEIGPCLDSLPGWARRCMSELLEHTSHIEDRLVELDRAINQIAREDDRSRRLLQLRGVGSTTASALVASIGDGHDFRNGRQVAAWLGLTPSQYSSGGKQRLGSITKAGDAYLRSLLVLGARSVMANLGDKQDPLSRWIRNLMERRGYWRAAVAIAAKNARMAWAVLHYGDTFKPEQAEPTGA

SEQ ID NO: 323051 - protein, 404 aa, unidentified
MWYAGIDWATDHHDAVVIDEKGHQVGSLRIDHSPQGMSKLNTFLAQILGSESKEQIACIIETTHGLLIAHLLEAGWPVYPVNPRTVDRRRAASGAKTDTIDAYLLAKTGRADLADLHRLTPDSAKIAELKLLTRDQDALIQMQTRLVNQLTACLKAYYPVALELFTKLPQKSTLRFLQTYPTPQAAMAVSAEQIQEVLRQAKHSNPTPVAATIFERLHQPHLQADAVITRTKSRLMLVLVSQLLPLIEQIAQYDKEIATLFLTHEDHEIFESLPRAGKRLAPRLLAEIGDDRKRYQDASSLQALGGTSPVLFQSGMYSKAHRRLGCIKPLRNALQQFAWQTTQSEAWARQYYQRKRAEGKSHTVAVRALANVWVRIIFAMWLHHQCYETATFEQAQQQHARRVA

SEQ ID NO: 323052 - protein, 339 aa, unidentified
MNRIVVGVDIAKRVFQLHWVEAETGEIVALQLKREKFLEHFANRSSCLIGMEACGGSQHWARALQKLGHEVKLLSARMVKPFVGGNKNDAADARGIWTAMQQPGIKVVAVKSEEQQAILALHRMREQLVKFRTAQINGLRGLLTEYGEVMPQGRAGIKRDIPGALGRLSARLPAIVIDTLREQYARLGELDEQISQIEQRLRQWQREDSASQRIAAIPGVGLLSATAAVATMGDAKAFKSGREFAAWLGLVPRQSGTGGRVRLLGISKRGDKYLRTLLIHGARAVLTHSKSPPQWLTELVKRRPKNVAVVAMANKMARTIWALSAHERAYQTGYVSRPA

SEQ ID NO: 323053 - protein, 346 aa, unidentified
MQHYVGLDVSLKQTAVCVVDQAGKIIREGMVASEPKAIADFIAANAPQVVRIGFESGATSTWLWTELKKFGLPVICIDARHAKAALKMQINKSDRNDAIGIARIMQCGWYKEVRIKDLDSHAIRALLSSRALLVELKRDLENQIRGLLKNLGLVVGRCKLNTFTARATELIDGKPALAAAVEPLLKAREAIGRQIADLDRKVLRLARSVPQVRRFMTVPGVGPITALCYLATIDDPTRFKKSRSVGAYVGLTTRRYASGETDRTGRISKCGDGMLRSYLYEAANVLLTRVAKWSALKAWGMRIARRRSLSKARVAVARKLAVILHRMWIDGTEFSWSSEGTAMQSA

SEQ ID NO: 323054 - protein, 340 aa, unidentified
MPNPAVIGLDIAKNVFQVHGADAEGRCVLRRRLRRAEVVMFFARLPKALVGIEACPGGHHWARELRSLGHDVRLIPPQYVRPFVKTNKNDAADAEGICEAVVRPNMRFVPIKSVEQQAAMMLHRTRALLLRQRTQLINAVRGHLAEFGLIARRGARNIRELADLVRDTESDALPDAARAMLVLLLEQIREAQVRVAKTEHALEAWAKRSDACRRLMSIPGVGTMSATALVLTMDDPKRFRSGRHFAAWLGLVPRQSSSGDRQVLGGISKRGDGYVRTLLIHGARSLTRWRRESWAWLAGLLIRRPTNVAAVAIANKTARTAWAILARGRQFQPSRRAEAA

SEQ ID NO: 323055 - protein, 409 aa, unidentified
MNAIGIDVSKNKSTVAVIRAYGETVKMPFDVAHTAKELAELADFILSLEGESRVVMEHTGKYSMPIAHVLSEAGIFVCMANAKLIHDYGGDTIRRVKTDKADALKIANYCLDKWAKLVQYAPEDKLRMTLKVYSRQLSEYVKLTTALKNNLISLIDQVFPKINELFTSPARESDGHEKWIDFVAHFWHCECVSSLSLNAFMKRYEKWCCKNGYNFSTKKAEEIYSVAASHFSTLSKDDFTKTLIIQAVSQLNSFCETVASLKVEMNNIASELPEYEIVLAMHGVGKTLGPQLIAEIGDIRRYPKRSSLTRFAGIEPPENQSGTYNQHSRRISKQGSPHLRKTLFQVMCCVLQLGHCDQPTFTFLDRKRAEGKPYKVYMIAGANKFLRIYYARVKELFDALEQSFDSQVA

SEQ ID NO: 323056 - protein, 334 aa, unidentified
MLYAAIDIHKRTFHAAVLDVETGETSERRFDATREELNDWAMPLQGTLAAVAIEATNGWRWVWRELSARGFDVRLVDPAQAKALRGRIKRAKTDRLDARWLCLLLAKEMLPESWLPPAEIQTLRDQTRLRKALAEDRTRWAQRLHALLTHEGWPCQRARLLTVEGRRWVQSLSLSPAARSQVDRLLRLIEAVESELHALQTELRRFARSDRRCLALQTIYGVGPILACHLLAELGEAARFRRARQAVRAAGLDPVVEESGETRRRGHLAKHGAPALRWALVEAAQHAQRTNSPDRVLYTQAATRVGGKRAVLTVARKIGRRAYHVLRELETQAA

SEQ ID NO: 323057 - protein, 417 aa, unidentified
MQTELSQFTAIIGIDWADKKHDVCVQALGSDKRQFSKIPHQVDKIDEWAQAMYLRHGGQMAVALELAKGPIVSALQKYCFFVIYPINPTTLAKYRQAFNPSGAKDDPTDAELALDLLVHHPHHFQPLNPQSVEMRTLMTLVEQRRRLMNDRVRITNRLRNALKQYYPQALDWFDHIDTPLFCAFIRRWPSLTQVKRARRTTLEKFFHQHNLYRKPVLERRIQAIKSAMPLTRDEAVIMPYRLQTLVLVNQLEVTLQSIAMYDDEIAALALEHPDYELFSALPGAGPHLAPRLLVAFGEQRERFASAAEVQKYSGIAPVTERSGQKSWIHWRWQCPTFLRQTFVEWAAQTINKSYWAGLYYYQQRAKGASYQAAVRSLAFKWIRILYRCWVTRTPYDEAKYLKALKERGSPLLSVKTT

SEQ ID NO: 323058 - protein, 338 aa, unidentified
MEVAVIGIDLAKDVFQVFGVDARGRAVLTKRLRRPQLAPFVAALSPCLIGLEACASAFHWARQFQARGHTVRIISPQFVKPFIRGNKNDGNDAAAICEAVQRPNMRFVPLKSVEQQDVQSLHRARQRLVNHRTALISQMRGILLDRGIVFAKSATRARRFLPLILSDPTSELSPLMRETLASLLELLRELDARVKRFDRQIADVFQASPVCQRIAQVEGVGPKTATAVVAAVGNGHDFKNGRHMAAWLGLVPRHRASGDRITLGAISKRGDQHLRTLLVHGARAVVRTAVRKTDARSQWVNALVARRGVNRAIVAVANKNARIIWALLARQEDYRRAA

SEQ ID NO: 323059 - protein, 355 aa, unidentified
MSNSSTFVIGLDLGDQHSHLVMLDQDGESIEETRLPTTRAAFQRKFSSLPTCRLAMEVGAHSRWASHLLKELGHEVLVANARKLRAIYTNPRKGDRADAETLARLARLDPKLLSPIHHRSPQAQADLAVIRSRDAGVRSRTLLINHVRGVVKASGARLPSCSADSFSKKVGPSIPEPLRPALLPLLDTIASVTQQIRAYDRQIETLCQAQYPETRSLQQVSGVGPLTALAFVLTLEDPSRFPKSRDLGPALGLVPRRDQSGDRDPQLGITKSGNAFLRRLLVGSAHYILGPFGPDCALRRWGLELADRGGKNAKKRALVAVARKLAVLLHHLWKTGQTYDPLYQSQRSREPQLAA

SEQ ID NO: 323060 - protein, 262 aa, unidentified
MTVKTVGLDLAKDIFQVHGISENGRVIFNKAIKRAKLLAFFEALPPCTVGMEACGSSHHWGRTLRQLGHDVRLMPANYVKPYVKRGKTDAADAEAICEAVGRPTMRFVEIKTEEQQAILSIHRTRDLAVRQRTQMANMIRSMLREFGHILPIGVEAMTAFAKRHLDGDHPDMPDIANGMLGMQCYQFIGLNERIAGYSKMIEQHALLSTDARRLMRMPGIGPITASAIIATIGDAKQFRTGRDLAAWLGLTPLNKSSGGKER

SEQ ID NO: 323061 - protein, 344 aa, unidentified
MSNLDTCGIEVSAKELVVSLRRQGDLEPLRSFPNTPEGHLIILRYLRRAGRLVRVCMESTGLYGLDLALALSGQEGIEVMVANPRAVRHFAHALMKRSKDDQIDAAVLEQFAVHMPFKPWQRPSVAVLALHALARRLRELVEMQTAEKNRQHAAGLSQAIPAVVRRDLARSLRAQERAIERLTRQARRLIAQDPQLAERFQLLDSVPGIGETSAVQLLGELGVLAPDLEARQWVAYAGLDPRHYTSGTSVHKKPRISKAGNKHLRHALFMPALVAVQHDPHLRAFYQHLLAKGKFKMQALVAVMRKLLHALHAMFKTHQPYDGSKLFRLKSAPAQEVTHVLVAC

SEQ ID NO: 323062 - protein, 427 aa, unidentified
MGRLKIVYPICCGVDVHRDFVIACIASTNEKGVTDYQSRRFSTYSGGLRDFRDWLAEQGCKDVCMESTGKYWFPVHNILEPTCRVVVTHPKFVKAIKGKKTDKKDAMWIADLFKHDLVRGSFIPPEVIRQLRDLCRYWVKLTWYTSGEKNRAQNCLTVSNFKLDSVFSNVFGKSASAIVDFMLEHPGEKFDVAPFLHHRCKSSPEDVQAAVDGAFNPWQAEKLKLVRQHVADLSVLKDLLEDLIMRIAEPFSRQIELLLTVPGISVPMTAVRILAEIGADMTQFESSKHLCSWAGLTPQNNESAGKKKTTRIGKAGQYIKPLLLQCAIGSCNPRSKLHPEILQKYQQLKKRRGKKKARVAIARRLLTAVYQVLLKDEPYAPYIAPAKDSIPKNRVLTHEEGLAILRRKGYIFADDPAPEAAAHTPAA

SEQ ID NO: 323063 - protein, 408 aa, unidentified
MTVVGIDVSKGKSMVAAMKPGGELVAAPYEVRHSDIELSRLALDVLCMEPDTRVVMEATGRYHEPVAALLHSEGIFVSILNPLLIKQSGAGSLRKVKSDPKDALKIAKYGLDNWSTLREYTPTEAIRQQLKLCERQCDLYSKNIVMLTNNLISLSDKTFPGVNELFSSPEKADGHLKWVDFYRTFWHCDCINRMSPDAFGERYKKWCKRKGYHFSTDATDALYAASCGLYTTLPRDNNAKLLVTVAADQLIALRENQSKLEAEMLNLCKQLPEYETVMAMYGVGKSTGPHLMAELGDVRRFPHRSSIVAFAGVDPGVVGSGKMQLSSVTTSKRGSPQLRKALFQVVSTYVKCKPENEAVYQFYAKKRDEGKPFFVCTTAAANKFLRIYYARVKECLNAVESATQVEEG

SEQ ID NO: 323064 - protein, 412 aa, unidentified
MQDILTCAMGLDIHRDVIVACLAKGELGTDPEIEIRSFSTLIPEMRKLRDWVLEAECRYVAMESTGIYWQPIYEMLEPCFDGQISILVVNARHMKNVPGRKTDIRDAQWIATLLRAGLLKGSFIPDKAFRELRHLTRYRKSIVHDITAQKNRIDKFLQSSGFRFTAFLSDAFGASGRNIIRHLMEYGNISREALDRCLKTQTRKRIDEILIALNGSLSEHQRGFLRMIFGHLEALEQHRHTVEDAITKEITKHEEALSLLCSIPGIDVTAAAAIIAEIGTDMSAFPDSQHICSWAGLSPGNNESAGKRKSAHINKGNPYLKSMLCEVGWVISGKRSLYLSGWYWRIKQRKGAKRATIALARKLLALIYTMLKTGSPYNEDCFEIRRKQSERKRASRMVNELQKLGYFVVAPG

SEQ ID NO: 323065 - protein, 336 aa, unidentified
MRYIGVDLHTTQITVCYLKATSEVEIRKYQLCEMDKFVSSLEISDEIAVEATCNTRWFAGQVQGAVKRVVLVNPREFEVVKNSCKKTDRNDAINLARFLRADLLPEVRAKREEAEQVQSLVNTRTKLVRLKTSLINKIHALFVSNGRKLKKAGLASEKGLGRVLLSDWNAVERIELEIIIEQIRSLKVSIKKLDKAIEAESEKLKGYRNLKSMAGIGSLSAGILLSVIGEVTDFGSADKLASYFGIVPKVSNSNETVKTGRITKRGSKSGRTTLVQCSLAALKKSEYLKKYYEQVKARRGHGKAKIALARKYLGIIYNTLTNGWVFADFNNFELAE

SEQ ID NO: 323066 - protein, 407 aa, unidentified
MDKCIMVGCDLHDQSLVLKIAQGTLPPATRRWANTVSGRQAMIADLQHRASQAGARIVFAYEASGSGFVLWDQLTAAGIECHVLAPNRIERSPRQRKNKCDDRDALLCLDKLRAHVLAGNELPSVWVPPLQTRQDRDLVRHRLSVRMDAADVKRQIRWLLKRNGVESSPARGWTGEYWKWLEDLSAGQLPGGPGQALASMLRQLEFLLDESGRLDKQVTALCRERRYAGVVAALRRNKGVGVLTAMVFLTELGDLSRFENRRKLGNFLGLTPSAHGSGLNDDRKGRITHQGPPRVRRVLCQAVWCRIGTLAAEQESYARLVARNPQHKKKAVVARMRVLAVRMWHDGLEAQRALAAEPQGDARLSHKATGRTRSRRPPQKPPVPYGPDAALGSLASVALSSASAKTA

SEQ ID NO: 323067 - protein, 343 aa, unidentified
MDHFAGLDVSVKETSVCIVDETGKIVREVKVASEPDALVEVLTSPSYHFKRIGLEAGPLSQWLYNALAEAGLPVICVETRHMRAVLKAQINKTDRNDARGMAQMMRVGLYRPVHVKTLRSQKLRMLLTHRKLLQSKAIAVDNDLRGTLRNFGLKVGTVGTAKFEARIKELVENLPDLAVLVEPLLIVRRVLREQIGVLHRRLLAIVRDDDVCRRLMTVPGVGPVVALTYRATVDVPARFKNSKAVGAVFGLTPSRHQSGESDRPGSVSRCGDEMMRMMLYEAAQTMLVVSTKWSWLKAWAMKIARHRGMKKAIVALARRLAVIMHRIWVDGTEFQWTREVTAA

SEQ ID NO: 323068 - protein, 345 aa, unidentified
MAIVEVTRPVIGGVDTHLDTHVAAVLDGTGGVLGVESFPTTPAGFTELHDWMIRFGDIERVGVEGTGAYGAGLARFLRGCGLEVIEVDRPNRQARRQAGKSDPADAVEAARAVLSGRATGIAKTGDGAVEAMRALLIAKRSGREARISCLNQLRHLGFCGPDDLREAFRGVPRTALGARAAALRPRVGGDDVAHATKIAMRTLGRRVLALDADNDELDALLAGLVHTTAPDLLGVYGVGVDTAAILLVAAGDNADRIRSEAAWAHLCGVAPLPASSGKITRHRLNRGGNRQANHALWRIVFTRLGSEPRTRDYLERRLAEGLSKREIIRILKRYVAREVYRHLPR

SEQ ID NO: 323069 - protein, 346 aa, unidentified
MAYYVGLDVSVKETSICIMDDKGVVVARTDISTDPDLIAGFIFGHAPKVERVVHESGILAIWLTRELEKRGVPIICIDARLAHKALSGRINKSDQGDAEGLAQLARTGWFSQVHIRSEASERVRVLIGARERLIRMRKDLEGHVRGVLKVFGVCMKPVEKGKLRKNFRDQLVAAADTDPAIEMMSETFIPLHKTLCIARDALDEEVRIMARESDLARRLMTVPGVGPIVALAYIATLDDETRFRKAIDVGAFLGLTPKRHQSGEMDWSGKISKCGDRDMRRLLYAAASTLISCTRKPSRLKEWATKLAERKGHKKAAVAASRKIAVILHCLWRNATVFEPGMEGAN

SEQ ID NO: 323070 - protein, 484 aa, unidentified
MAKRKLSTFERLQRGERLNRKERREVQQRLNLDDPGLDIIQRDAAGIDVGNESHFVSVPPDRNPQPIREFGSWTAALEEMARWLKDCRIRTVVMQSTGVYWIALHDVLQRHGLKVNLVDARGSKNVPGRKSDVQECQWLRKLHTYGLLRPCFLPPPEIHAVRTLWRLRSQHVRDAGRCIQRMQKAMIQMNVQLHNALSDISGVSGQAIIRAVLKGERDAKLLAKLRDPRCQASEEEIVQSLQGNWKEDVLFELQQAVDAYDFYQRQMQQCDQQLRRYMAALPTCAPVPPPASAPSLPSAKEGKQGRARKSRRQGNQPAFDLAAELERILGVNPITIDGIDVLTIQTVLAEVGPDLSAWKTERHWTSWLNLAPKRDVSGGRVIRHVRQHHTNRAGHAFRMAAQSLIRSQSYLGARYRYLRAKLGGLKAVKAMARYLACLYYRLLTRGQIWVDRGTEEFDRRSQQRELAALQRKARKHGLQLVPAA

SEQ ID NO: 323071 - protein, 311 aa, unidentified
MTPSVYVGIDVAKAWLDVATVPPVLAVVQYANDPAGIARLVRALEAITPSLIVLEATGGHETAIASAVALAGMPVAVVNPRQVRDFAKALGQLAKTDALDAGVLALFAERIRPTPRALPDEAHAELLALVTRRQQLLDILIAERNRLAVARPSTKRSLDEHIRWLHARIRDTDELLQAALKRSPVWRAQEQLLRSVPGIGPQTASRLLVSLPELGRLSSRAIAKLVGVAPLNVDSGHQHGRRQIWGGRAPVRSALYMATLVGVRHNPLLRRYYQHLRALGKPPKVALIAAMRKLLVILNAMIKHQQPWQPA

SEQ ID NO: 323072 - protein, 344 aa, unidentified
MRIASIGIDLGKTTFHLVALGERNKVLVRKKFSRGQLLAYTANLPSSLIGLEACAGSHFLGTTLREQGHQVRLIPAQFVKPYRKSNKNDFLDAEAIAEAVTKENMRFVPIKSQDQLDLQAMHRVRDRLVQRRTALINEIRGFLLERGIIFAAHPIHLRNNLPGVIEDAEQNLSPRLRWLLDRLWQEWKQIESDVQAISQEIERISDEDVRCRQLRQIPGFGPLVSTATVAAIGNGAAFRRGRDFAAWVGVVPRQYSTGGKARLYGISKRGNIYLRRMLIHGARAVLFRIKHDTGGFGQWVHRLAQRAPRNKVIVAIANKLARIAWAVLSSGKDYRHQPLRPAAA

SEQ ID NO: 323073 - protein, 322 aa, unidentified
MIPPPLFVGIDVAKATLDIAVRPTAETWSAPNEATGIDALVAPLVPLAPVLIVLEATGGYQGPLVAALVAAALPVVVVNPRHIRAFAQAVGILAKTDRIDARVIAHFAEAVKPAPRALPDAQTQELRALLVRRRQLVAMVSAERARLDTAPLGIQETIHAHIAWLTTQIAGLDDALTQASQMHPAWQAKDDVLQSIPGVGPVLARTMLGHVPELGTLSPKPLAALIGVAPFNRDSGTLRGRRTVYGGRAEVRAVLYMGALVATRYNPVIKAFYERLLAAGKAKKVALTACMHKLLTIMNAMVRDLKPWQPQEAPSASHTRAP

SEQ ID NO: 323074 - protein, 358 aa, unidentified
MDQVIIGVDPHKLPVTIEARDSREVLRATGRFGTDTQGYRQLLRAARQWPQRVWAVEGANGIGRPLAQRLLADGERVLDVPARLAARARVSGTGQGRKTDATDAHAIVMVALRDTGLRELSSDAGLMVLRLLCDRRDEISRARAQALNPMHRLFLELLPGGAPVKKSTGQYKAMPARVRPRDLAGKTRRRMAAGELAGLARLDAKLKAMKAELKAAVQASGSHLMDIHGIGPAGAARILADVGDVARFPDRNHFASWTGTAPIDASSGEHTRHRLSRAGNRRLNHVLYMAGIAGSATTPPAGPATGASGSSPGPPWKPCGACAGACPTWSTASSPPTPPHGQQQHQIRQAREGTRGRL

SEQ ID NO: 323075 - protein, 406 aa, unidentified
MELVPIHKRVIGLDIHQAQITACAILEEADGETRIEQRQFGAFKKDRRALAAWAAALDPEEVVMESTGIYWKSPYAALEAVGIRATVVNARHVKQVPGRKTDVGDAQWLATLARAGLLRGSFVPPAKLRELRVISRQRQKLVSLLTAEKNRMHKVLTDAGIRLGVVVSDLHGQSARAMIKGILDGQAPHEVLNLASRRLKASREELHDALQGELTASHVFVLDELLRHIEELEARIARFDARLLGELASEHNALALLQTLPGVDVIGAAMLLVEIGSDMSVFGTPDRLASWVGICPGNDESAGKRKSGRIRKGNPYVRRLLCEFAHAARCTKSAFQSKFQSLIVRRGYKRAIVALAHKMLRTIFFMLKRGEYYRDSATNYEQLSVQRNASRWIKALTRFGFISAAA

SEQ ID NO: 323076 - protein, 362 aa, unidentified
MRGQRTSVGLDVHARSVVACGLDGETGELFERRLTPEHGGVLSWVRSLPGPVSVTYEAGPTGFGLARFLVVAGVDCQVAAPSKLQRPSGDRVKTDARDARHLARLLHLGEIVAVAVPDAETEAARDLVRAREDVRGDLMSARHRVSKLLLRQGIVYSGGVAWTGVHDVWLRKQKFESAALQLTYDTAYDTMIAAVDRRDRLDKVIAAMAADSPFTPVVTRLGCLRGVSTLTAFGLAVEIGDWRRLTGRSIGAYLGLVPTEYSSGGSRSQGGITKTGNGHARRLLIESAWHHRQPYHRPSVDLRRRWDLADAASRARGQQANRRLHARWAGFDARKKRPVVANTAVARELAGWCWSLAVGENS

SEQ ID NO: 323077 - protein, 411 aa, unidentified
MENVFACCAGLDIHQKSVEACVRRLEPAGQLHHQTRHWGTMTRDLLAMADWMAAQGVTHVAMESTGVYWKPIYNILESRFTVLLVNARHLKQVPGRKSDVRDCQWIAQLLQHGLLKGSFVPPRAQRELRDLTRHRAQLVEEKTRTVNRLHKVLEDGNIKLASVATDILGVSGRAMLEALMEGQEDPVKLADLAQRQLRGKIPELEKALEGHLTEHHRFMLRLLWKELGQQEELIAELDRKIEEQTRPFANEIERLDAVPGVDRRVAEVALAEVGSDMKPFPTHSHVASWAGMCPGNEESAGKRRRQRLTPGNRWLKRSLVQAAWAASHTKHTYLASQYRRLAGRRGRKRALVAVGHSMLVIFYHMLKDRTTYKDLGGDFFDRLEPERLTRYYVKRLEDLGHKVKLESSVPA

SEQ ID NO: 323078 - protein, 403 aa, unidentified
MSVFVGLDWGGSSHAVCLLDGTGKVIDHFAVGHDHEGLADLVARLRRHGQPDKTPIAIERPSGLLVDSLVEAGFLVTPIHPNVVKACRPRYRAVAAKSDPGDAYILADVLRTDGHRLAPLSPQSDAIKALRALVRGRDDLVAARVALANQLRTLLESFWPGPVACFADLDSPIALAFIDRYPTPDSAARLGEKRMAAFLAQNQYCGRRAAADVLTRLRSAACGVAGEAEAEAKGEMVRALARSLESIVAKLAKLTSRIEHTVAELPEGRIVMSFPRAGKICAAQITAELGDVRARFQSEDHLAAEAGVAPVTYQSGRSRGVGWRWACNKRLRAAVTCFADNSRHASPWAALVYRRARERGCKHPHAVRILARAWLRILWRAWQDRTTYDPQKHPAARALSVSG

SEQ ID NO: 323079 - protein, 372 aa, unidentified
MTQSNILFIGMDVHKESIVVSLANDDRSEVRRYGSIGGRLEDFKKMLRKLVSTGKSLFFCYEAGPCGYELYRYITSQGHQCIVVAPSLIPKKAGDKVKTDKRDADNLTRLLRSGDLTSVYVPNAEDEAIRDLSRAREDAVLGLKSAKQRLKSFLLRHGIRFNGSANWSEKHLRWLAEDVYMSYPAQKVVFQEYVNTVTEANARVKRLEQEILYHTKQWRLYPIVKSLMALRGVRMVVAVTMMAELGDLTRFDNPKQLMSFLGLTPSEHSTGDKKKKGAITKTGNQHARRVLVEAGWSYRFPAKVSKEMQKRQEQLPMQVRDIAWKAQLRLTKRFRTMANNGKLKNVIVVAMARELAAFMWAIANEVPILPCD

SEQ ID NO: 323080 - protein, 340 aa, unidentified
MNYAGIDVSLECSSVCVVDANGKILREAKVASEPEALIAWFRSSGFDLERIGLEAGPLSQWLFAAMREAGLAVELLETRHVRKAFEAMPVKSDRNDARGIAQLMRLGWFRPVHCKSMSAQETRTLLTARKLVQSKLRDVENSLRGILRGFGLKVGKTTELKFAGRIEELVAGHPHLQVIAKALLAVRAVLRTEYAAFEKQVRKLARSDMRTRLLMSTPAVGPIVALTYASAIDDPARFKSSKQAGAHFGLTPKKYQSGETDYTGRISKIGDSSVRTVLYEAAHVMLTKPVKGCSQLKSWAMRIARRAGMSKAKVALARRLAVIMHRMLADATPFNAAAAA

SEQ ID NO: 323081 - protein, 400 aa, unidentified
MRTVFGIDVSKTSSEVAILVNGERVHGYTMPNDIIGFSRLMEDLKTVSNPEIIFEATGVYSRRLQAFLEENSYDYTRLNPLEAKKQLDGLRVRKTDEIDAEKLASSQFVLNRKPTYVQEEVYQNLHDLSRFYQNLTEDIVRTKNRLHKVLQVAFPEIENLLSTPTGEQYWNLVSIFPTKHWVLELSEVELKEAIRNSTSKRISENRVGNLTEKLVGLAKQSYAGISKTSPMVEEVKYDAQELIRLTNRREQVLQQLIALAEPLPEYKILLSIPGIAETTATSIIGELGDIRRFKSANQINAFIGIDLKHYESGDFLGQEHITKRGNPYARKILYKCIHNIASASHTNPCHIADFYEKRKRQSQITSTKPHTIASIHRLIRTMYYLIMHNKLYDYTLAQSH

SEQ ID NO: 323082 - protein, 343 aa, unidentified
MQEVTTIGLDIAKSVFQVHGVDAIGKVVIRRQLKRRYVLAFFEKLAPCLVGIEACASSHHWSRELKALGYTVRLMPPAYVKPYVKRQKNDAADAEAICEAVTRASMRFVATKTPEQQSCLMLHRTRHLFIRQQTSVINVIRAHLAELGIVAPVGRKGVEELLDVVADPSDKRVPEVARACLAALGAQLRRLKEQILEFDRIILAWHRSSETSRRLDAIPGVGPMLATALVASIADPQAFRSGRNFSAWIGLVPKQHSSGGKDRLGSISKQGDRYLRSLFMAGALAVIRYAKINGTKHRPWLTALLARRPVKVAAIALANKIARMVWAMMARGERYKEPVALAA

SEQ ID NO: 323083 - protein, 333 aa, unidentified
MQNFYFIGIDVSKKKLDICVMSNSKVLKEEKVSNHPQAIATVIAGIKEELSMSNDCFIICAEHTGQYTYPLICACKSVGSKLWLENASQIKYCSGVTRGKNDKVDARRIAEYAMRFFDKAKPYQRPIEELMRLKQLEAERSLYLTDLAKYKAQLSDQEGFMEDKIFKRKAKRLKEMIKSLEKTLKEIAQEMADVIYSSEELSRQMRLLKSVEGVGPVVAMNMIIATEAFTRFDNPRQFNCYVGVAPFAYTSGSSQHSRNRVSQRAVKYIKCLLHMAAVAIAHKKTGDLKTYFERKVAEGKNKMTVLNAVRAKLVARMFAVIRNNRVYQPILSV

SEQ ID NO: 323084 - protein, 343 aa, unidentified
METIYYIGLDVHKKTIAYCIKTVGGKTIRQGVVSTGRNELQQWLVDLPGPWMGAMEATLFTGWIYDFLKPHAVELKVAHPEMLKAITAAKKKNDRADAEKLADLLRVNLLPECTMMSEDLRELRRILRYRNLVVRTATKMKNKISGLLMEVGAPYNKKRLHGKKYFGELLERVEDVPESVKDLLRLSRGNLEIFSAVQKKLTGTLREQALIRERVERLQSIPGVGEIMALTWVLEVGDPGRFSNSRQAVSYCGLCSAQRESAGKEQRGPISKKRNKHLQTTLIEAAKLAPRWNPQLAVLHDKELQRGNRNRATLAVARMLLEFLLAVDRRGTPFTAEMPRRVA

SEQ ID NO: 323085 - protein, 337 aa, unidentified
MIIVGCDFHPSFQQIAMLDTETGSTEEHKLMHASGEAEHFYRKLTAPAIVGIETVGNDQWFVQLLQKLGHEVRVGDAAQIRASYVRKQKTDRRDAKHILQLLAEGRFPRIWIPDAGVRDHRQLLMHRHKLVQIRTRVKNELQHLMLNQGMQKKQKLWSTEGRAALASLPLEPWTDRRRKDLLNLLAMLDAQLESLDDAVTRVAKEYPGVPLLMSQPGVGAVTALAFVLTLGDVHRFPRGKQVASYLGLVPREHSSGGKQRMGGISKQGNRLLRFLLVEAANIAVRFDPELRKEYLHRCHQKHFTVAKVVTARKLAVRMYWMLRTQTPYPQVLSSRVA

SEQ ID NO: 323086 - protein, 316 aa, unidentified
MVPSPLFVGIDVAKATLDIAVRPTAETWSASNNATGIDALVLRLGALAPTLIVLEATGGYQGPLVAALVAAALPVVVVNPRHIRAFAQAVGILAKTDRIDARVIAHFAEAVKPAPRPLPDAETQELRALLVRRRQLVEMVSAERARLDTVPPSIQDAIQAHIAWLTTQIAGLDDALTRASQTHPVWQAKDDVLQSIPGVGPVLARTMLGQVPELGTLGPKPLAALIGVAPFNRDSGTLRGRRPVYGGRAEVRAVLYMGALVATRHNPVIKTFYERLLAAGKAKKVALTACMHKLLTIMNAMVRDLKPWQPQEVPSA

SEQ ID NO: 323087 - protein, 332 aa, unidentified
MNKRVCGIDVSYKTFDVEIMVNGKAVFKKDYTNDLKGQKTLIKKLIKMKTSYVCIEATGNYHLDIALMIDKIKEVKLMVINPRIAHNYSKVLNQKAKTDSEDAHVLAHYAAHMEYFKWQAPDEILFSIRACGRRLSQITKQATQLKNQKHAYEVTKATPKFIITDVELSIYNLENQKTNLIENTLKIISENRKAQQMYDLITGINGFSTKTAIKLIGELAVLDAQMKANELVAHAGLNPTIFTSGKSVNKTSRLSKAGNKYIREALYMSAMQMTYRYKNVAAYYEHMQIDNGLKKRQAICAIMRKMLMAIHGMIRDNVQFNENRFYKIPTNK

SEQ ID NO: 323088 - protein, 411 aa, unidentified
MEVLYDRVAGLDVGKASVTVCVRTPGTRRGSRRSETRTFKTTTGSLAVMRDWLLEHGVTIAAMESTSTYWKPPFYCLEEAMTVWLLNAAHMKAVPGRKTDVRDAEWIAQLLEHGLLTASFVPPPPIRHLRMLTRYRVQLMGDRTREMVRLEMMLEDASIKLSTVASSLKTVSARAILAAMIDGETDARVLAEMAKGRMRSKIPDLAQALEGHFNANHAQLARSILDRLDRVDQSLAELDEAITAACEPWEHQIELLVTIPGVGPRVAQTIVAETGADMSQFPSAAHLASWAGLAPSMYESAGKRTPAGRRRGNKWLTAMLVEAAGSVGRMRGKNYLATQHARLTRRRGMSRAQIAVAHSILTSAYYMLQRDEPYRDLGPEWLAQRNDEAHTRRLVAQLEKLGHSVQLDSVA

SEQ ID NO: 323089 - protein, 453 aa, unidentified
MRKAGLPPPKEKPPVKIEMMHPHQIILSEEVSVDKNDDSRLEEFRQLKRDIRGSTRHLVVGMDIAKERHHAFFGTPAGKVLLHRLVFDNTRDGFEKLCFQADILKTQHGLAHVVFGMEPSSDYHKPLGEYLIEHGHGVVLVAGTAVKKNRELLDNRWDKHDTKDAANVADLVTQGKCLFYEFPSLSLRELRSLLSLKRRLKKSEQGYKVRIRNHLIAQYFPEMDAYFNYAEGPDIVRWCLNPERLAGLHLQEFARMVSLGNAHQMSRLEEIHTKAAVSIGCAAHPSVAFEASLLLDGLKSLHLMILETDRRIAEVCKKFPEYPCLLSIPGFGPDISAKVLGALGNPHRFENHRQVLKMAGLDLSADRSGKRTDVTPVISKKGKADLRYGLYQAALIASTRNTQFMTYFTNKLKGREREKGIGTKMRVKLSAKMLVIAWTLMKKKEMFDPGCLG

SEQ ID NO: 323090 - protein, 387 aa, unidentified
MAHRNLPRPAAVYGIDIGKNVFHVVGLSRDGTPVQKVLFRRDTLLQFFARADPSIVDMEACAGSQWLARRMQALGHKVPLIPAQFVKPYVKSNKNDINDAEAIAEATTRPTTRFVTVKDTDQVDLQGMHRIRDQMVGFRTRLINQMRAFCLEYGLPLRQGAGLFKLDLPQALNDPANDLSAAMRRLLGDLNADFLRLEERIRQVTNEIESIADREDVARRLMTIPGIGALGATALLAAIGNGLQFRKARDLGAWLRLVPQYSTGGKPTLLGISKRGNRYVRKLLVHGARSCFRHLDRTRDRLGSWLDGLEARMHPNKAVAALAAKIARNVWVVLNKPGARYEPPSTLIQTAKMNEADPLAWLTQMLERIAAGWPASDIDALMPWNFE

SEQ ID NO: 323091 - protein, 356 aa, unidentified
MTSNIKYIGMDVHKESISIAVMNSVGKVVMESVIETKVSMILQFVDGLRGDVRVTFEEGTSAAWLYDLLKPHVTKLVVCDPRKNKSMREGNQNDKIDARRLAELLRLDHLTPVYHGEHGLRTLKELVRSYLTITKDLARVKSRLKAIYRSWAIPCTGKQVYARCHRAEWLGKISEAGVRRRAEFYYQQLDALRVLRQEARRDLLAESKKHKVWKRLCEIPSIGPIRAAVLLGILQTPHRFRSKRPLWNYGGLAIEMHSSADHRSVHGQLQRSRKNVLVRGLNRNCNHDLKNLFKGAAAVASSKPGPFQEFYTALVAKGMRPEMARLTLARKIATIVLIVWKKGVCFDAQHLKPQTA

SEQ ID NO: 323092 - protein, 345 aa, unidentified
MKKVMAGIDLHSNNLVVGIMDQDGKRVGEKKLPCELQEVVKFLAPFKKRLEQVAVESTYNWYWLVDGLPGLGYPVVLANPAAMEQYSGIKSAGDTNDAFFLAEQSRLKILPTGYIYDAELRPVRDLLRRRVLLVHQRTALMLSFKSLYTRTTGQEMTLSELKGLEIKAAQELYHHPANQLIAGMQIQQIEQLSQSVEKIEKAVMASARELPFYCKLTSLPGVGKILGMTITMEVGEIKRFADAGRFASYCRTVEAQRTSNDRKKGENNSKCGNKYLAWAFVEAANFARRYDLQCRKWYERKAAKTSNIIATKALACKLAKAAWYLMAKGTNYDAQRMFGQPAKPK

SEQ ID NO: 323093 - protein, 454 aa, unidentified
MAQTTARKLISFESTRFCRTTSQCRLSKYFFGGMLLFKIFRKNCCGLDVHKTWIYACIGITDANGRTDYKETRFSSFSKGLRELANWLAQYNCKEVCMESSGKFWVPVFNILEKTCWVTLAHPKYTKPQKGNKTDRKDAKWICDLFMCDMIKPSFIPSPDIRHLRDLMRYRFKLTNILTGEKNRAHNCLTVSNLKLDDVFSDVLGKSARSITNYILEHPGKQFDVAPFVDGRCKTPVEEIQAAVDGSISPEQAAKLREILSHIDELETHKRNIESEILRLAAPYETLLNLIRTAPGLSSDLMTAIAILSEIGPDMSVFPTAKNLVSWAGCCPRNDQSGGKRKSTRISRAGVYLKPLLVQVANAIVKSDKYPEFKERYRRLKARRGHKKAIIAICRMLLTAIWNILSKLEPYSSAGYLTDRPVNQSAVLTTAQALNLIRLRGYVIKDDCPSPAPV

SEQ ID NO: 323094 - protein, 419 aa, unidentified
MTGISAMKKHIYRTKKINAIDWIQMKEQLQGSPVVFAIDVAKEKQYALLANADSSVSELLSWNHPEQTREVLTHLENLACPLTAVMESTGTYGDALRYQFRCFDFEVNQISAKRVSDARELYGGVPSLHDAKSATVIMRLHRDGLSIPWRESDDAERELDALRREYDLHQSQYQRNKNRLEAYLSRHWPEVLPLLPLDSVTLESLLIEYGSPEQIAKNTEEAAKNMHLWSKNQLKNEKIAVVIQSAVNTLGQPCIDAERRYLQALTAEMRHSRQQQKEVKDILEATVKADTGLSKLTSVIGLITTAVLLSCRLDPRNFRNARSFQKALGLNLKEKSSGRDVGRLKITKRGCSMVRRYLYFAALRLINNDPVVKAWYQKKVDARAKNKTVIAFMRKLAKALWHVARGERFDATKLLSVTA

SEQ ID NO: 323095 - protein, 417 aa, unidentified
MIRKVMEVIHQSVGGLDVHKKMVMACRRRLLGDGQVESEVLEFGTTTLQLRSLSKWLSEWGCSHVAMESTGVLWIPVWNVLEGDFKLLLTNARQLKKVPGRKKDVTDAEWVGQLMQCGLLKGSFVPSREVRHWRTLTRQRMKLIDQRTGVVNRMHKILQQGNIKLSSVATDVMGVSGRAMIQAMIEGESDPETLASLAKGRLKSKHEQLVESLEGRLNQDDRWVMKELWEQMEYLEEEIARYDDQIKEKMSPYEESLERLMTIDLIERRSAENILAEIGPDMSFFPSDDNLVSWAGLCPGSEESAKKNRSGKTPKGDQWLRRALVEPAWGAARRKDGYLGAMYRGIAVRRGEKRAVIAVARTILQAAWHVLSKGEKYKERGGDYFDRINSEQTKIKLIRRLERLGFEVELKPKQATV

SEQ ID NO: 323096 - protein, 428 aa, unidentified
MKYSQNEKILQITEKTLIIGVDVASETHFARAFDQRGIEHGKLIKFSNSAEGFQGFGDWVKELKEKCLKLHVIVGMEPTGHYWFNLAQQLKDHRIKIVLVNPFHVKRSKELDDNNPTKNDRKDPKTIAMLVKDGRYMEPYIPEGIYSEIRIVMETRWQIVKQMNTIRNRVQRWLSIYFPEFKTVFGDWEGIAALIVLKEFPTPVKILEKGVDEIVSRWRRDKIRAVGRKRAMTLVEAAAKTIGVHEGITAGENDLKIILEDYEMKMKQYDWTIDLVEELVKQIPGMKEILKIKGVGLVTAAGFIAEVGDITRFDHPKQIQKLAGLSLKENSSGKHKGKTSVSKRGRKRLRALLFLAILPIVANNQEFKKLHQYYTTRVDNPLKKKQSLILLSCKLIRIFWALLKKQIAYDPEKMLNDIRRPETMQTAA

SEQ ID NO: 323097 - protein, 392 aa, unidentified
MTYFIGIDLAKYKHDCFIMDENGEVIRDSFSFNNDKEGFNTLLNVLNSLDSNQEKRIGFESTGHYGSNLKIFLERNGYSFMEFNPLLVHRHFKSETLRRTKNDKVDARKISSYLYTREYKPNPNSSYHLNCLKSLTRTREALIKDRTRHIIHMINVLDKMFPEFKLQFGNQGLNAASAMYLLENYGSPSKMSNMTRASYDKMKSELRHTISYAKFLRIKELARNTIGNEDEILVFELNTYLELFKELDKKILKVEDKITKEFSIMKCHIASIKGIGIITAAGILAEIESIDRFDNPGQLCAFAGIEPSENQSGTHDGGGKMVKHGSPHLRNYLMQSAGYMLIHNPVLYEYYLKKRNEGKCHTVALSHVAKRLTRIIFYLEKNDTDFNIDKMR

SEQ ID NO: 323098 - protein, 391 aa, unidentified
MVCVGIDVAKDKHDCCILDSDGTIRADCITIPNNMDGFKQLLQTIRDCTKKSDKIKVGLEATGHYSYNILGFLLDNDLAVYVMNPLHTNLYRKSLSLRKTKTDRVDARTIATMLLSDVDLKSYTDTAYHNEELKSLTRYRFDKVRERAKLKQSVSRLVTILFPELEKLVPSLHIASVYALLSEYPGAKQISEIHLTKLTNLLATASKGRYGKDKAIQIRDAARTSIGSVMPAKFLELKHTIKLIRELTFEIDEIEVSIQKIMDELNPPILSIPGVGIQSAAMILAEIGDFSNFESPDKILAYAGCSPSTYQSGKLTNCYAHMEKRGSRYLRYALYNATKYVCHWNPVFAEYLAKKRAEGKHYNVALSHATKKLVRLIYALQKSGKAYLVAA

SEQ ID NO: 323099 - protein, 409 aa, unidentified
MERVIERGAALDVHKKSVTGCVRVPGPDGGRRQEVQTFGTTAAALLALRDWLRAHRVTHVAMESTGVYWKPVYYVLEELFTCLLVNAAHVSKVPGRKTDVRDCEWLAQLLEHGLLRGSFVPPVPIRELRDFTRYRQVLVQDRTREANRLHKVLTDAGIQLASVASNVLGKSGRAMLAALVEGTTNPQVLADLAQGKLRRKLPALREALAGRFRKHHALLVSQLLAHLDYLDEALEILTAQIEEALGPFATEAARLDAIPGVGPRTAEILIAELGVDMRQFPTARHVASWAGLCPGTHESAGKHRAVRTRKGNRWLRAALIEAALAAINVRDSALAARYRRLVRHRGHKKAIVAVAHKMLTTAYLLLADGRTYQEPGAGYYDAQRKDRSVRRALQTLQRCGYRVSLEPAA

SEQ ID NO: 323100 - protein, 342 aa, unidentified
MGQYVALDVSLKEICVCIVDSNGDVVFEGKTAAEPATLVALIRSKAPQVTRVGLETGATSPWLFHALAAAGLPVVCMDARHAHAALSMRPTKSDRSDARGLADMLRMGWYREVHAKSITSHERRTILGARHQLVTMRSELDAQIRGILKTFGLILGTGNKDTLIQRAEKLTAEHPVLSGLVAKLAEVRRHVTSQIAAIDRDIRHLVHTQPTLKRLISVPGVGPITALAFLCAVDDPSRFKHARDVGPYLGLTPTRYQSGETDRQGRISKCGDTFTRTCLYEAAHVLLTRVQRFSPLKAWGMRLAKRIGGRKARIAVARKIAVILHCIWTDGTEFWWTREKAA

SEQ ID NO: 323101 - protein, 355 aa, unidentified
MSSEKYIGLDVHQATISVAVMDSQGKVVMESILETKASTLLEFFAGLRGSLFVTFEEGTWAAWLYDLLKPHVTEVLVCNPRKIPLLKQGNKSDKIDARQLAERLRLHDLKPVYHGETGVRMLRELARSYLTVVKDLSRVMNRLKALYRSWAIPCAGRDVYYTRHRGQWLEKIPEAGTRRRAEQLYQQLDMLQHLRQQARRELLAESRKHTITAKLRKIPSLGPIRSALAVALIQTPHRFRSKRQLWTYSGLGLETRDSGEYHYLRGQVQRRKKQATIRGLNKDYNHDLKSLFKGAATRASVKPGPFQEFYQRSLAKGIKPTMVRLTLARKIAAITLTLWKKGEDFDINKLNSQAA

SEQ ID NO: 323102 - protein, 410 aa, unidentified
MQTLVERGCGLDVHQATVVACFLVVFRNDKVQKQMRTFGTTTRELLSLRAWLLSEGCTHVAMESTGVYWKPVYIMLEGAFEIVVANAQHVKKVPGRKTDVKDAEWIADLLCHGLLRSSFVPPKPIRELRDLTRYRRKLVESQTGERNRLLKLLETANIKLASVATDVFGLSGRLMLRALIDGKATPQETAGLAMGKLRKRIPELEPALEGKLEEHHRFLLRLQLDRLETAEKDLAVLEQRIQEKLRPYEGQVTLLDEIPGVDWTLAAVIIAELGVDMKVFENVAQLASWTGVSPGNNESAGKRKSGRIPKGNMYLKTALVEAATAAARTKGTYLRDKFYRLKARRGYKRAIVAVTHKILVAIYHMFSHRVCYNELGDLYLDKLNKHHLMRNLIHRLERLGYTVKLEPKAA

SEQ ID NO: 323103 - protein, 412 aa, unidentified
MIGRGVRIGCVVCCRRLDLRDWGADQLPGARDVGFAAGAGQQPVVMMWTASPERHQVPRHDRCRSRIGKPSMKTFIRIGIDLAKNFFQVHAIEREGAPAVTRKLSRGKVLAFFAQTAPCRVGMEACGSSHYWAREIRALGHEVVLIPPAYTKPYVKRGKNDANDAAAICEAMSRPEMRFVPIKSADQQAVLMLHKTRELLVKQRTMTVNALRGHLSEFGLIAPKGIQRVKELLKLALVDETLPEEARQATAMLASHGDGLDERIDDLEKKIARASGRNQTSRLLDEIPAFGPVIASAMVAFNPDPSVFRSGCDFSASLGITPSQNSSGGKDKLGGITKKGNRYLRKMLVVGCTSVLRVAHKYKGALAEWIVAIRARKPERVVAVALANKLARIAWAMMTTGESFRAELYTKA

SEQ ID NO: 323104 - protein, 366 aa, unidentified
MEKDTIYVALDDSKRKVVVAILRAGDKDPEEREMAKEPHLVRRLFQRLKREGPVEACYEAGVSGYDLYRQITACEVPCQVIAPALTPRRPGQRIKTDRRDAAKLVRLFRAGELTPIHVPDEAEEAVRDLVRCREDVRRDVLRWRHRLLKLLDRHGRLWGAGKNWTQRHWAWIRGQHFDLPPLQRTFEATLFALEQALARRAELDKEIEALAETEPYREPVGWLRCFRGIDTLSAMVLLAEVVDFQRFRRPRQLMAYLGLVPSEYSSGETQRRGAITKAGNTHARRVLVEAAWHYRHRPTLGHALRRRTEGQPPAIVSQAWRAQQRLHRRSRHLVGHGKRPPIAIVAVARELVGFLWAAMTQPPKVA

SEQ ID NO: 323105 - protein, 351 aa, unidentified
MDGDSRVVIGMDPHKRSVTIEVMTSDEHVVGRGRFGTDIEGFTAMLAYLAAWPGRVWAIEGCAGIGRHVAQRLVAKGEPVVDVPAKLSARVRVFATGQGRKTDDTDAYSIALVGVRMSGLRSVVDDEKLELLRLLVDRRRRIGEEHTRMVCQLHQLLPELIPGGAKKDLSAAQARRLLAAIRPRDVVGRTRKQHAMELVVDLERIYQRKKAANKELIAHIKTTGTGLLDLHGIGPSGAARLLVEVADITRFPDRGHFASWTGTAPIDASSGDRVRHRLSRGGNRQINEPFARTTVMTREGRPNSETLRMLEAALAEMTPLYRAVTDQLGVAIRTELDRRYLASPASAQGQG

SEQ ID NO: 323106 - protein, 342 aa, unidentified
MNLTTIGIDLAKSVFQVHGADEKGKAVLKKQLKRAQMLAFFANLTPCRIGMEACGSAHYWARKLQGLGHTVQLIAPQYVKPFVKRNKNDAADAEAICEAMMRPNMPAVPIKNASQQAILSVHRARQGFVKARTAQANQIRGLLAEYGIIIPKGIGHIAKRVPEILEDGENDLPGSFRLLIERLADHLKELDRQVGELEVQIQLWHKDNSASQKLEKIPGIGPITASAVAASIGDARNFKNGRQLAAWLGIVPRQHSTGGKSTLLGISKRGDTYLRTLLIHGARAVIRVAERKPSPDPWLKNLLARRHKNVAAVALANKNVRTIWALLAHDRAYEPGYARAAA

SEQ ID NO: 323107 - protein, 387 aa, unidentified
MSQTAAALIPAPVAYGSTLVLAIEVSNKSWVLAAQVPGLPHTKAKRTIHPEAGALLAAIAGYRARAAATGHTIERVIAVYEAGWSGFWLARWLIRHGVEVYVVQPSSVPVDRRMRRAKSDGIDAELLLRTLLAWLRGEPRVCSMVPVPDEADEDARRCVRERTELISERVGLTNRIGAVLATLGVTDYNPLLRSRCRRLAELRTGLGEPLPANAHAKIKRLLARLELVLTQIAELERERDAVVETEASDKAGKMIQQLISLRGIGVQSATVLVREAFVRRFANGKALGSYAGLASSPYNSGGINREQGIGKGGNRRVRTVMVELAWLWTRYQPSAAQVCWFRERIGPTGRRVRKIMVVALARKLLIALWRFVIDGVVPEGAVLKPAA

SEQ ID NO: 323108 - protein, 430 aa, unidentified
MSKEVLYLGLDVHAENIAVAVAEAGRDGEVRSHGIISSDLQNVEKVLRRLGHPHKELRVCYEAGPCGFVLARRLKQWDIACEVIAPSLTPKGSGDKIKTDRRDARMLARLHRAGELTGVHIPDERDEAIRDLCRARTDAVQDQRSGRHQLKAFLLRNGYRYSEKTSWGVAHMRYLRELVLPHPAMKVVLEEYLQCIDAAAERIERIEVHMKALLEEWHMKPVVLALMGLRGYQTVAAMITVSEIGDIHRFANPRQLMAYLGLVPSESSSGGSRTQGAITKCGNGHLRWIFNDHRAARAAGGDCHRQPEGQDERERASQCAQHYRLPPKVSQELTTRQEAIPKAHRRAVQELSWRCQNRLHERGRKLAAHGKTRQKVQIALARELAAFVWEVMRLTTPLADGTHVSKAQPAAKKKGRSYVLKSRASSTSPA

SEQ ID NO: 323109 - protein, 373 aa, unidentified
MINIGIDVGKFKHCATVLDDSTGEVLIKPFFLTNDRKGFDILYSKTKQFIHRKHSVGMEDTGHYMINLTNYLLDKKFTVKYINPRATFLRRKELGISAKNDRKDALLIAEMLSEKRFWRSISVRSIENSKFRDITRLYHQLQEQQNQDMNRLQRALDIVFPEVNSLSWTRYSKAYMKFLSTYPSASSIALEDIRNLRKALKTEGKGRQSKVTAEEIRELAKCSVGEDNISIDLEVTSIISIINTREEQIRILGKKIEEFSHKLNSPIISIPGISHISGMTILAEIGDINQFQNTGNLISFAGMDPLVYQSGKYDAAHMPISKHGSRYMRKALYQAIFTVCKYSPTFHDYYTKNVIKENLTDAPRAIVHENFSV

SEQ ID NO: 323110 - protein, 402 aa, unidentified
MNAVGIDVSKSKSVVAIMRPFGEIVSTPFEIKHTASDIHSLIELINSVEGESRIVMEHTGRYYEVLAHQLLEANLFVSAINPKLIKDFDNDSLRKVKSDKADAVKIARYALDKWQNLKQYNVMDELRNQLKTMNRQFGFYMKHKTAMKNNLIGILDQTYPGVNTYFDSPARSDGSQKWIDFASTYWHVDCVRKMSLNAFIDHYQNWCKRKKYNFSQSKAEEIYGKAKELVPVLPKDAITKLIIKQAVDQLNSASTTVESLRTLMNETASKLPEYPVVMAMKGVGTSLGPQLMAEIGDVSRFTHKSAITAFAGVDPGVNESGTYEQKSVPTSKRGSADLRKTLFQVMDVLIKTHPQDDPVYQFLDKKRAQGKPYYVYMTAGANKFLRIYYGRVKEYLASLPES

SEQ ID NO: 323111 - protein, 388 aa, unidentified
MTQISGSLPQPVAPDYDRTLVLAIELSNKSWVLAAQVAGLARVKARQTIEPTAEALLVAIQGYRERATVAGRHVERVIATYEAGWSGFWLARWLAVHEIETYVVQPSSVLVDRRARRAKSDGIDAELLLRTLLAWLRGEPRVCSMVPIPSEADEDARRSVRERTELVAERVALVSRIGAVLATMGCGDYNPLLQNRRQRLGELRTAFGTPLPQHALAKISRMVDRLDLVRAQIAALEQDRDAVLQEDEPDKAGTMIQQLSKLRGIGVQSATVLVREAFVREFANGKALGSYAGLCATPYSSGGAEREQGISKAGNRRLRTIMIELAWLWQRYQPGSAEADWFRTRVTGTGARMRKVMIVALARKLLIALWRFATQGVIPVGAVMKPAS

SEQ ID NO: 323112 - protein, 311 aa, unidentified
MMASQDVFVGIDVSKGRLDVHVRPLGIGFSVSNEAAGYAALIARLQPLRAKRIVLEATGGYERALWLALSEAGLVAAVVNPRQVREFARAAGRLAKTDRLDAAVIAHFAETFAPRLGKPDPVADRLGEHVLYRRSLQDEIVALEHQRRRIETPALRERAQRRHAALRAEVKEIEREMRAIVDSDPAKKALFACLTALKGVGLVLACTLIANMRELGSLTRHQAAALIGVAPFNHDSGARRGYRAIAGGRRRVRNVLYVATLSAVRCNPAIRDFYCRLSAGGKPAKVALVACMRKMLVMLNGRVRDQLRAAA

SEQ ID NO: 323113 - protein, 400 aa, unidentified
MLSIGIDVSKGKSTVCGMKPGGEIVYTPFEVQHTREGMSELVSLLRSSGEEVRAVLESTGSYHCPVAAALLESGIFVSVVNSLRMKRFCSQSIRKVKTDRIDAMQIALYGLAYWQELQPTRLPENTYRELQLLARQYYQMTSLLIKAKVDFNAICDQVLPGMQELMSDHAGRHKLSDFVLRYHHTTHILEMGETRFRKDYCKWAEKKGYRNCERMAALIFATAQNGIPVLPNAPSTQIVITEAIRVLHTVEASRDAILTQMQALAKTLPEYSLVREMPCIGDTLAPRLIAEIGDVRRFHSKRALIAYAGIDAPPYQSGKFCANNRHISKRGNRYLRKTGYEVMQSYVMHKPANDPIFTFIEKKRSEGKSGKLAMVAGLNKFLRVYYGKVTELYRSLSAIE

SEQ ID NO: 323114 - protein, 448 aa, unidentified
MSKIKTKNETVKRISQLTVINPTVAGIDVSDKEMMVAYPIGSEQLEVRSFGCFTSDLHTIAKTLKKFQITSVAMESTGVYWIPLFLLLQEYGFEVYLVNAKHVKNVTGRKDDESDAEWIQKLHSCGLLKASFQPDNMTRTLRSMVRHRKSMVSTSSTYLNRMQKALELMNIKLHTVISDIDGKTGLLIIEAILSGERNQEVLADLRDRRIKASREDIIKSLEGHWTTEHLFELRQCYQLYCTHREMIDECDKEIEKQLIEQIASKNEGVIPDIPKAKRKVSGKHKVPFNLTFYLKEILGVDVTEVFGISELSALTIFSEVGTDMSKWKNEHHFTSWLGLAPNTKISGGKVISSRIKKKKHHAGQAFRMAANGLYNSKSPLGDFYRRVRAKAGAGKAVVATARKLAIIFYKMVANKEAFNPIALENFQEKYRQKKINQLKRKLEILEAA

SEQ ID NO: 323115 - protein, 341 aa, unidentified
MQITTIGLDIAKNVFQVHGIDAAEKVVVRKQLRRGQVLKFFAALPPCLIGMEACATAHYWARELTKLGHEVRLMPAKDVKAYVKRNKNDAADAEAICEAVRRPTMRFVGAKSAEQQGRLIQHRTRDLLMRQRTQVINALRAHLAELGIVAAQGREGLKQLLTIIADEKDARLPIDARASLIVLAAQLQALQTMIGSIEKRLTVQHRANEASKRLESVPGIGTIGASAIAATVTDPNAFRSGRDFAAWIGLVPRQDSTGGKQKLGPISKQGDRYLRRILVVGAHSVLRRARQNPEKYPWLTQLLARRPFKVVAIALANKMARVAWVLLARGGTYRVPALAAA

SEQ ID NO: 323116 - protein, 404 aa, unidentified
MVFLGVDWAEEHHDAWLENEQGEMLGKTRITNDVGGVRQLHELVAEHAHDPSQVVVGIETDRGLLVTALVGAGYQIYAINPLSVSRYRDRHGTSGAKSDRADAKVLADLVRTDRHNHRPLASDSDLSEAIKVLAREHQDLVWTRKRFINRLRGTLREFYPAALEAFGTDLGALDALAVLERAPTPWQGRQLSHAKIVSVLRKAGRQRNLEHKAAEIQRALRSEQLQAPSQLQAAMAIVVSSCVAMIKSLDLQLEQLAAEMTASFEGHPDAEIYLSLPGLGVVLSARVLGEFGDDRARFADAKARKAYAGTAPVTQASGTKKIVLARFARNRRLADACYWWAFSSLTRSAGAHRYYRALRTRGKTHHQALRGLANRLVGILHACLAAGQTYSESVAWPQPREIAA

SEQ ID NO: 323117 - protein, 388 aa, unidentified
MDVLYQSCAGIDVHQATVVVCILHGPLTSTRPKREMAQFDTTTKGLKDCHDFLSQFHVEAVGMESTGVYWRPVWHELCDDFELILAQPAHMKAIPGQKTDKKDAHWIAQLTRIGLLPRSFVPDETIQELRELTRQRKHYVESRNRETNRIHKILQSGGIKLTTYIEDIMGASGRNLLQLLIDETPVTPRMIHQSVYTSLKRKVPQLLEALDGYFSAHHRFMLGQSLEIYDFYQKQIDCLEERINGYLNLYERPVEILDSIPGIDLITASVIISEIGVDMSQFPTAGHLASWAGLCPGNNESAGKKRSTKIRHGNSYLKRCLCQAVFAAKRQKGSPLAERYYQIQSRRGPQKATIALAHQLLKIAYILLKENLTYQEFVLQKRLLETSQ

SEQ ID NO: 323118 - protein, 387 aa, unidentified
MPQPNDQSRSLVALDQNSTIIAVVELSQSSWLVAGMLPGIERQPRKKLEPNPERLLGLLHRWRDEAVRAGCTITRIALAFEAGRDGFWLARWLAARGVEAHVIHASSVAVSREHRRAKTDRLDTELLKRGFLGWLRGERGHCTMARVPTIDEEDAKRPNRERDGLVGERTRIVNRIKSTLARLGIRNFKPTLRNAAERLATVHTPEGMPVPPNTLAELQRDMARLGFIVSQIREIEAARWKRLEQQHESGSHAMVRRLARIVGIGIETADMLVHELLSRPMRDRRAVARYAGLTGSPDESGARRREQGLSRAGNARVRRGMIQLAWRFLMFQKESALALWYRARTADSRIGMRKTMIVALARKLIIALWRFVTTGEPLDGVVLRPAS

SEQ ID NO: 323119 - protein, 326 aa, unidentified
MIYIGIDVAKNKLDCLWLKEIQPEKIKTKMFKNNIEDFENIALWLIKVTSAKPEQLHIILEATGSYHEGVAMHLFKMGFQVSVVNPARPKEFAKALGVTHKTDKADSLVLAKFGYQMKPKFWEPQSPETRKLTSLIKRIESIEKDIQRELNRKEPAVVSYDSSIIIDSIDKVVALLREEKERLTQELDKYINDDPTLKKNRQLLESIPGVGTVVSRVMLSVLSSHSFRNAGSVAAYLGLIPKIRESGTLRGRSVLSKVGPANVRAKIYMAAVVAKQHNPDVKALYDRLKSRGKTHMQALGAAMRKLTQICFGVLKHQSEYQPQIVL

SEQ ID NO: 323120 - protein, 321 aa, unidentified
MGEYIGLDVSLKETAISVRRDGKRIWRGKCPSDPSLIAEVVRKHAPEPKRVVFETGPLSVWFYHALSAEGLPAICIDARHAKAALDMAPNKTDANDADGLAHLAEVGFYREVRVKGYDSMLVRTLVAARSRLVQITTELSNQIRGLMKTFGLVVPRSKGGTFEAEVQRLLVGQDELARIILPMLEAWRSVRTRASALGRQLLACARQSAACQQLMSIPGVGAITATSFTAAIEDPANFKTSRSVGAWLGLTTRRYQSGEVDYDGHISRRGDAHLRGLLYEAATVILTRTHADSDLRRWGLMLRERIGFKRAAVAVAPEPST

SEQ ID NO: 323121 - protein, 379 aa, unidentified
MVERWLGGFPMAKNGTLAKSQELQPSFQTTTEQITIGIDLGDRFSHCCVLGPDGKILTEGRLRSTPETMARHFQDLPASRIAIEVRTHSRWVSQLLEQWGHEVIVSNPRNLRMIADSIRKSDQVDAHMLARLARVDPKLLSPIVHRKQESYPDIIQLKARDLLVKNRTRLMNAVRGVLKSTGLRLSPCGTSCFPSKAAMCVPDELKSSLTPLLETISHLNKQIYLLDKAIENTAQNRYPETNRLRQISGVGPITALQYVLTIGDPGRFAHSRDVPAYLGLTPRRHQSGSIDQQLRISKAGNKQLRSLLVQCAQYLLGRFGPDSDLKRWGTRMFDRGGKNSKKRAIVAVARKLAVLLHRLWVTGDTYHPLHNVATSAVTP

SEQ ID NO: 323122 - protein, 264 aa, unidentified
MYVCLLNQDGEILLHRTMQTRPEVFLKALAPSREALGVAVECLFPWSGLAALCAQAQMPFGLGHALYRKAIHGGKAKHDTIDSQKIAVLLRGGMLPQAYVYPAEMRATRDLLRRRVHLPRQRAALLAHLQQTNSQDHLPEIGKQLASKAKRDGVAERFPEPAVHKSVEVDLTLLDYDARLRRAVEVTIVQTAKEPKAQALYRRQSVPGIGTIVRLVLLYELHDLHRFPSVQDCVSYGRLVKCAKEAAGKRYGTAGATSGHTPLK

SEQ ID NO: 323123 - protein, 417 aa, unidentified
MKCFVGLDVSSTKLDVCIMLSDTTTPFTASLPNDLVGAQEIKKQILELNDSYSFERIVIGMEATSLYSFHPAMFFHEDSDLKALSVEVRVEQPNKIKKYREAFEESKNDTIDAFYIADYFRAERFSPAFLKEEKYLALQHLTRTRLQLIEQLTRTKQHFIENIYYKCNTLSTEIKNESLTTSLWSSTIISLMTEDYTLDELATVPLNDLADFIQKLGRGRFKAPEKLAKAIQSAVRGSYRLPKLQQDSVNVILGLLAREIRNLEKLIKDIDKAIEEMVEVIPEYQCLTSVPGVGKVYAAGIIAEIGQIDRFKDHPQVAKYAGLNWKQNQSGNTNSQNTELVKRGNRYLRYYLVEAANSVRRHDSEYQTFYKKKYHEVPKHQHKRAIVLTARKFVRLVDALLRNRQLYAPPRRLMEDR

SEQ ID NO: 323124 - protein, 313 aa, unidentified
MQSNKKSFKGQKIFIGIDVHAKTWAVETLTESGFTKRHAQEASAKVLFDFLSKNFPDGEYHAVYESGFSGFSTYYQLKEYGIHCVVVHAADVPSTQYEQVMKTDKIDAGKLARALRKGDIKPIYIRERENLDDRAVVRLRKTIQKQLSGYKTRVKHLLHTNGVKLPARFDKPGTHWSRAFMNWLKDEVVLLSSTRLSLDLLVNQVESIRKNLLEATRGMRILAATDKYKANYELLLSIPGIGFNVAMCLLTEIYDFKRFGNENCFAHYLGLVPTCHDTGDKHSTGGKTFRGNKLLGPMIIEACWVAIHKDYGP

SEQ ID NO: 323125 - protein, 368 aa, unidentified
MEIERTFVGLDVHARSVVACGLDDVTGELRKARLVPDNETIFAWLQALPRPVAVVYEAGPTGYGLARFLTGRGVRCVVAAPSKMHRPSGDRVKTDAKDAMLLARLLRLGEITAVTVPSPAQEAARDLVRVREDVRADLMRARHRTSKLLLRQGILWSGGTAWTGAHEQWLGQQRFQLAGLQAAYDTTLETVLLATSRRARLDKAIVEMAHEPQWWPTVSRLQCLRGVSTLTAFGLAVEVGDWTRFSGSTIGAYLGLVPTESSSGEGRHQGSITKTGNTHARRLLVEAAWHHRRPYRPTKTMRDRWDLAPAPARARGHAGNQRLHERWVRFNERNKRTVIANVAVARELAGWCWSLALIEDRATPEPGR

SEQ ID NO: 323126 - protein, 409 aa, unidentified
MQVVHEVCCGLDVHKKSVTACVLWASGRRRQTREFGTFTKDLLEMSDWLRSCGVTHVALESTGVYWKPVWNLLEGQFEVLLVNAQHIKAVPGRKTDQKDSEWIADLLQHGLLRASFVPPTATRELRDLTRYRASLAQEINRIANRIQKVLEDANIKLASVATDTLGASGRAMLEAIVNGEQDSQRLAEMSRGLLRNKIPQLQQALEGRVTPHHRFLLRELLDHHYFVESKMRRMEQEVAERLGPFQSEVARLCTIPGVDRVTAWGLLAEIGLDMSQFPDAQHLASWAGLCPGSHESAGKRKSGKIRKGSLWLRRCLCQGAWAISTKKNNYLSALYRRLAARRGSKRATITVAHNLLVIAYYILRDGTCYHDLGADYFDRLNPEGLRRRLTKRLEGLGFKVTVEPLAQVA

SEQ ID NO: 323127 - protein, 356 aa, unidentified
MSRDIKYIGMDVHKEAVVIAVLNNSGKLVMESIVETKASSLLQFIHGLQGELHVTWEEGTWAAWLYDLLKPHVHQVLVCDPRRNALLKEGNKSDKIDAQKLANLLRTGMLRPVYHGEHGLRTLRELARSYHTISQDLIRVMNRIKALYRGWGIACGGTQVYAPRYREEWLGKIEHVGVRRRAELLYQQLGDLQTLRRTLRPELLAESRKHKATKLLRQIPCIGPIRAARLLALMQTPHRFRSKRQLWTYSGLGIETRDSAQYCFVRGKLQRVKKPQQIRGLNRNHNHEMKDIFKGAATRASCGVGPLRGFYVALLDKGMKPEMARLTLARKIAAIALTLWKKEACFDAEQLKPQAA

SEQ ID NO: 323128 - protein, 455 aa, unidentified
MAKKNPATRQSKGKVRQNILERINLHAAGIDIGANFHFVAVGEECTEENVRKFDAFTSDLHRMADWLSEHHIQTVVMESTGVYWIPAFQILEQRGLEVKLVNAAHVKNLPGRKSDVSDCQWLQQLHSFGLLNGSFRPKDEVCVLRSFLRLRDTLVKDSSSHILRMQKALTQMNIQVHRVITDITGYSGMAIIRAILDGERNALKLAQMKHPLVKAPTEVIVEALQGDYRTEHLFELQTALDLYDVYQRKILECEAQVEQHLQQWETKVDFEQALAQTAALQTRSASVRLELHRQAQLLSVCGVDLTRVPGLSTLAVRTIIGETGLDMNCWKSEKHFCSWLKLCPDNRNSGGKVLSSRARRTRNRATAMFRLAAQSAMRSQTAIGAFIRRIKARLGAPIAINAGAHKLAQLFYRMLKFGETYVERGQTYYETKYKERLLRNLNRRAKEFGLQLAPS

SEQ ID NO: 323129 - protein, 343 aa, unidentified
MELFVGLDVSLESIAICVLSSHGKVVKETTSPCEPEDLIALLRSLPGTVECIGLEAGPLSQWLYRHLIEVRFETTLMETRQVKGALKAMPIKTDRRDAEGIARLLHMGWFRPVHCKSTSAQEMRALLSARKTVVSAITNLELSIRGILRNFGLKLGRISKGGFEERVQELAADNIKLQAAAISILAARNALRVELAGLEKLLRDFAKADPLCHLFMTMPGVGPIVALTVKAAIDDPNRFQSSKDVGPWVGLTPRREQSGERDIVGSISRAGDAGLRTGLYQAAMVMLNKGRPSWLTAWALNVAKRRGKRRATVALARRIGVILHRMWQDGTEFRFTRAAPNAV

SEQ ID NO: 323130 - protein, 452 aa, unidentified
MATKRRKRIQDLPVLHPDAAGIDVGASEIFVAVPADRDAEPVRSFATFTRDLNSLADWLQACGIRSAAMESTSVYWIPLHQILEARGIEVCLVNAHHVKNVPGRKTDVSDCQWIQYLHSVGLLRASFRPPAVICAIRSLWRHRDSLIQMAAEHVMHMQKALDQMNLQVHRVLSDITGLSGLRILDAILAGERDPIKLAQLCHSRVKSSQDTVAKSLEGDYRIEHVFALRQSLAGYRYYQGLIAEVDQEIQRQLADLKTTAAGDSTPPKRTKKTPYQRYRYEPAGFDLRGELYRIFRVDLTDIPGISSVTAHTILCEIGTDVSRFRNASVFASWLGLCPERQISGGKVLYTKSRRVRNRVALALRLGAYSLHHANNYLGEFFRRITRKLGKPQAITATAHKLARIVFHLLNTKEAYNESVFHRCEEEALKHAELRLRKHAARMGFQLVPAANN

SEQ ID NO: 323131 - protein, 338 aa, unidentified
MFIIGIDPHKGSHTAAVLDGTETVIGELRVCADRRQRDLLLEFAARFTPRTWAIESASGLGALLAQQLVAAGEMVLDVPPTLSARVRLLDSGCTDKTDPHDARAAAIVALRHSRLRQVTPVDHTAVLRLLADRHHDLTGLRTQAICRLHALLCGLTPGGAGRLLSAPQAGRILRGVRPLGPVGIERKRIALELLGDVRRFDNQLLATNERIVEAVLASGTTVTDIHGIGPLGAAIVLGHTGDIDRFPTSGHFARYTGTAPIAASSGPKQRHRLNPRGNRQLNRALHVAAVTQVRNDTPGRAYYRRKLDEGKSRKEALRALKRQIAKTVYRHLVADARH

SEQ ID NO: 323132 - protein, 337 aa, unidentified
MNYCGIDLASKSSDICIITEKGNVLRRRTVDTESSDIGKALDGFGQLKVIIEASPLAEMVARIIEEHGHIAIIIDARAAKNLMSAMKKTDRRDAQTLAEIGRCGWYVEVHKKSAEARQMRSILQARQALLKSNKALGASIRGLLRSHGIRLGAVSKGQFAVRVKEVAAQEVPGLLPALTGMLEAWILTGQHAKQLRQSMIKACKQDEASAYLESVPGVGPLISTAYRATIDNPHRFKREEEIGDYLGLAPRIYQSGEMEYRGRITKQGDAMLRSLLVEGAHVLLTKGKDCALKRWGLSLEKRKGSAKAKVAVARKLAVLLWRLWKDKKMFEAFPQPV

SEQ ID NO: 323133 - protein, 341 aa, unidentified
MVGVDTHLDEHVLAIVAARSGAVVAQHSIQASAPGYAAALRFAADEANSARVWAIEGTGSYGAGLARFLAGRGETVLEISRTPRAERHLRGKDDSLDATRTARAALASETLALPRSGERREALRLLLVARRSAVDVRREALGQLRGVIVTAPDKLREELRVLPTGRLLKRCSRLRRSSSAGADELATRLVLRSLARRIEAATLEAAELERELLGHLRALAPALLDEPGVGPIVAAQLIVAWSHPGRVRSEAAFARLAGVAPLPASSGKTTRHRLSRGGDRQLNRALHTVVLHRRQYDPATKDYIARRIAEGKSRRDATRLLKRYLARHLYRLLQNQEPLLA

SEQ ID NO: 323134 - protein, 424 aa, unidentified
MKVSYQTCCGVDVHKSFLVATIVKTTGGIEPSYQKKRFSTFNNSILEFKQWLLDNDCHDVCMESTGKYWVPVFNLLEDEINVVIANPKWVKAVKGNKDDAKDSKWIGDLFRLGLVKGSYIPCKKVRILREYTRYRYKLISCRSSEKNRYQNALTVCNVALDSVVSDIFGKSSTSIIDYLLEQSGSSINHEEIASKLLRSLKSKEDAVIESIEGYQMTDAQKYRMRLIRAHMDYITAEINDVDKMIENMISSNPDFENAIQFLCTIPGVKRDSAITIISETGTDMSQFSSSKRLCCWAGLTPGSNESAGKKKSVQITRAGVYLKPALVQCAHAAVKSDKSPYYKKKYDSLVKRRGKKRAIIAIARMILTAIYQMLSTGELWNPSDLYKIDMPVALVEKQKAKAIKQAKKLLQREGLLPPDEPLAS

SEQ ID NO: 323135 - protein, 327 aa, unidentified
MSDAIVGIDVSKETLDANCARGRRKQSRIFANSPEGWKLVLSWLKAMGSKQAHVCMEATGRHSLGMALALHEAGHVVSVVNPAQIRDFTRTKLGRNKTDKVDAALIREYAELFKPKPWVPPSPAMRRLCELQTVRAGIVNNRAEWNNRIGSGLDDSTATRLAAATIEHFTSQLEAIDRVIGETIDQDAELRGRRELLLSVIGVGETLAALLMAEMPEPGVLRRSSEMVAYAGLNPSHHRSGSSIDRPTRISKIGNATLRSSLYMPALSAMRFNPAVAALVARLKSAGRLKPKQIVVAAMRKLLVLCFGVLKTGKRFDPAIAMSAEPK

SEQ ID NO: 323136 - protein, 424 aa, unidentified
MKFKMQDKQNQLIERISDPHLVVGVDIAQQFHVARAVNYRGIVVGDPLTFENNEEGFNRFLEWINKLKAKNSLDTTIVGMEPTGHYWINLSKWLSNEKIDVVTVNPHLAKRNKENRDNTQSKSDKKDALVIADMVKNGYYAFVRSTPESFEKLRVLMSNRDVIVKRLVSSINQLNRWVDVVFPELRQVFKDVKGKGAIATLRLFPTPIELRSMQPQDIVGKWKSVMKRQPGLKKAYLIIDLAKRSIGTHQALDAYKLHLEQLLEEYDLATTQLERVEQEVTNVLQQIPFAKKLLAIKGISEISLAGILGEAGDLSGFAHGNSLLRHAGLHLSEASSGKWKGQIVISKRGRSRLRRFLYLATMSLVMNNPEFKELHANNVKVKKIKKMKSIMKLCGKLARLFVGIAKRNESYSPEKLQPLTTLAA

SEQ ID NO: 323137 - protein, 413 aa, unidentified
MKSASSNLPDQPVNGVTAGVDWACEDHAVAVVDDRGREIGRRTMAHSAAGLNDLLGLLGRYRVREVAIERCDGPLVETLLEAGITVVVISPNQVKNLRGRYGSAGNKDDRFDAFVLADTLRTDRARLVPLTCDSDATIALRRTCRARKDLVAHRVAATNQLRAHLHNVFPGAVGLFADLDSPISLAFLARFDCQDRADWLSVKRLSSWLASVGYSGGVHPAELYSRLVAAPRGATGHYGAVQAHITRALLAVLTTLTEQIKALTAQISQQLASHADQQIFTSLPRSGTVRAARLLAEIGDCRGRFPTPDSLICLAGVAPSTRQSGKSRTVGFRWACDKQLRDAVCDFAGDSRQANPWAADLYQRARTRGHDHPHAVRILARAWLFVIWHCWQDNTAYDPTQHRALQRLLNQDH

SEQ ID NO: 323138 - protein, 353 aa, unidentified
MQVEYERCAGIDLHKKTAVTTIMMTHPDGRVEEHTRTFSTMTSDLLALDDWLRAHHVEIVAMESTGIYWRPVFNILEEGRTIILVNAQHMKAVPGRKTDVKDSQWLADLLRHGLLSASFIPPAPIRQLRDLTRYRKTLVQERAREINRLQKVLETANIKLAAVATDVLGKSGRDMLDALIKGGQDPEALAELARGRLRAKLPDLRLALEGRVEPHHRFLLEHILAHTDFLEQSIAQVQQEIDERLVAFQDAVTLIQSLPVQLQAGAATVIAEIGVDMTRFPSDAHLASWAGVSPGNCESAGKRKSGKTTKGNPYLRGVLSEMAWIVSRMKDNYLSAFTIASLDVGARNEPSSR

SEQ ID NO: 323139 - protein, 355 aa, unidentified
MNEAKYIGLDVHQATISATVLDSTGKLVMESILETKAATILQFIHGLRGSLHVTFEEGTCAAWLHDLLKPHVTRVLVCDPRRNALLKVGNKSDRIDSRKLAELLRSNLLRPVYHEHTGIRTVKELARSYLTITKDLTRVMTRLKAIYRSWAIPCACQQVYAPRYRAEWLAKISEAGVRRRAELYYQQLDALRPLHQEARRELLAEGRKHKAMNLLRQIPSIGPIRAVLLLALIQTPHRFRTKRQLWSYCGLALETRNSGEYRMVHGQLKRSKKVVAIRGLNKNHNHDLKNIFKGAAIRAAAVAGPFQEFYAALLAKGMKPPMVRLTLARKIAAITLLVWKKGVLYDAEHLKQQAA

SEQ ID NO: 323140 - protein, 341 aa, unidentified
MYYIGLDVHKKTISYCVKDVSGQVHREGKIGTTRNELDCWVGTLPQPRIMAMEATIFTGWIYDYLLPHAEQVKVAHPLMLRAIAAAKKKNDRIDAGKIADCLRCDFLPECHMASTEIRDRRRTLRYRHLLVRQMVQMKNRISGLLMETGVTYNKQRLHKRGYFGELLSSNEEVQENIRPLLRLSRETIVRCQRTEYALVSSLQRDPLLAERLRRLRTVPGVGPITALTWALEVGDVSRFRSVKQAISYCGLCGEEKSSADKVLRTPISKQRNKHIQRVLVEAAKLAPRQNHELALIHERENQKGNRNRATLAVARKMVAYLLAVDRREREFVPAEGRGKAA

SEQ ID NO: 323141 - protein, 464 aa, unidentified
MTAGQQLWRNRKEKKEWARRLQSEDPGLEVVHPHAAGIDVGNSTHYVAVRPDRDPEPVRRFECFTADLHRLADWLQSCGVKTVAMQSTGVYWIPLYEILEEHGLEVYLVNARHTKNLPGRKSDVQESQWLLKLHTYGLLNNSFQPVSEIRVLRTYWRQRGEQVRGAATCIQRMQKTLTQMNVQLANVISDISGLTGQAIIRAIVAGERNPLKLAMLSDPRVHASHEEIAKSLEGNWRPELLFVLHQEVDMYDTYQKRIAECDQRLQKHLASFTRPLPIQPPTQKLKTKKPAAKNAPRFDLSSELQRVTGVDLTRIDGIDVMVAQTLLSEVGLDMSRWITESHFASWLGLCPDNRISGDKVLSRGTRRVVNRAATALRQAANTLMRSRSYLGAQYRRLRTKLGAPKAITAMAHRLARLVYRMLKYGQTYVDKGTQYYEERFRQQQVQLLRKRAAKLGLQVAEIHA

SEQ ID NO: 323142 - protein, 409 aa, unidentified
MTAYRFYVGIDWATEAHRVVILDADRCPLHDRTVRHEGVALETFAGWLAEDVAAGIARDVAVALEVPRGAVVDTLLARGFHVFALNPKQLDRFRDRYTVAGAKDDRRDAQVLASALASDPPAFRRLEPEHPLMLELRELSRLEDELRQEFGRLTNRLREQLHRYFPQLLQLVPAADEPWLWALLERAPTPSAAQHLPRATLRTLLTRHRIRRVNADAVRALLRAPALTVAPGTVQAAQRHLAVLLPRLRLVHQQQAECATLIESLLDRLAESQEHRDVPILRSVVGVGRVVAATMLAEASRLLAARDYHGLRAQTGVAPVTRQSGRRTLVIMRYACNPRLRYAVYHWGQSAARHDPVSRAHYERLRARGHSHARAVRGIVDRLLRVLIAMLTAGTIYDPTRRRVLTHLT

SEQ ID NO: 323143 - protein, 412 aa, unidentified
MEVIFGCCCGLDVHKRMVTACHRVQGVDGRGHKEIQTFGTMTADLLVLHDWLVSRGVTHVAMESTGVYWKPIYNILEASFTILLVNAAHIKAVPGRKTDVKDCEWIADLLAHGLLKGGFIPPEPIRDLRDLTRYRKSLIDERVREVNRLHKLLESSNVKLASVATDVMGVSGRLMLDAILGGHADPVVLAELARGRLRKKLPDLRKALEARFRPHHRFMLEQILGHLDFLDEWIARISEEVANRMDPFCRQIDLLRTIPGVDRKTAEVILSEIGPDMDHFPSARHLASWAGLCPGNNESAGKRKSGKTRKGNQWLRRALVEGAWAASHTKDTYLGSQYRRLVSRRGKKKAIVAVAHSTLVIAFHVLKNDVPYREIGADFLDKLNATMIQRHHIRRLESLGFKVTIEPQAKAA

SEQ ID NO: 323144 - protein, 472 aa, unidentified
MVTTRPSALNRKQRTELARRLQSADPGLEVMHPNAAGVDVGNSTHYVVRPDQDPNPVRRFDCFTADLHRLADWLEQCGVTTVAMQSTGVYWIPLYEILDARGMEVYLVNARHTKNLPGRKSDVQESQWLLKLHTYGLLRNSFHPAAAIRVIRTYWRQRGDHVRAISTSIQRMQKTLTQMNIQLANVISDLRGWTGMRIVRAILAGERDPYALAALSHPGIRATRDAIAKSLEGTWQPDLLFVLHQEVALYDVYQQRIAECDQALQDHLKGFADRITDTPAEGDAPSATSRHRPRSTPKRRRKAGSHAPQFDLSRELHRISGVDLTRIDGVDVGVAQTLISEVGLDMSRWQDEHHFASWLGLCPDNRITGGKVIRRGTRHVINRAATALRIGATTLLRSQSYLGAQYRRLRGRLGAPKAITAMAHKLAVLVYRLLRWGHEYVDKGMQYYEERHREQQIRLLKKRAAKLGLVVV

SEQ ID NO: 323145 - protein, 417 aa, unidentified
MNNPLLVGVDVHRKQNVLSVMNVAGDEVTKRTSVDNNRPGTSQTIAQLGELMETGAYDHIQVGAEATGYYWLHFFQMLKEDEFLNQWPLALYAFNPRVIAHYKKTFVDLDKTDGNDAFVIADRLRLGRELPSPFGLDEPYLALRFLTRYRYHLIHNLAREKAYCLAILYLKASEYTRKEIAPFADVFGAASRAVLLEFASIEEIAALPFDELQEFIDVKGKRRFPDPSTNTRKLQRVAQDSYPLHQALLPAVNLILTTSFQQITHLQRAIKRLDTAIAEQLHAIPQTLDSIPGFGPVFTAGIIAEIGDIARFDFNQAKVAKFAGFKWRRNQSADFAAEETPLTRTGNRYLRYYFCEAANIIRLHDVDYKHFYHRKFHEVPKHQHKRAIVLTARKLIRLVVRLLTTNQTFRPRRVATA

SEQ ID NO: 323146 - protein, 317 aa, unidentified
MTKHSRKVAGIDISKAVLDVATNIGEAELQCDNNEAGHRQLVTWLRHEGIELVGLEASGGYERRVVAHLRAAGFTVRVLQPIQVRAFATFCLQRAKNDKIDARLIAVCTAAKPSNRAAPDPRFDALAERLTLLEQIEEDMARAKTRREAFHNQRHRDLIDAEIKRLRAWRAAEIRLLLTELRRHKDLAHRLALIESVPGIGIRTALAVLIRMPEIGKLSREQIAALAGLAPFDQDSGTHHGRRRIAGGRKRLRKSLYAAALPAAFRWNPALIDLYRRLINDKKTHKAALIACARKLLIFANAVVARGTPWIKKECAA

SEQ ID NO: 323147 - protein, 347 aa, unidentified
MRYVGLDVHQRETRVATLDVETGEVSSRSVPTAELAAKLSEWSDELRIVLEAGGNSWFVAQQLLSCGWEVVVVHPATVRPRRATYRRAKTDRCDAEGLVRTFAGGQLEDAVVWLPGPWIADLRELTRAREQLVRQGTRLRVLIRQALLRWGETCPYDNLTGKRAAAWLDELAFRLRPAQRTTLQSLREALAAVALQIEGLSAEIEAYVREEPDVQRLCTLIGVGVQSAAVIVAEIGDIVRFATAAQLRSYSGLTPQVKQSGSRSFTGPLTKAGNPHLRRTMVLVAQHFARSQATRESSVRRWYAHWVYKHGPNPAKVALARRLLDVVYAMLRDQTAFDAARYAPAAA

SEQ ID NO: 323148 - protein, 401 aa, unidentified
MDNTTIFYVGIDVSKDKSDICIKDEKGNDLIHRFEITNKKADLEMLYETVEGIKRNIPGNSDVVFGLEATGIYSLPLYSALKRDGCKVKLYNPIQTNGYRKINIRKTKTDSIDSAIIADMLRHSEPPQVSEIQDMHLFQLRELVRIRHRLIEKQALCKVQIVRNIDTIWPDYGGVMKRVFGAASIAILKKYSVPSKLKDESFEHFYELVKKKSRSKISRSKAEEIYVHAGNILTIPELESVIALEIKTLINQLELYDEQIHSVEGKIDQMMKLTDTKIMSIPGIADILGPTILGEIGNVERFSNVKKLVAFAGLDPVVSQSGRFENKSGKISKRGSPLLRHALFLASNTAIQNDENLKQFYAKKRSEGKHHFSALNAVAAKLLRIVYWVLKNNKEYQIKPN

SEQ ID NO: 323149 - protein, 457 aa, unidentified
MTKPKRSRREREMSPVHAGAAAIDIGATMHVAAVGPGRDPEPVRSFGTFTADLHRLADWFKQCGIKTIAMESTGVYWIPAFEILEQRGFTVVLVNARDAKHVPGRKTDVTDAQWLQRLHEYGLLRASFRPERRIAALRDYLRQRERLLDYAASHIQHMQKALMQMNLQLHHVVSDITGATGMRIIRAVLAGERDPAALAALRDQRVKASEETIRRALVGNDREEHIFALSQAVELYDAYQTKVAACDVRIEAALKELEASCPPPAAPLPAPRHRTQQPNALAFPAREALHRILGVDLTQIHGLGPYLALKLVGECGTDLSAWPSAKHFTSWLCLAPSNKISGGKVLSARTRRSSNRAAALLRLAAVTVGRTETALGAFYRRLAGRVGKAKAVTATARKMAVLFYNTLRHGMDYTDPGASYYEDRYRRRVLTNLQRRAKSLGFVLQAVESNPDGVGVS

SEQ ID NO: 323150 - protein, 316 aa, unidentified
MQAQQVFIGVDVAKDSLVSCIHGLAKPQVVANEERAIKGWLKTLAPQAVIGMESTGRYHQSLARLAHQAGLRVYVLNAKDVYFYAKALGACGKTDPGDARVIARYIAEHHAALHAWAPGTAAQLRVQELLQRRARVAVHRASLRQVLAGLEELAPDVLQLEQHFEQLLQHIDDEVQALVASETQLSQGSALLQTICGIGPQGAALLAALFNRIEFANADALVAYSGLDPRPCDSGTRSGRRRLSKRGSPSLRRQLYLAALAATRSKALGPTYRAIRARGFKSTPAVVILARRLLRIAWAVWKSGQPFDAARLQLAP

SEQ ID NO: 323151 - protein, 374 aa, unidentified
MTATTRPEISVSELTLYVAFELGKKEWKLAMTSGFGVAPWLRSVVSGDWQGVERAIAYGRARFGVPGDASVVSCYEAGRDGFWIHRALAERGIRNRVVDSASIEVNRRARRAKTDRLDALKLVMMLVRVCYGERGVWNEVRVPTAAEEAARQVSRERTALTQEQTRLINQLRGWLTTWGTALPRRTRAWWTTVRDWGGAALPLEVQGRLARAEARLAVVEGQIAELEAQQQAALTVAAPTSALQQLVQLKGVATTSASVLLDEGLVWRAFRNRRQIGGLLGFAPTPYDSGESEREQGISRAGNHRLQAISIQLAWNWVRWQPQSALTRWYRERFGTGKRARRIGIVALARKLVIALWRYVTTGVIPVGAIRKVA

SEQ ID NO: 323152 - protein, 352 aa, unidentified
MKVYAGIDLHSSNNYVGIIDEQDRRLYQKRLPNQIDHILCALEPFKETLEGVVVESTYNWYWIVDGLQEHGYRVHLANPSAIKQYEGLKHTDDKWDSFWLAHMKRLNILPEGYIYPKEERSVRDALRRRLFFVRQRTSHILSIQSTITRNLGYKVSARDIKRLDESDADKIFDDPYLRLVVRNGISAIRFLKESIKEIEGAVTSHVQVKPEFEYLQTMPGIGKILGLTIMLEVGDINRFPSAGNYSSYCRCVKSEKLSNNKKKGEGNRKNGNKYLGWAYVEAANFAVRFYPEFQRFYQRKKAKKNGVVAIKALSNKLARASYYVMRDRVPYDIDRHFYNHSACGRESEKGLV

SEQ ID NO: 323153 - protein, 349 aa, unidentified
MAEPRISYTGERIDVGIDVHKETYTVTCLRQRQIVKTATVPADPARLAESLPRWFPGARLFSAYEAGFSGFVLHRVLTTAGITNIVVNPASVAVAANDTVKTDRRDAKKLARELADGRLGGIYIPTEAEELARLLPRTRAQLVAHRATITRQIKAKLHQFGLITPGSRRLMSSRYLREIAAWELPPELHVSLTLLADQWRFATRQLLEVRRLLREQAKAQAALETVYRSVPGIGEVVARTLATELGDMTRFANERALFSYTGLTPSEYSSGAAIRRGHISRQGVSRLRHVLVETAWRALSGDPILQAMFDRIAATRGKQRAIVAIARRLIGRIRACFRHGTPYAVGTVG

SEQ ID NO: 323154 - protein, 311 aa, unidentified
MATYVGIDIAKHHFDLAVEGQPNVQQFENDPKGIRHGVKRLVELKPELIVMEPTGGYETPLVGELQAAGLPVAVINARKIREFARAAGQLAKTDKLDAQIIARFAAVLQPPPQEALDAQTLAMKALVARRHQLVQMHTAETNRIEHARDKVIVRSIRTILKTIQRQMDDIDRQIRDHIDSQPELKRKQEQLESVPGIGETTASLLLTELPELGRLNRRQIAALVGVAPINRDSGTYRGKRMTGGGRCHLRARLFMPTLVATRHNPAIRNFYQRLVANGKAKMTALIAAMRKLLTILNVIIAKNETWNPKTT

SEQ ID NO: 323155 - protein, 343 aa, unidentified
MEYFAGLDVSVKDTSVCIVDDAGKIVREVKVASEPEALLAVLTNPAYPFKRIGLETGPLSQWLFSVLAEAGLPAICVETRHMRAALKAQINKTDRNDARGIAQMMRAGLYRPVHVKTLRSQKLRMLLTHRKLLQSKAIAIENDLRATLRNFGLKVGVVGTVKFEARIKELVENLSDLVVLVEPLLIVRRAIREQIGILHRRLLAIVRDDDVCRRLMTIPGVGPVVALTYRATVDVPSRFKNSKAVGAVFGLTPSKYQSGEIDRTGGISRCGDEMMRAMLYEAAHILLVRTTKWSWLRAWAMTIARRRGLKKAVVALARRLAVIMHRIWTDGTEFRWTRETVVA

SEQ ID NO: 323156 - protein, 313 aa, unidentified
MDCMELDVGVDVSKPLLDVAVVQTDEEFQVTNDEAGWADLIKRFKGRKVRVIGLEASGGYERGLIKALRKAGFRVHRVDAYRLRQYARAMGRLAKNDRIDARMIARFAAQMPTREPYVDPLVEQMAELVVARRQRTKDKVRLSNQLEQVRDPMLRRITRQRLQRIEAEILLIGKRLAEIVASDANLATRDRLIQSFLGAGPVLSHTLLALAPEIGEVDSRELAALIGVAPFDDQSGKRNGKRHIWGGRAEVRNVAYMAAMTAACCNPALRAFKERLIANGKCKKEAIVAVARRMLGIITALLRTGQEWNPHHA

SEQ ID NO: 323157 - protein, 416 aa, unidentified
MESQHGMVAGMDVHKKTVVVVLLQSMQPDQDYASGIFGTTQSGLVELVAFLRQHGVTQAAMESTAQYWRPVWMTLEGEFNLTLAQARSTRARRGRKWDRADARRIAKRLLSGDLTVSYVPSPEQRDWRLLSRTQVGMRESLVRLRNQIEVLLEQAQVKISSVVSDVLGKSGRRMLQALTQGIHDPVELAGLGDRRLHASKQQLADALTGRFTEAQRMVLKLYLQQIDHIEQQIAELDQALAAALAAHGEAIERLCEIPGVSVRTAQQIVAEIGPRAEAFCSAGKLASWVAICPGQQESAGVSVSSRSAKGNWMMRRTLSQTAWAAIAAKRSEAARRFRTWRPRLGAQKAAWAVAHYQLRVIWNVLHQGVRYRRPETETLNRRALITKAKRALTDLCKLGYAVSITPPAAGTSALST

SEQ ID NO: 323158 - protein, 460 aa, unidentified
MDEVPVIGIDLAVTAASELAVASRASIETSRKVASTPKGLTEGIRQAARGRSVAIVVESTAMAWFVAAVAAVRSGVAHTLYRVSGRKSAALRAFYRSHTKTDHIDARVLARMPAVDDSLLTFTLSTPAEMALKRLVVARHKLTTECTKIQNRVRSLLDWAAPGMVKAGGGTVSAGLVAVLSRWSDLTALARARSATIALQSEWSAERAEAVRVAAAEAVAFYEGFVDFSAVELELEVSLAQLRFLGNQVERLEERIASLHAELYPKDRLLSIPGIGPVVSGVVRAVVGDLSRFANLASFRAYTGLVPREDSSGEVRRRGRISKAGPSVLRWALYLAADAARQCDPALAELYRRLMVERGRTHTQAVCAVASHLAGRIYAVARADRDYVWRDLEGNEITKEQARVIAQSLRVDPATRARLRARAEGGPRTPCTRQPVAPQDVTQPSADKLIEAALELASKR

SEQ ID NO: 323159 - protein, 342 aa, unidentified
MESIYYIGLDVHKKTIAYCIKTANGTKVRQGVVAAERKALGQWLIELPGPWLGALEATIFTGWIYDFLKPHAVELKVAHPEMLKAITAAKKKNDQADAEKLADLLRVNLLPECTMMSTELRELRRILRYRNLVVRTATQMKNKMSGLLMEVGVTYNKRSLHGRRYFNNLLERVEDVPDSVKELLLLSRGNLELFTAIQKKLITTLREQLLISERVKRLMSIAGVGEITALTWVLEIGDPARFSSSRDAVSYCGLCSAQRESAGKEQRGPISKKRNKHLQSKLIEAAKLAPHWNQQLAALHEKELKRGNRNRATLAVARKLVEYLLAVDRRGRPFEEKLARVA

SEQ ID NO: 323160 - protein, 347 aa, unidentified
MRFYTGQHRHYCGIDLHVKTMYVCILDATGAVLVHRNMKATPEAFLETVASYRDDLVVAAECMFTWYWLADVCAAEGILFVLGHALMMKAIHGGKAKNDRIDSHKIASLLRGGVLPQAYVYPRVMRSTRDLLRRRLHLVRQRGALLAHILNTRAQYQLPAFERRLASRANRTGVASRFPDGSVRTSITVDLALIDQYDTVIRDLERTIVQHAKCHDADAFHRLRSVPGIGTILALTILYEIHDIHRFSRVQEFASYARLVKGRHESAGKIVGSGGAKMGNVHLKWAFSEAAVLFVRHARGGKQILAQVANVHGKGKALSILAHKIGRAVFYMLSRGTVFSMGRFVAA

SEQ ID NO: 323161 - protein, 360 aa, unidentified
MDVVGVDVSTKSCSSSHLDGDGGIKKCLEFANEPEGWQILDRELGLETVVVLEAGTAAYPLHDYLKAKGRTVVMANPRGVRMIAASSSKTDRKDSVVLAQLYRLGYLPEAYVPSPEVLRIRDLVRAAIGVGQELTRTKNRVHALLVRSGLRPQYKKATLFVSGRGRRWLRDLRFGDHRDAVLEALLVQLEALEVQRRILHGEMARIGTEVPEVDLLMSIKGVDTFLALVIHGEIGDVRRFPTADALCAYAGLVPRVRQSGDSVVHGRITKQGPGALRWALGMAAGVALRYENPVGQKFRALRRRKKKAAVAKTAVAHKMCRMIHAMLTRGEWCRWEDRQATDVKVMNMRRRARARKVSAG

SEQ ID NO: 323162 - protein, 316 aa, unidentified
MNHYAGLDVSLEETAICVVDGTGRIVKEARAASEPEALIAALRAIDLPLERVGLEACSLTAWLHDELCAAGLPAVCIETRQANATMKTMPNKTDRNDARALAQIMRTGWFRQVHVKSRQARLWRSLLVARRTVLNEMRAIENVVRAVLREAGLKLGTPGRAAFAGRVRELAGDDRAVMPIVAPLLAILATMLAELARLTKQVLELARGEEVCRRLMSVPGVGPITALVFRATIDRTDRFRRSRDVGAHLGLTPSRYQSGETDISGRISRCGDELARTALYEAAHTLLVHSRARTRHPCVTLENLQRCTMLGPGTLA

SEQ ID NO: 323163 - protein, 361 aa, unidentified
MDGTMTWVGLDVHARSTHASAIDVVSGELTRARFGTGSEEVIEWLVGLPGPARVVYEAGPTGFALYRAGRAAGVAIEVIAPSKTARPSGDRVKNDRKDAELLARLAMAGQLTAVVVPSEFVEAARHLSRTREQVRGDLMSARHRVSKLLLAHGRVYEGTTTWNRAHRSWLGAQRFEQAPTELAFIDLLAAVDGLVARKDALDERLSRLATDERLWPTVARLRCFRGIDTLTALAVHLELGGDWQRFSSPRKLFSWLGLTPSLDQSGQSKTQGSITKTGSTYARRLLVEAAWHYTRQPRIGATVANRQAGQPDHLLQIAWRAQHRLHRLHTRLRERGKPHNVTTIAIARELAGFLWAAATAP

SEQ ID NO: 323164 - protein, 440 aa, unidentified
MKTKKAKAFPIIYPNAAGIDISSKEHYVAVNPDASSEPIKSFGCFTEDLKTLVGWLKECKVDTVAMEATGIYWISLYLMLEEAGFDVVLVTAKHVKNVRGKKTDVSDAEWIRQLHSCGLLSASFQPDSFTRKLRTYMRHRKNLIEMAATQIRMMHKAFEQMNIKIQHVITDITGKSGQEIIKAIISGERDPQKLAAHCDGRIRANKKESIIKSLEGVWKEEHIFELEQSFTLFHTYHQKIKECDLQIENHLRQKSGINNISNEKIKAKSNKNNLNFEAKEILTQITGTDLSEIFGITETNAVEIISEVGLNMEKWPTVKHFTSWLNLAPNNKISGGKILSSHIPKKKNHAGQIFKMAAFAVQRSKNWLAMFFQRIKSKRGTQRAVVATARKIAAIFYKLLRNKEKFNPIPIEKYMDGFKEYQIKRLKRQAQNLGFQLING

SEQ ID NO: 323165 - protein, 317 aa, unidentified
MSFVGIDVSKTQLDIAERPGNKRWSAVNAEADIGKVVETVGALFPQVIVIEATGGMEVPLVAALSQACLPVVVVNPRQVRDFAKAVGRLAKTDRIDAEILAHFGEAVKPEVRALKDEDTQMLTALVMRRRQVIEMLTAEKNRLGISPKVVHKDIREHIAWLQARLEDIDRDLESAIRKSPVWREKDDLLRSVPGVGQVLSVSLITGLPELGTLSRRQIAALVGVAPLSCDSGLFRGKRTVWGGRSHLRSVLYMATLSASRFNPTISRFYRRLVEAGKKPKVALTACMRKLLVILNAMMKNRIPWQANYSTCPTPQIP

SEQ ID NO: 323166 - protein, 369 aa, unidentified
MAKSITYVGLDVHKDTIAVALAEAGLRGEVREHGKIPNTPAALQALIVKLAPAGRQLRFCYEAGACGYGIQRQLTEAGHECAVVAPSLIPRKPGERIKTDRRDANNLAKLHRAGELTAVWVPDQAHEAIRDLVRARQAAVRTLRQSRQQLSGFLLRHGHHYHRPAWTQLHRRWLASLKFEQAVHYIVLEDCIAAIEAAAARRDRLEAYIEATLPEWSLAPVVHALQALRGVGLVAAATLVAELGDITRFTNPRQLMAYLGLVPSEHSSGRTRRQGGITKAGNGAARRMLIEAAWSYRFPARISREQLLRQERLSRPIRDIAWKAQERLCRRYRTLARTGKLPTVITAAIARELAGFVWAIAKQVQPTVS

SEQ ID NO: 323167 - protein, 354 aa, unidentified
MQQTTPADEVIVGVDTHKHTHTAVALNALGARLGTMTAPVNRGGYLRIETWARAFGPVRAFGIEGTGSYGAGLSRALREAGHRVLEVNRPDRSARRRRGKDDPLDAEAAAGAVLGGQATAEPKSGTSSVEMIRHLKIARDAAVKAKTQAMLTLKAIIVSAPAELREQLEGVRGKLALVRHLTKMRPGPMVSTTASAKAALKAIAGRWLALDEEIEAHDRELEALVSASAPNLMVARGIATATAAEMLLLVGDNPERIRSEGAFAKLCGACPIPASSGRTNRHRLNRGGNRQANAALHRVVVTRMRFHQPTIDYVGRRTGEGKTKAEIMRCLKRYVAPEIFGLLRKDSSAASKAS

SEQ ID NO: 323168 - protein, 420 aa, unidentified
MRSIGLDIHRDFGEVAIGEGAEVRSAGRIEMAPAALELFAQSLGADDQVALEVSGNAWEVARIVRPHVGRVVVVSPADTGIRSARAKTDRLDARALAKLLASGSLDSVWVPDENTQAMRRRLQRRSQLVRVKTKAKNEIHAALMRRLIPKPGFSDLFGIKGRRWLAELELPPSERETVDGCMRQLDFCEAEIAELERAIAAEALKSREVLRLMTVPGVNVITAATFMAAIGDIGRFADRKKLVGYLGLDPKVRQSGTTTASRARISKQGSSSARYALVEASWSVVRAPGPTRAFYERIRARRGHQAAIVAAARKLACLFWCLLTRCEDYAYAQPSLTKKKLRRLELAAGAQRGKAKPGTWAANKAMREAERELARQAEVADKRTVADWQRAQAKKGASVTTGRASDRPSGGEAARQTISP

SEQ ID NO: 323169 - protein, 417 aa, unidentified
MKEEFSFYVGVDWGVEFHQACILDAQGEKICQRRIEHSGPGMLEFCDFLQALTNGEASALAVAIEVPRGPIVEALLEHNYAVFSINPKQLDRFRDRHTVAGAKDDRRDAFVAADSLRTDQHCFRRVRSDHPDVIRIRELSRSEENVGIDLRRCVNQLSQLLLRYFPQLLRLCSTPDEPWLWALLELAPTPQRAAKLTEKRLKQLLGKHRIRRWTAEEVGEILSAPPLPLAAGSAEAISEHALLLLPQLRLLHLQRKQVADRTQQLLDHMAASTADFPESQEHRDIPVLLSLPGVGRIITATMLAEGAHILSLRDYHALRAHAGIAPVTKQSGKSRQVLMRYRCNQRLRNAFYHWARTSIQHDPRSKHHYAHLRQVGHNHGRALRGVADRLLAVLIAMLKSGQTYDPNRRSTADLTTA

SEQ ID NO: 323170 - protein, 337 aa, unidentified
MKRYLGVDLHRTQLTVCTRLGNGRTYLRQWPMRELKLFAAQLRKDDEIAVEATGNTRLFYDAVVEHVKRVVVVNPSQFKVISQSVKKTDRNDAEMLALYLSKGLLPEVRMKDKQHRSMAHLAQTRDLLVKQRSALKAKINNLLSAEGINLKREALSSNKALERVLALPLTPLMLAEARVLVNQIRSLNQSIAELEGMIEEEGPKLAGHRNLMSIKGIGPVSAAVLLSVIGDIRDFADPGKLAAYLGLVPRVQNSNETERSGRITKQANKLARTCLVQCALIAKRYSSFLGKFYQRIQRRRGGGKANIALARKFLGVIYHTLKNNWVFEDFPNFVLAS

SEQ ID NO: 323171 - protein, 316 aa, unidentified
MSDARYVGIDVAKDSFDVASDPAGLALSLPNDPTGRQHLLDALRKHTVALIVMEATGGYERALVADLIGAGHKVVVANPRQVRDFARGIGQLAKTDRIDARVLARFASMVKPEPRQKASEQAVNLAELVTRRRQLSDLMTQESNRLPHARHPDVRRSLKKSLRALERQIDDLDKIIRQNIDSDDGLRRKDEIVQSFKGVGPGTSAMLLSHLPELGRINRQQIAALAGLAPWDFKSGQWAGQSKIWGGRRPVRNMLYMAALSAIRSNEIIRKFYQRLASQGKKFKVAITACMRKILVILNTLVRNDCLWSPPLPKNA

SEQ ID NO: 323172 - protein, 320 aa, unidentified
MNQPSSTTSKNTNEIQYIGIDVCKARLDIHGIEGLDHVANSPEGHKKILRKLKPKLHQIALEATGGYEDRFIFQLHSKAIKVSRIEASRVRDYAKSIGRLAKNDIIDARSITEYAQHVKPAALVPPSAEQSQLKALCSVRQQLVDHCSNLTKQLQQTYHAVAVKHLEKTIKDLAKQIGKIEKEIKDLLEKDEFKTKAQRLMQIRGVGLVGASGALGYMPEMGTISATKATALVGVAPMQNQSGTKEKQRRIKGGRAKLRRIIYMNAICCIRHNSQFKALYKRLRQAGKPVKVAVVAVMRKLVILMNRLLSDTNFNLAEEK

SEQ ID NO: 323173 - protein, 378 aa, unidentified
MSSSVNFWVGLDVHKDSITAAVFKDRDPEPLHVDRLPYDLRKIRRFFQRLQAQGTVRACYEASGAGYVLQRSLTAWGIECHLAAPSLIPRRPGERRKTDRRDAIKIARDFRDGRLVLIHIPTEEDERVRDLVRCRETFQREIVKSRHYILKFMRRRGFVFREANNWTVRHFNWIRQVLAPGTLAEEDHTVLSEYLALLEYKLQRRDELDRRIEALALTPRFKPLVDRLCCFRGFKTQAAMVIATELGDLRRFESPRQLMAYVGLVPSEHSSGPRQRLGSITKAGNSRVRHTLIQAAWSYRRRPAVGASLKRRQQAQDPEVIRHAWKCQHRLYTLFHRLAVKKPAQVAVTAIAREMVGFLWAVLREIDVSKLQEVSAAA

SEQ ID NO: 323174 - protein, 326 aa, unidentified
MQGKEASEQETKAKCNVGVDVSKDWLDVHLVPGDEQLRVTNTREGIRRLKRWLMRFDLALVVVEATGKWHRDVQRSLAASAIPVAVVDPFRVRMFAKARGILAKTDRLDARVLALFAALMAPTARPPAPETLAELAELVTARTTAVEAQTALKNQRSVATVKFLQRQLDRRIGRADQDIGALDAAILARIKADKDLARRYAILTSIPGFGFVTAATLVACLAELGSITAKQSSMLAGLAPIADQSGKREGARVIFGGRPNVRRILYLAALSAVRFNADLHAFHQRLRTAGKAAKAALIAVARKLVVLANTLINEDRLWQPQAPKYA

SEQ ID NO: 323175 - protein, 334 aa, unidentified
MQNITLIGIDLGKHSFHIHCQDKSGKALLRKKFTRTKLMQFLATCPPSVVVMEACAGAHFMARRISDFGHETKLISPQFVRPFVKSNKNDFVDAEAICEAASRPSMRFVQPRTEPLQAMRALHRVRESLIRDKVKTTNQIHGFLLEFGISLPTGDVVIKRLSLVLAEHEIPEYLSRLLVRLHTHYLYLVEQIAELESELSQSINADDTAQRIMTIPGVGPITASLLSSQPGDGKQFSCSRDFAASTGLVPRQYSTGGKLTLLGISKRGDKNLRRLLVQCARSFMMRLERQHGKLAEWVREQLNKKHSNVVACALANKLARIAWVITTQQKEYQA

SEQ ID NO: 323176 - protein, 410 aa, unidentified
MEVLHPRCCGLDVHKGTVVACVRLVIDGKVVKESRTFSTTTADLIAMSEWLAENNCTHVAMEATGVYWKPVWHILADGGFELVLANAAHIKNVPGRKSDVKDADWISELLAHGLIRASFVPDGPTQEMRTFLRTRKQFVREKARHILRIEKTLEDANIKLDSVIADIIGVSGRKMIEALIAGESDPAKLAGLADHRLKASQSALRDALRGRVTAQHRFLLRLHLDQIDALDAAIATIDREVEASIAPFCTAVEQVISVPGVKNLAALQILSEIGTDMSRFASDANLVSWACVCPRSDESAGKRRSTRIRKGSPWLKTTLVQCAWSAVRKKDSYLNALFHRIKARRGPKKAIVAVAASILTAIYHMLKDGTLYHDLGPNHFNARDKERQKNRLIKRLAQLGYTVALAPVPT

SEQ ID NO: 323177 - protein, 428 aa, unidentified
MSYRIAGIDVHKKMLAVVVSNVEVESEFQFERRMFGGNPEQLRLLAAWLLEQEAEEVVMESTAQYWKPVWGALERYWKPIREKREGAKRRSGTLHLAQAQSNRGQRGRKKDFVDAERLVKRLVARELTLSFVPDVEQRLWRAVTRKKYQLRRDLVRLNNQLESLLEETHIKLSSLVSDLLGVSARRMLNALADGETNPAALAALAHQRLRATPEQLCDALGACTELKPVYRRLLKMTLEHLQILEQQIGQLDQELATLLHPHQDAVQRLAEVPGFGVDSAQQIIAEVGPAAATFPSEKCLSSWVGACPGDEESAGVNYSHRSPKGNRHMRRLLNQAANAAVKVKGSIFEVIYRRCVPRLGHNQAIGVIAHRQCRLIWLILHNGVLYEERGPAVTTLSKYKRTWRMIRQLRQLGYRIESPNPQPSQAQA

SEQ ID NO: 323178 - protein, 371 aa, unidentified
MKSIIYIGMDVHKKTYSLCALLKETGEIIGETKIPADVSLIIKFIENAKKSVDSDDVQIKTGYEAGCLGYSLYWQLAAKGIECDILAPSTMHRSAKNKVVKNDKRDAKNIAANLANGTYKSVYVPTDEDVEIKEYIRMMHDFKIELKKVKQHINAFLLRFGHHYPGKSKWIPAHIKWLKELELSDMYREILDEYLSQLEILSEKIERFKYRLEELSQKETYNEKIGQLRCIKGIDTTAAMTIHAETSDFDRFPTANAFASYCGLTPGEDSSGDSYHRLGITKQGNSMIRTTLVEAAQVLVRGTIGKKGKKVKSKQKDQDVKVIDYADKAVVRLQKKYHRMIFRGVKRNIAITAVARELACFVWGIETGHIS

SEQ ID NO: 323179 - protein, 421 aa, unidentified
MNQLTDAGYTAYVGIDWAAAKHDICVQAADGGAREFACISSQPEGIEAWAQDLNRRFGGPIAVALELNKGPIVTALQKYDFFVLYPINPSTLAKYRETFTPSGAKDDPTDAELAVDLITRHPERFSPLKPQSVSMRKLIALVEQRDKFLGDRGRLVNRLGHALKQYYPQVLEWFNEHHTVVFCDFLNRWPTLTQVKGARKASLERFFKSHHVHSVQLIEKRITAIKAAMPLTADPAVIEPHRLQVEILIEQLRITIKALKRFDEEIAATANKLPDYNLLFSPLPGAAQVLAPRLLAAFGEDRQRYPHADSLQMYSGIAPVTKRSGKKTWVHWRWQCPTFVRQTFVDWASQTINKSAWAGAYYRQQRAKGCSYQVAVRALAFKWIRILHRCWQNRTPYDESKYLEALRRKGSPLLKYLAEPV

SEQ ID NO: 323180 - protein, 348 aa, unidentified
MMLIGCDYHPSWQQICWLDTATGETGEKKLEHASGEAERFYRQQPAPVLIGMESTGNCQWFVELAATLGHDLWIGDAAKIRASDVRAQKHDRRDAELILKLLLEGRFPRIWTPSGEEKDLRQLLMHRYKLVMLRARVKNELQHLAMNQGITKKRKLWSKAGEKVLRELPLAPWAGQRRKDLFRIREMLNGQIDLLDQAVVEIADKNEKARLLMTQPGVGPITSLAFVLTMGDVSRFQRGKQVASYLGLIPREYSSGGHQRFGSISKQGNRFMRMLLVEAAQGAVRCDPGFRNEYVHRCHRKPKGVAKVAAARKLAIRLYWMLRTNTGYPEVVRVESSSRVPLVVRHGG

SEQ ID NO: 323181 - protein, 343 aa, unidentified
MDYFAGLDVSVKETSVCIVDDAGRIKREVKVASEPDALLTVLRNPAHRFKRIGLEAGPLSQWLFSALAEAGLPVICVETRHMRAVLKAQINKTDRNDARGIAQMMRVGLYRPVHVKTLRSQKLRMLLTHRKLLQAKAIAVENDLRATLRNFGLKVGVVGRVKFETRVKELVDNFPDLVALVEPLLVVRRVLREQISILHRRVLAAVRNDEVCRHLMTVPGVGPVVALTYRATVDVPARFRKSKSVGAVFGLTPARAQSGESDRPGAISRCGDEMMRTTLYEAAQVMLLRSAKWSWLKAWAMKIARHRGMKKAIVALARRLAVIMHRIWIDGTEFRWTREAAAA

SEQ ID NO: 323182 - protein, 436 aa, unidentified
MSQQEDRQAWLGQYGALVGIHWADETHVVHLAEVDSGVSQTVPLRQSPEEISTWVLELHKRLGGRRFAVCLEQKKGSLIAALMKYEFIDLYPLNPKRLKSYREAFTTSGAVDDPTDATLLYRYLHTDGHRMKAWRPDTEETRLLVELTHDRREEVSERTRHTNQLESRLKSFYPLVLELLGENLHSPLACQVLRRWPTLEALQKARPSSVRKVFARHGKLSAEALDDLLRRIREAMPLTTDRALVESGSLRVQQLVRRIHDLNESVAEFDHQIAQVMEKHPEADFYTALPGAGGVMAPRLLAAMGTDRERWDSPEEIQTFHGIAPVLERSGKTKKWVHWRWACPKFFRQSWHEFAAHSRMYCHWAMAFYQMKRAQGMRHNAALRALAFKWIRILYRCWKNRTPYDEAKYLESLRKRGSKLLEYMEKESPNVGTARC

SEQ ID NO: 323183 - protein, 348 aa, unidentified
MTLVGCDRHSRKQQVAVLDTTTGEVLEQELVHDGDAVERFYRALRPPVTIGIETTGYTQWFHALMHRLGHTVLVGEAGKIRAMVVRKTKTDRRDARHLLDLLKHDRFPTVWMPDPETRDLRALVAHRVRLVRMRTMVKNGLQAIALNQRLALRSALWTQRGLSQLRALALQPHTQRRRDDSLALLTWLTSRIDQLDAQIARVVDADSRARRLLTHPGVGPLTALTTVLVLGPIERFPDGKHVVSYVGLAPAINASADKHHLGKITKQGNALLRWVLGQAAPLAARADDDLRRRYFAVLQRRGRPKAKVALARKLLVRLYVMLRDQVDYDEFRRRGRLARAPHTAVAVT

SEQ ID NO: 323184 - protein, 348 aa, unidentified
MDKILKQSLGFDVSQEKFDVALFVCGEDLAPREVASETFDNTKNGFKKLSQWYDKLIDKQLPIFACMEATGVYHEHLCRHMYTDPRVKVSVVLPNKSRKFIDSLDWSSKTDKLDAKALSLMGLNRKLRLWVPPKELYRKLRRLTREREHLSIAHSAQINFIHAMETEFGSCEENLMRVKQLKELIHQQIKAIDKQIENIVNSDDELKQEVALLKTIPGVGQQTAVVVLAETNNFQEVERSKQLVSYAGLDIRQKESGKWKGKTKISKKGNRHIRAVLYMPALTIIRGNSRLAQYYKCQIEKGKHKMTAITAISRKLLVLMYGVWKTKTVYQDDFNLHLSQMASGNARD

SEQ ID NO: 323185 - protein, 391 aa, unidentified
MILVGIDVSKDKHDSFIMNSDGEILAKAFSFPNNLEGFNFLYDKISSVSKPKDKIKVGLEATGHYSYNLLGFLLNKGLPTFVINPLHTNLFRKSLSLRKTKTDKVDSKTIAMMLMSDVALKPYTDTSYHNEELKSLSRYRFTKVQERAKLKTSISRLVQILFPELEKMVCTIHMSSIYHLLEEYPGASHIASAHLTKLTNLLSEASKGRYDRDTAIKFREAARISIGSIMPAKSLELKHTIKLVRELTIEIDEIDAEIKKMMDSIASPITTIPGIGYSMGAMIISEIGDFSRFSSPDKILAYAGLSPSTYQSGQLNNCYSHMEKRGSRYLRYALFTVAQKVCIWDSTFAEYLSKKRAEGKHYYVAISHAVKKLVRVIFHLEKTGQAYLKAA

SEQ ID NO: 323186 - protein, 423 aa, unidentified
MDTKPSIDESLVWIGIDWADQEHVVCVIGPDGGRLETLRQEPEEIAAWVGRLKQRFPRQRMLIALEQSRGALMAALSGFDGIELYPINPKQLARYRDAVCPSGAKGDPADARLLAKFLQHHHQQLRRWQPDTIQTRRIAELCELRRKLVEARKRLVLQLGSSLKLYFPLVLTLAGGTLYHELVLDLLRRWPTLRQLKRVHPKTLRTFLAEHGQRNAERQTAFIHAVRSAVPLTNDQALIEPRALYVQTLVGQIKDLNRAIAEFEDQLRQAVAAHPDQAIFRALPGAGDALVPRMIAAWGSDRTRYESAAQMQCYSGIAPVTRASGKSRHVNKRIACPKFLRQTFHEFADHARKWSGWSKAFYRMKRAAGMKHHAAVRALAFKWIRIIFRLWKTNTLYREATYLQQLQATRSPLLAFLETGEPT

SEQ ID NO: 323187 - protein, 407 aa, unidentified
MSTSTDVFAGLDWAVHTHAVCIIDTSGAVRDRFEIAHDRQGLAELMRRLTRFGPSVRIAIERPSGLIVDALLEAGHQVFPIHPNAVKASRPRYRSHGAKSDASDAYLLADLLRTDGHRWAALSPQSDSIRALRALVRSRDDLVSTRVALGNQLHSTLEAFWPGAACIFADITSPIGLAFLRRYPSPASAARLNEAQLLRFCHTQHYSGRRNPAELLARLRAAAQALPGNLTNESMEHGVRSLVAVLNPLVAQISDLTRRIERFVQSLPDGQIIMSFPRAGRICAAQILAELGDVRERFSTPDQLAAEAGTVPVTYQSGKTRSVTFRWACNHRLRQAITCLADNSRHANAWAHSIYAAARARGCDHPHAIRILARAWLRVIWRAWTDRKPYDPNLHLGALKLASDTGG

SEQ ID NO: 323188 - protein, 408 aa, unidentified
MEILYPRCAGLDVHKDSVVARVRCVSQPVIDETKSFATTTAALIELQEWLSSCGVTHVAMEATGVYWKPVWHLLEEHFALVLANAQHIKNVPGRKTDVNDAAWIADLLAHGLIRSSFVPPAPIQELRDLTRTRKQLVREISQHTLRIQKTLEDANVKLASVLSSVVGASGRAILEALIRGESDPAKLADLAQGTARRKRAELIEALNGRVTPHHRRLLRLHLELIAALERALAEVDADVGKLLAPIQECARRLTTVPGISEITAHVVVAEIGVDMARFPTPAHLLSWATMCPRNDESAGKRRSTRTRKGSPWLKTALVTAAWSAIKVKNSYLAAQFQRLKARRGAKKAILAVATSMLTAIYHMLKNGTDYHDLGPEHFSRRDRSKTILRLVRRLNDLGCDVTVTPQAA

SEQ ID NO: 323189 - protein, 421 aa, unidentified
MENSVARKLKQVPQGYLVMGIDPHKKRHAAVAITQDFTIKTKFKFDNTREGLEAMLSRGKSEMVKSCCPGVIFAIETGGHYWRNVAYFLSERDIPYRFINQFTLKRRREGKDLNRRKNDYRDCEVAAQLLCTGEFTESRIPQGVYAELRAAHNAYRRLVKERTRITNLVKGLLDALFPEFTQVFKDPCALTALSVLSTCPIPGEIAGMTDEEFVAAIEARHQGRLMRKKLRALHCLARTSIGISAGARSVASEISFLVEKLELIRRHIRSIEGTLFSLVDETEEGKYLLSVRGLNYISVAGLLAELGCFTSYRSAKQMIKMAGSNPTESESAGKRSSHTPMSRKGRPVLRYCAWTAVIPMLRLNPDFRAWAKQRRERPAHANPLNGREVVGAALNRLLRLAFALVKKHSFYQAPELATVAC

SEQ ID NO: 323190 - protein, 358 aa, unidentified
MGQFIGCDAHKKFSMFASINEKGEYGPTARVGHEREVFRRYLQELPPKSEIALETSGCYYWIVDEMERAGHVPRLAHAFTAKRRMEGSRHKTNERDARGLAMLLRNGTLPVVWIPPGELRDQREMLRWRMTLSNLRTRIKNRVHGVLQRYNLGIGVSDLFGDRGRAELLERQDELPAYSRRSVLEQLDMIDRIETQIQDCEQVLEEMLYPSVERNLLDSLPCVGKVLSAVLALELGDVRRFSGPDRVVSYAGLVPVARESADWKRQDRCPRDCNTYLKWAYVEAANLISIQRHRWQQRHVARLYERVKEHTNMHGKAVVAVARHLAEASYWILTKQQVYQEPKPRLFVKKKVLSSTHG

SEQ ID NO: 323191 - protein, 398 aa, unidentified
MDLPVYYELETNNGNRDYRIQIGGHYMNYNTVYVGMDVHKESFTLCSCKYEDEKASHYQRTPASYKNVLRYLAFLRTIYGEYTRFVCGYEAGCLGYSLYHQLENFNVECVILAPTTMLEQRSKRRIKTDKRDAEIIARSLAQHNYSPVHIPTETDNQTKEFIRMRDDHKAELKKIKQQILSFCLRQGYQYDGSGNWTAKHVKWLRSLKPAGLYKEILDEYLLTYTILTDKLNRLDQRIEELASKEEYKESVSKLTCFLGIKIHTALSVIVEVGDFQRFVSARKFAGYLGLVPGQHSSGDDRNGLGITKAGNTHVRRLLVESAQSYTRGKIGYKSRVLRSRQAGNSPQVINYADRANERLRRRYYKMVLKDGKKYNIAKTAIARELACFIWGMMTDNIY

SEQ ID NO: 323192 - protein, 339 aa, unidentified
MVEGTKGSHHKEGSTKMSKHSMVCAGIDTGKHKLDVALDGRSDQLAVDNTAAGHKTLSAWLRRHQVKRVGIEASGGYEQAVVLQLRQDGFLVIVFQPAQVRAYAMFHLQLAKNDKIDAALIATCAAATRKIHAPPDPRLAPYAEHLTLIDQITEDIALIKTRRASCRNARIRSLWKDEITRLKRLQNAELKALVKAIRQHPDLAKRLDLIESVDGVGLPTAVAILVRMPEIGRVTRQEVAALAGLAPYDNDSCSQIGARHIKGGRKRIRGRLYSAALPASFRWNAQLIALYQRLIAKGKSHKTALIACARKLLIFVNAVIARGEPWTEKPIRPAHIGAM

SEQ ID NO: 323193 - protein, 445 aa, unidentified
MRIVYQRCCGMDVHKDSVTACLLLIDGEGECRTEKRRFGTMTRDLKGMASWLASQGVQAIALEATGVYWKPVWNILEAEKKFALLLVNAQHIKQVPGRKTDQKDSEWIAELLQHGLLRASFVPPLEIRRRRDLTRMRAKIRQTVASFANRIQKVLEDANIKLGSVASDVLGVSGRKMLQALMAGAQDPQQLAKLAQGRLREKIQQLQLALEGHFTDHPRLQLKLWLEFVEFGEKQLSSFDVEIRHLLAQGQLEGLRTVPSARVDAEGILPRPTSPLQTAVELWDTIPGIDELTASTLVAEIGAHMDQFPSAGHLAKWAGVCPGNNESAGKRRSGKTRKASVWLRRALCQAAWAASRTKNTYLAAQYRRLIVRKGKKRTIVAVAHSMLIIAYWVLKRQCAYQELGADFFDRRDERAVAHRLVKKLIGLGYEVTLKPCRSEAVPQTA

SEQ ID NO: 323194 - protein, 382 aa, unidentified
MNRILKIGMDVHSTSYTLCAMEPVLGGEDRIFANIQVTSDYRNVVQFIDKLKEKLGSSDSYSIECGYEAGCLGYSLYHQLTKAGVKCTILAPTTMLTQQGKRVKTDKRDAVMIAQCLSYGGYHAVHVPADKDVSVKEYLRMRDDHKVALKKIKQQINAFCLRQGYFYAGNKWTIKHLNWLKKLVLSDLYRETLNEYLTSYEEQTAKIERFDKRIEELAEDSDYQENVKKLGCLLGIKTHTALSLIVETGDFKRFRKGNTYAAFLGLAPGESSSGEKINRTGITKAGNSHLRMLLIEAARGMCRGRIGYKSKVLRSRQDGNPTEVIAYADRGNTRMRSKYYRMIRHGKKDNVAVAAVARELACFIWGLMTNNITPKEEGTKAA

SEQ ID NO: 323195 - protein, 318 aa, unidentified
MKTTSNQNINVGVDTGKFQLDIYIRPLNIYFTVSNDEKGIKEAIKTIKKYTPERIVIEATGRLEMPFIMACAEANLPFVIANPVHIKRFAGAIGQRAKTDKLDAQLIAHYSEAIKPTLSTLKPDVMRAMSDLVARRNQLLVMQTMEKNRLQILPKELEMTIKPILTAFKNQIEKIEIKIVKLIESNPDYQAKNTLLQSMKGIGKIAAASIISNLPELGYISNKEASALVGVAPMNKESGRFKGMRKIQGGRHQVRTVLYMAMMSAIQSNPVFKSTYQRLVAAGKPKKVAIIACIRKMVVTLNSMLRDGALWEAPKAIN

SEQ ID NO: 323196 - protein, 315 aa, unidentified
MRSTVAQSVGVDISKDTLEVAIHPAGESFRITNNPEGHRALIKRLKGFDVARIVFEATGAYHRLFQQALVEAGLPWVKVNPRQARRFAQATGKLAKTDRCDALMLARMGTALDLEPRVPASKTVEAMKELVTARDALVKDRVAALNRQAIAVSPLIKRQLVQRLRQINGQIEAIDKHLKMLRNADSDLCQRFDILTSIPGLGEVTANVLVVETPELGRLEHAQAASLVGLAPVPRDSGKTHGKRSIRGGRPRARRALYMPALNAIRCNPEFKAKYEAMIKAGKPTKVAIVAIMRKLLILANALIRGQRKWAPAAP

SEQ ID NO: 323197 - protein, 291 aa, unidentified
MSEVSIIGIDLAKRVFQLHGACANGAVIFRKKLTRVQLRAFMSQQPECIVAMEACATAHCWGREIEKLGHTVRLIAPSYVKPFVKRQKNDVADAEAIVEAASRPTMRFVALKSEAQQARAMLFRTRQMFIGQRTQTINALRGHLAEHGVVAPKGAIHLKRLADTVADETIGLPEDVRELAQVYLAQIVGLNVQVAALDQRMRGAAKEAEAARRAQTMPGVGPITALAIETFAPDLNCFRRGRDFAAWLGLVPKQSSTGGKPRLGKTSDPLGTMLRMTLTGNGWANATFAGC

SEQ ID NO: 323198 - protein, 408 aa, unidentified
MEVVHARCAGLDVHQQQVTACLRVVERGKVRQEVRTFSTTTHGLLALSDWLTAEGITHAAMESTGVYWKPVWHVLEAAFELVLANAAHIRNVPGRKSDVSDAMWIADLLAHGLIRGSFVPPTSIQELRDLTRTRKQLVRESAQHIQRIQKALEDANLKITGVISNVVGVSGRAILDALIAGETDPERLLALTHDRLKVPREWLIEALRGRIRDHHRFLIKLHLSQIDALQAAIAEVEGRIGETLRPFRERAQLLTTIPGVSDTVAHVIVAEIGIDMSRFPTAAHLISWAGLCPRSDETAGKRRSTRIRKGDAWLKTVLVQAAWAASRKKGSYLRAQFLRLRARRGPMKAIIAVAASILTAAYHILRTGQAYRDLTDAYFDARDRSRLARRLIRRLNDLGLQVEVRAAA

SEQ ID NO: 323199 - protein, 343 aa, unidentified
MKGQLKEEVMLFELLAIDLGKASFHLHSISPDGTILSRKVSRSKLAETVGAIAPKTVAMEACASAHHWGRQFKDDGREVLLINPRFVKPFVRGSKNDAVDAAAIYEAATRPTMRFVPVKSTAQQDLQSLHRIRERLIVQRTSLINHARGLLAEYGVVLPQGPWRFAAQAPLAVQNAALSDLGRELFLELLDQLTDVNGRVAKLDRKISEICREREDCRRLSELPGVGPIIATALVASVEDGSHFKSGRELAAWIGLVPRQYTTGGKPRLGGIGRRANHYLRRQMIHGARAVISRLASHDDRRSQWLKELVARRGFNKAIVALANKTARIAWALLTRQERYSAQ

SEQ ID NO: 323200 - protein, 312 aa, unidentified
MIKTICGVDTSKRHLDARIVPGEAFARFANDATGIAKLATFCGEHKVELVVMEATGGFERLAFTLLWEAGVACAIVNPRSVRQYAEAMGFLEKTDRIDAFIIARFARSKDLKPTPPSSKNQCRLKALVVRLRQLTDDLVVNNQRRHQAENDEIRATFDEIIALIRRQSRRLEGEIASLIDDDPLWAVLDKTFRTVKGVADRTVARIMAELPEIGTYDNKAIAKLVGLAPLANDSGKKSGKRSIRGGRSGVRSILVLVAGTARRYDPSLADFHRRLTAAGKPKMVVRVALAHKLLVRLNAKAREARAQYANAT

SEQ ID NO: 323201 - protein, 416 aa, unidentified
MRNEADVSPPAKTGGGPAHSKVQMNGTRKETPAMRSVALDLAVKKISYCEVEVGHVVARRTVTSLSSLKELLGPGCLPARIAIEACREAWHVHAELTRWGNEVLLVDTTRVRQLGVGEHGRKTDRIDAEILAKAVEKGSLPKAHLLSKPRQQLRLELSVRRTLVETRSQYVTTIRGLARTHGVRLPSCDTNAFVSHLRKVKLDQDLQELIEPMSHVLEKVDEDLARAEMRLQSIVEKDSKIQLLMTVPNVNVVVAAVFVSVIDDAHRFRNAHQVGAYLGLVPSEKSSGEHRRLGSITKEGNSYARATLMQASWGLIRLGRSDDPLQQWAKAVAHRRGKFIAAVALARRLAGILWAMWRDDTAYDAARVGFRSAAGLERQAQETKFRATAMHSAAQKARRRARPHERKLEHLKEMNL

SEQ ID NO: 323202 - protein, 346 aa, unidentified
MPYSTTVGVDLAKNVIQISVVSGRGKELSNRSLTRKKFAEFLGKQKPSLVAFESCATSHYWARAAKRHGHEARIIPAKAVTPFRQGHKTDSNDALAVAEAARRPKIKEAPMKTVEQQGLQAIHRSRELLIQESTALSNHVRSLLMEFGIVIKTGFASLLRAVPEILEDGENELPDLYRPTLHRMYTRLLGLREDIGAMTAEVERLAKGHPICSKLMALEGIGPIGALLLYATMGSGAAFSSGREFAAYLGLAPKQYSSGGKTNIVGLSKKIGNSRLRSVLILGARAYVYKLKEPKSSKDRWLKAIIERNGESRAAIALANKNVRTAWAMVTQGTEYQRRLQLEMAA

SEQ ID NO: 323203 - protein, 356 aa, unidentified
MINHNRLNFTGQPIYIGLDVHKKSWSVSIFSKYGEYKTFNQPPEVDKLVHYLRHHFPGALYYAVYEAGYCGFWIHDQLRKKGIQCLVVNPADIPTKNKERRTKRDPIDCRKLARSLRNGEIEGIYVPCRSKLEDRTLIRTRQSMVRKQTRCKNQIKGMLLFYGVVIPEEKEMGHWSRRFIQWIEQIQMERASGDIALKAHLEELSHLRQLIANLNRAIVRLARTEEYRPAVNLLKSVPGISTLTAMILLSELCEVTRFPSLDELSCYVGLIPDTQGSGEKEYVGGMTQRRHSQLRWLLIEASWVAVRKDPALLMAFQEYCKRMRKTKAIVKIAKKLLNRIRYVLKNQAEYVPCVIQ

SEQ ID NO: 323204 - protein, 360 aa, unidentified
MTIVAHAHPFVIGVDTHARTHTLAVLVAATGETIATEQFPATDAGMSRAVAWAARRTDGELATLWVIEGVATYGAQLASAVQRAGFEVVEAAAMNTRAHRGTGKSDPLDARRIAAAVLSLEPDQLRRPRNGDGDRAALRVLITAREHMTTERTAAVNALTALVRVAALGIDARKPLTASQIREAARWRTRAEDIATSTARAEAVRLAKRVADLDEQLTANQAQMIDLIRASRAAVLLDKTGIGPVTAAVVYAAWSHAGRVRSEAAFAALAGVNPIPASSGNTIRHRLNRGGDRRLNRALHMAVITRMTHDPDTRTYVERRRAEGRTTKEIRRCLKRYLARQLYRTIQGLHTGSNAHSPAA

SEQ ID NO: 323205 - protein, 413 aa, unidentified
MKYDKIKRIDSKTLLVTADCSKGKHMGYFRTPSGIDIKPFEFDNSRKGYEWFWSKVTVFAQSHELSTVLFGFESTGSYSACLADFMASQGAYLSQINPKHTKRLKELSGNSPNKTDQKDPKVIADIISLGHGLTVLKPAGVIATLRYLVQAREGVLTDITRVKNRMEALISLFFPEFLQVMKGLTTKTSIYLLCHYPSAKAIRKLGVSKLTGILKKVSRGQLGKDRAEDLYSASQHTVGLTEGLSGMLHTLRLYLEQLEVLERQKVALELKIDEELAKVPECELILSIKGLGKITAAILLAEVVDFKGYEKESEIIKLSGLDLYEVSSGKHKGQKRISKRGRSLLRKALFYAAINTVKKEGPFYDDYQRHLAKGMKKIKALTIISKKVLRVTFSMIKNQQYYNEEYNDIKQAA

SEQ ID NO: 323206 - protein, 349 aa, unidentified
MRSFTPPAGTRFYAGVDLHARAMFPVILDRDGQVVFARNLPANPDAFLRAVAPFRDGLLVACECMHCWYWLADTCRDHDIPFVLGHAWAMKAVHGCKTKCDRKDAEAIARLLRGGNLPPAYAYPRERRGLRDLLRARLRLVRQRAELYGHVHTARRQANLPPVSSDVKYKSKRDGITADIVDPFVRRRVETHLALLQPLDTTIRRLEKEIEDAADQLFPTELAVLQSTPGVGKVLSLTILLEIDTSDRFDTRQQFCSYARLCGAVQTSDNKRTGAGNRKAGNAWLKWAFSEAAVLSAQKDERVGALLNRLASKLGKAKAYSALAHKLGRAFYHMLHTREVFDVNRFVRH

SEQ ID NO: 323207 - protein, 360 aa, unidentified
MAITITEGPRRIVGGVDTHKDLHVASVVDEQDQVIGTRSFATTRQGYRQMLAWMLSFGELQRIGVESTGSYGAGLLRFMQQANVAVLEVTTPDKQDRRRRGKNDDLDAQNAAHAAFAGQRTVTPRSRDGMIESLRILMACRKTAVSARRVALQMIHNTIICAPDGLRDQLRSLTRMQLVRTLAAWRPDLTAYRDVDSAYRIGLKSLARRYLELHDEIADLDAMIAAIVDELAPNLVARNSIGHIGAAQLLLTAGDNPERLRSEASFASLCGVSPVPASSGKTVRHRLNRGGDRAANSALHIIAIGRLRTDQRTKDYVARRIAEGHSKLDAIRALKRYLAREVFTLITQRRREINATRIAA

SEQ ID NO: 323208 - protein, 353 aa, unidentified
MPPVKPTGVPLKYVVGIDIAKSSFVACLGSLDLSQQLSFGKETTFDNTASGFTALLSWVTQQQGAAAPLWFVVEATGVYYEELAYFLADNQQLLSVLLPNKVKHFARSTELKSKTDQLDARLLARLGLERSLPAWQPPTAALRQLRALARERQVLTKQGAQLKARAHAYQHSYQPDTRTLARLAAQQQLVIQQLAALDQDVAELLAAEPELARKLTHLTSIPGIGQTTAIIVVAETSGFVLVENERQLASYAGLDVVQRQSGLSAYATRISKRGNVRLRTALYLPALSSLRHNPRQAAFYNRLRTRHPSGKPGVIAVMRKLLVLCYSLWKNDHAYDPNYHPAHLTEKEIAPTT

SEQ ID NO: 323209 - protein, 341 aa, unidentified
MKNKSFIGIDISKNVIDVSIFCEETPIKDFSHDVFNNSRKGFGEMCTWLKKNHVVLSNCLFGMEFTGSYSMELEKFLNARNYQFCMLSTHVVKHYPMGPKDKSDKIDSAKIADFLYRYNGTECVKPYKMPDKTMQRLKALMNERKFLVEQRTCFMNRRQLCTTKEDAQLYDGYIKKFSRDIDNIELEEQKLLATDDSLLATYKNLLTIPGVGFVNAINVIVITRNFTAFETARQYASYVGVAPHSHTSGTSVRWRPRPSARCDGQAKADLSMAATVAVQYDAELQSFYNRKLGGKQDSDTKRKALNAVKFKLVLRMFAIGKQNRKWEPLDSKSSNEKLAIS

SEQ ID NO: 323210 - protein, 328 aa, unidentified
MNKAGKAELKRKLRRSELIAFFEEQERCTVVMEACGAAHHWARILTGLGHTVKLVAAETVKPFVKKGKKNDAADAAAICEAAARPDVKFVAAKSVEQQGILALHAAQSLLVKQQTMLANAMRGLATEFGLTVPKGLRKLEELKTLVDADESIPKQARQAITGLHDRCQELAEGIETFEAEIVAHARHDETARRLATIPGIGPITASLIAATVGDISLFKTARQFAAWLGLVPGQNSTGGKTRLGRITKAANREIRRLLVLGATSMVQRADGWNSAVGTWLRNILERRPVRLVTVALANKMARIAWALMTRREVYRPKGGVTVVAQAAA

SEQ ID NO: 323211 - protein, 344 aa, unidentified
MDHFAGLDVSVRETSVCIVDETGKIVREVKVASEPEALLAVLKNPAYRFKRIGLEAGPLSQWLFSALAEAGLPVICVETRHMRAVLKAQINKTDRNDARGMAQMMRVGLYRPVHVKTLRSQKLRMLLTHRQLLLSKAIALENDLRGTLRNFGLKVGMVGKVKFEARIRKLVENLPDLAVLVEPMLIVRRVLREQIVILHRRLLAIVRDDEVCQRLMTTPGVGPVVSLTYRATVDIPARFRKSKSVGAVFGLTCAKYQSGEVDWDGRISRCGDEMMRTMLYEAAQAMMRSKKWSWLKAWAMQIARRRGMKKAIVALARRLAVILHRIWVDGTEFRWTREQATVAA

SEQ ID NO: 323212 - protein, 424 aa, unidentified
MSEPLTTLYVGIDVSKNSNQVCALNFDSKKLINSSFKNNQEGAQELESKLVELCIKNDLKDIIIVLESTGVFSFHIANYLSTSHALLKFDVIVYVVNAKMVKNYAKSYIDTSKTDPKDAFILADFARVGRCKELTPYRGSQRLALQRLLRHRKHLVDLATKEKEYVTANVFIKFSEFNNGKHGYGTFSNNFSNTAVEVLLKYKSAEQIAKTPIDKLTDFIVKTGKNRFGDSKEVAKTLQAAARASYRLDKAAYKPVNLAIASSIKMIEVYEKEIDSIDKEIELLIKGLDNQSEYQSLTSIPGIGAVYAAGILSEVGSIKDFKDDSALAKYIGLSWKKNDSGEKNSEDTPMQKAGNTYLRFYIIEAANTVRQWEPEYQEYYQKKYDEVKIHQHPRAVVLTARKLVRLIYTLASKDQLYSPKNNRK

SEQ ID NO: 323213 - protein, 343 aa, unidentified
MDSVSTIGLDIAKNVFQVHGVGEKGKVVVRRQLRRGQVLKYFAKLPPCLIGMEACATAHHWARELRKLGHEVRLMPARYVKPYVKRNKNDAADAEAICEAVTRPTMRFVPIKTVEQQSVLMVHRTRQLFVRQRTSLINAIRAHLAEFGIVAGVGRNGVDKLLALIAEGKDERVPSEARDCLMALAMQLDLIKRQILEADRRILAWHRNNSMSKKLEAIPGIGPLGASALVTSIPDPHIFRSGRDVSAWIGIVPKQNSSGGKERLGSISKAGNRYLRKLLVVGALSVIKRAKQLGYTRYPWLTKLMERRSVKVAAVALANKNARTAWAMMARNESYRAPQTASV

SEQ ID NO: 323214 - protein, 337 aa, unidentified
MFNSEEGYLHKVVQLGIDVSKAKLDCTLLLDRDTLRSRSKIVPNTAAGFVQLVEWVQRQAQVAAAEVVAAMEPTGVYRQGLALALYEAGMTVVVVNLGQLRQFAEGLAVRTKTDAKDSVVLARYAGQPERIVWQPAPVEVRQLQALMGRLATVETELRRELNRREAAQLGHDPQLVQASIADAIAFWSAEQSKLQQAIDEHIDRHPGLKIERERLLTIPAVGPKTANRMLCVLSAHDFGRASQAAAFIGLTPVEHQSGSSVRGRPRLSKCGDARLRAALYMAAVVAIRHNPDVRALYQRLLKRGKAKLSALCAAMRKLVHICFGVLKNQQDYRPQCA

SEQ ID NO: 323215 - protein, 343 aa, unidentified
MDYFAGLDVSVKDTSVCIVDDTGRIRREVKVASEPDALLTVLRNPAYRFKRIGLEAGPLSQWLFSALAEADLPVICVETRHMRAVLRAQINKTDRNDARGIAQMMRVGLYRPVHVKTLRSQKLRMLLTHRKLLQAKAIAVENDLRATLRNFGLKVGAVGTVKFEARIKELIESFPDLVALVEPLLVVRRVLREQISILHRCVLAAARNDEVCRRLMTVPGVGPVVALTYRATVDVPARFRKSKSVGAVFGLTPARDQSGESDRPGAISRCGDEMMRTTLYEAAQVMLLRSAKWSWLKAWAMKIARHRGMKKAIVALARRLAVIMHRIWIDDTEFRWTKEAAAT

SEQ ID NO: 323216 - protein, 344 aa, unidentified
MDHFAGLDVSVKDTSVCVVDDTGRIVREVKVASEPEALLAALRNPAYHFKRIGLEAGPLSQWLFSAMAEAELPVICVETRHMRAVLKAQINKTDRNDARGIAQMIRVGLYRPVHVKTLRSQKLRMLLTHRQLLQSKAIAVDNDLRGTLRNFGLKVGMVGATRFEARIRELVEGLPDLAVLVEPLLVVRRVLREQIAVLHRRLLAVVRDDEVCRRLMTAPGVGPVVALTYRTTVDVPARFRKSKSVGAAFGLTCARDQSGERDRAGAISRCGDKMMRAMLYEAAQSMLVRSTRWSWLKAWAMQIARRRGKKKAVVALARRLAVILHRIWVDGTEFRWTREAVPAA

SEQ ID NO: 323217 - protein, 353 aa, unidentified
MNNIKYVGMDVHKSVTVIVVINEQGQVESLTKIKTKAENFRDYFRGFSGATHVVFEEGGWSAWLYKLLKPLVSSVTVCETRHNKLIGAGNKSDEEDAEILARLLRLGELKVVYKGDDRQQQLREIFRAYDNLVEDATRVQNRLKAIYRGRGIDCDGHHLFRPDQRSTWLEKLPEQAARFRAGSLLKELDTLQNLRKEAKTKLLSESKKLPDYSLLLKLPGIGPVRAASLLAIVGRPERFRTKRQFWPYCGFAVVVRTSADYREIGGRIVKQQKKASTRGLNRNHHPGLKAIFKGAALTSLQYETWRAYYDGLVKKGTKPELARISVARKLAAVTLAVWQRREEYDQNKVFAKA

SEQ ID NO: 323218 - protein, 356 aa, unidentified
MSRDIKYIGMDVHKEAVVIAVLNSSGKLVMESIVETKASSILQFIHGLRGELHVTWEEGTWAAWLYDLLQPHVQQVLVCDPRRNALLKEGNKSDKVDARKLADLLRTGMLRPVYHGEHGLRTLRELARSYQTISKDLNRVMNRIKALYRGWSIPCAGTQVYAPRYHQEWLHKIEHAGVRRRAELLYEQLDGLQALRRKLRPELLVESRKHKAAKLLRQIPCIGPIRAARLLALMQTPHRFRSKRQLWTYSGLGIETRDSAQYRFVCGQLQRSKKPQQLRGLNRNHNHEMKEIFKGAATRASCGVGPLREFYVALLDKGMKPEMARLTLARKIAAITLTLWKKEEGFDAELLKTQAA

SEQ ID NO: 323219 - protein, 325 aa, unidentified
MRPPQSQVKPQTQIGLDVSSQTLDAHIRVDGKAFSVPNTDAGFDQLCEILSAYSVSMILMEATGGYEDNVACYLQLQGFDVVVINPRFARRFAQSMGRLAKTDRIDAAILAQMAFMIDSGPDRERYIKPVTDDQRKQLSRLSSRRRQVVDLITIEKQRLTHADDYARESINGIISLLNVELKRIESDILRYVKKNFSELANRLLSIPGVGEQAMIVLIADLAELGHVNRRRISALLGVAPFNHDSGKFKGQRRIRDGRQTVRNVLYMGVISATRFNPVIKAFYDSLLLRGKPRKVAIIACMHKLIRIINAMMRTGKPFDMSLHGV

SEQ ID NO: 323220 - protein, 387 aa, unidentified
MARVIIGMDPHKRSATIEIINDREAVLARGRFGTDRDGYRAMLNAGRRHKDRVWAVEGCNGIGRHIAQRLVADGETVLDVPAKLSARARVFATGQGRKTDPVDAHSVAVAALRTTGLRHVVVDDTTIALRLLVDRRDGLGRARTETVSRLHHLLLELVPGGAKKFLSAQQARVLLNTVRPRDIVGRTRRQLASELITELAAIDKKIKAANAQLTELVAATGSQLQELNGIGPSGAARLIGDIGDIHRFASCGHFASWNGTAPIDASSGDQQRHRVSRAGNRRINRALHIMAVVQLRHDTEGRAYYRRKLAAGKAPMEAMRCLKRRLSDVVYRQMVNDANRTQTGPGGHPGATLQSSAVDPIPMINTSEQSLPGPADNHPRTPLLAAH

SEQ ID NO: 323221 - protein, 408 aa, unidentified
MNTLYVGIDVSSRSNVVYLMLPNGNKHSNFSVANSHEGSVQLVKRIHSTLTSHSLDTVLIGLEATSVYGDNLVYFLREDTTLAPFNRKIHVLNPKQVKKFHDAYNDLPKNDYVDSFVIADCLRFGRINKEVYLGDYRYKALQNLTRARYFAVQNLTKEKQRFINVLFKKYSTLTQEKVFSNTFSTTALAVYDEFESAEALANMDLHELTDFIIEKGKNRFPDPDAVAKAIQKAARSSYRLPKTVNDSVNQVLSISITSMKALESQIKEFDKAIKSQMELLPNVLISIPGIGPVYSAGIMAEIGDINRFDNQAALAKYAGLAWKQHQSGGFEAETTRLIPSGNRFLKYYLCEAAFSLVRCDKEYSDFYHLKYKEVNRCQHKRALALTARKFVRLVFRLLKDNRLYCPAK

SEQ ID NO: 323222 - protein, 441 aa, unidentified
MNQPNPLDLPILNPHAAGIDVGSEKFFASVGGKEPKVFLTVTGQMQELCEHFQAEGVRTVAMEATGVYWINVQGALEEAGFEVLVVNGAHCRNFPGRKSDMKDCQWLAVLHAHGLLRGGFVPPAQIRRLRDYMRLRADLVSMAAQHVQHMQKALDRLNVKIHVVISDITGVSGMKIIKAILAGQRDPELLVQLCDQQILKTKKAPMLEALRGLWRKEHLFALRLALESYENYQQQIAQCDAEIASVIQELSGGRPAPELGEPKELRHNALDIEGLHQQMAQIYGKDLTKLPCINESTAALLLAEIGADMSRWKDWRHFGSWLALAPCNAQSGSKRRRVKRYLTRAGQILCRAVQCMAMGKHTWLASFYRRIRAKRGAKVAIKATAYKLAKLIYLVLTKGWEYVEQGIAKYEERLRQMQLKALQKLAKQLDFVVIPKTIINK

SEQ ID NO: 323223 - protein, 312 aa, unidentified
MKQQHQDSEVTIGLDLGERRHRFCALDGRGEVVEEGSLLNDRASLARLTARYPGALAVMEAGTHSPWVSRYLEGLGWEVIVSNPRKVRAIYQHERKSDQRDALMLARIGRMDRALLYPVRHGSEQAQQDLLRIKLRDSLVRARVALINSVRFSLKSLGYAVCNPSSERFHKVAMERLPERVQQMIAPSVQALAELSTRIAVLEREINVVARTKYPQTLWLQQVPGVGALTALYFVLKIEDPQRFENVRDVGAYAGLCPRRDQSGQSDPQLRISKRGDPYLRRLLVSAAQYILGPFGPQSALRGYGLMLAARW

SEQ ID NO: 323224 - protein, 349 aa, unidentified
MEQHEVILGVDTHLDTHVGAVISETGKLLGTLSVPAETAGYLKLLTWANSLGHLRRAGVEGTGTYGAGLARVLRDHEIEVLEVNRPDRAARRSRGKSDPTDAENAARAVLAGKATAIPKEQSGAAEAMRAVSVARRSAVKAKTQAINQLRALLVSAPQDIRERLLKTKTAECVANCARLRSLGNTPMLQTLTTRLRLLAKRYLALAEELTTLDAMLEQLTLKHARRLRERFGVGPQTAAVLVAVAGDNPERLKSDAALAALCGTSPLQASSGKTVRHRLNRGGDRAANNALWTIAMVRMRSDPRTRAYVERRTKEGMSNKEIHRCLKRYIVRELYPLILADLADSARTT

SEQ ID NO: 323225 - protein, 319 aa, unidentified
MKVTYPIVGIDISSTTLDGAALDAGGKFEATSCANTRPAARKLARAFARSKVALVVIEATGGYETVIMAALAAEGVPFARVNPRQVRNFAKGIGRFAKTDLIDARVLALFGERARPRLTTLPSEEEARLKALSLRRRQLIDARVAEKNHRTQIVDKDIKASIGRMIEALDDEVEIIEGAIADLIAACEKMRKRQELLESIPCIAAATSATVLAELPELGDRSTSVLKALVGVAPFNADSGGVRGERHIQGGRAPLRQALYMSAQTGYRCNPMLKAFYERLRAKGKSHKQSIVACIGKLVSIMNAIIKTGTPFNANLATM

SEQ ID NO: 323226 - protein, 344 aa, unidentified
MTKIIKQVAGIDVAQNELEVSLGRIDQSLEKEVYASKTFANKASGFAALEVWIKKHANPGAEVRFVMEATGVYHEKLAYYLSDQGRQVSIVLPNKINNYFKTLDIKTSTDKTASQAICQFGLERKLAVWQKPKKIFRDLKQLTRERDQLIADRTALKNQLHAENAEAFPNESSIKRIAKRMQLINKQELEIRGELAEIVKTDSELVKKINKITTIPGVGKLTAVITLAETNGFELIKNQKQLVSYSGLDVKLKDSGTSVKGKPKISKRGNRHLRKAMHMPALTAIRCNEHHKALFVRLVSKHGIKMKAAVAVQRKILELIYTIYKTDKAFDPNYEDAKNKVAQI

SEQ ID NO: 323227 - protein, 386 aa, unidentified
MRTVCGLDVHKDSVYLCILSSTGEIYEKKFGVLTTELIEMRDLMLSHHVLEVGMESTSVYWVPIWRVLEPHFKLKLINPYFIKQLPGHKSDVKDAQWIAECMLKELVNGSFVPPERIQQLRQYDRRIYDLDDEIIRKLAKLDAAVQRCNIRLSNYVSNTDSVSYKAVIDKICEGVTDPNVLVEEIHGRIINHHGKETIIASLTGSITECDIDIMRQLKAEIDLAEQHKQECMDKMLAICENEYSTQLHNLQTIPGVKMRAATSLIAEIGTDMSHFETANHLASWSGLKPRNDQSNKTIKSRRITYGNRYLRRTIIQCSWGASRTKNCFFSRFSYHQTQVRKKNRMKVQVAIARKMLICAWHILKDGVSYKDFNTNDMTGDGTQCER

SEQ ID NO: 323228 - protein, 485 aa, unidentified
MTFLSTVVRQLDGERYFGLDLAKRETQLAVLDASGSEKQQKRFATSRNEFLAFSAELRKGDTVALEVTTNAIAIARLIRDNSPARVIISNPVKTRVIAEARIKTDKIDARVLAELARVGYLPKVWLPDEDTESLRQFTSDRTSLVRRRTECKNTIHSVLHRNLVHQEYSDLFGTGGRTWLEKIIKGDDASLSVPVPQLDRLRIGSLLNEIDRIDALVADLESVIASFIAVRPHLKEQMDRLLSITGVSLVVAAGLLGAIGDVTRFSKKRSLAHYFGVTTSVKQTGDGPARYGCITKQGPAEARWLLIEAAEHLRKSPGPMRALYTRVQRRRNHNVAVVAVARKLAELVHHLLINKEDYIYRIPRLTQEKRAHWRYLARQKTGVKLASAARKISGRPTLYGTGIGIQGRKLKAQIAKQAAANAERLYEAIVEQRRTKLENPNAPAITTADLVFDPTRPNETDWETLLAAATADIIRKQKRRNRTDN

SEQ ID NO: 323229 - protein, 349 aa, unidentified
MTMLADRVDAVIGVDTHKHTHTAAVVTPTGGLVDHLTVPSDAPGAGRLLAFARARAPGRRAWAIEGTGGYGAGLTICLLEQGEWVIEVDRPRRPARRNGAKSDELDAVRAGREALSRDHLAQPRRRGDREALRVLLATREAAVRGRTRSIAALHALVVSAPEGLRRRLRHLGTRELTARCAQLRGGRDRSSEQCATIMALRSTARRALACEAEAAALESALQVLVETLRPDLLAEPGIGVLSAARILNAWSHAGRIRSEAAFAMLAGVAPLEASSGQTVRHRLNRSGDRQLNRALHTIVLVRLAHDAETRAYAQRRTEEGKTPREIKRCLKRHVARRIFRLLESPAQAT

SEQ ID NO: 323230 - protein, 422 aa, unidentified
MKKIQTKKLKFVNDKTLIATVDIGKGLNMGYARCPDHSVVKSFEFANNRAGFDKFWDCLEKARDSKNLDSIIVGFESTGAYGEPLQHFLKNKPVRLVQVNPMHTKRVKELQGNSPNKTDRKDPKVIADIIELGHSLTVVIPEGAAAELRRLTLARERANKRCTALYNQLQDLIFISFPEFSQVIKDVKTKTARYLLQTYPDPQDIIDLGLESLGAVIKRVSRGKMKLAKAKDLFEAARTSAGITEGRFSVALEIQATLEAIASSDDFVSRLEKEMSRHLEDIPYSHLLLSMKGIGRVTVAGLIGEIGDFNSFDTQRELLKHAGFDLFEISSGKLRGSRRISKRGRPLLRKLLFFAALNTVRKGGVMHAHYQRHLKKGMKKIKALVAIARKLLGIIFALVRTKHEYQEDYQKIQAAATIPMAA

SEQ ID NO: 323231 - protein, 347 aa, unidentified
MTYFTGIDVSLRSVSICVVDDRGEVCREAKIDAHVDVIVDWLRSFSPELNSVGFEAGALSQYLTYGLQAAGFEVICLEARQVKNTLDAMRNKTDRNDARGIAQILRTGWYSRVHIKSLHSHRVRALLASRKAILAKCVDLENELRGLLRVFGIRLAPRVGHGSFDAQVRSTFADDETLSCALVPLLDARTVLYKTYLKLDNAVKALTKADPLCVRLMSIPGVGPVTALTFKSAVDDPVRFKASRTVAAHFGLTPKRYQSGEMDNPGHISRAGDADVRSALYVAAHSLLTRNAQWSSLKAWGMRLAKTRGHRRAVIAVARKLAVILHRMWVDGSEFRWGAQEPVAVKA

SEQ ID NO: 323232 - protein, 408 aa, unidentified
MKRYYAGVDWADREHQVYVEDENGEKIMERNVQQTVEGLAEFGRWLDERRAEGIELWAAIEKPHGRIVDFILSHGVVVYPVNPKALDRARDRFRMSPSKSDGFDAYVLAEFVRTDHAHLRALEPNSEQAEELKLLTRDELRLERHKTRLLNQLTVTLKEYYPRPLEVFSDLETKIARDFLKTYPTPRALSELTRRKWNRFAKREHHLSEERCKELWENLRQAQLAVPDHVVRAKAQLLSALLVQLEALSDAVESYKQKVRSFFASMPAAKLVTGLPGTKTGTIVAVLWAELGDANGRWQSFPHLQAEAGVVPVTRASGKSRVVQFRFSCNKVMRHAAYWLAFVSLNRAEWANHFYRNQRAKGHSHHQALRALGAKWLKIIFVMWRDHKPYDENYHLANIARQKMRQAA

SEQ ID NO: 323233 - protein, 309 aa, unidentified
MATSSYVGIDVSKERLDVAVLGEEREWQEDNTQAGIAKLVQQMQELQPELIVVEATGGYQRGVVDALFHAGLCVAVVNPARVRQFARACGLLAKTDKLDARVLAVFGQRVQPRRYEGKSEAEKQLSALLVRRKQVEEMLKAEQNRLRTTSASLKSSVEQVLACLKEQKKHLDKQIQQFLSEQKAWQEQSEILRSAPGVGPVTTATLLAELPELGKMDRKKIAALVGVAPMNYDSGRKRGYRKTKGGRGEVRSVLYMATLVATRRNPVIRTQYQHLLKRGKEKKVALTACMRKFLTILNAMQRDQQPFRM

SEQ ID NO: 323234 - protein, 387 aa, unidentified
MIAVGIDIAKRTHEACFMGQDGRQIGKARRFHNTRLGVRALLDDLQQLREPATIGLEATGHYWLALHDALERAGHTVQVLNPLQTHAYRKTTIRKVKNDRKDAWLIADVVRIGRGRAAYVPDETILQMRELTRFRWGLVDQIGDAKRRALSVLDRVFPEYERLFSDVFIKSSRALLQRATTAAEFADADLAELASVLKQTSRNRFGLDKAEAVQAAARDSLGLAKLGGVASFELRALLDHMAFLEQQVVACEQQIDQLLATLEQHVTDIKGIGPVLAASLIAEIGEVHRFARFESLVAYSGIDPSVFSSGEFSATETHMSKRGSPYLRRALWLAAISASQSNPDLAAYLQRRLDQGKPWGTAMGAVARKLLSRIYVVLKHNRPYEVR

SEQ ID NO: 323235 - protein, 410 aa, unidentified
MDKIYDKCCGIDVHKKLIVACFRCGREQEIRDFGATTRELLELADWLRDGGCEMAAMESTASYWKPLFNILESSGLKAMVVNASHMKAVPGRKTDVKDAEWIADLLQHGLLKPSYIPDRDQRELRELVRYRKSLVGGRTSELNRLQKMLEGANIKLSGTVSDINGKSARSILEYLLTGESIDGAKYDEMYEKNIIAHNLKATRKQIIDDLNGVMSPLQRRMMKELLAHLDELNVHIANLDDEIDSFMKPEEKQASQAIQDVTGIGSTSAQAIISVIGTDMSRFPTDGHISSWAGLCPGDNESARKRKSGRTRKGNVLLRTTLITCAHAAVKNKKSYFYAQFMRISAHRGKKRAYVAVAHSMLIAIYHILKDGVVFKDLGAGYYNQFNKERKVNAYLKKLKALGWEAPAAT

SEQ ID NO: 323236 - protein, 345 aa, unidentified
MGPMYYIGLDVHKQKISYCVKDVIGKIHAEGWIPATRFDLDRWMKTLPQQWSAAMEATMFTGWIYDHLKPHAAMLKVAHPLMLRAIAAAKKKNDRIDANKICDCLRCDFPPESYMAPTAIRERRRTLRYRNLLVRQMVQMKNKVGMLLMESGVSYNKQKLHKAGYFRELLASNPDINPGLRSLLCQCREMVVRLGKMETALIRCLQQDRLLAERVERLMSIPAVGPITALTWALEVGEIQRFSSIKKAISYCGLCGAEKSSGNTVQRTPLSKQRNKHLQTTLIEAAKMAPRYSPTLALLYDREKQRGNANRATLTVARKLVAYLMAVDRGQTHFLVLDRDTCAAA

SEQ ID NO: 323237 - protein, 429 aa, unidentified
MNSTQNKKIEQVKETTMIVGIDVGSEKHYFRAFNWRGIELTRKPVAFSNSMEGFNSFYNTIVELMQKSGLEEVLVGIEPTGHYWFDLGQFMGEKDIKFVMVNPHHVHKTKELDDNSPSKNDRKDPRVIAGLVRDGRYFYSYMPTGVYAELRNASNRRFVLVEEQTRAKNRLQKWIAVYFPEYKGIYTHIDAKGGMLVLKKAPTPEEIVRLGVEGIIKIWKDAKLRGNGHKKAMLILAAAMRSIGLKAGLTEARMEIQDLIEDYELQTKRLERVNDLIKGLCQQVRYADKLLEIKGIGITTVAGFIAEVGDITRFDSTKELQKLAGLELVADSSGKHNGKTKISKRGRKRLRYLLFEAAISVVGKNEEFKEIHRYYTTREKNPLKKMQSLIAVACKLIRVFYVILIKGISYDSSKMLKDIRHPGEQLKAA

SEQ ID NO: 323238 - protein, 386 aa, unidentified
MATAVTSRIEQDTLPQPTLYLAFELGKDTWKLGFTIGMAQPPRERTIPAGDVARLQQEIARAKQRFGLLADAHIMSCYEAGRDGFWLHRYLVAQGITNHVIDSASIEVNRRQRRAKTDRLDVRKLLTMLLRHSAGEKKVWSVVRVPSVDEEDRRQLHREMQTAKQDRTRVINRIKGLLAGHGVQLALQGDVEAQLDQVQQWDGAPLPSALRTRLKRAWQQVGFLTAHIQTLEAERRALLRRREDPVIAQVRQLFTLRGIGINSAWLYVMEFFAWRDFQTPKQVGALAGLTPTPYQSGQARRELGIAKAGNRHIRAMAIEIAWAWRRFQPDSALSQWYERRFGAGSARLRKLGIVALARKLLIALWRFVKTGGLPEGAVLKPAAPSR

SEQ ID NO: 323239 - protein, 406 aa, unidentified
MNMNAVGIDVSKRKSTVAILRPGGEIVKKPFDVPHLSSDFRSLTRLIQDLDGETRIVMECTGHYYEPIARRLSQAGFFVSAVNPHIIRNFQGHDNPLRKVKTDKADSVKIARYTLDSWGNLKQYTLMDELRSQLKTMNRQFSFYTKHKTAMKNNLIGLIDQTYPGANTYFNSPVREDGCQKWVDFVDTYWHVDCVRKMSLTAFINHYQKWCHRRRYIFSKSKAEEIYGKAKELVPVLPKDNFTKRIIKQAIAQLNTTSKTVEELRNLMNETASKLPEYPVVMAMEGVGPSLGPQLMAEIGDVMRFTHKGAITAFAGVDPGVNASGEYSQKSVHASKHGSPVLRKTLFQIMEVLIKNKPDDAVYLFMDKKRAQGKPYYVYMTAGANKFLRIYYGRVKEYLLILSELN

SEQ ID NO: 323240 - protein, 385 aa, unidentified
MKEQNFVPREFEIFGGLDVDKKSIAVTFMSHQGILQSFSMPYRAEHLLSYVGKHFEGKKIAFAYEAGPTGWGLYDRLTREGHICVVAAPSMIPKVPGQRVKTNRLDSQKLSEHLRGGQLKSVPVPSESYRQLRQLVQLRDTFVQDLVAMKLRIKALLLFEGLEFPPAPAGSQWSLIVRGKLKRLSCSSAVRFKLDQLMESLESTEKRVLQTIQEIRRFYQQDPELCQAMKYLKSIPGIGEIVASHLLARIGDPQQIGNVRQLAGFIGLAPTEHSTGDRVARGHITRSGDGRLRSKLIQAAWSAIRQDPELREFYRSVYQRHPRDRAARKAIVAVARKLTTRIYAVLKQQRPYVVREIVHSAPLTQEETSPQGTTRRLAEPGEILS

SEQ ID NO: 323241 - protein, 338 aa, unidentified
MDHFAGIDLHSTNSVMGIIDKDNRKVFKKKTKNDLPTVLHFLEPFREQLMGVVVESTFNWYWLVDGLMDNGYRVHLANPSAIKQYEGLKHADDVTDAFHLANLLRLGILPEGYIYPKEQRPVRDLLRKRLMLVRQRTAQILSFENLFTRNHGSRINVNAVNKLIEQDVENIFEQEYVVLSGKASIATINFLMGRIIQLEKAVLKVAKLRDEYKMLLTAPGIGKILALTVMLETGPIERFAKVGNYASYCRCVQSKWFSNSKAKGKGNSKNGNKYLSWVYIEAANYALWNYDYVKRYYQRKMAKTNNVVAIKAIAHKLSRACYYIMRDNKEFDPKRVFV

SEQ ID NO: 323242 - protein, 418 aa, unidentified
MTKIIRIGMDTSKSVFVLHGVDAAEQPILRRKLRRRQVLEFFAQLEPTKIGLEACGAAHYWARELAALGHEAVLLPPQYVKAYVKRNKNDAADAEAICEAMSRPTMRFVPVKTAEQQAALMLVGMRNGLVRRRTQLTNAIRGYAAEFGLTAAKGLDKIEPLLARIADAALPGLAKELFAAYAHEYAQLKVQIAKIEARLMAWHKHNELSRRLVEVPGVGPIGAALTAMKVPDPHAFRCGRDFSAWIGLTPKDHSTAGKTRLGVITRAGDEALRSVLVVGATSVIQKVKQGKGHPSPWLVELLRRKPPKLAAIALANKNARIIWKLMVSGERYNPARRDTVLAAVKDAARRRRRWPKRAILDRGCARCHWATAGRDGETALRSNKETDLKEAGERRSSRCLANSPPRSGQLMCYQNLTT

SEQ ID NO: 323243 - protein, 448 aa, unidentified
MKAEPEEIPDTEHELVVERVCAVDVAKDSGKVCVRVSSRAGRRVSKVWDVAARSGAVAELADHLVDEGIEKVTVESTSDYWRIWFYVLEAAGLSVQLVNARDVKNLPGRPKTDKLDSVWLAKLTEKGLLRPSFVPPAPIRELRDYTRLRIDLTRERTRYWQRLEKLLEDALIKVSAVASTLDTLSVRDMLEALIAGQRDPRRLAGLARGRMRVKHAALVEALTGRFDDHHAELTRMLLDQIDALSTQIATLITRIDELLTAMGTQTRADEPDTPGGADNVANGAGELTTIERLDEIPGISPGLAQIILAEIGLDMSQFPTAAHLVSWAKLCPRTIQSGAIQRGGKTGKGNPYLKGALGEAAAAAAKTNTFLGERYRRIVKRRGKLKALVAVARSILVIIWNMLNDPTAQFRDLGADYHTTRINTERRTRNHVTQLMAMGYRVTLEPAA

SEQ ID NO: 323244 - protein, 429 aa, unidentified
MKIIYPRVCGIDVHKKFIVAVICISESVEPIYLKKRFSTFHNDLIRFRDWLIQNDCQNVCMESTGKYYIPVYNVLESHISNIVVANPKWVRAVKGEKDDDKDAKWIADLFKFGIVRSSFIPQKDFRILRELTRYEYKLVNMRSSEKNRYQNALTSGNCKLDMVFTDVFGKSASNIIDLILSDNPYTDEDILSKVHKNCKASPDMILNSINGTDLTSVQKSRIELVNDHIKQLSSNIQRLDKLIDLMIEPYEDYISFLCQIPGVSRNSAIIILSEIGVDMNQFTSTRRLTSWAGLTPSSNQSAGKKKSVRISRAGVYLKPCLVEVAHAAVKDKNHSYYANKFNKISKRRGKKRAYIAIARKILVAAYHMLLTGEIWNPADLAEVETPVEQRIKYVKNNLKSDIKQLLDIGLTVEELTLMIQQNANTMTAQ

SEQ ID NO: 323245 - protein, 358 aa, unidentified
MPRKADTAVARTVGIDTGKNTLHMIGLDEKGAIVLREKVSRTRIAARFVSLPPCLVGIEAGMASHHVARELVALGHEVKQVPPAYSKPFRQGHKNDFRDAHAVAEAVERPSTRCVPIKTEGQLDLQALHRVRSRLIGNRTAVINQIRGFLLEHGIPVRQGHRFLRQQLPQILATRTDVLSPRMIRIIADLMADWKYLDERIEGVTDEIEALAHADEGCQQLITVPGIGPIISSAMVAAIGNGAAFCKGRDFAAWLGLVPKQMSTGDRTILGRITKRGNRYLRMLFVQGAAPSSYDRRVGQNTALDRGSPPQRGDCIAMFWQLRSPTSWRGSLGLSWRRDVAMRLASSRVSNRRRRKRA

SEQ ID NO: 323246 - protein, 429 aa, unidentified
MNNETIFRIMRFRQFKQEIRGSEQYLIVGIDISKDKHHAFFGTANGKTLLRRLIFANNLEGFRKLQFRADATKAQNGLSKIVFGFEPTSNYHKPLGMHLIRCEREVVMVSGVAVKRNRELLNGRWDKNDTKCAANVADLISQGKCLYYDSPTSEISGLRELLSLRERMKKQHHSLRMRIRGNLVAKYFPEFDRYFRQCPNESLAIVKFCLNPHMIAGMDFEQFMRAVTTKDRGVAQKRRLQKIYDLAYESIGCPMNRFAEFEAAMLVDQVKQTKQLIEQIDGQIDQAASAFIEYHCLLTIPGFGPYVSALVMAKIGDPFRFENRGQILKMAGYDLSAKRSGKSSDKATPVISKKGSNALRYALYQAALIASARNDNFIRYFTNTLKGREKERGIKVKMRVKLAAKMLIIAWTLMKRKIDFNPDYLLTDE

SEQ ID NO: 323247 - protein, 321 aa, unidentified
MLPTLGIDISKANFHVELSLSNNKLRHRKFGNRKGGFAELAAWLSKHKTHRVHACMEATGPYGEDLAMFLHQAGHTVSIINPAQIKAFGQSELLRNKDDRPDAGLIRRFCEKQQPAAWVPPPVHLRQLQALTRHLENLSETRQQQVNRLESTKAEDVVKSLSKLIAYLDDEIKRTENQIQNHIDTHPDLKEQFELLDSISGIGTRTAATLLGEINFKQYRSARQLAAFVGLTPRNNRSGTFRGRTRLSKIGNRRVRKALFMPAIVAKQHNPIVRSFCQRLAVKGKTKMEIIGAAMRKLIHIAFGVVKTGRAFDPNHELLPS

SEQ ID NO: 323248 - protein, 331 aa, unidentified
MVFNYYLGIDISKATLDAALIIKERDIVGQTKVSNNSQGFKELVAWVKKKGAKVSETIICAEHTGIYGYDLQEWLDDNGIAFSFVSALEIKKSLGIRRGKNDAVDAVRIAEYAYLKRESITLTHKPLKGIFTLKSLLGERKHYVRLKSSLLARKDALNQYESHESRERRNKAIELLLKNIDALEKQIKSVIDEDPEISRNYELISSVKGIGLVNAVNTIVYTNNFTSFQTARQYACYCGIAPFEHKSGTSVKGRTMVSTIGCHQLKAELSMAARSAIINDPWLRKYYKRKMEEKGNLTSAHGIVLNAIKFKLVVRMFSVIKSGVPYKILAY

SEQ ID NO: 323249 - protein, 408 aa, unidentified
MTVVGIDVSKGKSMVAAMKPGGELVAAPYEVRHSDIELSHLALDVLCMEPDTRVVMEATGRYHEPVAALLHSEGIFVSILNPLLIKQSGAGSLRKVKSDPKDALKIAKYGLDNWSTLREYTPMEAIRQQLKLCARQCDLYNKNIVMLTNNLISLSDKTFPGVNELFSSPEKADGHLKWVDFYRSFWHCDCINRMSPDAFEERYKKWCKRKGYHFSTDAADALYAASCGSYTTLPRDNNAKLLVTVAADQLIALRENQSKLEAEMLNLCKQLPEYETVMAMYGVGKSTGPHLMAELGDVRRFPHRSSIVAFAGVDPGVVGSGKMQLSSVTTSKRGSPQLRKALFQVVSTYVKCKPENEAVYQFYAKKRDEGKPFFVCTTAAANKFLRIYYARVKECLNAVESATQVEEG

SEQ ID NO: 323250 - protein, 361 aa, unidentified
MRPQASEGEAQHGPFCWTGRIGQGDQRLHSSVCIVDDVGKIVREVKVASEPEALLAVLKNPAYHFKRIGLEAGPLSQWLYSALAGAELPVICVETRHMRAVLKAQINKTDRNDARGIAQMMRAGLYRPVHVKTLRSQKLRMLLTHRKLLQAKAIAVENDLRATLRNFGLKVGVVGTVKFEARIKELVEDVPDLAVLVEPLLVVRRVLREQISVLHRRLLAIVRDDDVCRRLMTVPGVGPVVALTYRVTVDVPVRFRKSKSVGAVFGLTPSRHQSGESDRPGAISRCGDEMMRSMLYEAAQILLVRSTKWSWLKAWAMKIARHRGMKKAIVALARRLAVIMHRIWVNGTAFRWTQEQAAAAT

SEQ ID NO: 323251 - protein, 427 aa, unidentified
MNRFLLISQQVVTFSSTRNVRNLNMRRAYTMYIVGIDIAKRKHEAAVIDGEGAVIIKPFSFTNNCSGYNRLLAMLTKAKLPLDEVSFAMEATGHYWLALFTRLQKEGFRVQVINPVQTNSIRSFYIRQAKTDPRDALLIAEVIRFGHFSESTLHPENIYELRELCRGRHAIVSMQADVKRKVVALLDQVFPEYETAFANMFGDTSMAILQTCPTPKELSEMPLEELCHLIEVSSHKRFRMAKAQELQVLARNSFGFAMAGDVFSTMIRLYAKHLDFLKQQVREMDCKIAEIMDTLDTPITTITGIGPTLGAYILSEIGDISRFSSAAKLAAYAGIDPTMRQSGEYNGVRNRMSKRGSPYLRHAIWLAASSAVLHDPALKLYFQKKRDEGKPYMASVGHACRKMVSIIYAVMRDNKAYTPYIPNEISA

SEQ ID NO: 323252 - protein, 354 aa, unidentified
MNKASGKIAYEGKKVFVGIDVHKRTYSVVAVVEGVIAKKWRTVASPEKLAEQLKRYFPGALIYTAYEAGFSGFVLHRVLAKAGIENMVVNPGSIEVAIHNRVKTDQKDAIKIASLLEAGRLTGIRVPTPQQEQERLLTRTREQLVHERSAIKNKIRMKCHQMGLIDPEDRREMSHKLVEEMLAQTPSTEFSLVIEAYWAVWKSIESQIQRIEQQLKEQAKSDPNETIYRSAPGIGPLSARILSNELGDLSQFANERQLFSYTGLTPSEYSSGDTVRKGHITRQGNKRVRYILNQAAWRAIKQDRDLKEFFERLTPRTGKKKAIVAVARKLIGRIRAAMKTGQPYLINSLSAQAA

SEQ ID NO: 323253 - protein, 421 aa, unidentified
MNKRNYRATHVKQVNWRNVIQNTAGKALVLAIDVAKEEQFAVLMDDQSQLYLTTKWTHPVETPALLKHLATLTSQQLEVAMEPTGIYGDTLRRQLALAGYRTYQVSAKRVSDAKEIYDGVPSLHDVKAAYLIGRLYWSGVGQAWQESSAQQREFKALCNRYELHNEHYGRNRNRVEAMLQRHWPEALVYLALDSVTLEYLLIRYGCPQALVRDSVAAATLMRKVSCGKLAEAKIQGLLEGSRNSIGIACVEEERRYLQQLGEELRRSRLHQKAVRKQLQVLIDADEQLKAMSAVVGPLTTAMLLSNRLDPRHYGNAGAYRKGMGLNLKEKSSGKFKGQLKLTKRGPGRSRKYLFFSCLRLINHDPIVQQWYQAKVRANGDRDKLKYVVALMRKLACALWHVGHGDAYDAHKLFTLKPAVSA

SEQ ID NO: 323254 - protein, 359 aa, unidentified
MSPTNMHQYVGLDVSLKETSIRVIDEAGKIVWRGRRDSTPEAIAEAIEKHARHAVRIGLESGQLSTWLYHGLKERGLPVICIDARHARAALSLKVNKTDDNDAEGIAQIMRVGWYREVTVKGLDCQAVRALLVARAQLVSQITTLKNCVRGILKTFGLIVRKRLRSQFSQHVREAIRANPVLAAIVEPMLRVLETTRDQLRIYDRAVIRRARGHETARQLMSVPGVGAVVVLAYMTGVEDPVRFRRSSSVAAYFGMTPARYQSGEVDRAGRVSKCGDSMVRGLLFEAAKVLLSRLARPCALQRGDERSPSALEARRPPWPSRASSLFSCIGCGPATLRSGGPLERWPHDMVFQLKLVRC

SEQ ID NO: 323255 - protein, 321 aa, unidentified
MENARTYVGIDVAKEKLDIAVHSSDQRWTFANTDAGIGRVLSCLQKLNPVLIVLEATGGIEVALVAALAVAGLPVVVVNPRQVRDFAKATGQLAKTDTLDARTLAHFAAVIRPPLRPLPDAQTREMTAILTRRRQLVEMLTAERNRLSAARSKPVRDRISAHITWLEKELADVDDDLASGIRESPVWREKDNLLQSVPGVGPVLSTTLLAHLPELGNLNRRQIAALVGVAPFNRDSGNLRGKRTVWGGRSAVRAALYMATLVATRHNPVIRAFYHRLCADGKPKKVALTASMRKLLTILNAMLKHRTPWHYTDTQTLGPCS

SEQ ID NO: 323256 - protein, 344 aa, unidentified
MVTIGIDAHKRSHTLVVCDGQGRQLAQAGFGTTSSQHLELLAWAAGHGSDRLWALEDCRHLSRRLERDLLLAGEKILRVPPKLMAKTRDGARTYGKSDAIDALAVARAALREPGLPLARLEGEERELRLLVDHREDLVGERTRVSNRLRWHLHELDPACEPAPGSLKRVRTLERLAATLEGREGLVARLARELIERCRQLTVEIRSLAHEIAARVSTLAPSLLAICGCGALTAAKIVGETAGIERFRSSDAYARHNGTAPLPVSSAGRVHHRLSRSGNRQLNAALYRIALTQSQWHPQAKALLARRRAQGDSPRGALRVLKRRLSDVVYRALQADAEAALRIAA

SEQ ID NO: 323257 - protein, 387 aa, unidentified
MSQPNDLSRCLVSLEQETTLVAVIELSQSSWLIAGTVPGLERQPLKKIVPDEAALLRLLHRWRDEAIGKGRTITRVAVAYEAGRDGFWLARWLAKQGIEIHVIHSSSVAVSREHKRAKTDRLDTAMLTRVFLGWLRGERGHCSMVGVPTIEQEDAKRPSRERETLTAECTRIINRIKSALARLGIRGFKPQLRKAPQLVDALRTPEDVPIPPNTLAEIRRDLARLAILREQIKEMEQARLQHLEDAPQSAPNAMVRLLASVIGLGVETAYLLVQEVFSRDLRDRRAVARYAGLTGAPDESGSKRREKGLAKAGNARVRRGMIQLAWRFLLFQKDSALAEWFRSRTEGVNGARKTKMIVALARKLLIALWRMVTTGEVPHGVVLRQAA

SEQ ID NO: 323258 - protein, 436 aa, unidentified
MAPEFQVVHPHAAGIDIGSRQFFVSAKESHYEIFNTYTEGCYAVRDYLKAEGVTSVAMESTGVYWITLYDVLDSAGFEVYLVNGREAKNMPGRKSDIKDCQWLRQLHTYGLLRRSFIPDEAIRKLRSYVRLRRDNIRAQASQTNLIQKALTLMNIRLTEVINDVMGVSGKRMIEAILAGERNIDKIVSLCHETILSKKEDQVKKALEGNYKEEHMFALKQAYNTWMYYAGQIKECDYEMQKLLNERTQNLPPVENMQKRKPIRYNKPDIDNLPQMILKLTDGKDPVGIPGITDYSLLQLISEVGTDMSHWPNEKKFVSWLKLAPMSNQSGKINKRISAKRSNKASLIIRTIAQGIVTSKKIAMGAFARRIRAKRGSAVAIKAVARKIACYFYRVMTKGTAFVEKGIEMYELDQKERAKQHILKMAKKYNLNLSAGI

SEQ ID NO: 323259 - protein, 351 aa, unidentified
MKILSLDLGKNKTVGCDYERESGQHRFKTAFSTRSGLQRMVKEVKPDRVVIEVCSTAGWVCDMLREMGIEVQVANTNDEAWRWRKVRRKNDRRDALKAAQLSAVNQLREVHVPRIEVRQWRALIAFRQKLVQRRTRMKNHIRDLLLREGEILPSGQKCWTQLGMARLESMARPLSELGLHEMWRGELDIELRQLQAVQQEIAILEERLDAIGAADPRVRLLRTIPGVGPRLSEAIVALLDRPERFRKAREVSAYIGMVPKELDSGETQRRGRITRQGSRLVRSLLVEVAWTGLRHNGWVRETYQRIHGGKKSRKKIAIVAVGRRLLVRCWAMLRDGTAWHWSESAAGAGTK

SEQ ID NO: 323260 - protein, 400 aa, unidentified
MRAVFGIDVSKASSEVAILVNGEKVHGYTISNDALGFARLLGDLKTVHKPEIIFEATGVYSRRLQAFLEDNGYAYTRLNPLEAKKQLDSLRVRKTNQIDAEKLAQSHFVLNRKPTYVQEEVYQELRDLSRFYQNLTEDIVRAKNRLHKVLQVTFPELETILSTPTGEQYGNLVVAFPCKDFVLDLSKDELSESIRQSTSKRISDKRVAYLAEKLIALANQSYCAVKKTSPMLEEVRYYTKELLRLSEQRQTVLDQMVELAQPLPEYDILLSIPGIAETTATSIIGELGDIRRFQSANQINAFIGIDLKHYESGNFLAKEHITKHGNPYARKILFKCIHNIASASHTNPCHIADFYEKRKKQSQTTSTKPHTIASIHRLIRTMYYLIMHNKLYDYASTQNR

SEQ ID NO: 323261 - protein, 410 aa, unidentified
MDLVSAELPAKTLIVGTDPGKAVNRVLPATGEKGMLGEPVSLPTQREGVERLCGSIAEAGAPQTVIAIEATGSLHLPWVAELERRLPGSTRLFAPSETQAARTGPGSRRFKDDDRDCAALVSPARQGRGRPAQDGTLEALLDAVHHRRRLIARLKVVRRHLHHQLNALCPGLSAPAGHGRALALETPTGQAVLACAVEFAGRAPAPRSLIARAPGRLTRADACFRAGRRRGCPAPPPDAELRSERLRRDVRRWRALVEDVDAVAAQVEALLRDTAGEVLTTLPGVKTIRAASFRVHALPIGRFPSAGHLYSFTGPAPARHGSSTIRKARAISRTAPGGRRDALTGLAWGLSQHCGPFRVRDREPRGRGMPPIEARVALARHACRLAHRMPQTQEPFDEERYARSRHARGR

SEQ ID NO: 323262 - protein, 406 aa, unidentified
MKVLHERCAGLDVHKKEIVACVITSDGKEIKKFETMTEELFKMSDWLLDQGCTHVAMESTGVYWKPVYNLLEGTGMEILVVNAQHIKTVPGRKTDVKDAEWIANLLRHGLVRGSFVPDKPQRELRELTRYRRSLICERSREVNRIQKVLEGANIKLGSVASDILGKSGIAILERLVEGVEDTTLLSDLAKGQLKKKKLELEKALKGLIGDHQRFILGEQLEHIKELDRRIERLDREVDERLRPFQKQLQLLDQITGINKRTAEDIIVEIGTDMSRFPSEKHLSSWAGICPGNNESAGKRKSGRSRSGNKWLRVSLVLAAHAAALSKGTYLSAQYRRIASRRGAKRAAVAVAHTILVSIYHMLKTGKEYKDMGADFFDKQSEESLIRRTTKRLESLGYDVSIEKKVA

SEQ ID NO: 323263 - protein, 410 aa, unidentified
MFTVKHPRCAGLDVHKRQITACRVRPGDAALEREVRTFGTTTSELLALADWLSAWGCTHVALESTGVYWKPVYNLLEGSFTLLLVNPEHVKALLGRKTDVQDAERLAGLLAQGQLQGSNVPDRPQRELRELTRYRTALVRERAAEANRLQKTLEGANIKLASVAADLQGKSARAMLAALAGGEIDPEALAELAQGRLREKLPALKEALRGCVGEHQRFLLGQQLTHLAELDERVREVSEEVAKRLTPFEVQLRGLQAQPGVGRRTAEILVAELGTDMSRYPNHRACAAWSGMCPGQHETAGKRKRCPARKGSPWLRAALVEAARAAARVKDSYYGAQYQRLARRRGANRAAMAVGHSMLVSSYYILRGDEFRDLGGHYFDERDREHIVRHNVKRLQQLGYDVDLRPVTAV

SEQ ID NO: 323264 - protein, 413 aa, unidentified
MKSWKEFTHFAALDWAKDHHDVVVVDRQGTVVADFRIAHDCVGWQLFAEKLRGFEAVAVAIETSEGPAVEQLLASGFDVYPINPKSARRYRERKRPSGSKTDRIDAWSLADALRMDGHGWRPLQPVNPLLSELRQLCRDEIALIEERTALINQLQHALGYYYPIALKAFEDWALPSAWAFVEAFPTPDALLEAGRRKWERWLHANKLFHSRSNKRRLELFAHAGEFRASSATTLAKSLLAISRVKMLRLIERQLAVYRKRIEALFAQHPDHQLFASLPGAGPKLAPRLLSEMGEDREQFEDAQSVQCYAGTAPVSFQSGQISRVTVRRSCNLHFRQAVHLWVDLSRKYCVWAQIYYRTHREKGQSHACAVRCLGQRWLKILWKMWQARKPYDPELHQQNQVKHGSWVVQLKTA

SEQ ID NO: 323265 - protein, 338 aa, unidentified
MSIVMGLDQHRGQITGEWIDTETGEVQRTRVAPADRAHVRKWLERFRGQELEVALEGTTGWRFVVEELRRVGAVVHLAEPAETAGLRGPKKRAKGDRADARHLRELLMVKRLPESWIPPAHILDLRARVRLRHTLSEQRGEWQQRIQATLYHHGCPQRRSLMTGDGREWLAAQPLPATAREQVTVALAMIDGIETQIAPIDKELRAYAHRQAGCKALMAHYGIGPLVAVTILAELGDCTRFSSSRLAVRYAGMDITVYQSDQRRAPGHLSRQGPPALRWALFEAAQNACRQGSPDREYYREAAERLGHNRACLSVARKLLKRSYHTLRELGEEALAPA

SEQ ID NO: 323266 - protein, 414 aa, unidentified
MEVIHGRCVGMDVSKRDAKVCVRIAGRGRRKTVETVRTWVSTTNAILALREHLINEQVSLVVMEATGDYWKPFYYLLEDAGFELMLVNARQVKNLPGRKSDVSDAAWLAQLGAHGLVRGSLVPPAPIRELRDLTRARTIMTRERGRDIQRLEKLLEDAGIKLSSVASDITGVSGRLILQALIDGQRDPAVLADLAKRRLRHKIPELTEALTGRFGDHHAFLARMYLEAIDQRSRAITDLTTRIEVVIEPFRSFCNLIGTIPGIGVRCAEVIVAETGADLSIFPTAAHLASWAGTCPGSNESAGRIKSTATRPGNPYLKAALGAAALSIANTHGTYLAAKYRRIAARRGPKKALVAVEHATLIAIWNMAHTGAEYDDPGADYFTRRDPVRARQRALDQLQHLGYRVTLKPVAASA

SEQ ID NO: 323267 - protein, 379 aa, unidentified
MEYTTYVGLDVHKDTIAVAVADEKRSDEVRFLGTIPNNHESLAKLMKRLGEPENLRVCYEAGPCGYGIYRFLTKQSIICHVIAPSLIPQRPGDKIKTDRRDAVRLARLLRSGELTEAWVPDKDTEALRDLTRAREDAVEDLVTKRNQLTKFLLRLEIRPPQTNRPWSVKYRDWLSSLKLSTPTQTNILREYLQAADEIESRIKRLESAIEKIGSETTGCQGALIRALQSLRGVGPITAATMVAEVGDFRRFRSPSQLMSYAGLVPSEYSSGPRQRRGSITKSGNNHIRRVIVEASWHYRHQPRVGIALRRRQKDQSAEVNQISWQAQHRLNSKFNRLIFKGKPSTVAAVAVARELLGFMWAIAREVLAVLPEADLVKAS

SEQ ID NO: 323268 - protein, 458 aa, unidentified
MPARLIISMRVTPVARKRKMQRLEIVHPRCAGIDVGSREHWVAVDPHGADQPVRCFSAFTDDLQKLAMWLKSLGVEMVAMEATGVYWIPLYEVLDAYGLEVHLVNSRATRQVSGRKSDVLDCQWIWQLMSHGLLRGAFRPGDAVCCLRSYVRQRATKVQEQSRCIAHMQKALTQMNIQLDNVVSDLMGKTGTAILRRIVAGERDSQQLARLRDGRLRANEATVARALHGNWRDEHLFALAQALAHYDFLAEQISACDRQIGQALDRLPKLAEEPAPEPVKPLRSAQRTGAEQKQLHQALHKVMGVDLSAIPTLGIDTVLVLASEIGADLSRFPSEKQFCAWLSLAPPTHISGGKPLSGKKPKTFNRAGQALRQAAVNARRSDSYIGACHRARLARMDTPKAIKATAHQLARLIYAMLTKGQAYVEKGIKAFEADSRSRQLRALQRKASKFGLALTEAA

SEQ ID NO: 323269 - protein, 341 aa, unidentified
MNHYAGIDVSLKSSSVCVVDANGKLVREGTVASEPEALIAWFSELGLEVARIGLEAGPQSQWLYAAVRQAGLAVELLETRHVRDAFKAMPVKTDRKDARGIAQLMRLGWFRPVHCKSIEAQETRAILGARKLVQSKLHDIEMSLRGTLRGFGLKVGKTTPNRFGARINELVEGHPTLQIIATSLLAAHAVLLREFKVFEKRVRVMARQDERTRLLMTTPGVGALVALTYVSGIDDPGRFTTSKRAGAHFGMTPKKYQSGETDITGRISKIGDKGVRTALYEAAHIILTKPVKGSAVKSWAARLAKRAGMNKAKVALARKLAVIMHRMLVDKTPFNPAAAAA

SEQ ID NO: 323270 - protein, 355 aa, unidentified
MNSEKYIGLDVHQATISVAVLDSAGKLVMESILETKAATILEFFAGLRGTLSVTFEEGTWAAWLYDLLKPHVAKLVVCNPRKNALLKDGNKSDRIDAHKLAELLYLNKLSSVYHGETGVRMLRELARSYLTIVKDLTRVMCRLKAVYRSWAIPCAGRDVYYTRHRAEWLGKIKEAGVRRRAERLYQQLDMLQYLRQQARRELLAESRKHAITVKLRQIPSLGPIRSALAVALIQTPHRFRTKRQLWAYSGLALETRTSAEYCYVKGGLRRSKKQISIRGLNKDHNHDLKGLFKGAATRASVRPGPFQDFYQRSLAKGIKPTMARLTLARKIAAITLTLWKKGENFDADKLKSQAA

SEQ ID NO: 323271 - protein, 342 aa, unidentified
MNHYAGIDVSLECSSVCVVDANGKILREARVASEPEALIGWFRLLGFGLERIGLEAGPLSQWLFAAMREAGLAAELLETRHVRKAFEAMPVKSDRNDARGIAQLIRLGWFRPVHCKSMSAQETRSLLTARKLVQSKLRDVENSLRGILRGFGLKVGKTTERGFAGRIEELVAGHPHLQVIARALLSVRAVLRSEFAAFQKQTRKMAQSDARTRLLMSTPAVGPIVALTYASAIDDPARFTSSKQAGAHFGLTPKKHQSGETDYTGRISKIGDSSVRTALYEAAHIMLTKPVKGCSQLKSWAMRIAKRAGMSKAKVALARRLAVIMHRMLADGTPFNPATAAA

SEQ ID NO: 323272 - protein, 319 aa, unidentified
MRETPVFVGIDVAKATLEVAVRPSGAQWASANDEAGIQTLLGQLRALTPALVVLEATGGYEHAVAATLATAGVPIVIANPRQIRAFARATGQLAKTDAIDAQILALFAERVRPTPRPLPDDATQALEALLTRRRQLLEMLVAEKNRLGVARVGVRRDISQHIRWLERRVADLDRELHAGVRASPVWRAQDDLLQSVPGVGPVLSYTLLAALPELGTLGRKQIAALVGVAPLARDSGTRRGRRTSWGGRAPVRTVLYMATLTATQWNPVLRHCYQRLRAAGKPHKVALIACMRRLLLILNAIVRTQTPWRATPTAARATT

SEQ ID NO: 323273 - protein, 377 aa, unidentified
MDQQTGEIISQPVSFSNDKEGFDFLVKKIKSYPKDSILIGMEDTGHYHFALLKYLLDLQYTVALINPKTTDFNRKMQGGITKNDKLDTINICDVLDTPERKKQYRITKVNSFDLYEQKQLTRHHHNLKEEENVYKNRLQKCIDIVFPEFNKLFNSKYGIVYMNILKMFGSAENIANTDIRTIRKCFEIEGRGNRISLTPERLKECARSSIGISSSAEVIQIKHLTAQIELIEEQLTEIDKKIEEFSIQNNSPILSIPGISHFSGTSILAELGDISNYSKPSQIIKFAGVAPLHYESSQFNAQHTAITKKGSKYLRKTLYQIILPVIRHNPVFNKYYQLKISQGKGHRCAQGHCVRKPLRIIYHLLKTNQQFDPQLLR

SEQ ID NO: 323274 - protein, 365 aa, unidentified
MLKTIFKNCAGIDVHKNTIVVTIAITNKDDVTDYQTKSFRTFTEDLIRCRTWLISNDTLDVCMESTGKYWIPVFTILEEECRCVVCHPKYVRSILGKKTDKKDSKWIADTFKYGLVEPSFMPPADIRDLRDLMRYRNTFVNTRSGEKNRFQNSLTVSNVQIASVVTDVFGKTSQSILKLMLDNPHLTLDDITPLLKKNLKSSPEDILKSIDGIFNESQSSKMSVCLKHYDVINECIDSLEQEILKLSVKYSAEIKLLMTIPGVQEISAIFIIAEIGTNMKAFIDAKHLCSLAGLTPRCKESAGKKQSVRIIKAGQYIKPLLVECALCAIKDKSCPYIKARYQSIKSRRDHKKSIIAIARFLLTCS

SEQ ID NO: 323275 - protein, 482 aa, unidentified
MKSTRQEQSSPSTQASVSVTWQGMNRKQRREMTRKIQSADIGLEVVHADAAGIDIGNEAHYVAVPPTRDSQPVRRFGCTTAELKDMAVWLKRCQIRTVAMQSTGVYWIAVYDILQAAGLEVYLVNARETKNLPGRKSDVQESQWLMKLHTYGLLRNSFRPSPEIRALRTYWRQRHDLVRSAGRHLQRLQKALTQMNIQLANVLSDVSGATGQAIIQAILAGERDPQQLAAWRDARVKASQEEIACSLEGNWQEDLLFMVKQEQDGYQFCQKQIAECDQRLAHYLQQQTDRSAGAPLAEEKRKWRRKKKKGNNPQFDLRTELFRMTGTDLTRIDSIDVMTATTVISEAGYDMTRWPTEHHFVSWLRLCPDNQVSGDRVIGKKRLPTNNRLTVAFKMAANTLRKSDSYLGAQFRRLRTRLGAPVAIKAMAAKLARLVYRMLRHGLQFVDHGATFYEAKHRQREINLLKRKAANLGFQILETPAA

SEQ ID NO: 323276 - protein, 310 aa, unidentified
MEDIIVGIDVAKDRLDVAVRPSGEAFVVERNAAGLEVLVARLRELSPYLVALEATGGYETVVAAGLAGAALPVVVVNPAQVRAFAKALGQRAKTDPIDAAVIAHFAQATRPEPRPLPDEATQLLADLVARRRQIIEMIGAERQREKRVTIAHLRKSIARLIKTLEKELASLDTDIDDAVRGSPAWREKEDLLASVPGIGPTIARTLIAELPELGQLGRKQIAALVGLAPFTRQSGQWHGRSFIGGGRTTVRAALFMGAMVAKQHNPVLKAFFNRLVTAGKPKMVALIAVARKLLTVLNAILRDNRPWQNA

SEQ ID NO: 323277 - protein, 364 aa, unidentified
MGEISIIGLDLAKLVFQVHGADKAGRCLLRKQLKRREVLRFFAGLSPCLVAMEACGSAHYWAREIARLGHDARLLPPAYVKPYVKRGKTDRIDAEAICEAASRPTMRFVPVKTIEQQSLAALHRCRDLLVKNRTMLVNALRAHLAEFGFISGALPHDALLERIVAAKGIGKLPDLIEIVSEAPAEALPEMARAPLSGFIDAIALINRQLDGLEKRLRAWHKGNAQSKRLETVPGVGLIGATALCALVPDPKLFRNGRHFAAWIGLTPRLDGTGGKVRLGRISKAGDGTLRRLFVLGATALLRSLANKTTPLALWVQGLLARRSGRAVAVALANKLARIAWAIMASGKAYKPLSAAQLPMPAGRA

SEQ ID NO: 323278 - protein, 346 aa, unidentified
MLHVGLDLSRKRVDVHVMNDAGESVDTWAVLPDRGGLHALVRRLEKHGEPVYAAIESMNGARFVHDELEMAGWRVDVADAVKVKGLAPLACKTDKIDARVLAELCRRDLVPAIWLPTPEHRGERERSRWRLHLVRHRVALKNRIHATLLAFGHQCPTSDLFGVKGRRRLAEMHLPEPWLGTVEASLRLIDELEAEIASCERDLRALGAQHAYIPKLMTAPGIGWVLAYTIASEIGDINRFASPKKLCGYTGLCPRVYQSGTKDHRGALRKNGPAYLRWALIEAATHAELHPAFHVHYEATKKRLGKQRGAKVARVDVARRLAEAIWYMLTRDQAFSPAGPPVGLVA

SEQ ID NO: 323279 - protein, 385 aa, unidentified
MTNTQYHSTIVPRDYDIFIGLDVDKKRMAVTCVDHGTLQKSLSLPYSGKQLLNYTAKHFPGQRVAFVYEAGPTGFGLHDELSAAQHPCLVVTPAMVPSAPRKRVKTNRLDSKKLALGLRGGDLQGIHVPAQSYRELRQLVQLRDTQAAQVRATKCRIKSLLLFEGIPFPEPHEKWTVAALQGLATLPCNATVRFKLDQLMEALQFHYQMAAKVQKEVRRFCNQDSELRQSVELLRTIPGVGTITATHAIARLGDWRLIKNERQIAGFLGLVSSEHSTGEKEKRGEITRIGDQRLRNKLIQCAWTAIKKDPELRAFYRRIYARHPPKVAARKAIVAVARKLTTRLYAVLKKQRPYEIRADLATTPLTVEETVGLRERLDMAQNDEL

SEQ ID NO: 323280 - protein, 334 aa, unidentified
MSKKVIGIDVGKKDLYLAHKYFTTTGKVKVKRKKFSNNLKGYKALIEWSKNIAKKEGDKSLHFIMEATGVYYEGIAYFLFDKGFAVSVINPSYIKSFANSSGVRTKTDQKDALVLVEYGEAMKPELWSPPAEEYRVLLNLCRAISSLKNRRDAVANRIESLKSSRVIAQAVLEEEERLFNEINKSIKRLEKQIREHVNKYPSLKKETKLLMSVDGVGWNTAVLMVAIMEGGRRFKSAKETAAYLGLSVQEYTSGTSVKKRSRLSKKGAKDIRKALYFPAITAVRCNADVKALYERLLKRGKLKMVAIGAAMRKLVHICFGVLKNKTAFQPQTIG

SEQ ID NO: 323281 - protein, 353 aa, unidentified
MEGDAMTLVGCDLHARDQQVAVLDTATGEIQERRLVHDGDSVEQFYTALPGPVTVGIESTGYALWFHALLRRLGHEVIVGDAAKIRAMVVRKTKTDRRDAAHLLDLLRHDRFPTVWLPEPAVRDQRTLLAHRMRLVRMRTMVKNGVHAIALNYRLALGPSLFTRAGVAQLQALSLPPHTACRRSESLELLSWLNTRIKGLDDQIGEAAHAHPEAQRLMTHPGVGPLSALATVLVLGAVTRFPTSKHVVSYVGLAPAIESSAGKHRLGRITKQGNALLRYVLGQAGQAAIKRDPDLNRLYYAVLHRRGRSRAKIAVARKLLVRLYVMLRDQIDYPTFLHRAPAAARRKEMTPTS

SEQ ID NO: 323282 - protein, 346 aa, unidentified
MTIVEDARAITGGVDTHADTHVAAALDPIGGLLGVQEFPATAGGYARLLGWLGGFGTVCLVGIEGTGSYGAGLARHITAAGIRVVEVDRSDRQDRRRQGKSDPLDAISAARAAQSGRARGAPKGRDGAVEAIRALMVAKRSAAGERTRTINQARALILTGPDDLRARFAGHTAAALVAAIASLRPRPGDTAGYATRIALRELGRRAVFLDGQLERLDELIVPLVTARAPGLLALYGIGPNTAALLLIAAGDHPGRLRSEAAWAHLCAAAPIPASSGKVTRRRLNPGGDRQANHALWRIVFTRMGSDAATRAYVERRTKEGKSKAEIIRCLKRYVAREVYPHLRPAG

SEQ ID NO: 323283 - protein, 340 aa, unidentified
MKKVSTIGLDLAKNVFQAHGADASGAVIFRKKLRRAQVLEFFATQPACTVAMEACGGSHFWGREIGNYGHRVRLIPPAYVKPFVKRQKNDAADAEAICEAAQRPTMRFVTVKSEAAQGAAVVFRTRDMLVRQRTQIINALRGHLAEFGLIVAQGPAHVAKLIMAVQDPNQPLPEAARPILCVLVDMLDLLDQRIKLLDIAIARRAKEDEVARRLMSIPGVGPVIATAVAALAPPAETFKRGRDFAAWLGLTPLQHSTGGKQRLGATSKMGERTLRRLLIIGASSVVRWAARKGAPAGSWLASMIARKPAMLVRVALANKMARVIWALMAKGGTYRAPVVA

SEQ ID NO: 323284 - protein, 344 aa, unidentified
MATIFHLQFFTMEHYRFFIGIDVSKAVIDVFIHAKNLHRQFSNDRSGYDTFVRWAGKVLQAESLGQVLVCFEHTGLYSLCLSVYLEETGIPFAMVPALQLKRSMGITRGKSDKVDARRIAEFAYLYRETLHQTKLPAKAIMQLQPLLALRDRLVRDRAGYYVTQKEQRRFLLPSQLMGLLDAYATIISAMDTEIKRVEKVMQEIIEQDEELRSMLELITGIKGVGFLVGVYLIVFTHNFTRFATWRKFACYAGIAPFEWQSGTSIRGKTKVSPLANKQVKKMLHMAALSASRSDSELKTYYQKRLAEGKNKMCTLNMVRNKLVARVFAVATRKTAYVELMRHVA

SEQ ID NO: 323285 - protein, 338 aa, unidentified
MSLYAAIDLHSSNSVLAVMDGEGKSLLQCRRPNDLPRLLGELEPYREELVGVAVESTYNWYWLVDGLMDHGYEVRLVNTTAIPQYDGLKHGDDHTDALHLAQLMRLGLLPEGYIYPREQRATRDLLRRRFSLVRQAVRLMLSIQSSFSRSTGKQLSANQLRQLAPSQLVDLFPELTTRYGVMIQFQLWLTLQDQIKALETWIRKDLTRPDLLKRLQSVPGIGPILGMTILLESGSIERFDSVGDYASYCRMVESVRLSNGKRKGTGNRKCGNRYLCWAYMEAANYAVRFDPLIRRWYERKRARKHRVVAIKAVAHKLARACYHMLYEGTTFDLGRAFG

SEQ ID NO: 323286 - protein, 337 aa, unidentified
MHNITLIGIDLGKHTFHIHGQDRKGKSLLRKKMSRKQLIEFIATRRSCTVVMEACAGAHHLARHFATFGHTVKLISPQFVRPFVKSNKNDFVDAEAICEAASRPSMRFVTPKTEAQQTLSALHRVRESLVRDRVKTSNQIHGFLLEFGISLPIGKAVIRRLHSVLAEHPLPARLVVMLERLHTHYQYLDKEIAEIEKELSRQLGEDDLGPRLMTIPGIGPITASVLAAEIGDAKQYRKGRDFAASIGLVPRQHSTGGRSHLLGISKRGDKNIRRLLVQCARAYMQRLDRQTGRLAEWVRSMLLRRHSNVVACALANKLARTAWAVAAQHTEFRVVPV

SEQ ID NO: 323287 - protein, 347 aa, unidentified
MRFYKQQHQFYCGIDLHARKMYVCIIDQKGKTRLHKNIPTDAEMFFELIFPFLEDIVIGVECVFCWYWIADLCAQHSVAFVLGHALYMKAIHGGKTKNDKIDSFKIAALLRGGNFPLAYTYPAPMRATRDLLRRRMYLSRRCGELVAHIQNTNTQYNLPEFAKKISRKYNREGVAERFENPVVRKSVEVDLSMIDALNQTLRQLEWYIEKTAREHDYQTLYLLRSIPGVGQILALVILYEICDIKRFATVQDFSSYARLIRPVKESDGKWAGKGNKKIGNHHLKWAINEAVILMLRESEQAKHFVDRLTKKHNKGKALGILTHKLGRAIFFMLKNNEAFNMNRFFSS

SEQ ID NO: 323288 - protein, 339 aa, unidentified
MEHIIGIDLHSNNGYYGIIEPDGKRVFHRRLANVLPTVLRTLDPYHKTASSVIVESTYNWYWLVDGLMQHGYKVKLANPAKFTKYNDMKFSDDKTDAFFLTELERLNILPTGHIYPGSERPIRDLLRRRMFLVRHRTSMINSFQSLASRETGRDSINARQIGLLDQERIKELFSDEYVQLAGISCLETIKCITDQVKILESVILKQAKLKPEFERLKTIPGVGKILALTIMYETGAISRFKSPGNYVSYCRCVKSVHMSNGKKKGEGNRKNGNRYLSWAYVEAAHYARSCCEPAKKFYQRKLAKRNAAVARKALASKLCRAAYYIMRDQTEFDVQKLFV

SEQ ID NO: 323289 - protein, 338 aa, unidentified
MDRTTYAADIAKQVMQVHWVDAQSGEIGRRKLSRAKFLEFFAKLQPARVVMEACGGAHHWARCLRRLGHEVELLPAGQVRPFVRGNKDDAADARGIWLASRHSDIRRVPIKSCEQQAVLSLHRMREHWKSIRTATINAMRGLLYEFGVVLPKGRTAGLKALAQRRADIDATLPQTMCRMVDAELGMLAELQKRLDQLEAEIQATSTSTAKRLRKASGIGVLGASALAATLGDGTGWRSGREFSASLGLVPAHTGTGGKTRMGHISKRGDPYLRTLLIHGARAVIAQSKKKPQWLQELLLRRPPNVAAVALANKMARIAWAMVAHGRDYDANWISAKPC

SEQ ID NO: 323290 - protein, 426 aa, unidentified
MKCTQNEKISQIKISTLVVGIDIGKETHYARAFDYRGIELAKLLIFRNTAEGFETLDRWMQDICKQQEKTEVIAGFEPTGHYWFTLGDHLKRQGHKLAIVNPFHVKRTKELDDNSPTKNDRKDPKTIAMLVKDGRYRDVYIPEDIYQELREAVAERERLQERLIAINNRVVRWLDIRFPEFTGVFKKWTGKTALLTLRNFPTPAKVLEAGEEKIMSTWRTEVKRSVGKKRAQALVKAASRSIGRATGQIASEVSLQNLLAEYELYHAQHERLEQLIRELLLQVPNAAKLLGIKGVGLITAATFVGEIGDIHRFRHPRQIQKLAGCNLVENSSGKHRGKTTISRRGRKRLRHGLFMTMISILGKNQEFRELHHRNLTREKNPLNKMQSIIALCGKLIRVFYAILKNGVDYNPEKMMGDIQRSMKAAA

SEQ ID NO: 323291 - protein, 420 aa, unidentified
MSSTVDIVYPICCGMDVHKNFIVACIATTDERSHTEHMIRRFSTYTGDLRILADWLAANNCRDVCMESTGKFWIPVFNALEKTCKVCLTHPKYVKAIKGKKTDKRDAKWISELFKCDLVRSSFIPPPDIRQLRELCRYYVKLVYMCSSEKNRAQNCLTVCNFKLDAVFSDVFGLSATRIIDQLLIHRNSEFDIVPLLDPRCRATVENVQAALEGELTLAQAEKLKLIRLHMENLNNLKAALEKFILALAAKYQPQIDLLLTVPGIKEPLTAVRILAEIGADMSVFETAKQLCSWAGLAPQNNESANKKKTTRIGRAGLYLKPLLVQISLSNGVSDKCPELKSKYQALKKRRGGKKAVIAIARKTLTAIWHMLTKNEPYAPLVYSRANRAPVNREITQSQAYAILRNQGFIIRDEESPDSA

SEQ ID NO: 323292 - protein, 338 aa, unidentified
MALYCGIDLHSRDCWLAILDEGLKVVQEAKAGNDLEALLHVLEPYREDLEGVAVESTFNWYWLVDGLEEAGYRMHLTNTWAVKQYEGLKYTDDRHDARWLAHLLALGILPEGYIYPKQERAARDLLRRRAFLVRKRTSFLLAMRGAFECRTGMRISSNDLKKWKAKDVEAHMEDPAEAFSITCLLEPMHALSAQIKKIEKGALARGRLRPEFAPLETVWGIGKILALTIMYEVGDIARFRKVGNFTSYCRLVNTARLSAGKRKGSGNPRNGNPHLSWAFSQAAHHAVRHHPEAQKFYQRKRAKTNGIIAIRALAHKLARASYHVMRDHVDFDPEKTFA

SEQ ID NO: 323293 - protein, 365 aa, unidentified
MEKCITKSIICGMDVHESTIKTCTAAGNGAAEVKTFSNSEAGRNSLIRYLQGLAKKHGCRQVVTAYEACMLGFGLHDELSGAGMVNYVLAPSLMRKSRKDVKRKTDEADARMIFETLRGHVLAGNSLPTVWVPPPELREDREVVRARLELGNKTTKIKEQIQMLLKKHGARKPSGMGGAWTMVHRKWLHGLLTCGGPELPPGAKIVLSSLLRQLAMLEKEIKTLDEAVETLSHKPRYQVACQALVKQIKGVGLLTAMVFLTEIGDLGRFNNRRQLGSYLGLAPTSNESGETSDRKGHINRCGAGRVRWVLCQASWVRLQHDEAESAVFERIRKGTKKLTRVAQTACMRRLAVLMWHTAKDALAAA

SEQ ID NO: 323294 - protein, 353 aa, unidentified
MKCDKYMGMDVHQATTVVDVVDADGKPVLETIVATEAAAIIRLVQSLSGPLHVTFEETTQAAWLYEVVRAYVTEVVVCDPRRNKLLGEGSKADKPDARKLAELLRAGMLRSVYHGHEATRKLKELVRAYETLSIDTERTMVRIKAVYRGRGIPTPGRGVYQLRKRDQWLEKLSEPGARQRVAFLYEELDLVRSLRRRAKQAMLAESRAHRAVSLLRTIPQLGPIRCALIVATVDTPHRFRTKRQFWSYSGLAVVTHMSSEYEIKEGRVVRSRKPIATRGLNRNCNRRLKEVFVGAATGGSQAEPYRSYLEKLKQNGMRAEMARLTLARKITTLALTVWKKGEAFDPKKLNWTT

SEQ ID NO: 323295 - protein, 320 aa, unidentified
MQRCEITWIGIDVAKDSLDVAWASAEGSQHLSLANASPGFRSLVEKLPPAHEARLVVEATGGYERALVTALIETGYRVAVVNPRQVRDFAKAMGILAKTDRIDAMVLARFGQQVRPRLLEEDPAQRAELMQLVSRRRQLIDLRTMESNRSEQTTARAAQKSIRHVLRLLGKEIAQLETEIARLLESDDDWRGKIALLSTVPGVAKVTSATLVAEVPELGRLNRHAIAALVGLAPFNDDSGRHRGTRRITGGRAAVRQVLYMAALSARRCNPVIHAFAQRLAAQGKKPKVIITACMRKLLVILNSMLKKNVPWKSHPLHTP

SEQ ID NO: 323296 - protein, 466 aa, unidentified
MVQHKTHKKVIELVEGEGRRKSGVIVGTDVHKSVLAYCIGSETRILKEGTVPNTKDGIRDLIGWCRRYQTQSVAMESTAQYHFKFLYALLEAQIPTLVANPRQTKDTQGKKTDKLDARRIYVAHRDGRLKPSVISPEDTMQLRKAMRQLFKLISEQTKIKQRLHQLFHQKEFQIKKQFKHFLKSHWGLQVMHQFLDEEVRSVVEREYPKKKRMDNIAFIVREVTQFKNRLGEIEKITLRTDVTRLLMLKSLSDQLRLVYVKVATSNPVFRAMMKLLLSIPGVGPDTAAVILAEIVDISYFPAPAKLVKWAGLAPRVYQSGHRKRVTGKIHKGGNKYLRRALTLACQNIHSKGNASNQLWNFIKSKYQNPKQDSFWRAICAAARKLLVIIWFMLKQNQEWHWQVTDETVLQQLHAKIQRKVKGFQHMIGKYQRTQELLTQEINQVLEASLYRGQDPKILLKVLLSSV

SEQ ID NO: 323297 - protein, 376 aa, unidentified
MTAQHSNPVLYMAMELSNRTWKLRFGNGTTVHDKTVKAGDQKGLMEAVKRARGRLKIPSEAPVRSCYEAGRDGFWLHRFLQKHGIENLVVDPASIEVNRRQRRAKTDRLDAAKLLLMLLRYHLYGEKTVWKICRVPELESEDDRRLGRELNRLTRERTGHLNRIRALLVTQGVAGVRPRKVDFQTIRNWDGQALPSAMAAELEREQQRLRLVDEQIRQIEAARNQRLAEPRTESDRKAGKLLQLRAVGPVSSWMQAKELFGWRHFHNRREVAAVAGLTATPYDSGDSSRCQGISKAGSPWVRSVCIELAWNWLRFQPQSELSQWFHQRFGGGGGRMRRVGIVALARRLLVALWKYVEFDELPAGALLSATPVQVSC

SEQ ID NO: 323298 - protein, 413 aa, unidentified
MNSYIGSDWSEMHHNVCILNEAGACLNRFQVPHTQTGFLRLEHQLARVNEVAAECLVAIETHHNTLVDFLCSRGHTLFILPPNQVKSNRGRQRASMAKNDDSDARLLADILRTDQGRLIPWQENGDLVQQMRSLLSWIDDLTSSIKRHRNRLRANLLRYYPQPLAAFGNLSSQFSLKVVAAHPSPGRLRKLTYSQFVAFSRRQGYYQVGNLPAYYAQLQAAMPAAPETIWPALEKQTVYLARQLLTLMEQKQTTIGQTGHLFEQHPDAPIFASLPGAGDLLRPKLLVMFGDHRARYPKPSMLPAIAGTCPVTVQSGRSRFIRFRRACNHSYRQTTQQFAKSSIRKSVWAAGYFNRCLTRGMSNSHAYRCLANRWLHIIWALWQKRVPYDEAFHLSQVARHRQPLLGSVSAIPS

SEQ ID NO: 323299 - protein, 411 aa, unidentified
MENVFACCAGLDIHQKSVEACVRRLEPTGPLHQQTRHWGTMTRDLLAMADWMAAQGVTHVAMESTGVYWKPIYNILESRFTVLLVNAQHLKQVPGRKSDVRDCQWIAQLLQHGLLKGSFIPPRAQRELRDLTRHRTQLVEEKTRTVNRVHKVLEDANIKLASVATDILGVSGRAMLEALMEGQEDPVKLADFAQRQLRGKIPELEKALEGHLTEHHRFMLRLLWKELGQQEELIAELDRKIEEHTRPFANEIERLDAVPGVDRRVAEVVLAEVGSDVKPFPTHFHVASWAGMSPGNEESAGKRRRGRITPGNRWLKRTLVQAAWAASHTKNTYLASQYRRLAGRRGKKRALVAVGHSMLVIFYHMLKERTTYKNLGGDFFDRLEPERLTRYYVKRLKDLGHKVTLEPGVAA

SEQ ID NO: 323300 - protein, 341 aa, unidentified
MNALYYIGFDIHKKSIAYCVKRNDGTVIQQGMVAADRKSLRQWQEELPGPWVGAMEATLFTGWVYDFLMPYAVALKVAHPEMLKAITAAKKKNDSADAEKICDLLRVNLLPECYIAPEELRELRRVLRYRNLVVHTAVKMKNKISGLLMEVGATYDKGRLHGKQYFYDLLERIEDVPDSVKELLRLSRGSIELFTGVQKKLIKALRENELIRERVERLMSIPGVGIILALTWVLEIGDPFRFNSARQAISYCGLCSAQRESAGKEWRGPISKKRNKHLQTILIEAAKLAPGRNQQLAALHAKELARGHSNRATLAIARKLVEYMLAVDRRKTDFETVRPAA

SEQ ID NO: 323301 - protein, 413 aa, unidentified
MVDVVYERCCGLDVHKDTVVACLITPGPDGQPQKEIRTFGTMTDGLLELADWLRARQCRRVGLEATGTYWKPIWNLLEEEFDLLLVNARHMKAVPGRKTDVKDCEWLADLLRHGLLRGSFVPDRPQRELRELTRYRTALVQERTAERNRLHKTLEGANRKLGSVASKVLGRSTRQRLDALLAGTTDPAVLADLAQGKLRAKLPQLERALRGTPGLHQHFLLAHQLTHLDFLDEQIAQGSAEIAERLRPFGEALERLDAIPGVGPQTAEVLLAEIGPDMSRFPSAEHLASWAGMCPGNYESAGKRLKGRTRKGSKWLRAALVEAGQAAARKKDTYLAAQYHRLVPRLGKKKAAVALGHSILRTVYYLLRRGTTYAELGADYFDARNRHSVERRAVRRLEKLGDAVTLTPKDPAA

SEQ ID NO: 323302 - protein, 317 aa, unidentified
MTQTSMMTAGIDTSKAKLDIALHGRTERWQVANALPGWRALAASLTKAHVNRVGIEATGGYERGVVEYLRAAGLVVLVLQPIQVRAFGRMHLRRAKNDVLDAVLIAACAAALDQVRIQPDQRLAELAEHLTFLEQIEEDIRRCKTRLEHIDEPKLRRLVLGDIARLKARRLAQIRHLAKQLRSHPDLATRLDLVLSIPGIGERTALALLIRMPELGCVSREEAAALAGLAPFDNDSGQKKGQRRIAGGRARLRRSLFAAALPAAFRWNKALVALYARLTAAGKAHNAALVACARKLLIYANIVVQRGTPWTERPLGA

SEQ ID NO: 323303 - protein, 344 aa, unidentified
MHAVTLGIDIGKRVFHAVGLDELGRVVLREKLTREQLHRLFATHPTCVLAMETCCGAQHLGRIAASHGHDVRLIPAQHVRPFVKSQKNDFNDATALAEVARMPSMRIVPLRSIEQIDVQAFHRARQRLIEQRNGMTSQIRGLLLDRGVPIAQGLYPLRTAVPRILEDAENGLTPSFRQLLASLLAMWRQTEAALEELTEHLKNLSRESEVCRRLQSVPGIGPLVSTALVSAVGNASTFRSARHLSAWIGLVPRQHTTGGKPRLFGITKRGNTHLRRLFVQGARALWVWKDKRDDPLHIWIRGLASRMHPHVAVCALANKLVRICWALLRHEDQVFRHAAAARGV

SEQ ID NO: 323304 - protein, 349 aa, unidentified
MTIVENPTAVITGGVDTHLDFHVAAAIDANGGTLGTETFGVGAAHYEQLRRWLAGFGPIAKIGVEGTGSYGAGLARHLCSAGIDVVEVDRPNRQMRSRQGKSDHVDAVAAARAALSGTATGLPKHRDGNVEAIRVLMIARRSAVDERIQILNQMRHICFCAPDDIRARFDGTTPNALISQTAALRPRNDGDVVRYTTLMTLRELGRRARNLHEENKRHAQLLRPLIRDTAPSLLEVNGVGFDTAAKLLVAAGDNPERLHSEAAWAHLCGVAPIQASSGKTQRHRLHRGGNRQANSALYTIMLSRMRYDPRTRAYIERRQAEGKTTGEICRMLRRYIAREVYKHLPRTTG

SEQ ID NO: 323305 - protein, 392 aa, unidentified
MIFVGIDWSEEFHEVELQAGSGRVLKRLKLRADLAGLTRLQEVITDAAEEPSQVVVAIEASHGLLVNALVASGYRVYDINPLTAARARQGESPAGSKSDAGDAHLLANLVRTKRQDHIRARSHVRAIRHQQRLRNQLRSSLAKFFPGALPLLGDEPEELRDALAVLTLAANPVQARRLSLNKLRASLARHGRQRNLDAKAAQIQEQLRQPQPELSSAKVLSAHSDEVRYLVRSLVQVRSEVALLEEQLAQDFEEHPDAKIILSLPGLGVVLGARVLGESGDDPTCYANAKARKNYAGNAPITRRSGKWEARNRRVARNRWLADATFLWARSALSASPGARRYYDQLRARNKTDNVALRALANRLVGILHGCLRTRYIYDESIAWPGVLEHAA

SEQ ID NO: 323306 - protein, 354 aa, unidentified
MIIIGVDYHPEFQQIASVDTDTGDFQEKRLAHPEEAEKCYRSLAAQGVKVRVGMEASGHARWFERLLAELQFELWIGDAAKIRTKRVRKQKTDRQDAQLILQLLLENRFPKIWVPSWENRDLRQLLWHRHRMVQARTRIMNQLQAVALNEGLHCKKKLWREQGRRQLESFRLAPWASRRRRDLLELLDRLNPTIAELTRAIEHEAEKNPGVQRLRTHPGVGVLTALAFVLIIGQAERFQCGKQVASYLGLVPLEDSSGKRRRLGHITKQGSSILRFLLVEAAQVTVRSLPEWRSKYLHLAMRRGRKIAKVAMARRLAVCLFWMMRKEWDYEQLKKFGSHAGQPENRHGVQSNTE

SEQ ID NO: 323307 - protein, 343 aa, unidentified
MNITTVGLDLAKSVFHVVCFNEHFKEVKKRILRRNQVLQFFTQLPPCRVGMEACASSHYWGRELRALGHDVKLIPPQYVKPYLRGNKNDYNDARAIAEAVTRPSMPFVAIKTVAEQDMQAIHRMRAQCIRDRTALSNSTRGLLGEYGIVLSTGLATLRNSIHGLLEDADNGLSDRFRNLLARRHEQLVELDKHITFYTNELELLSQQDDACQRLQTIPGFGPIVSSAFRCAIGDGRTYAHGRDASASLGLVPRQHSSGGKNVLLGISKRGDRYLRSQLVHGARAVVVQAARKDDPLSRWINRIREERGWNKAVVAMANKMARIGWAILRYNTDYQPVLAPSTR

SEQ ID NO: 323308 - protein, 416 aa, unidentified
MSLTIDEAAFFVGIDWATEIHAVCVQDTGGKQVAAFTVQHTADGLAALMRRLARIGDPTTMPVGIERPDGRLVDALLEAGHPVVPVKPNAIKTWRDGEVLSGAKSDDGDAEVIAEYLRLRHHRLQLATPYTPETKGLRTVTRTRGDLVDLRVATTNQLCALLDLHWPGAKAIFADVESPIALAFLTRYPTARHAAKLNAKQLTAFCAKHSYSGRRTGEQLLTRLRAAPAGTLDETLCKAVHDAVTAMVTVLTAVGTALKALNSSVIATLAEHPDAEIFTSLPRSGQINAAQILAEWGDCRQAYDSPDAVAALAGATPVTKASGKHRAVHFRWACNKRFRVAVTTFADNSRHESDWAAQVYTNARARGHDHPHAIRVLARAWIRVIWRCWNDRVAYDPARHGNAVHLQPVQNELLAA

SEQ ID NO: 323309 - protein, 352 aa, unidentified
MSAATKGHAVITIGIDPHKRSLTAAALDPHSRLLGQLRLPASGQAGRQLLAWAKQWPERRWAVEGASGLGRPIAQRLVAAGEPVVDVPAKLAARARLLGTSSARKTDLADAASVAAAAIHHWQLRPVALEDHTVIFRLLSDRRDDLVAERTRTLSRLHVLLADLQPGGAARELSATRAAALLRRIHAITVVDVERKRIARELLADVRRLDRQVKTASQAIHTAVGEHGTTLTQLYGVGPVLAAKLLGHTGDITRFPDRDHFASYTGTAPVEASSGDVRRHRLNRGGNRQLNTALHLIAVCQIRDLSPGQAFYQRKLAEAKTPEEARRSLKRHLANVVYGHLVTDHRHRTRGC

SEQ ID NO: 323310 - protein, 408 aa, unidentified
MSSDKSQPKRFIGLDLHKYYLVATGVDQDLNKVYGPRRVELIDLEEWIQKTITHEDALVVEATANAFMVYDTLVSHAHSMIVVHPAHLASIVKVPVKTDKKAAYELARLLAKGMLDGIWIPPQDVRDLRVLVSQRRKMINLKTRAKNWLQDILYRYSIPLPEGPLFDTAQRPWWDKLPLSKLEHVRITSNLAALDFAQEQIDLIETHMAAWAAQDERVSRLFELSGIGLVTSVTLLSAIGDITRFSDAEHLVGYAGMGVRVHDSGMTTRTGRITKAGRREMRAVLVEAAQVAVLHDPRWKAELDRLEPRLGRNKAIVAIARKMLVVVWFILHEHAVDNQLNLERLARKYYEFAYSVGKSNWGESGSAVEFIRRQLDQAGVGQEFTSFVYSGKNVQLPPSKQTIAEKRK

SEQ ID NO: 323311 - protein, 355 aa, unidentified
MNDAKYIGMDVHQATISVAVRDSRGNLVMEAILETKAETILQFIRGLRGSLCVTLEEGTWAAWLHDLLQPHVTRVLVCDPRKNALLKVGNKNDRIDARKLSELLYLNKLSPVYHGEPGIRTLKELARSYIAMTRDLTRVMSRLKAIYRSWAIPCAGQQVYAPLYRAEWLAKISEAGVRRRAELYYQQFDALAALRQQARRELLAEARKHPAMRLLRQVPSIGPIRAALLIALMQTPNRFRTKRQLWAYCGLALRTYTSGEYRFVGGQLKRSKKVLAIRGLNINHNHDLKNIFKGAATRTASTVGPFQDFYQACVARGVKPHLARLTLARKIAATTLLVWKKGVRFDAQHLKQQAA

SEQ ID NO: 323312 - protein, 355 aa, unidentified
MNSEKYIGLDVHQATISVAALDSKGKLVMESILETKAATILEFFAGLRGTLSVTFEEGTWAAWLYDVLHPHVANLIVCNPRKNALVKDGSKSDRIDAHKLAELLYLNKLSSVYHGENGVRMLRELARSYLTMVKDLTRVMSRLKAVYRSWAIPCAGRDVYYTRHRAEWLGKIKEAGVRRRAERLYQQLDMLQHLRQQARRELLAESRKHPITARLRQVPSLGPIRSALAVALIQTPHRFRTKRQLWAYSGLALETRTSAEYRYVKGQLHRAKKQISIRGLNKDHNHDLKGLFKGAATRASVLPGPFQDFYQRSLAKGIKPTMARLTLARKIAAITLTLWKKGENFDADKLKSQAA

SEQ ID NO: 323313 - protein, 348 aa, unidentified
MEHICRIGMDTSKHFFQLYGVNAAEEPVLRKKLRRKDMIVFFEKLAPTVVAIEACGGSHHWARLLSSFGHQVKLIAPQLVKPYVKRGKNDAADAEALCEAMSRPTMRFVPVKTAEQQAAVMLVGVRDRLIRNRTQLANSIRGYASEFGLTAAKGMAHLDPLIERIQADESLPDLARELFAAQAKEYEQLQAQIDEVDVKLKAWHHADECGRRLAQIPGVGPIGAALLMMKTPAPEMFRSGRQFAAWIGLTPKDHSTGGKVRLGVITRAGDEALRSVLVVGATALLRFVANGKSKSALSPWLGQLLKRKPAKLVAVALANKLARIAWKLMVTGQSYVRKSTPTTVAGAA

SEQ ID NO: 323314 - protein, 352 aa, unidentified
MTMTTLARQITGGVDTHLDVHVAAALDERGGLLGVESFETTPKGYANLLNWLQDFGTVELLGVEGTGSYGAGLTRHLHSQGVRVVEVDRPNRQRRRRHRKSDPQDAISAARAAQGGDATGEAKTRDGNVEAMRVLRVARASARKGRTQALNQMRSLISTGPDCVRAELRGLNVYRMLVRASSYRPGSKRDLVSINKFTLRMLARRAIELEEEVKEIDAILKVMVAETAPELSALSGVGTDIASALLVAAGDNPERLRNEASFAHLCGTSPIDASSGKNQRHRLNRSGDRQANSALWHIVITRMVSDPRTRHYIERRMKEGQTKKEAIRCLKRYIAREVYNNLPIEHLALDSP

SEQ ID NO: 323315 - protein, 412 aa, unidentified
MRRVIGIDIHRTFGEVVIWENGVLKHEGRVEMTRTALEGFGRKLRQTDEVVIEATANSMAVSRVLSPFVKRVVIANPLQVKAIAHAHVKTDKVDAGTLASLHAAGFLPEIWTPDADTERSRRLVARRYQVVRHRTRIKNEVHAILHAYLIPKCPHSDLFNRRGREWLTRQSLPDDERAAIERHIRELDRLGQDLAVLDRQIAEGALEDVSINRLLTITGVNVTVAAGLMAAIGDIARFKSPQKLVSYFGLNPRVRQSGLGAAHHGRISKIGRSHARAMLVEAAWAAAKASGPLRAFFIRIRARRGHQIAAVAVARKLAVLCWHMLTKEEDYLWARPSLLAHKRRALALQAGKPQKKGNSRGPAYAYNVKQLRNQEMRVAEQAEKGYEHFVETWRPRPPKAQARGRLKPAGSS

SEQ ID NO: 323316 - protein, 449 aa, unidentified
MSRATQKSRGLPIVHDAAAGIDVGARFHVVAVPPECCDQPVQTFQAFTGDIERMADWLNSLHIKTVAMESTGVYWVPVYEILERHGIEVIVANAREARAVPGRKTDVNDAQWIQRLHACGLLRASFRPGRQIAALRAYLRLRERHVDYASSHVQHMQKALTLMNLQLHHVVSDLTGLTGLKIVRAIVAGERDPQTLAAMRDRRCKASVQTICAALSGNYQPEHLFALTQALALYDFYQDRIAECDSQIERAVAALNASKQVPLAPLPKPRHNREHANAVNFDTRPALYQLTGVDLTQIHGIGPYLALRLVAECGTDLSRWKTAKHFTSWLTLSPGSKISGGKVLSAHTRKTANRVVAHLRLAAVAVGRTSTALGAFYRRLAARIGKAKAVTATARKIAVLFYNAMRFGMDYKDPGADQYEQRYRERVIKQLHRRAAEFGFTLMATERVS

SEQ ID NO: 323317 - protein, 395 aa, unidentified
MSAEGEAIRSNDYRKDTTVKAPSTRPTAVLGLDVGKSSHWACLIDRDGEVLASAPVRNREAELDALFASAPAGTLVVVDQFRNIGSLAVRRARAAGLGVAYLPGLAASRAAGLFAGEAKTDERDAAVIARTALGVPDSLSGVPGRGEALEAARALSSQRDHVVACATRDKNRLRAVLLESCPALEAAVDLSDRRWLELLAGFGGAWGIARSGAEGPRAEVAGEAAAASTAPPPALVEAENRQVRFLAARILEALDEAGALEAETAALLEGDETYACLLTVPGIGPRTAAQLAVSVDIGRFPDHDHLASYCGIAPRVRSSGTSVRSVRASRRGDARLKSLLIFSCNSLVRSSGRYGEYYRACRARGMGHGRALKAVARKRLRAIYAVMRDRVPYRE

SEQ ID NO: 323318 - protein, 394 aa, unidentified
MTFVGIDIGAEAHAAAAVNDQGSTVCKPFRFTADQAGHAALFTELERLAPVQLVVLEATGHYWKNLAAALVARDLPVAILNPLQSARFQQEALVRTKTDALDALGLARLGQQKRPAPATLPDHATEQLRELIRHRDRLVQDCGDRVRQLHRLLDLTFPEFKQHVALLDTALALTILKAFPTAADIAAATPRRLAKLRHGPRHFVGDPLARQLIAAAKQTVAAQSGDVYRVRIRHACEDLALWRARLLTIDTMIETLLEDHQVARLLTSIEGIGTTMAARLVAELDDPARFRSPEALASYIGLVPALKHSGKQTPKRAGLSPIGKAALRRALWMPTVHAVHASPWLRVFYEGLRARGKPGKVALIAAMRKLMVAIWTVAKQRRTWSPSPPQETTA

SEQ ID NO: 323319 - protein, 335 aa, unidentified
MKITKQSVGIDVSKDSLEIKFKEKSTKGIKIKGSSKFDNTSTGFNNLLEWCTKREKVENVVYVLEATGVYHEDVLYFLFDQGKKVSVELPQRIKYFAKSKGVKTKNDLIDSGVIADYGLERVLKVWQPPGKEFKTLRDLSREHNTLTNSKSVVKNRLHAAKHSHDKNTRVIERLQSTIKFYTNQLSEIEKDIKTTVNADKELSGKIKKITIIKGVAVMTVIKVIAETGGFYLFQNINQLISYAGLDVVENQSGNHNGKTWISKKGNADLRTALYMPALSAIRFNEKMKSFNERIMETHHYKKQGIIAVMRKLLILIYTLWKKNEEFNPDYKWGQA

SEQ ID NO: 323320 - protein, 306 aa, unidentified
MLDTTTFIGLDVHARSIKAVSLDVMTGEVRAATFGYDAGAVAEWVRSMDPRARCVYESGVTGFDLQKRLSGLGVDCVVGAVSKMIKPSADRRRKNDRNDAEFLARMLSVGNVVEVWVPDDECEAARDLTRALEDARDDLSRSKQRLSKFLLRHGLVFDERTPTGRRKGNWTRAHWSWIESIRFAERADNDVLAYYVDAVRRAAEEKARLEGLVEAEARKPRWRKRVDSLRCLKGVDTASAADLVFEAGEFSRFRNARSFAAWVGLTPSEHSSGESDRRGAITKAGNKHLRKTLVEAAWHYLMLALL

SEQ ID NO: 323321 - protein, 317 aa, unidentified
MSVTSEVFVGIDVSKAELEVSWLPQVGRLQVAREEAGLVQLVERLKALGPALVVLEASGGYEMPVVMALAGAGLPCVVVNARQVRDFAKASGKLAKTDRIDAQVIAEFAQAIRPEVRALPDAAAAHLIALVTRRRQLVEMLTAEQNRLALSHAIVREDLKQNIAWLKSRLQDLDGELARAVRESPLWREHDKLLQQVPGVGRVVSAVLLALLPELGRLSPKKIAALVGVCPFNRDSGRWHGKRSIFGGRAGVRTVLYMAIVSAIRWNPLIKAFYQRLLAAGKPKKLAMTACMRKLLVILNAMMRDRTNWNPNGALAS

SEQ ID NO: 323322 - protein, 346 aa, unidentified
MNHFAGLDVSLEWTSVCVVDAEGGIVREAKVTSEPAALAAFFTGLDFGVTRICLEAGPLSQWLHDGLAEAGLPVVCAETRQLKAVLSATVNKSDRDDARGIAQLVRANLIRPVHVKTVSSQEKRMLLANRRFMLKQLCDAEAHIRGTLRNFGLKMGKVTRRGLEARVGCLVAERPELARLVAPMLRARSALLAEYVRLHRMMLEAARADPVCRRLMTVPGVGPVTALTFRASVDVPSRFARSRSVGAHFGLAPRKWQSGEVDRTGRISRCGDAMMRTALYEAANTLLARTTRWSWLKAWAMGVAKRRGKARAKVALARRLGVIMHRIWVDGSEFRWKRDGVDDVAA

SEQ ID NO: 323323 - protein, 343 aa, unidentified
MQTITTIGLDIAKSVFQVHGVDADGKVVLRRQLKRRYVLAFFQKLPPCLVGIEACASSHHWSRELQALGHTVRLMPPAYVKPYVKRQKNDAADAEAICEAVTRPNMRFVPTKTPEQQSCLTLHRTRHLFIRQQTAVINSIRAYLAEFGIVAPVGRNGVERLLEVVADVNDTRLPEIARACVAALGTQLLALKAQILAFDRRIMAWHRSNETSKRLDAIPGVGPALATALVASIADPKAFRSGRDFSAWIGLVPKQNSSGGKDKLGSISKQGDRYLRSLFTTGALAVIRYAKLHGTKHRPWLTALLARRPTKVAAIALANKIARMVWAMMVRGERYKEPVALAA

SEQ ID NO: 323324 - protein, 347 aa, unidentified
MKQYAGIDVSLESSSVCVVDTEGRIVLEAKVLSEPEALIAWFAEHGAPMERIGLEAGPLSQWLYAAMAQAGLAVELLETRHVRTAFKTMPVKTDKKDARGIAQLMRLGWFRPVHCKSLPAQEVRAVLTARKLLQGKLHDVEMSIRGILRGFGLKVGATTPRTYEGRVRTLVEGHPTLEAIAQALLNARGIIADELRGFERRVRAMARHDERARRLMTTPGVGVLVALTFVSAIDQTERFRSSRMVGAHFGLTPKKYQSGETDRSGRISKIGDVGVRTALYEAANVILTHPVRGSDLKTWALGVAKRAGPRKAKVALARKLAVVMHRMLRDQSDFVANHKIAPIMAVI

SEQ ID NO: 323325 - protein, 342 aa, unidentified
MSRHIGVDLHRNCFTACVRLESGRQYVSTWKLEGLGRFVSRLRGTDEVAVEVTGNTRLFYDAVKPQVKRLVVVDPRQFEVIRRSVKKTDAHDARALALFLSKDMLPEVRMKDAAHAEMASLVQTRDTLVKSRTALKNKINNLLSARGVNLSKESLASEKGLEAVVGLYFGSCVDLELQVLVEQIRSLNQGIGRIERAIREQGPKLPGHEHLKSIKGIGDVGAGVLLSVIGDVNDFADEGKLAAYFGIVPRISNSNETEHSGRITKRGSKLGRTVLIQCALVAKRYSEYLQRYYARIQARRGTGKAIVALARKFLGIIYLTLKDHLIWEDFPNGVVCSAEGTA

SEQ ID NO: 323326 - protein, 363 aa, unidentified
MLKTTKSFRTQSQEAPMFYSGIDLHKDNCFITTINDVGDVVKQERVPNIPEAVLGYFGSLGGTHKTVVESTISWYWLSDLLEDHGIELMMAHAKYLKAISYAKVKTDKVDSHTLATLLRMNLIPQAHKISRELRDIRDVMRARLRYVQKRTRCIVAIHTIGRKFNCDDQIAIDRQTIPSQLPEAYRLQLQMLFRQISLLTEQILSLEKFLHPVLIPNDDIQRLLLVPGIGKTTAFTIYLEIDGIQRFPSDKHFVSYCRLVPGAKNSNKTLAHRSGCKDGNKYLKIAFSDAAVRALQYYAEIKAFYRKKVRRSNEPIARTLVAKELARIVYYVLKNKTDYRGFKGQPISRVKSMQWPRLRNPDA

SEQ ID NO: 323327 - protein, 339 aa, unidentified
MPFLGGENISLIGVDIHKKYCLGIIEGNNTETKLRFPNTRNGWKAFLKNEEHIDKVIIEAGSVSEKTLRYLEDLNVPVKMANPRKARLIAEATIKTDELDAKRLIDLEKVGLLPESWIPSREIRDIRHLCRYRYFLVQIRTKIKNRIHYELEREDINVKTLTYKYLETVKEKTIMIDQLYRLLREINEKIREVEKEIEREYSNNEYSKIIDTIPGISKYGSLLLSMEIGDINRFSNSKKLASYAGLVPREYQSGTREWKGHITKEGNKWIRWILDECLAIHINVCPESPISIYYKSLVPIKGNGKAKIAAERRLLSVIYVMLKEKITFDQYIKMMNRAI

SEQ ID NO: 323328 - protein, 412 aa, unidentified
MRVIGMDIHRVFAEAVALLDGKTTRLGRVDMRRDRLEEFARTALTHDDHVVVEATGNAAAVAEVLAPHVGRVVIANPKQVRLIAHAKIKTDGIDAAVLAKLYASGFLPEVWVPDERTGALRRQVSRRTQLVRQRTRIKNIVQSILHAHLVPPCPHADLFGARGRAWLAAQALPEDERLAVERHVRTLDGMLADLRAVERDIARHALDDGAVRRLMTIPGIDMVVGVGLAAAIGDVARFASAEKLVAYLGLNPSVRQSGEGPARHGRIAKQGRGHARGMLVEAAWAAARSPGPFRAFFRRISARRGQHVAAVATARKLAVLAWRLLTRGEDYAWARPALQARKQRSLELRAGQPPRRAQRGAAYDYNIKGIRERERRPAEGAEAAYRRLTDRWIQAGPRRRARTGAAKEERPS

SEQ ID NO: 323329 - protein, 342 aa, unidentified
MQITTIGLDIAKNVFQVHGIDATEKVVVRKQLRRGQVMKFFAALPPCLVGMEACATAHYWARELTKLGHEVRLMPAKDVKAYVKRNKNDAADAEAICEAVRRPTMRFVRAKSAEQQGRLMQHRTRDLLLRQQTQVINALRAHLAELGIVAAQGREGLKQLLAIIADQADARLPLDARASLIVLAAQLQALHTLIKSIEKRLLVQHRANEASKRLESIPGIGIIGASAIAATVTDPKAFQSGRDFAAWIGLVPRQDSTGGKQKLGPISKQGDRYLRRILVVGAHAVLRWAKQNPGKYPWLTQLLARRPFKVVAIALANKMARVAWALLASGAKYRAPRLAAAA

SEQ ID NO: 323330 - protein, 379 aa, unidentified
MDCTSTAAPAGSILHCALELSKNTWLLGIQFSDRPQPSLYPIRGGNTEDLMAKLTAARDRCAKLSGRTPSIVLCYEAGYDAFWLARFLKARGFECLVIDSASMQVNRRARRSKTDRIDVGKLLRGLIAWHRGDRQVWSVVRIPSVDEEDLRRSHRERDYLVHERTAHINRIKGLLFAQGIRGINVKRQYKTLHVDKLVTGDGHPIPPRLASEIVREIARLALLQEQIATLERERDEAPTPCTATEKKRAQLMFLNGIGPAISAVMTREVYYRQFDNRRQVAGFLGLAPSPYDSGEVERSQGISRAGRGQVRGTMMQAAWLWIKHQPKSTLTRWFLERTTGQGGRIKRIMIVAVARKLAIALWRFLEHGLVPQGAIMRSK

SEQ ID NO: 323331 - protein, 407 aa, unidentified
MGIDIAKRTHYACIVDDRGRVLQKSFSVPQAGNGFELFYQRVLAAMKEHEKSEVIVGIEPTGHYWLNLAYFLEERGIPLVMVNPMHVKRSKELDDNLPTKHDRKDALVIARLVKDGRFSYPRILKGMEAELRVGSTFRSKLTEELGAVKNMIIRWLDRYFPEFVQVFPSFGKMALAALECTPFPSDLYQKQPDEVLSLFRKVEGLKSPQRPKTVRLIEVAAGSIGVTEGLEMARIEIATLVRRYHQLEQDIESITGQLIELVKTSVEYEWLSTVPGLGDTTIVDLLAEIGSFSHYQDPRQLIKLAGLTLRENSSGLHKGQKRISKRGRRKLRALLFRVMMPMIRHNEAFRKLHEYYTNRQVNPLRKKQSIVVLCGKLLKVLHGISTKHKPFDAQRMMRDIPGLAEAE

SEQ ID NO: 323332 - protein, 351 aa, unidentified
MDIIGLDLHQRESQLCICDADGTITERRIVTSRERFTAVLGDRPRAKILLEASTESEWVARHLESLGHEVLVADPNYAPMYATRSRRTKTDRRDARTLMDACQTGAYRLAHRLSDPRRHVRAELAVRDALVRTRTRYVALAKTLVRRDGLRVTSSESHLVAQRIGALSLSPALEAELQPLFTVLAPLNEQIAAADRRVATLAATDPVVARLATAPAIGPVTASAVVATIDDIARFRSAHQFEAYLGLVPGERSSGEKRHVGPITKAGNSRVRWLLVEAAWRLLRTKSPEAAALRTWAHGVAGRRGKKIAVVALARRLAGVLYAMWRDGVSYDASRIRGPRIAAAEVTARAG

SEQ ID NO: 323333 - protein, 424 aa, unidentified
MVRAIGMDVHRDFCEVAIAEAGTVGSAGRIATRPAALELFAASLAPSDVVALEVTGNAGEIARILEPHVARVVVVSPHDTGISRARAKTDRLDARALAKLLAAGELDAVWMPDEWTRAMRRRLARRDQLVRARTRAKNEIHAVLIRRLQGRPPVTDVFGVRGRRWLSELELPEDERETIAGCLRHVDFLDAEVAALDRAIASEALRHPDVLRLMTVPGVSVITASTFIAAIGDIRRFPSARKLIGYLGLDPRVRQSGPGPARHGRITKQGSASVRHVLVEAAWVTVRAPGPMRAFYERVRARRGAQVAAVATARKLASLFWCLLTREQDYAFGQPSLTRRKVRKLELAAGAPSRKGQVRAGDGLRNKQIRDAERALAAQAEDAYRRTIADWKATSPQKAGASVTPGRASHRPSKGKAARQTTSP

SEQ ID NO: 323334 - protein, 355 aa, unidentified
MSIVGGVDIHRKQLTFDYVEQETGQWERGRIAPADRQHLAGWLTRFEGVEDVQFAMEGCTGWRYVAEEMRAAGVVPHLAEPAETSTLRGRKRRAKTDRADSKLLRELLAAGRLPACYIPPSAVLEWRAMLELYHDLRSEHTGWAQRIHATCFHHGATALGEAGVIRGDRQHLAQIVEEQLSPVGRLQVNTALAVLEALDEHVDRLRKRLLATARHVHGARVLMHEIYGVGAMTSLALCAWLGGADRFSSSRRAVRFVGLDITVHSSDNKRSPGRLSRQGPEVLRWLLFEAAKTSARSAAPGYGYYAAVRERIDANRACLPQARRIVRHSVHLLAELGDEAFTIVAQPAAPSIIAR

SEQ ID NO: 323335 - protein, 366 aa, unidentified
MKKDSIRIKNGKGDWEGKKLTIGMDLGDRTSRYCVLGEEGELLLEDSVATTHKGLSEAFSALPPSRMAIETGQHSPWVSRHLSGLGHEVIVAHARNVRLIGESTRKDDRLDAKTLARLARIDPALLSPVRHRSAEAQAHLTRIRARAVLVGARTALVNAIRGLTKAYGERLRKCHPEQIRKELAAELSPELRTALEPLFQEVQSLTERIRHYDHEIEKIAQQHYPEVAQLQQVNGVGTLIALTYVLTVDDPHRFRRSRDLGCYIGLRPGRRNSGNSQPQLRISKEGNRYLRTLMVQGAHYILGPFGKDSDLRRWGLKLAERGGRNAKKRAVVAVARKLAVLLHKLWVSGEVYEPLRNHREEKCAAA

SEQ ID NO: 323336 - protein, 318 aa, unidentified
MAEITNPTNIGIDVSKDWLDIVVTPSGETWRTQNIEEKMDVLVEKLETLKPERIVIEATGGYERLVTTKLYLARLPVCRVNPKRVRYFARSIGQLAKTDKLDAKILARFGELIKPALTQLPSEQEQLLSALLSRREQLLAILVAEKNRLGTAPAELKPSLNEHVTWLKKQLKELDKKADAFINDTPDLKEKDDFLQEVQGIGKKTSAKLIADVPELGSCDRKQIAALIGVAPYSQDSGNKKGQRAISGGRPDVRSILYMATLAATRFNPVIKPFYQRLLNAGKKKKVAIVACMRKLLTILNAMLRDRKHWISDPTALS

SEQ ID NO: 323337 - protein, 404 aa, unidentified
MNNVAGVDVSKGKSMVSVLRPFGEVVAKPFSVGHTGSELKELANYLKSLDGETRVVMEHTGRYYEPVARFLHEEGIFVSAVNPKLIKDYGNNTLRKVKTDKADARKIARYGLDNWVELRQHTPMDTIRMQLKTLNRQQSLYSKTKTMMKNNLIALLDQTYPGVNNLFDSPVREDGSQKWVDFATAFWHVDCVRNMSLVAFTERYQKWCKRHGYNFSQSRVVEIHARAQDLIAMLPKDALTKTVVRQAIDALNAVSASLERLKAEMRTLAAQLPEYPVVMAMRGVGDSLGPQLMAEIGDVTRFTHRNSITAFAGVDPGADQSGTHEAKSTRASKSGPPELRKALFLVMDCLLKTMPQDDPVYCFMDKKRAEGKPYLVYMTAGANKFLRIYYGRVKEYLASLEDTD

SEQ ID NO: 323338 - protein, 344 aa, unidentified
MSNLDTCGIEVSAKELVVMLRRQGDLEPLRSFPNTPEGHLMIVRYLRRAGRVVRVCMESTGLYGLDLALALSGQEGIEVMVANPRAVRHFAHALMKRSKDDQIDAAVLEQFAVHMPFKPWQRPSVAVLALHALARRLRELVEMQTAEKNRQHAAGLSKAIPAVVKRDLARSLRAQERAIERLTRQARKLIAQDPHLTEGFELLDSVPGIGETSAVQLLGELGVLAPDLEARQWVAYAGLDPRHYTSGTSVHKKPRISKAGNKHLRHALFMPALVAVQHDPHLRAFYQHLLAKGKFKMQALVAVMRKLLHALHAMFKNHQPYDGSKLFRIPSIPTQEVLRAPVSA

SEQ ID NO: 323339 - protein, 354 aa, unidentified
MTNQHDQPTQTFASIGIDIGKDVFHIVGFDTSGKVVLRKKFKRLALEAELARLPPSIVGLEACLSAHFVSRTLRRLGHQPRIIPAIYVKPFAKGQKNDYNDAEAIAEAALRPNLRVVQEKTQDQLDLQALHRVRARLVSRRTATINQIRAFLIEHGIAVRTGAHALRNSLFAILEKRADELSPRMSDLIVGLYEDWLWLDERIETLTGEIEQISHREANCKRLMSIPGVGPMISTAVVAAIGTGEAFERGRDFGAWLGLVPRQYSTGGKSILGRISKRGSRYLRTLFIQAANVILMRPQNWEQFSFGAWLKAAQPRLHRNKLATALANKLARIAWSVLRHNTSFDAHRVEVAAI

SEQ ID NO: 323340 - protein, 348 aa, unidentified
MHIAVLGIDLGKNSCSVAGLDASGRVVLRRRLHRDSVVKLASRLPACVIAMEACCGAHHLGRLLQAYGHVIRLMSPEYVQPYVKAQKNDERDAEAIAEAATRPTMRFVDVKSEDQLDMQTLHRARSRLVGQRTALINQLRAMLLERGIAVAQGRHRLARYLAQALDDGNAEPVPLSLRIRLLIEDMRAQWSELDRRIASFDAEFVAATRSDEAARRLSTIPGIGALNATALVAAVGDARSFARARDLAAWLGLVPRQATTGGRPRLLGITKRGNKYLRTLLIHGARAALPSLATTEGVLGNWLRGLSARAHRNTVIVALANKLARIAWAVLRSTAIYSARISDRPTAV

SEQ ID NO: 323341 - protein, 460 aa, unidentified
MTLLAQLGSQLPQRYYLSLDIGYKEHVAVVIDLQTFVRGDDRWKRARCLHFPSTRVGLKKFQKYVDRFCPDPAAFLGLCEPTGGFYGATVLQYLLDGGYQMLLVENATTRHMREKIFPNLPKTDEMDARVMARIGYLHEAVGEEFTLRPLELPDPDDADLMALCRDSWKLSTLITRARNQFTQLIAVTFPELKTFFTSSVSTVVPVSLITAYPTPALLAEAPAEEVHQVLWEARDYQHARRVDGLQALARNSSGLLPDPGRVWRLNWLTCFLLTNSRHQAALDKRIKELLEQREDYELIVHVPYSGPATLGVILAVTGDVGRFSNYRQYVAYTGYFAGLEKSQTIDRTRMSKRGNRDLKRALFQIAAPLVWFDQGDNPYKALYERKMAEGRAWYEAMPFVCAALARHIYHCLKFKDPYDVERAFRGSSPIPASEQALVDLRADLDERFEVMDVHLCQIEG

SEQ ID NO: 323342 - protein, 367 aa, unidentified
MDHFAGLDVSVKETSVCIVDDTGKIVREVKVASEPEALLKVLRSPSHQFKRVGLEAGPLSQWLYSALAEAGLSVICVETRHMRAGLKAQINKTDRNDARGMAQMMRVGLYRPVHVKTLRSQKLRMLLTHRKLLQSKAIAVDNDLRGTLRNFGLKVGMVGATRFEARVKELIENFSDLAVLVEPLLVVRRVLREQLGILHRRLLTVVRDDDVCRRLMTVPGVGPVVALTYRATIDVPARFRKSKAVGAVFGLTSAKYQSGEIDRSGAISRCGDEMMRTMLYEAAQSMLFHSIRWSWLKAWAMKIARHRGMKKAVVALARRLAVIMHRIYGPAVRCKGIRTEWSFWSALIYPASRRSSCSGPSWLSAHT

SEQ ID NO: 323343 - protein, 310 aa, unidentified
MIIHPGYIGIDIAKAHLDIFDASLGRLQRCANAAGDIARLVRRWKRKPTFVLFEATGHYDAQLRHMLARAQIPFARINPARARDFARAAGFLAKTDAIDARMLAAMAQCLRPHPAQAADGEREKLARLHKRRDQLVAMRQQERTRASECAWPDGNADISRHLAWLDHEIQAVDARIDSLIAAAAHLAAAGSLMRSVPGVGPVTATVLLALLPELGARSPKTIAALAGLAPFNVDSGQWRGQRHITGGRKRVRDALYMAAVAATRSKSRFATFYRALRHAGKPAKLALIALARKILTTLNAILRDQTPFHA

SEQ ID NO: 323344 - protein, 350 aa, unidentified
MLAELVDHVVGVDPDRDWITLAVLDAHSTGVIAEDRFPATRDGYDDAIAFVDGHSVDSERAWVIEGSAGYGRGLAVALERHGEWVIEFDRPTRKSKDGAKSDALDAVRAAREMLGRKRLSIPRAHDGVREAIRVHAVTRAAAVRARTAAINELKALIVTADETLRSELRGLRTTGQVATCAKFRDRPCSSVHERVTRTSMRSLARRVQLLDTEIDEHDLALKQLLDQAAPQLLAEHGVGYITAAQFYIAWSHPGRCHSEAAFARLGGTSPVPATSGQNQTRHRLNRGGDRQLNRALYLVAVTKRRCDPNTKSYIARRVAEGKTEREAIRCIKRFLARRVWRLLEHPPIHA

SEQ ID NO: 323345 - protein, 394 aa, unidentified
MHGPVPAGANDLGKAAGIITAGVDGPREDIDVLLSGSCKHQKEPSTMTIAMIGLDTAKTVFQVHGIDKSGRAVLRRKLHRSELVRFFEQQPQCTVFLEACGAGHYWGRLLSGFGYEVKLIAPEAVRPFVKRGRKNDAADAAALCVAGTRPETRFVPIKSVEQQAVLALHAARSLLVKQATMLANALRGLAAEFGLTVPKGLHKLEELMTLVSAEESIPAAGRQAMAELYAQGQAVAERLATLEAKIASHARQDATARRLATIPGIGPITASLIAATVGDNISAFKSARHFAAWLGLVPRQHSTGGKTRLGRITKAGNTEIRRLLVLGATSMVWRAAHWNSKAGLWVQGVLARRPARLVTVALANKMARIAWALMTRKQVYQAQGHAQAAAEAAA

SEQ ID NO: 323346 - protein, 360 aa, unidentified
MDKHKYVALDVDSANIVVGVYDRQGEALMQCYLRNNGQVISEFFKTMTGVVHVTFEEGTQAIWLYELIRPLVAEVIVCNPRENKLLQAGNKSDRIDVAKLGKLLRLGELRPVYQGPSAAQGLKQLVHGYQALVDDTTRVKNRLKALYRGRGLSCKGELIYGREQRQQWLGQLETKEMQSRAASLYEELDCVLRLRAEAEKVMCRAARKHEAYKWISSAPGLGAIRTAQILATAITPHRFRGKRQFWPYCGLAVVTRSSSDYEWVDGGARRKRKPIQTRGLNQNYNRTMKAVFKGAAISALQQHPEFQEYYQRLCAQGTRPEMARLTVARKLAAIVLILWKKGELYNSERLNQAAPDAGQQ

SEQ ID NO: 323347 - protein, 383 aa, unidentified
MSKSSNLYVGMDVHKETIDIALAEGDGRQEVRHYGSIGGDLVVLDQAVRKLQATGKTLHFVYEAGPCGYVIYRHLAGKGLDCVVVAPSMIPKRSGDRVKTDRRDAEMLARLHRAGELSAVYVPHPEDEAVRDLTRAREDAKEAQTRARHQLKAFLLRSGIRYAGKTAWTPAHVRWIARIKLDQPVQQIVFQEYVNAVTAASERLERVEGNLRDAVVEWRRKPLVEALQALRGVQLVVAATLAAEIGQIERFDNPRQLMAYLGLVPSEYSSGPSTRRGSITKCGNTHARRVLTEAAWAYRQPARITPIIARRQDKLAKNIRNIAWKAQVRLCKRYRTLRAKGKEHNKVITAIARELSGFVWAIAREVSAVAPQHGLSTGAALRA

SEQ ID NO: 323348 - protein, 398 aa, unidentified
MTESSDYESVQVFIGVDVGKDTHHAVAINRSGKRLFDKALPNDENKLRSLISDLKQHGQILLVVDQPATIGALPVAVARSEGVLIGYLPGLAMRRIADLHAGKAKTDARDAAIIAEAARTLPHALRTLKLADEQIAELSMLCGFDDDLAAQTTQASNRIRGLLPQIHPALERVLGPRLEHPAVLDLLQRYPSPEKLASLGEKKLAAQLCKLAPRLGKRLAADIAQALAEQTVVVPGTNAAAVVLPRLALQLITLRKQRDEVALEVEQRVLAHPLYPVLTSMPGVGVRTAARLLTEVACRAFASAAHLAAYAGLAPVTRRSGSSIRGEHPSRRGNKALKRALFLSAFAALRDPLSRAYYTRKMSQGKRHNQALIALARRRCDVLFAMMRDGTFYTPQGS

SEQ ID NO: 323349 - protein, 413 aa, unidentified
MDVLVDVCAGLDVHKDQITACVRRWATSGRKRRSDVRTFSTMLADLRELRAWFENCGVAVVGMEATGVYWKPVWYELEDAERFELKLLNPAHVKAVSGRKTDVRDAVWLARLVECDMVDASFVPPREIRELRDVTRYRRRILEERSREVQRLQKLLEDAQVKLGSVVSDINGVSARLILDALCNGERDPDVLADLAKRKLRAKIPQLREAVPGRFSEHHALLVRELLAHIDYLTGIEARLDARVDELIAPFRWARDLLVTIPGIKGRNAEIIIAEIGVDMSLFPSPAHLASWAGMCPGNNESAGKHRSGKTRHGNPWLQSALVEAGWSASRTHNTSMRARFYRIAKRRGYERAVYAVAHHLLVVIWWMLHDRVPYREMGDDYQQRPDNPDRRRRHLIRQLEQLGLDVTVQPAA

SEQ ID NO: 323350 - protein, 338 aa, unidentified
MYYTGIDLHKKTSYITTVDEMGRIVAKANLVNHEDIIIKDFKELKEKTKIVIESMSSWYWLHDLLIENGFEVVISNPLKTKAIASAKIKNDKLDSHMLAQLLRSGLISTVHVSSLETRKLKELLRHRNRLVRDATRVKNRIHVLLRKNNFQAPFSDLFGAQGLKYLLGVALPDYQRAQVDTYLRLYGHLVQSIEPLTESIHALAKGDPTARLLMTIPGIGPIVAMFIIAEVEDISRFPSYRNLASYAGLVPSLDSSAGKDRRGRITKQGSVYLRTALIEAAQVIPRMKTCRLNLFFRKRIVRSGYQKAVVATAHKILQHAFYILKNKTSYQEEYPICA

SEQ ID NO: 323351 - protein, 282 aa, unidentified
MMVIGIDPHKSTHTATAVDPQTNQAIGSVRIQARLADYRKMLTWARQFDERHWAVENAEGLGRHLSSWLLARGEQVLDVPTTATARVRQLSRGGGRKNDQIDAAAAACVAALQGEGRALEAEDATDALALLDESRMNLTQSRVRLVNQLHALLRALLAGGAPTDLTAATASALLSSVRPKGEAERARKAVARELIAEIRSLDDRLKSSRKAIAAQVENSESSLTEIVGIGPIIAGRIIARTGTPSRFPNSGSYANYVVVQPRSRSPAPTTLAIVCPGPGIGN

SEQ ID NO: 323352 - protein, 354 aa, unidentified
MNSIKYVGLDVHRDTISVAVLNAEGKLVMQSVIATQATAILDFHGLRGTLHVTFEEGTHSAWLYDLLVRRVAHLVVCNPRKNALLKTGSKSDAIDARKLAELLRAGLLSPVYHGQNSTAAVKHLGRSYAALTEDTTRIMGRLKALYRSQAIACAGSKVFGSRHREEWLAQLTDSGLQRRARRLYQELDLLQQLRREAKRELIAECRKHSEAKLLRTVPWLGPIRAALLLGRVQTPHRFRSKRQFWAYCGLALETRSSADYRFVDGQLTRRKKPVFIRGLNRNHNHDLKNLFKSAATAAGGSEGAFGEFYENLLQKGMRPEMARLTLARKIAAITLHVWKKGEAFDAEYMKSQAA

SEQ ID NO: 323353 - protein, 418 aa, unidentified
MAEVTFPQLIQRACGIDVHLKVVVATIDGAGIQRETRSFKTFTSSLNELKEWLLSNGVTHVGMESTGVYWKPVYKVLEDSIPNVWIVNARHIKNVPGHKTDKMDSEWICKLLLAGLLKPSYIPPKEQRQLRDLTRYRNKLIQQIASEKNRMMRILEDCNIKLSSVVSNTSGTTATSLIDMLCEGKVLTLDDINSVYHGKLSASPEELLEACTGFVEEHHIYLLQMIRKDIDQTQTLVDDLSERIKRLLSKYENVLELLREIPGFSTKVVEDLVSEIGLDMSHFPSEKHLSSWAGLSPGNNESAGKKKSARITHGNKQVKAVITEAAWAATRTKNTFFSERYHRIAARRGKKRALIAVGHSQLISVYLILSTGSRYHELGAQYMQSKIEQKRKVYLSSELKKLGYNVSLTKVPQAVTLN

SEQ ID NO: 323354 - protein, 484 aa, unidentified
MEQKYRRCCGIDVHKKSVTVCVLAPAGKPEAEIRKRTFRTFTRDLKQLRAWLKNCKVTEIAMESTGQYWRAVWNILEDHFEKLILVNPQHIKGLNGHKTDPKDAQWIAGLLDSGKLKGSWVPPRPIRELRDLTRQRVHLLEDLNRIKNRIEQLCQTGNIKVSSVATDLFGVSGRKMLHAIVEAKHDAGWIADYARSSLRSKKRELELALEGSFTENQRWLLDKELRQLEWLEIQVQVLEQEIERRVVGFEEPMRRLMTIPGVDRKTAWMIVAEIGVEMEVYGDARHLASWAGLCPGNRESGGKRMSGRTRKANRYVRRAMCQAAWAATRTKKTYLSAFFRRIQLRKGAPKAVMALAHHMIVIVYNVLARKEEYVELGADYYDQRNKPKTVSRLVARLMKLGYHVDLKPVEPDLPIEPDLPNGVAPPDGVAPPAPVVAKPATNAVESNRQSDTAVVRTRKRGRPCKCAERGRICTHTEPLFRSTH

SEQ ID NO: 323355 - protein, 320 aa, unidentified
MQTPSALLNIGADVAKHTIVVACSEGGFPVREMANQRAAVLAFLKSLPAGSRIGVESTGTYHELFAEAAHRLGFLVFVLNPKDTRHYAKAVGLRGKTDRVDAELIARMVAHEHTKLHAWTPPTAQQREIDRLIKRRATLIGLREAVEMSLHELGGFADELKALRSRFNQLIARLDLRAKALVEANPERKQNFARLCTISGVGPVVGTALVNTLERVPVKSADAFIAFTGLDPRPDDSGQHRGKRRLSKRGPAELRRLLYLAALSAVKTKPWSSLYEHYRARGLSSTAALVILARRIARTAWSIYTYKTEFDPARLTRSLT

SEQ ID NO: 323356 - protein, 344 aa, unidentified
MEHYAGLDVSLELSSVCIVDERGTIISEVKVASEPEALIRFLRTQEVKIGRVGLEAGPLSQWLHAGLADAGFEAVLLETRHVKAALSAMTVKTDRRDARGIAQLLRLGWYRPVHAKSASAQEVRALLTARKLIQAKLLDIESGIRGVLRGFGLKVGPISRGRFEARTLELVDGHATLEEVIGAMLSARAALETEFKRLHRALLALVRDDPVCRQLMSVPGVGAIVAITFKSGVDDPSRFRRSRDVGPHFGLTPRKYQSGELDVTGSISKVGDRMVRTALYEAASVMLTRSVRFSALKAWAMAVAKRRGTKKARVALARKLAVILHRMWSDGTSFRWTNEETAIA

SEQ ID NO: 323357 - protein, 366 aa, unidentified
MFKDSTTYIGVDLGDKQSHVVILDSNGEMIEEARLPTTRSAFQRKFSSLPGCRVAMEVGAHSRWASHLLEDLGHDVLVANARKLRAIYSNPRKGDRADAETLARLGRLDPELLSPIHHRSPPAQADLAVLRSRDAVVRSRSLLINHARSVVKSCGARLPSCSADSFAHKVAPDIPESLRPALAPILDTIACLTQQIRAYDRTIETLCSERYPETQQLRRISGVGPLTSLAFILTLENPDRFRKSREVGPALGLVPRRDQSGDKDPQLRITKTGDPYLRRLLVGSAQYILGPFGPDCDLRRWGLKLAERGGKNAKKRAVIAVASLSWPGQGKLAVLLHYLWKTGEIYDPIYLARKHDPALEAIAAVA

SEQ ID NO: 323358 - protein, 386 aa, unidentified
MPRLNDLSRSLVTLEQDATLIAVIEMSLTSWLVAGIVPGVERQPLKKLGVDERALLKLLHRWREEAEKAGHRIKRIAVAFEAGRDGFWLARWLRAYGIEARVIHASSVAVSREHRRAKTDRLDTELLKRAFLGWLRGERDHCRMVAIPTIKDEDAKRPNRERESLVGEQSRIVNRMKAALIRLGIRGFNPKLKKAAERLDGLRTPEGDPIPPNTLAELRRDMVRRRLVSDQIRQIENARLERLEHASGDGPHAMVRLLARVIGVGTETADMLVQEVLSRNMRDRRAVARYAGLTGSPDESGKKRHEKGLARSGNARVRRGMIQLAWRFLMFQKDSALAQWFRARTENARGTRKTMIVALARKLLIALWWLVREGVVPDGVVLRPAQ

SEQ ID NO: 323359 - protein, 345 aa, unidentified
MEHYVGLDVSLKLTAICIVDRTGNIEREGTVPSDPEAIATFVKTHAPHVARVGLETGATATWLWTELNKLGLPVICIDARHAKAALKMQINKSDRNDAVGIARIMQCGWYKEVRVKDLNSHAVKALLVSRALLVKIKRDLENQIRGLLKNLGLVIGRAKMNVFAVRAAELTEHRPELAAAVAPLLNARAAIELQIADLDRKVMWLARNNAQARRFMTAPGVGPITALCFLATIDDPTRFKRSRSVGAYLGLTTRRYASGEIDWTGRISKCGDKMLRSYLYEAANVILTRVARWSALKAWGIRVAKRTGLRKAKVAVARKLAVVLHRMWIDGTEFRWSKEAANQPA

SEQ ID NO: 323360 - protein, 417 aa, unidentified
MSNKVIFNLDELFISVGIDVGADFSWMSIALPNQQFVGKPYKILHNSIDSLTTAVSKIKEAEELYSLESRIFLESTGIYHYPLFCYLRDKGFNCSVINPIITKNSTNINIRKVHNDRFDSKKAALVGLKPDLKVSLMPSDLALNCRNLCREYYDLMDNRSAYVNKLQGELRMAFPQYLGIFSKVTINTSLTLLETYTSPSAFLEADKQEIIDIIKSTARFGLTYAQNKYNAIIQAATDANQFGYIIDSNIKRIRLYISFIRKYDEELNSILESLHELVDAHEDADFVKQIHLIETFKGAGFLSAVSIMGEIGDFSAFSKPKQLFAYFGLDPAVKQSGKFEGTKVQMSKRGSAIARRVIHTLTLQSISISRNGEAKNPVLREYYIKKCDSKPKLDIVNIGLHFILKNVRPYAASCSEA

SEQ ID NO: 323361 - protein, 440 aa, unidentified
MRRVEEVTDEPLHRDRVCGIDIGKAGMVATIRVPSDKDPARRAQETRSFGTTKKGVLALADWLRCWQVPAVVMEATGDYWKGPFYRLEAEGFECVLADAKQVKHLPGRPKRDPSDSRWLAACFERGAVTGCFVATGEFRIIRLHTRYRRDLTGERTREKQRAEKLLESAAVKLSSVVTDLHGVTGRDIMDHLIAGERNPKVLAQLARARARRKIAELEAALEGAEFFTDEHAALLAVMLARIDRVNAEIDQLTGVIERLLAPYEEQLAQAGSMPGWGRRSAQDAIAETGVDMTRFPSGAHLASWAGRTPLDNQSGKRNGRSKSKKGNRYLGAITGETAVAAGKTATREGARYRRLARRRGKAKALVATGNTQLKVYHKLLSSPGMRYADLGPDYYERQRDLRRQISHHVGKLGALGFEVTLCRIPESEPRPDGPGNTQAA

SEQ ID NO: 323362 - protein, 412 aa, unidentified
MNPVVGLDVSKGESQVQAFLDKGQPYRKSFSIKHTLDGLGSLLEFLRDIEKLAAGKQPSVILESTGQYHMPVIQFLEEQQYVYIIVNPLISHRARSTNLRKVKTDAIDAYHLCELYYKEELEPYKKRGIQLLNLRNLTRQQETISSTAAQTKLQLQSILDQVFPEYRGVFGNLYSKISLQILSLFPTSEEVLSISECDLTDKIAELCTTRSEKWAKEKAYKLREAALRNPFQDNLYQSHIFNLRMFINIVLQYQEHLSKLAAEIDALAKEIEEYEIIQSIPGIGEKIAATIISEIGEIERFNHPKKLVAFAGIDPSVYSSGRFTASINRITKRGSSRLRQALFMAVQCGIRDARKQKTSDEIIPRNKRLREFYDKKREEGKPFRVAIIACANKLLHWIYALLKRKITFQNTA

SEQ ID NO: 323363 - protein, 463 aa, unidentified
MAKKTTTKRKNKAKARKNVLERINPNAAGIDIGASFHLVAIPEDRTEENIRKFGPFTSDLHRLADWLIEHRIETAVMESTGVYWIPVFQILEQRGLEVKLVNAAHVKNLPGRKSDISDCQWLQQLHTFGLLNGSFRPKDQVCILRTFLRLRDTLVKDASSHVLRMQKALTEMNIQIHRVLSDITGYTGMAIIRAILAGERDGLKLAQMKHPQVKASTEQIVKALEGDYRTEHLFALETAVELYDAYQLKIMECEKNIEQQLEHFELKLDFAQILEQSGAFKARSAQVRLELQRQAHLASVCGVDLTRLPGLSTLAVETIIAETGLDMNCWKSEKHFCSWLKVCPDNRISGGKVLSSRARKTKNRAAGMFRLAAQGAMQSKSAIGAFIRRIRARLGAPTAINAGANKLARLFYRMLKFGAAYVEQGQTYYEERYKERLLHNLSKRAKELGFQLTPSQPGTVSVS

SEQ ID NO: 323364 - protein, 354 aa, unidentified
MERYIGLDVHAQSTVIAVISQSGKRMSSAVLDTSASSIIEALKNMPGTKKLVLEEGTQSTWLSQVLSPYVQDLRVVAPKQAAERTKNDREDAFALAESLRTNSTLVRRPIFKPSAESMALRDALRLYTTFTQDSVRSKNRFKALLRSRGLTALGPDAYDPEPEVLQKLLEQVPPSVALNAEATLEQIFALEDLRSRARDLLIEEARKESAYRHVLTVPGLGPIRAATVLGVVVTPHRFRKSHLFWSYCGLGIKTSSSADHCRGPDGGWQRNREPMTRGLKHGQPMLKNAFRGAADTVVIQLKDHPLHGHYQRLLKNGMKDCLARLTLARKLAAITLALWKNKEEYDPKKHTTFE

SEQ ID NO: 323365 - protein, 334 aa, unidentified
MGEVSTIGLDIAKSVFQIHGVDADGAVVIRARVSRSKVLQFFTDLSPCLVGIEACPTAHHWSRQLQSLGHTVKLMPPSYVKAYLKRAKNDANDAAAICEAVTRPSMRFVATKSKEQQAALMLHRSRQLLVRQRTMLSNAIRGQLAEFGIVASTGRLGFNRLLEMVDGPEELGIPKVAWVSLMALAEQHQRLQVEIGKLEQCIQAWHRSSELSRRLEEIPGVGPIVATALVGTITDPHAFASGRHMAAWIGLVPQQNSTGGKDRLGGITKQGNRYLRWLLVAGAMAVIRYVQKHGTAKRPWLARLIERKPTKVAAVALANKIARIAWVIMTRGER

SEQ ID NO: 323366 - protein, 399 aa, unidentified
MTPDDIDVWVGLDVGKSAHHAHALDHDGNTLYDKPLKQDEKAIRTMLGKLSKHGRVLLVVDQPNTIGSLPLTVARNMGIAVAYLPGTAMRVPAQLLPGDAKTDRRDAHVIAWAALKLPETLRDAGPDDETLAALKLLAGHDEDLAHESTRHVNRLRSLLLQTHPAFERALKGERITRDATLALLERYGGPMGVKRAGIEDVKDWAKSNGLRAGRIIDDMFKAIGEQTVTVPGTLMAETIIPSIAHDIKTIRDRRREVGRQVEKLLEDHPLLTVLTSMPGIGVRTASNILLGIGGDIANFKSSAHLAAYAGISPVTGQSGTSIKGERPSRRGNKRLKNALWQTAFVASTKHPPSVAYYKRKREQGKHHNAAIICLARRRCDVIYSMLKNGTLYQEPALVA

SEQ ID NO: 323367 - protein, 366 aa, unidentified
MESYVGLDVHSKRSVFVIEAQDGRVVGRGDIPTTSEGFRQLRRQHKLPAETPVALETGTVAFYAARELAGVGLRPVVIDAHEVRVKAHRPRQKSDRRDAFELCEGLRRGQYRTVVHVPPAPIGALRETLSRRRHFVAVRVAEVNAVKRLLRAAGLGQLSKSLGTDAAWAKLLAALAPEPALRTYVAQHHALWPCAQEQIAALEETLAAQPATITKVAARLQTVPGVGPLVSLTAVAVFSDVHRFPSAKHAASYAGLVPSTDQSGDRDTHGHITKRGSAALRTLLCEAGHHAQRPSHPLHPYFARLCAQRGYKMAVVAVAHRLCRILFALLRDGAEFDVAKLAVEEGPFRRTTVHRYRLKRGTTSRA

SEQ ID NO: 323368 - protein, 379 aa, unidentified
MEDSTRYPGGMTIGMDLGDKRTFFHIRDKEGFYAEGSIKTTPGSVERFLSDFGPSLVAFEVGTHSPWVKDLAESLGHRTIVANPRRLRLISENDRKTDRADAKYLACLAQLNPDLLAPIHHRSRETRAAIMMLGIRDGLVQARTQLINACRGMVKPFGEKLPECSTDSFHKKALEEIPKELKPVLSPALGAIKELTERIKQMDRKLAKLVEKRYPEVAHLQQVPGVGPVTSTAFVLIVEDPYRFERSRRLGSYVGLVPKMDQSGDRNPQLGITKAGSPMLRRLLVQASHYILGPFGPDSDLRRFGLRLAERGGKNGKKKAVVATARKLAVVLHRLMITGEDYDPFYSSKRREKKGEGGGGLRKGGGKRRSRPSRKKTSA

SEQ ID NO: 323369 - protein, 326 aa, unidentified
MQGKVSSERTAMATVYVGIDVCKEWLDIHLHPLGRSFRVTNDTAGMRRLKRELDALDQMPRSTLHIVMEATGKWHRAVQRSLHADGFYVSVVDPAQVRAYAHAIGRRAKTDPIDAAVIAAFVLATKPEIRPLRDAETQALSELVARRRQIVQMVVAEENRLRMALAKQAQKSIKRLLKALRRELESLDADLDSHIRKSPVWRVREALLTSVPGVGATTARTLLAELPELGSLDRRQIASLAGLAPWTRQSGKWKGKSFIGGGRGKVRAVLFMAALVASRYNPDLKAFRDRLVAAGKPKIVATVATMRKLLTILNAIIRDGRPWQNA

SEQ ID NO: 323370 - protein, 356 aa, unidentified
METAYDGRQVVGMDLHRRRSVLVRMTEDGRRLGTARITNSPAELRAQIARAGKAPRVVLEATYGWYWAADTLAAAGAEVHLAHPLGVKAFTYRRVKNDERDSADLADLLRMGRLPEAWIAPHEVRELRELTRYRIKLVRLRTSCKDQVHGVLAKLGVPVACTDIFGVAGPAWLDTLGLPQPYAGKVTSLRHLAGELTTEITMLSEVIASLLAGDRGYQVIQQLPGIGPVLAAVIIAEIGDVTRFSNAGQLCSQSGLTPRHRESDTRVARGHVTKQGSRLLRWALIEAIQRIPRDSVIGSARDAIIARRGKEARNIAKVAAARRLLTLVFYGLRDGQIRCLSRRPADPPVTETARAA

SEQ ID NO: 323371 - protein, 442 aa, unidentified
MEKKVVQFEEIHSNAAGIDIGSRGVFVSIDGEQVVNFKTFTADYQLCCKYLKDNGIVSVAMEATGIYWMTLYEMLEQYDIEVCLVHPMETQQVPGRKSDPKDSRWIQKIYSAGLLRESIVAKGELKELRMLTRERLDLIQMGSTYINKMQKYLELMNIKLRNVISQIHGASGLRIIKAIISGERDPEELLSLCHETIKTKKRDDVIKSLEGNYHPTYIALLKENLYLYEQHQLSVLRIELQIKELLDKLNRDNKRIEVTSPARPARHHNPAIPELHSTMVQMYGGVNLTTIAGINDSTMLRLLGEIGNDLSRFPTKKHFVSWVGLSPKHKQSGKMKKRVKCNSSNNAGLIFRQSAQSLFNSKNNAIGVFMKRLKGRKGAKVAVKAGARKIAEAFYDAITKGLDYVEQGTAKYIEQLKQKELKLMNVLAKRYNFVCLENQPVT

SEQ ID NO: 323372 - protein, 354 aa, unidentified
MSHHNSGIAAIGIDIGKNSFHVVGQDERGAIVLRQKWSRGQVEARLANQPACLIGMEACVGAHHLSRKLQALGHDARLMPAKYVRPYSKGQKNDFRDAEAIAEAVQRPTMKFVATKTADQLDLQALHRVRERLVGQRTGVINQIRAFLLERGIAVRQGLRFLRAELPAILATRSDALSPRMLRLIEDLAGDWRRLDARVEGVSEEIEALARQDQACERLMTVPGIGPIISSAIVAAIGTGDAFSRGRDFAAWLGLVPKQISTGDRTILGSISKRGNRYLRALFVQAAWVVLVKLGKKWERYGLRSWIEAAKKRLHHNVLAIALANKLARIAWAVLHRGRVFECVKMDEIASRPA

SEQ ID NO: 323373 - protein, 375 aa, unidentified
MKEKLRFLGLDVHAETIAVAIAEPDGEVRSLGTIANRTESVRKLVKKLGSVEQLRACYEAGPTGYVLYWQLAELGVKCEVIAPTLVPVKAGDRVKTDRRDAEKLARSYRSDDLTAVWVPDESSEALRDLVRAREAAKQDQLRARHRLSKFLLRSGQRPAPGVRAWTQIYMAWIRQIRFVQIAQEWTRLDYLHEVEHMGERVARLEQAIAEAAKLAPPELQEVIKGLQALRGIAHISAVTIASELGEFSRFEGARQLMGYSGIVPSEDSSGERTQRGSITKTGNAHLRRIAVEAAWSYRLRPCIGPALRKRQEGVADEIKEIAWKAQHRLYRRYCRLAATRKDQRKIITALGRELLGFIWAIGIKAETAVRQRIAT

SEQ ID NO: 323374 - protein, 386 aa, unidentified
MSRPSNILLPAINYDHTLVLAIELSNKSWVLAAQVPGFPRTKAQRTIEPNKNALLAAIDGYRARAAAVGYTVDRVITTYEAGWSGFWLARWLVAQGVEVHVVQPSSVPVDRRLRRAKSDGIDAELLLRTLLAWLRGEPRVCSMVPIPDEADEDARRCVRERTELLSDRVGLTNRIGAVLATLGVNDYNPLLQSRRRRLAELRTGLDEPIPPNALAKIERLLARLELVLAQIAELERERDEVAAADAPDRAGKMIQQLASLRGIGVQSATVLVREAFVRHFANGKALGSYAGLTSTPYSSGGIDREQGIGKAGNRRLRTVMVELAWLWQRYQPGAAQVAWFRDRVGSTGRRIRKVMVVALARKLLIALWRFVIDGVMPEGAVMKPSI

SEQ ID NO: 323375 - protein, 429 aa, unidentified
MTNAQSTPEAVVWVAIDIAKDRHEALIEAPGWKSRKKFRVQNTAEEFRAFAEFLHGLALPVWIGFEPTGNYHRALAYFLHTEGFHLELVSSVALARTREALHNSWDKNDPKDAQVILHLLKGRITQHFHDPIVHDLNDLQELSKTHHHISLEKTRTQHRLLTHYLPLYFPEIARYHSCSRSEWLWNLLIEFPTPRSMNRLSRDEFVRKAWNLVGRKVAKERILTDIYLTAQSSVGIPAEESSEAVAMLRFVLRQLLTLCQLRATIEERADDLLSGNEDYQRLRRIPGIGPISALTILAEAGDLRRFSHHRKFLKFCGLDLATEQSGQFRGLSRLSKRGNARLRAVFWMAASVAVRMRENSFRAKFERYMQTDPGSTDRKRKAYVAVAAKVARVAYALIRSGADYRCFHEVAVPSGRTRSARAVEAIPTS

SEQ ID NO: 323376 - protein, 505 aa, unidentified
MTAPTARRKPASSPTPGAQHAQAQAHRQAYHRRKTRAKAKSEAHRQREAAQVEALPVQHPHAAGIDIGSRSHWVCVGFTTEAASPWIEEFPAHTAGLKAIVDFLREHQVTTVAMESTGVYWIPLYELLAAEGFEVLLVDPSYSHQLRGRPKTDRRDCQWIYRLHSVGLLAAAFRPDEQTCQLRAYLRQRANLIRQASRHVQHMQKALEQMNLKLTEILSDITGLTGRTILRAILRGTRSPEKLARHRDKGCKASEAQIAQALTGTYREEHLFELKLAYEAWQFTLGQVAKVDGQIALQLGRMKCDRALPPLKPKARPKRRVNSPGFDVRAALYYVVGLDLTEIEGISELTALTVISEIGPGVSRFATVKKFCSWLGLCPNWKKTGGRVKSSRTRRGVNRAAQALRLAAQSLHHSRGALGGFLRRMKGRLGAQAAVTATAHKLARIVYLALKHGMTYVRQSQEEYEAQMKEKQLKALRRKARQLGLEVVEKTSGSGATATAASVQG

SEQ ID NO: 323377 - protein, 358 aa, unidentified
MNYFGIDVHSTYHKVVGLTADGESLEFDIPNTREGREELQELMLQHKPCAVAMEACSGAYKIYDLLQPVVQRIQLLHPADLKEMFGKKSRKNDRIDAAMCCRAAKYEMEGIWVPDEETRQRRALSARRVSITQKRTASKNSVKSSFREYHIPLVDNPWSEKGMKVLRERLKELPATVALGVDLELDHIEMYSRSIAHLDHRMAELACGNEQIKLLMSVPGINYYSAFVIMAEVGDVQRFESAKQLTSYAGLCPSFNQSGKKKARHGPITRKGRSRLRWIAVECAHVGARFAPKLQRLKWRLKKRGKHGNIATVAVGRKLLELCYHILKSGQPYSESIPEKHQAKLRKLGCQAKKGKAA

SEQ ID NO: 323378 - protein, 351 aa, unidentified
MEEYIAFDSHKRYTWVEHQEANTGKTRAYRLVHGTGAIRQALAGCVPGTAVAIEATANWYWIIDEIEQASCVPKLVHPRKAKLMMGLINKTDKLDAHGFNTLQRNGTLPTVWIPPGGLRELRELTRTRLVLVAQRTRWKNRIAATLAKWGLPPSEYSDPYGKKARAELEQQLERLPEQTRWATRQMLAQLDSLSEQARQFEKRLEELVDVSPMMQWLMTMPGVGVILAATIALEIGEIERFANAERLASYSGTTPRVHSSGDRTRHGRTRPDVNRYLKWAFAEAANSVAVNHRRNPERHVSRLYARLRASKGHSRAVGAVARHLAEAAFHVLHRKEVYRDPSLNPRPERGV

SEQ ID NO: 323379 - protein, 410 aa, unidentified
MWAVSGGLTRSKMAASNQGAEDRKMNAGREAVAAVPGAAPTVFLAIELSKASWIVALHSPAGARVSLHRLPAGDAKALLAFAEKARAAAAEATGEVVAVASCYEAGYDGFWLHRVLVAAGIASLVVDPASLQVDRRARRAKTDRIDAQALLRALMAHHRREPRVWSPVRVPAPADEDARRTHRERQNLLKERGRHVNRIKGLCAQQGIYGYEPIRRDRRERLAQLVTGDGRPLPPRLRAEIGRELRRLELVLEQIGALEAERDAAAVAEAGEEAGRAARIAALGRLKGIGPEIATVLGNEVFYRRFANRRQLAAYVGLAPSPYRSGGSGRDQGLSRAGNPRARTAVVELAWLWLRHQPESPLSAWFVRRVGDLKGRIKRIMVVALARKLLLALWRYLEAGLVPEGAVLKG

SEQ ID NO: 323380 - protein, 375 aa, unidentified
MTADLQAKEYESAAVLYMAMELSNKTWRLAFGDGRRARQVRIDAGDVAALGEQIGKAKAKLGLGAEAGVVSCYEAGRDGFWLHRQLEALEIRNHVVDAASIEVSRRARRAKTDRLDAQALLDKLMRYEGGEHRVWRVVRVPPPDWEDLRQLSREREQLLEERTRHHNRLSSKLVAQGIRLVINGEFLRRLGEAKLFDGRPVPEHLKAGLEREWARLQLVQTQLKVLEGRIRELISEGGLLNGVGSLMLLCGIGWVGAWTLVVEIFGWREITNRRELGSLGGLVASPYNSGTMVRDQGVSGAGNRRVRSLTIQLAWLWLRYQPNSKHSRWFQERFGGGSKRQRRIGIVGLARRLLIDLWRLLEGGVVPHGARLKVA

SEQ ID NO: 323381 - protein, 352 aa, unidentified
MLIIGCDFHPGFQQVAIFDNRTGEIQEKRLQHRAEAEQFYRSLAGREVRVGMEACGHYPWFERLLAELGFELWMGDAAKIRASVVRRQKTDRRDAEHVLQLLRENRFPRIWVPSLEVRDVRQLLVHRHKQVQARTRTKNQLQAMALSCGIQKKRGLWTKAGRKELEQLPLLPYAAERRRRLLEALDGLDAEIGELDGRVAEEARQRPKAVRLMTHPGVGPVTALAMVLTLGPAERFGSAKQVGSYFGLIPREESSGGKQRLGRISKQGSSFLRFLLVEAGQTAARLDPQLKRFYRRLAVRKNRSVAKVAVARKLATRLYLMLREDWTYAQLCQAVMQVSPSHSVAGEQEPSA

SEQ ID NO: 323382 - protein, 382 aa, unidentified
MYIVGIDIGKNHHEASIVSPKGKQIGRSLRFATTHKGADSLMSFIFKNIGNSPCVFGMEATGHYWYPIYSFLKAKGYTIYVINPIQSDSLRKMYIRQTKNDSIDSFLIAEVIRFGQFGTTSMADENILAMRQLCRYRDSVISSRTEIKLRIGTIMEQIFPEYEKQFSSLWVSTSMGILEKYLTPENIENAPIDELFEIIKDKSHNKLTMKKAISIREAAADTFGIKIAQDAFSFQLKQLIDRMNFLDKQIEALDIEIMKYYEQFDCYLHTIPGIGIIGAATILAEIGDISRFKNSSALVAFAGIDPTVRQSGEFNSTHNHMSKRGSPYLRHAIFLAATTCSFHNSPLNAYYKKKRDQGKHHLTATGAVARKLTTVNLCRVTG

SEQ ID NO: 323383 - protein, 361 aa, unidentified
MLFIGDDWAEGHHDIEVEDDVGRRLARIRLPEGVEGLARLHEVVAEHLDSDSTGSSDLPEGAVVVGIETDRGVWVSALLACGYQVYAINPMSAARYRERHGTSGAKSDAGDAHVLAEIVRLDRGHHRQIAGDSPQVEALKLLARAHQGLIWDRTRHLQRMRSALREYFPAALTAFDNLAAPDTLALLRKAPDPDRAARLTTGQITAELARAHRRGDRTATATRIRDALRAPALRQPAAIEHAYAVVVAGQARMLEHLAEQIEELEQEVKRSFRRHPAAEIVRSCPGLGDVLGARVLAEFGDDPHRYRNAKARKNYAGTSPITRASGKRKTVSARYARNKHLADACHQWAFCSMNTSPGARA

SEQ ID NO: 323384 - protein, 373 aa, unidentified
MDNFSKYIGLDTHKDSIAVGIAKAGRDKPLYYGEISNTPEAIERLIKKLSQDGEVLSFCYEAGPCGYVIYRQIIRLGHVCDVVAPSLIPTRPGDRVKTDRRDAIQLTGLHRAGELTAVWVPDNTQEAIRDLTRAREDMKAIERQTRQRLCAFLLRHGKVYTTGKSRWTLTYFRWLEAIKFEIPVQQIVFQEYIDAVKQAQQRVLDLEVEMRKALDDWGLAPAVEALMSLRGVKLITAMTVMAELGDITRFDSPRQLMKYLGLVPSEHSSGSSVRRGGITKAGNGHVRRVLVEAAWCYRFQARKTAHLQRRAEKASESVQAIAWKGQKRLCGRYQHLLEKGKLKVQVCTAIARELVGFIWAIVMEVSGRTRVAG

SEQ ID NO: 323385 - protein, 352 aa, unidentified
MEMIALDCHKHYSVASVQSPEGRSLAECRIEHRRGSIRAFLAPYSDGCPVAVETIGNWYWIVDEIEQAGKVPRLVHARKAKLMLGSINKTDKLDVRGLNRLQQTGTLPTVWIPPAGLRDQRELPRTRMVFATARTRLKNRIHSVLDKYGFQDQFAGVSDIFAVGVRPRLEGCIQQLPPQAAYTSGLLLEQLEAVQERIKALEERMAEVFKPTAELERLDTLPGVGLILGVVLMVEIGDIQRFRCAERLASYAGTVPRVHSSGGKTYYGRTRPDVNHYLKWAYTEAANAVAVHRESLAHRHVGQLYNRIRSRRGHASAVGAVARHLAEATYWMLTKKESYRERGITEVSPQGL

SEQ ID NO: 323386 - protein, 328 aa, unidentified
MSKHITICAGIDTGKRKLDVAIEGRREQLQVENTPEGHKVLIALLRHHGVKRVGIEASGGYEQPVVAELRRTRFVVVVFQPAQVRAYAKFHLQRAKNDKIDAALIAACTAAVRKIHAAPDPRLLPFAERLTMIDQISEDITRLKNRIESCRNAKIQELWQEDISRLEKREKAELKALVASIRTHPDLAQRLGLIHSVNGIGLPTAVAILVRLPEIGRITREQAVALAGLAPYDDDSGAQVGVRHIQGGRKRLRRALYTASLAASFRWNRQLIQLYQRLTAAGKEHKRALVACARKMLIFANTVVARGTPWRDEPPAVKALMREPLSVS

SEQ ID NO: 323387 - protein, 372 aa, unidentified
MKKLNYIGLDVHKKNIVMGESHRSGEAKITGEFLNTDSGIKKFLSRLNKLSEEFELKICYEAGPCGYALKRILDTKGYNCEIIAPSLIPVTTGNKIKTDKKDAVKLARLFRAGELTFIQVPNEDKESVRDLVRCRDDVMCDLKRAKQRLNHFLIRHGYHYSGSNWTEGHLKWISNLELSDKNLQNVLLFYNNEIEFLEMQLEELDKEIHEIAQTEEYNEKVKALCAYRGIGVLTAMIIISEVIDFSRFSNPRELMAYLGMVPSEYSSGQSVRKGSITKCGNKRVRRALVEAAHHYRHHPTITKLMRKNLENTRPPFRVAPVKALKRLNKKYYSLIYRGKKVQTAAVAVGRELIGFIWYSMILIENEIAENSN

SEQ ID NO: 323388 - protein, 343 aa, unidentified
MDHFAGLDVSVKETSVCIVDDTGRIAREVKVASEPDSLLQVLTNPAYHFKRIGLEAGPLSQWLFSTLAEAGLPVICVETRHMRAALKAQINKTDRNDARGIAQMMRAGLYRPVHVKTLRSQKLRMLLIHRKLLQSKAIAIENDLRATLRNFGLKVGMVGTLKFDTRIKELVDNLPELAVLVEPLLVVRRVLREQLGILHRRLLAVVRDDDVCRRLMTVPGVGPVVALTYRATVDVPARFRNSKAVGAVFGLTPSKYQSGESDRTGGISRCGDEMMRALLYEAAQILLVRSAKWSWLKAWAMKIARHRGLKKAIVALARRLAVIMHRIWVDGTEFRWTREVAAT

SEQ ID NO: 323389 - protein, 397 aa, unidentified
MIAVGIDISKAKSTVAVIDSDGTVLASPFTMAHTQPEMEAFVSYLKGLGEPTTILMEYTGHYHYPVLKKLQDEGFPVCIVNPYQMKKYGDVEIHKAKTDKKDALRIAAYALEKSYKLVPYSSMEQKYEDLKFLSRQYNQRISYVAKLKVQLIALLDQTMPGITRILPLNSRNPEKCALLLFIKRFKSFDEIQRIGKARFLASYDVLAKKASERSASSKGLSIYELAVDSITTRGEDPYIWLSQNQCVDLLSATHNAADEIISQMRNIAETIPEYKVLRAMHGVGDRLGPIILAEIGDVHRFHSGKALNSYAGNDAPPYQSGQFESRNRHISKRGSSALRKACYEVMQALKLIKPQDDPVYLFMLKKEQEGKPFNVAKMAGVNKFLRIYYARAMELYK

SEQ ID NO: 323390 - protein, 426 aa, unidentified
MNEVEDTRLKEFRQFKKEIRGSKDHLIVGIDIAKEKHHAFFATATGKTLFRRLIFDNTIEGFEKLLTQVRAIQVAQGLPKVVFGVEPTANYHKPLGEHLIKCGRMVVLVSGVAVKHNRELLDGRWDKHDTKDAANIADLISQGKCLYYEYPEMGLRDLRTLLSLKKKLKKQEHGYRVRIRNQLLAQYFPELDRFSGRPEVEPIVRWCLDTSELAGLEFDQFVQRVVPGRKTLAQHQRLQTIQQMAIDSIGCEMGEGAHFEAEVMVDGLRQIRETIKTTDEQIRETCRQFPEYGYLLTIPGFGPDVSAKVIGAIGNPFRFQNRKQVLKMAGLDLGAYRSGETSNTATPVISKRGKADLRYALYQAALIASTRCRPWIEHYTDQLQGRAQEAGIKTKRRVKLSAKLLIIAWTIMKKKEPYNPRYLNPA

SEQ ID NO: 323391 - protein, 430 aa, unidentified
MNCVNDIRLEQFLQLKKEIRGSEQYLIVGLDAAKEKHNAFFGTAQGKTLVKNLVFDNTIEGFEKLDAYVERVKVQYSLSKVVFGIEPTANYHKPLAEHLIKCGRMVVLVGGVAVKNNRQLLDGRWDKHDVKDAANVADLIAQGKCLFYEYPLMTLRNVRILIALKRRLKKREHSISVCIRNHILAQYFPELDQQYGPSVTLAVVRECLDPSAIAGMEYDTFCRTVSPGKMTLAKSRRTEAIWRAAVNSIGCTMGEAASFEAQVMVDSLKQIRQTITSVEDKLEDACLQFPEYTYLLSIPGFGPDVSSKVLGAIGNPHRFASGKQVLKMAGLDLCANRSGQTSSSSIPVISKQGKTDLRYALYQAALIASLKNKDFIAYYTNKLKGRAREKGIGVKMRVKLSAKLLIIAWTLMKKKEPFDPGRLNRLDKAA

SEQ ID NO: 323392 - protein, 406 aa, unidentified
MEVLYERCCGIDVHKRIIVACFKFGRKQEIRKYGATSSELRKLANWLQENNCQVIGMESTGSYWKPLYNVFELSGLDAMVINAGDIKNVPGRKTDVGDAEWIADLVRHGLVRASYIPTREQRELREVSRYRISLVQERARELNRLQKILEGGNVKLGNVVSNINGVSARNILKAMLDSSDKMMEEEIKNMVYGPLRTKIPEIVEATDGFFSLMQKALLRSILRHIDNLDLQIAEINALIAKHMGPYEKEIERLAEMPGIARQSAETILAEIGVDMSRFPTDKHISKWAGLCPGNNESAGIRKRSKTQRGNKTLKSTLVQCAVVAVKQNCYFKAQYQRISIRRGKKRALVAVAHSMLIAIYHMLKDDVTFKDLGSDYYLKVNKQSRVNYHLKQLTKLGWTPGAEEVA

SEQ ID NO: 323393 - protein, 412 aa, unidentified
MDVVYKVAGIDVHKKMLAVVVTNVAGLGEYRFERRKFGTGDSEIKALAGWLTAEGVAEVVMESTAQYWKPVWQMLEGSFKLQLAQAQSNKAPKGRKSDFADAERLVRRLVAGGLILSFIPDPEQRLWRMMTRSRYQLARDRARLRNHLEGFLEDCRIKLSSHLSNVLGLSGHKMLRAVADGETNPAAIAALANGGVRASQTTLADALVAATSLDAKRRQMLSLYLERLDLLSAQMDTLAKMAAASLSEHRDVVKRLSDVPGLGADSAQQIIAEVGPQAATFSSPECLASWVGCCPGREESAEVSKSDASPKGNSTMRRLLSQSANAAIKSKGSVFQETYRRLAPRIGHGKAVWAVAHKLCRIIWKILHDGVDYRELGLQPDPKSIERRVGKLTRQLRALGYQVQIQPATIAA

SEQ ID NO: 323394 - protein, 341 aa, unidentified
MNKSVLINPTTAFCGIDVSARSLAVALIKLDQSVTRREFANSASGHKALVDWLGKHKDKVRVSLEATGIYSLDLALALDREADIELAVLNPKLVNRFAQTLRRSKTDAADAMVLAEYSQRMPFMRWQRPGMEELRLRTMGRYIESLVVDLASLKNRLRTAEGTATTPRAVLRDLKQAKAALVRRLAKMRREAEKLVQAESVLQERFALLVSVPGIAKISALQILSELVLLAPAMTVRQWVAYSGLDPVHQVSGTSVHKPSRISRAGNRHLRRALYMPTLAAVRCDPHLRAFHQALRKRHKTGLQALMAVERKLLHAIYGIFKSGKPYDGKLLFPNILLEVE

SEQ ID NO: 323395 - protein, 454 aa, unidentified
MAKRKVKGNPNATITMPIVNPGAAGIDIGSRSHFVCVSQDNVKEFKSFTSGLHEIAEHLLYYEIKTIALESTGFYWQQLFVLLQSYGFEVILVNARHVKNVKGHKTDVVDSKWLQLLHSIGLLSNSFQPDFFTKELRQYVRHRKSLIETGSMYIAKMNKSLVLMNIQLKTVLRDLTGESGLKVIEAIVKGVRDPDVLESLVGKRVKASRQDIKDALNGDWRGEHLFELSQNYSFYQFTREKIKETDNRIEALLEQWKEKNGDEKIRKGYSKNKHSHGHKNDPGFDIKAYAYEMAGGVDLSQIEGVDVGTILTLVSETGLDLKSKFKTAKHFASWLGFSPNRKITGGKTMSSHTPKVKSSLSHAIRQAANAAGNSKSRLGDFFRRLSFRKGRTVAIIATARKIAVIIYKMLETHQPYCYEYTQEDSERFKQMQIKKTIKNIKKHGIAQSDLVMAF

SEQ ID NO: 323396 - protein, 404 aa, unidentified
MIFVGIDWSERHHDVCVLDEDGDVLEKARVPEGIEGTARLHEVLATHADAPEQVVIAIETDRGLLVRSLVAAGYEVFAINPLSVDRYRDRHRTSGAKSDPGDAKVLADLVRTDRANHRPVAGDGELAEGIKLLARTHQSFVWERQRYVNRLRSDLREFYPAALEAFGTDLASGDAVAVLSIAPTPELGRRLSRSKIGAALRHAGRQRKVGARAEQIQAALRSDQLRTSAGLEETYGVITSSLVGLIAGLNTQIAGLQRDLHEAFEQHPDAEIILSLPGLGSTLGARVLGEFGDDPTRYVDARARRNYAGTSPITKASGTRRVVLARFARNTRLYDSCHRWAFSSLSASPGARRYYDAQRARGKTHSQALRALANRLVGILHGCLAHRTPYREDLAWSITQADAA

SEQ ID NO: 323397 - protein, 331 aa, unidentified
MTITTTPSNGERFNRVIAFEVSKADLVVYCAPQDVSSTIPNTKSAVRRYLKKQTRTKPGPEVSDLLVVCEATGGYERFVLEAAAELGLACHRAHGSRVRAYARYRGTHAKSDAIDARLLADYGLHGENLKLYQPPSPAQDRLRALLGRRTELRRAMEAEQCRLDHALDKDIAHSIKALIAVLQRLLAGIEAKIVLLMKEDADLAEKARLLQGVKGIGPITAATLLGYVPELGSLSRGAAAALLGVAPFDRDSGKIKGKRHIFAGRGEARSCLYMAAISAMRYNPKFKEFATRLKQRGKPFKLVAAATMRKLATVVNAMLRTGTPKTAQTLT

SEQ ID NO: 323398 - protein, 385 aa, unidentified
MKPNSQMTLGEFFRQCVGIDISKSKFTACLYMYDRASDVGCCTKSIDFDNTKSGFNQMVKWSRKEAVKDYPLTFLMEPTGVYYERLAYHLHKIGQTVYVVLPNKARKFCESEGIKTKTDAIDARCLALMGCVSRKLKPWLPPASIYRELRQMTRFHADLCVIRRSVANRMEALDHMEGVSKTVRKHCEKLVEEIDTLTEKNDKDIMRKVAEDKELQARVKRIATARGLGVTTIVCVIAETEGFHLIENRKQLTSYAGLDVKARQSGKEDPKHRISKEGNAHIRAALYMPALVAVRHNKQIREAYGRICQKHPKEKMIGVAAAMRRLLMLIYTLWKNGEEYDETRDKTHTPRKKELEPEYGPEDCIGTDKESIDWNAMDENGEPPF

SEQ ID NO: 323399 - protein, 334 aa, unidentified
MENIALIGIDLGKNSFHIHCQDRHGKAIYRKKLTRQKLYEFFAKCPATTIVMEACGGAHFMVRKLSELGHTPKLISPQFVRPFVKTNKNDFVDAEAICEAASRPSMRFVKPRTESQQAMHALHRVRESLVSDRVKTTNQIQAFLLEFGVSAPKGPTLIKRLAEIMETNNLPPYMTSLLQKLSEHYDYLVAQIKDLEIQLQRALEEDEAGQYLLSIPCIGPLTASLLSTQLGDGKQYGSCRDFAASTGLVPRQYSTGGRTNLLGISKRGNKRLRALLVQCARVYLRTLEHRTGKLSDWVRGLLVRKNNFVVTCALANKLARIAWALTTRQQSFEA

SEQ ID NO: 323400 - protein, 309 aa, unidentified
MDSITYVGLDVHKATISVALAESGRGGEIRQIGVFENRPEVLAKLAARLAKGGRQLSFCYEAGPCGYGLHRLLTGWGHDCVVVAPSLIPIKAGDRVKTDRRDALMLAKLHRAGELTPIWIPDAAHEAMRDLVRARATAGRVLSKARQHLQSFLLRHERIYRGGRAWTLAYRRWLTTVRFAHPAQQIVLQDYIDAVQDAEARLDRLMRQIEELLPSWSMAPVVAALQAMRGVALVVAVTVVAEVGDFRRFANARQLMAYLGLVPSEHSSGATIRRGGITKAGNALARRVLIEGAWTPAFAGAGYTGCRRG

SEQ ID NO: 323401 - protein, 453 aa, unidentified
MKSENQVSMEIINPYAAGIDIGSRSHFVAIGQKEKDVREFGVYNEDLKSISDWLTENQIKTVAMESTGTYWQSLYAVLLSDGFEVMLCNGKFTKNIKGKKTDVQDCQWIQKLHSIGLLSGSFLPDLQTEQLRTYCRHRSNLINTTADTSRKMQKYLRLLNLRLDIVVKDICGLTGLKIIQAVCEGETNPEKLAAFRNGNCKKSEQEIAKALQANGRKDYLFALKQEYETYNQMQEKIEKCDHEIKTILDQTINNDDNKKQHYIDKKTHKRINKNTPKNIDLNLLGYQYFEGVDLLKIEGFSHATLLAVISEVGLDGIKKFPTAKHFASWLRLTPNNKISGGKILSSRVPKGSNRLKIALRNAANAIGNLKESTPLRDFFQRINFRKGRVSAISATARKLGVIIWNMVVKNIPYHNPENYLYLDEKRKLGIVKRIRKQVAKFNLKEENFNFVNI

SEQ ID NO: 323402 - protein, 360 aa, unidentified
MNRVPVYVGLDYHSKSVQVCVMDQAGKVLCNRRQESSLPGVISIIEPLGDVQRVAIEACSGAADFGDHLHRAVGWKVSLAHAGIVSRMRSSIDKSDNGDARVLADLCRTNFLPEVWLPPQEIRELRALVMRRHQRTEAMQHCKQRIRAFLRDKRLAVPGEAGRPWTIAYMTWLTHLELSPMLRLVLDDLLADHETLRRAREALDRMLKAIAQRDTHIQRLMEIKGVGLVTACILRAVIGRFDRFRNAKQFSRYCGLTPRNASSGERVADAGIVRAGSPVLKTMLIQVAHRAARYEGRWREVFRSLVGRGKPACVAIVAVANRWCRSTWHELKTFEQEMNRQRTLTGEEQKPPSGGEPLAA

SEQ ID NO: 323403 - protein, 396 aa, unidentified
MTAIWAGIDAGKTHHHCVVIDDTGKRLLSRRVANNESELLKLCADVLALGDEAVWGIDLADGGAALAITVLFNHGQQLLYIPGRAVNRASEGYRGDGKTDAKDAAVIADQTRIRRDLAALRPGDKLVSELRVLVRHRRDLSDDRTRTINRLRGHLTEIFPGLERELDLGNVGPLMLLTGYQTSTAIRRAGSRRLTTWLRNRKVRSADELAAKAVQAAEGQHTSVPGEDMTAHVVHSLAKEVIVFNEKIAEIDKLIEGRFRAHHYAEVITSMPGIGGLLGAEFLAATGGDMEAFASPDRLAAFAGVSPTPRDSGKVSGNLHRPTRYNRRLQRVFYTSALISIRCCEESRRFYDRKRAEGKRHSQAVMALARRRVNVLWALLRDGRCYQPIPPVTSAA

SEQ ID NO: 323404 - protein, 429 aa, unidentified
MNYNTQNAKIASITEKTLIIGIDVGSETHYARAFSWRNYEYSKKPFAFSNDEAGFAAFKEWMDDIVEKHGMEVIIPGMESTGHYWLNLGAYLQEQGMKPVHVNPHHVKKSKELDDNNPSKNDRKDPKTIAGLVNEGRFSYPYIPTGIYAEIRNLSNLRIQTQEEITRIKNRMARWFSIYFPEIKDVYRNPDAVSGLMVIKQAPLPCDIRELGVEGVNKIWRYARLKGAGIKRATTLVTAAEHSIGNTEAPRSARKEIRNLLEDYEGYKKRMDELMEEIEKTLSEIPYIDKLMEINGIGIKTVSCFIAEVGDIGRFDNPKQVQKLAGYAIVADSSGKHNGESRISHRGRKRLRYALYEAAISVIGKNKEFKEIHSYYRTREKNPLKKMQSVIAVACKLIRIFYTILTKGVDYDGQKMLNDIVRPEIQPAA

SEQ ID NO: 323405 - protein, 330 aa, unidentified
MAHIGIDVSKNKLDCMWVRDLAAGKVKPKVFPNRRDQYPEMLRWLERNTGEAPEGLHVYLEATGIYHEPLAYWLHDQGVQVHVLNPAQVRSHAKGMGVRNKTDRKDSMMLARYGIERAPRRWQPEPPEVRELKRLLSRLGALEQDMRREENRLEKARFSEDTLAQASIDNVLQALREEHRRLQQQIDDHFDAHHHLKRDRALLESIPGIGRVLSASMTAALRSRAFTSARQAAAFHGLAPVLEESGATVRRPSRLAKIGSSRLRKALYMAAVVATRYNPDVRHQHQRLLTRGKAKMSAIGAAMRKLLHIAFGVLKSQTPYQARHETPCTP

SEQ ID NO: 323406 - protein, 416 aa, unidentified
MTIDEKGGIAMQVVYECCCGVDVHKKMVVACLNKGGKQELRQFGTMTTALRELCDWLIQNGCEMIAMESTASYWKPLYNLFELMGLNAMVVNAAHMKALPGRKTDVKDAEWISDLLRHGLLKASFIPDREQRELREISRYRKSMVEERARELNRLQKMLEGANIKLNSVVTSINGKSSRRILDQIIAGKTLTEDEVSTLLHGSMRMKLHQIILAIDGLVTPLQRRLLAQVVDHIDDMTRRISDLDALIFDYMKQYEQAIAAIDALPGIARRSAETILSEIGMDMSRFPSAAHLCSWAGLCPGNNESAGKRYSGKITKGNQTLKTTLVECAKAARNVPDSFFHAQYQRISIRRGKNRATVAVAHSMLIAIYHVLCDGVSFVDLGSDFYARFNRDKKIAACLKKLHDLGWQPTATALV

SEQ ID NO: 323407 - protein, 444 aa, unidentified
MATSKAKEAAKLEVVHPDAAGVDVGGSSHHVAIRGDAPGQTVREFGCYTKELHEMADWLLSSGVKIVALESTGVYWIPVYEVLERRGLEVLLVHARHVKGVSGRKSDVLDCQWLQRLLSYGLLRGAFRPEDQMCELRELNRLRSRLLRDQSRSVQHMQKALTVMNVQLTNAISDVAGVTGQKIVRAIVAGERDPQELASYRDARIKASEQEIAASLQGNWRAEHLLALKVALATFDFCSQQIEQCEVEIERAMQVLQRFTQEPEKGKKRSKAKNAPKFDVRERLFKMCGVDLTRINGIDVSTAMTIISEVGTDMSRFPSDKHFASWLGLCPGTNISGGKRLGAASKHSANRATQALKQAAAALRTSQSALGAYFRTLCGRMDKAKAVTAAAHKLARLIYALLTKGQEYLDQGQLYYEERYRERAVRQLQRRANKLGMLVVPAGC

SEQ ID NO: 323408 - protein, 376 aa, unidentified
MKDIRHVGLDVDSEKLAVAVAEPDGEVRSLGAIPYSADAVRRLVRSLGPARRLRVCYEAGPHGYGLYWTLTKMGVHCDVIAPTLIPVRPGDRVKTNRRDALKLARCYRAGDLTAVWVPDASHEALRDLVRAREAAKKDQLRAKHRLGKFLLRRGLRAANGVRNWTWKHLAWVKALRFEQAPQEAAFLDYLHEVEHSAERVKRLEAAIDQAIGAAPEQMRALVAGLQALRGIKLISAASIVAEVGPVSRFPRPKQLMGYSGLVSSESSTGAVVRRGAITKAGNAHLRRILGEAAWAYQSRPSMSADLRKRQQGLSEEVKELAWKAQHRLCSRRRRLIAKGKQPQKVTIALARELLGFIWAIGMQIEKEQPGQRRPAA

SEQ ID NO: 323409 - protein, 415 aa, unidentified
MGKIIERCAGIDVGKRFLLCCALTGAAHEEPHSKTLRFDTTVLALESLHKWLREEGVTHVVMESTGSYWIPIFNILEGEFVVVLANPEEVKNRKGHKTDRKDAEHLADLLRHSHVRASYIPTKQIRDLRNLTRRRVQLMEDATRERNRVQKLLEQTNVKIASVLSDIFGVSGQRMLLALLEGQSTPEEMAGLARGTAHRKIPQLIEAMQGHRMTDHERFLIRSSLRHLGCLEEELEILDTEILNRMRTIPFQHAFTLLQTMPGVGELAAAAILAETGIDMAPFPTAEQMSSWAGLCPGKRESAGIQKGSHTTHGNAYLRTALVQCAWAATRKRGSVFQARFQRIAPRRGPKRAIVAVAHQMLIILHSMLTARVPFRAAEGEHRQRRRLRRAHHHLRCLRHLGLEVQIANPAGLMP

SEQ ID NO: 323410 - protein, 422 aa, unidentified
MRMKKYIRQIEKRQRIGIDTMVIGIDIGKEFNAVCLMDKEGYVLGRYPKIYNSRKGFDYFRAVVEQMKRDRGFSHVLIGMEPTGHYWRKIAFFALDQGYEVRFVRTTALKHQRELDESSSAKSDMRDAFTIANIVREGKYIDTVIEDGVFRDLRTLSHTRERLVRYNTGCAHVLKAVLDDYFPELTGIFWSMKAKGLWALLDRCPFPEDIRNVGPDAVQELLSRITKRKACEKAQAVYRAAMESVGLKVIGSADRMRLGVCLDEVKRSEQRLRDIEHQIADLLHKVPLAEHILSIPGIGVVTCGVFFGELGNPDYFKDPKEIVKYAGYDPKENDSGLHTGRKIISKKGRWLLRKYLYFMAMRVVHRTVFFKKYYENKQRGVLRPLAKKEALCAVVIKLIRVIFALMRDKRMFTEEMSCRRAA

SEQ ID NO: 323411 - protein, 339 aa, unidentified
MKYTPVGVDIAKHVIQVHFIDEHTGEVIDKQLRRQDFLMFFCNREPCLIGIEACGGSQHWARELTKLGHKVRLLQARFVKAFVIGNKNDVMDARAIWMAVQQPCKEIAVKTEEQQSFLVLHRTRMQLVKFRTAQINSLHGMLLEFGETIHKGRAAMDREFPEALERLKERLPPYVISVLDNQFNKLNELDLQIDDIEKQLTSVARQNETCRRLLDIPGVGPLIATAAVAIMGEASAFKSGREFAAYVGLVPRQTGSGGKIRLPGISKRGDKYLRTLFIHGARAAALLTKEPGPWITELKKRRPASVAIVAMANKLARTVWAIAAHGRKYNKNHVSIRPY

SEQ ID NO: 323412 - protein, 345 aa, unidentified
MKKIIIGIDFSKETFDATLFDSRNSEFSEAVQSAVHEKFTNKKEGFQAFLTWIKSSVKKINSDELLLCGEKTGKYSLALSNFLYAKGYSIWLDSGLRIKRSLGISRGKSDKADSLKIALYAYRYQDMAVCYVPLSNNVSRLKELFLYRQHLVSQMKAMAVRKNVTDDFKKELGDVRFIVDSATKIIQQIKATIKKCEEKMQEIIEEDEELKTTHDSITSVKGISLINATAFIAYTNNFKDFGGNAKKIATYWGVAAFAQESGTSVHKGARVSKIASKMLKSLLTQAARIAVRWEPKFRQYFEHLISRGKHQGVALNNVKNKLIHVITALAVSKEKYNQEYKCINR

SEQ ID NO: 323413 - protein, 372 aa, unidentified
MNYNTVYVGMDVHKESFTLCAYTIDAEKGSHFQRTEADYKNVLKYLEFLRTVYGNDANFICGYEAGCLGYTLYHQLTEHHVNCVILAPTTMLEQRSKKRIKTDKRDAEIIAKCLAQHNYSPVHIPTAADEETKEFLRMRDDHKLALKKVKQQILAFCLRHNYRYDGNSHWTAAHIKWLKSLNPEALYKEILDEYLLTYTALSDKLERLDKRIEELASKDEYKESVKKLCCFIGVKTHTALSVLVEVGDFQRFASAQNFASYLGLVPGEDSSGDGQTRLGITKAGNRHVRMLLTEASQCYARGQIGFKSKELKSRQAGNSPQVIAYADKANERLRRRYYKMVLGKSKKHNVAKTAIARELACFMWGMMTEHIA

SEQ ID NO: 323414 - protein, 390 aa, unidentified
MEARTVNNLPPAAPHDDAVRCLLAIELSKKSWIVAVNTPLSDKISRYTLEACDWKGLLDLCERIRTGVAREMKKPVEIISCYEAGYDGFWLHRLLEAHGIRNYVIDPASLQVDRRARRAKTDRVDVERLLRSLMAYLRGEPKVWSVVRVPSVVEEDDRRLHRERDRLINERIQHSNRIKGLLAIHGIYEYEPLRRDRMQQLERLRTADGQTLPPRLKAEILRELQRLVLVIGMIKTIEAERDAIASAKTEAEHTSAKKIQNLAKIKCIGPEFANSLVGEVFYRSFDNRKQLASYVGLTPAHFQSGAMSRDQGISKAGNAKARTVMIELAWLWLRHQPDSPLSIWFRDRVGKLKGRIRRITIVAVARRLLIALWRYLENGMVPEGAILKVK

SEQ ID NO: 323415 - protein, 389 aa, unidentified
MLLDHLSDGLTAIRTQFGAIFVSLELSRSNWLITSLSPGKGEKMSKHSVAAGDVAGLMKQFADLRRKAEARTGESYPIITIQEAGLDGFWLHRVLQQNGIESHVVDPASIATPRRRRRVKTDRLDGEALLRALLAYKRGEPRVCAMVVAPSPEEEDRRRICRERQSLIAERITHVNRIKGLLFAQGISGYEPLRRDRRARLEALRTGDGRELPAHLKAQIGRELDRIELLLEQVKAVEAERDALLVAARKPASEEAAPDAVTLLLALKGMGANFAAVLWSEAFYRQFSNRRQVAAYAGLAATPWQSGGIRHEQGVSRAGNPRLRTTMIQIAWLWIRHQPQSALTRWFKERSPQGRKRAIVALARKLLVALWKYVTQGVVIEGAVMKPAA

SEQ ID NO: 323416 - protein, 426 aa, unidentified
MQYCLFIGVDVALKGNQFCVMNFDQHIYFNLKFPNNPEGNDMVINKIKDIENKFFFEKIIIVMESTGMYSFHPACYLSSNEYLNKFHTEVYQINACDFDKYKKSFHDLDKEDGIDAYILADYARVGRTKALHPFRGSQYIALQRLTRQRYHICKELIREKTYVLTNLYLSFSGLMSLDKNELPFSDLFGATSSAFLEEFVSPDQIAESSVEELINFISEKSKNHSSNLNDKVTALNKAMRASYRLDQTAYEPINIAIACSLNTIKFYQQQLKNIDKAILNAALGLDSNTYHILLSIRGIGKVYAAGIMAEIGNIDRFSHNSKLAKYSGLYWKRNQSGEFDSQDKKSSKKSNKYLRYYLVEATASCVRQNFPFIKDYYNLKYKEVTKHQHKRALVLSARKLERLIFGLLRKNQYYKPIDSVQNSKIS

SEQ ID NO: 323417 - protein, 410 aa, unidentified
MVKENFIYVGIDLHKETHTAVMIDCYNQKLGEITFPNRPADFPKLVTKVKKCNTDAKEVVYGLENAYGYGRPLAVWLIDKGYFVKDVNTAISHRQAKHRGAMYRKSDSDDAEAIALATLNMLDKLPDACPNDAYWSLGQLVHRRDNIMKQRTRLVNQLHEQLCIAYPSYKQFFNDISRPTALYFWEHYPSRKYLKGKSVEDLRAELVPVSHNKCSTKTCEKILDAVASDKVKNNAYQDARDMVTLSIVSDLQHYDSQLAEVDKMLEQMYKMLGCTLTTIPGVNVITAVKILAEIGDIKRFSNANKLAQFAGIAPLHLSSSGKGKDVATKQGNRRLQATIYFLAIQMVQISSKGTPRNPVVRAYYEKRKAEGKTSQQALICISRRLISVIYGMLKNGTEYRMPVVENAGEK

SEQ ID NO: 323418 - protein, 420 aa, unidentified
MVARSVVKIAVDPHKRINAVVVVDTSGSVLARGTFTQSTTGFAELMGFARRWPRREWAVEGATGVGKNLAQRLVVKGETVFDVPSKKSSLVRAFSATSGRKSDDVDAYSVALACLHATGLNQVRVDERAETLRLLSHRRDELVGSRTQAVCRLHRELQILIAGGASRALTAAKAKALLASVRPRDEVGKVRKSLALDQLADLVAIDRRLKDIDAQIKTVVAETHTSVTEVRGVGPVVAAIVLGEVRDISRFPSKHHFASYNGSAPTTWGSAGDARPCVNLHGNRRLNHALHIAAIVQLRYDCEGRRYYLRKIAEGKTPKEARRCLKRRISDAIYHQLAADAQAAERGPGGQMGATTKISAVDPTPTVDTSIKPQPGPQTEGYASRRPRVLTRPLDTERCHSDSHGNGGRRGRCADVRVAA

SEQ ID NO: 323419 - protein, 391 aa, unidentified
MYFVGIDIAKRHHEACIIDSAGQSQGKTLRFPNTQAGGQKLIQWMQHVDPDLSSTEVALEATGHYWLALHSFLRKHGVKVQVINPIQSDAFRNMYIRQTKNDTKDAFIIAEVLRFGRYTTTELGSDEIVALRQLSRFRFSLVDSISDLKRQVISVLDMLFPEYERLFSDLFGKTSSELLMEYTTPEEILAVDTEELAAFMAKHSRNRLGLDKAEELKSAAASSFGIDTALDAYRLQLRLLLQQIRFTEEQLESLNAEIEKRLKSMDTNLVTIPGIGPVLAAAILGEIGDISRFPTGVKLVAFAGIDPTVRSSGEFTGTHNRMSKRGSPYLRRAIWLAANVAKMHNPILKDFYEQKRAQGKHHLAATGAVARKMTYIIHAVLRDKKPYEPMA

SEQ ID NO: 323420 - protein, 464 aa, unidentified
MRKARPWGRKLGKKIVDVTAGLEVLRPHAAGIDVGNAEHYVAVPAGRDAQPVQTFGSFTADLHRMGRWLQACRIETVVMQATGVYWMALYQVLESYGLQVYVVNAKYTKTLPGRKTDVLECQWLQKLHTFGLLNNSFLPPEQIRVLRTYLRQRENLVAAAATCIQQMQKVLTEMNVQLANVLSDLSGMTGMRILQAILDGQRDPQRLAALADPHVQASRNEIAQSLEGHGREDLLFVLQQVHDLYFTYLESITACDRRVEAHLKTLEAKVALAAQPLPETPHQNRLPRRKHIPQTNLQEELYRITGVDLTRIDGIQVQTAQVVISEVGLDMTRWPDEHRFASWLGLSPNHRITGGRVIRRGTKKVINRAATALRLAARTLHHSKSYLGAKYRRLRAKLGAPKAITALAHQLARLIYRLLRFGTQYHDKGMEHYERKYRETQMNWLQKQAAQLNMQLIPAQGVTR

SEQ ID NO: 323421 - protein, 335 aa, unidentified
MWHIGIDLHRETVVFAAVNDVGEVRPPVRIACSEVARIISAFEQLRPFRAVIEATRAYRWLFKELSPLGTILLAHPLRLRAMVQRRSKTDRLDAQLLAQLLRINQIPLAYIPSEEFQMLRDITRQRARLTQQETQTKNLLRWLLARHNLKAPYVCPFGPRGLYWFSRQDFGVVDNSIRDELLLRLQHYQKQMTAVADRLSAVRPQYPQVEALLVLHGVGLYTAMVIVAEFGDVRRFRYAKQAGAYTGLTARIDQSGSHCYSGHITRQGSPFLRHVLIEAAMKIVHQDVALANFSTRIRKRSSAKIARVATTRKLAEICWRRLMRWHQEQDVKTAA

SEQ ID NO: 323422 - protein, 388 aa, unidentified
MFFLGIDIGKNTHVASLLDEKAKVIFKAYSFANTLDAAEALLVKLEPYKDSLEIGMEATGHYWLSLYSFLTEHNFIVHVINPIQTDGWRKGIEIRKRKTDVIDSVLIADLIRYGDFLETSLADEDTLSLRNLTRFRAYLVNSVSDLKRKAIAVLDQIFPEYASVFSNVFGQTSKELLKSLSLPSDYENLSATKIEEVLSNITQKKKASETISTLSDKASRSFGISFCKDSFAFQLKLIIEQICFIEEQITSVELEIEQLMSKLGTNIKTIPGVGNVIGAVILGEIGDIERFDNPSKLVAYAGLDASVSQSGEYEASSGKLSKRGSPYLRKALYMAAQRAEFCDPVFHAYYEKKRNEGKHHLVATNAVARKLCHTIYAILKKDIPYEIQ

SEQ ID NO: 323423 - protein, 418 aa, unidentified
MEVLYPRCCGLDVHKSSITACALLREKGQVRTERRRFTTMTQDLEALAIWLHELQVTHVAVESTGVYWKPVWNILEGRFTIILANAQHVKNVPGRKTDAKDSEWIAELVQHGLLRSSYVPPEGIRDLRDLTRGRATLSQEASRIASRIQKVLEDANIKLSSVASNTLGKSGRAMLDALVAGQTDPEQLADLALGQLRAKIPQLRLALKGGIREHHRFLLKRLLHQLRFIENEIDLLDQRLEELGQGDPVLAAAVARWTTVPGVDRVAAWSLAAEIGIAMEQFPTAAHLGSWAGLCPGNCESAGQRLSGKTRKGSPWLGRMACQCAWAAARTKNTYLSVQFRRLAARRGKKRAIIAVAHSILVIAYYLQKKQCDYRDLGSDYFDRLNADGLKRYLIRRLEALGHKVTIEAAGDAAYRHE

SEQ ID NO: 323424 - protein, 355 aa, unidentified
MSQTLNTSIAVVGIDIGKNSFHLVGQDQRGSIVLRQKWSRVQVEARLANLPPCLIGMEACVGAHHLSRKLQMLGHDARLMPAKYVRPYSKGQKNDFRDAEAIAEAVQRPTMKFVATKTADQLDLQALHRVRERLVGQRTGIINQIRAFLLERGIAVRQGLRFLRAELPGILATRSDVLSPRMLHLVEDLAADWRRLDARIEGLSGEIERLARQDKGCERLMTVPGIGPIISSAMVAAIGTGDAFSKGRDFGAWLGLVPKQISTGDRTILGSISKRGNRYLRALFVQAAWVVLVKLGKKWERYGLKSWIEAARKRLHHNVLAIALANKLARIAWAVLNKGRAFECVKVNEMTSQPV

SEQ ID NO: 323425 - protein, 315 aa, unidentified
MQKQASFVGIDISKNFLDVHILPEDTRHSYPYEPQKVKALIRKLKQLKPVLIVMEATGGYELVIASKLAEAKLPVAVVNPRQVRDYARAIGQLAKTDAIDAYVIARFAQDVRPEAREQLTLKEQQLKELIMRRQQLIEMRTAEKNRLSRAFSQQIVKGIEKIIQALDAQIQALDDQLKREIKDNPTWDRKIEVITSAPGIGITTANMLLFCLPELGKLNRRQIAALVGTAPMNRDSGMMRGKRTIVGGRAAVRKSLHMPTLASATRWNKKLKVFYEQLLARGKKHKVALTACMRKLIIILNAMLKNDRVYDPKFC

SEQ ID NO: 323426 - protein, 424 aa, unidentified
MSKIEISTPAIAAWIGIDWADQTHVYALEVSGSEKIETGQLQQTPEAIHQWAQQLEQRFAGQPVAIALEQSRGALIFALMAHPFLLIYPVNPHAMAQYRKAFKVSGAKSDEADARLQLDFLLKHRDQLRLWQPDTVETRLLRLLCEDRRQAVDQRTALHNQLTSQLKICFPQALDWIQSWDYPLACAFLKRWPSLHSLQSSKPNTLRRFLAQQGCRKLQRYEPLIGQIRSSQPLTTDQALLRAGLMKVTWLVDQIRCLTEAIENYNQQISQLFSQHPDHDLFCSLPGAGPALGPRLLCALGTDRSRFQDAQEVQTLFGIAPVMECSGQSRWVHWRWACPKLIRQTFHEFAGASIPLCSWAAAFYQKMRGRGKRHHAAVRALAFKWIRIIYACWKNRTPYSETQYLTALEKRQQPLLAAGAVQAR

SEQ ID NO: 323427 - protein, 470 aa, unidentified
MSRSQSPDPFAQGEIRSTEGLPVVNPHAAGADIGAESIYVCIPGPGQTQIVRSFGTYTADLHAIADWLVENGIQTIAMESTGVYWIPLFEVLEERGIHCCLISGNMARRLPARHKTDVLDCQWIQTLHSLGLLTESFRPDADLIALRSLLRHRAQLIEHRSPHVLHMQKALIHMNIRLDQAVSDVTGQTGLAIIRAIVAGERDPHKLAALRNPRCKKTEDEIAQALTGTWREEHLFVLKQSLEFYDFYTRQIEACDLEIERTYSAIRPDWPDPAPDDREPLPPNKRGSHSKNLPKETPIRVRQHLRRLTGVDITAVDGLSLDLAQKIVSEIGTDMSQFPTVKHFTSWLRLCPNNQVTGGKTIRSSTGKSHNRARQAFLQAAASVACSDCAFGAFYRRLKARVGPAQAQVATAHKIARVVYHMLKFKVEYLPTSAQEYEQQFREREIRHLQRKAARLGFTLSPQPASGAVS

SEQ ID NO: 323428 - protein, 311 aa, unidentified
MSAAEKELSHKSFDNTPEGIQSLLDWIAGYHLSLSKLLFCAENMGSYVTELSVSSVSMGFSLALVCPLTIKKSIGLQRGKNDRIDAKRIANYAVLHYRKLELYKLPNKDLVRLRGWIIIRDNLVKQKVSSIKLLETFSQMAKLADVTESISFLEEQLKSIKEKILEVEEDMEQLIAASTSLYTNYLLLRSIKGIGIINAIVLLCVTDNFQRFDNPRKFACYCGVAPFEHTSGISIRGKTQTSSLANKEVKVYLTRAAITAISWDPQMKAYYKRKIAEGKHKASVINAVRAKIIARSFAVIRRQTPFVTLAV

SEQ ID NO: 323429 - protein, 343 aa, unidentified
MSEVSIIGLDIAKNVFQAHGVDVGGRKLFSRRIARSKVLEFFVGVPRCLVALEACGGAYHWARELVRMGHEVRIMPPAYVKPFVKRQKNDAADAEAICEAVQRPNMRFVAIKSEEQQASALVFRTRDLLVKQRTQIINAIRGHMTEYGWVAPKGPSWVAMLRDLIDEEIGASLPQAAREMFRVMLGMLDELDQRIAELDKEIARRAREDEVARRLMTIPGIGPIVATAIAALAPAAETFRRGRDFAAWLGLPPLQKSTGGKTKLGRTSKMGERTLRRLLIIGSSSVVRQASRRGAPEGSWLAGMLARKPRMLVTVAQANKTARIIWALLTKKEDYKAPVAASA

SEQ ID NO: 323430 - protein, 399 aa, unidentified
MLETIPLEVRVSVDIGSHQHRVAIGLSSGEVLEEFDIVHQSEGFDHFFARIATYEQQYACSVAVAMEGFNGYARPLDTMIRARDYRLYNINNLKLARFKEIFPGAAKSDALDARKGLELFQLRDHLPLAKDVLQEVAATPEENAILKRLTRRRRQLVREKGRVLNRLQSDLQAVCPGLLEITNDAGNLWFLRFLTSRPELTQLARLRRTSLLKIRGVGATYTGAIQAWQKHAVFSHEVAWVGEMIQADAARILELLGQMKALEAKIDAVAQESSVASILDSIPGFGRVCSAELAGEIGTIERFRSDASLGLYVGMSNLDNSSGKFHGSKAPKHVNTRAKAAMMIAVDRHRKCVPESQKYYAKKRAEGKSHNQAIRALGRHLCRVIYQLLKEERDYEIRD

SEQ ID NO: 323431 - protein, 458 aa, unidentified
MQTCPPGTVAGFASVSGSSAHEVVERRDEVPTKPAMWQGPGCQGAPLVPHNTSTSASEVFAGIDWGGSFHQVCLINAHGDVIVQQRVQHDLAGLAELDRLLLVHRNAAGRLRVAIERADGLLVEHLHTIEVEVFCVSPKISARARERYRLAAAKSDAFDAFVLADTLRHEHRHWRALSPASPALAELRAISRDRDRVVIAQQATENRLRAVLEAYHPAPLHLFSSLDRDITLDFVTDYPTPEQAARVGEARMQQFCRRHGYSGRTDPTVLVERLRPHLLSAAEGTEAGKAFSASMFTEELRLLNAHLRAYDKRLVELLDQHPDAPIFTSFPGIGPVVAAALISEMGEDRGRFPAPEALLAEAGLSPVTRASGRTRQVRFRYAANRRMRHMIDWWAFVAAREDAWSRRIYDDARARRQGKYRALRGLGSRWTRILWRCWTDHTTYDPAIHHKQQEPAQA

SEQ ID NO: 323432 - protein, 388 aa, unidentified
MDERKGFRWFLGIDISKETFDACCISGQVEKHFSISTSMDRKGFEELIKQLTSLSVPQESVLVGMESTACYHVNLYSFLISLGYTVIVINPLLISNFVKLQLRKTKTDKKDAYAIAQFLLLNRDSLGRTVGSSDFSDIRDLSRQRESLVDQMTSIKIEIKRLLTMTFPELEHIACIFTKSMLRLLCQYPSAVSIRQAKHSKIARILIPGSYGKQTDASVERIVKAAETSIGTASSAKEIILKQKVSLLIQLEQHLQELTDILTEQCKGKMRKDMDILTSMRGIGGKTAMNFLIEVGRDVKEFENHKKVIAMAGLDPALYQSGKTDRKGKITKRGNRHLRRVIWLMTTKVIQFNERFKQYYLKRIQDGLPYKMAVLMIVDCTLHIRIFH

SEQ ID NO: 323433 - protein, 403 aa, unidentified
MQPSAGIDWGSEQHAVCVLDATGTILSQFIVSHTAAGLKELTQRLARFGPPDQLRVALERPSGVLVETLVAAGHPVVPIHPNAVKASRPRYRAAGGKSDPGDAYILGDLLRTDGHRFPSLRPASDEIKALRALVRTRDDLVAERCALANQLRSLLESFWPGAAVLFADVDSPIALTFLDRYPTPQSAARLGVKRLAAFLAQHAYCGHRTPDELLARLRSAPRPLAGEAEAEAKGELVRALATVLRTLVEQLQKLSARLEHAVAQLPDGQLVMSFPRAGKINAAQILAELGDDRARFQSDQHLAAEAGVAPVTHASGKSRGVTWRWACNKRLRLALTTFADNSRHASPWAAEVYHRARLRGADHPHAIRILARAWTRVLWRAWQDRTPYNPLQHRAAAALAAGG

SEQ ID NO: 323434 - protein, 365 aa, unidentified
MEEPKKEKARYVGIDLGKKTYNVAIVGKGGKPAMSNGETFETGRQRLYKKLRRTDIVGLEAGNMAFIMAKEIEAAVGCRVYVLNPSHLPLIYGSMKKTDKEDSLKLARIIEYFPEDRLPLVPLPSDKEIMRRKILSYYRRAQQSRTRAINQLHGLFVSQGITTIKKADLSTSESRMKAVKALSGLELEEADYLVACLQAQEQRIAALKLRIKEESAEDGEIKRLQSVPGVGPLTAFAFAAHVAAERFENASQVSNYLGLVPRVYISGDTVRYGRITKRGNSYLRAFLVQASWSLVLSKDGGKLKDRFYYMTVEKSISKKKAIVAVARRLAELLYALMKYGADYEPRPFMPKMRGAEELARLAMCA

SEQ ID NO: 323435 - protein, 312 aa, unidentified
MTKTICGVDISKKHLDARIVPGEAFARFTNDAAGIAKLAAFSGEHKVELVVMEATGGYERLAFTLLWEAGAACAIANPRSVRQYAEAMGFLEKTDRIDAFIIARFAHSKGLKPTPPSSKIQCRLKGLVVRLRQLTDDLVVNKQRRHQVEDEEIRATFDDIIALIKRQSRRLEGEIASLIDDDPLWAVLDKTFRTVKGVADRTVARIMAELPEIGTYDNKAISKLVGLAPLAHDSGKKNGKRSIRGGRSGVRSILFLVADIARRYDPSLADFHRRLVAAGKPKMVVRVALAHKLLVRLNAKARDARAQYANAT

SEQ ID NO: 323436 - protein, 345 aa, unidentified
MKYYAGLDVSVKETAICIIDETGKICRELKVTSHPDDLVSTLNNRAYNLVRIGLEAGPLSQWLFSGLAEAGLPAVCIETRHTKAFLKAQVNKTDRNDARGIAQMMRVNLFRPVHVKTLTSQKRRALLTARKLLQEKAIAIENDIRGLLRNFGLKVGFIGTIGFEARIHQLIDGTPDLGEIISPLLAAREKLRAEFAKLHRKVLDLVRDDDTCRRLMTIPGVGPVTSLAFVSTIDVPARFKNSRAVGPALGLTPVLNQSGESHRVGRVSLCGDDMMRALLYEAAQVMLSRVKKWSWLKAWAMNIARRRGRSKAIVALARRLAVIMHRMWSDSSEFRWTRENEVIPV

SEQ ID NO: 323437 - protein, 344 aa, unidentified
MDHFGGLDVSVKETSICIVDDTGRIVKEVKVASEPAALLKVLGNPTYRFKRIGLEAGPLSQWLFSALAEAELPVICVETRHMQAVLKAQINKTDRNDARGIAQMIRVGLYRPVHVKTLRSQKLRMLLTHRKLLQSKAIAIENDLRGTLRNFGLKVGMVGKVRFEARIQELVENIPDLAVLVEPLLIVRRVLREQIVILHRRLLAIVREDEVCRRLMTTPGVGPVVALTYRATVDVPARFRKSKSVGAVFGLTCSRYQSGEIDWSGKISRCGDEMMRTMLYEAAQSMLRSKKWSWLKAWAMQIARRRGMKKAIVALARRLAVIMHRIWVDGTEFCWTREQATAAA

SEQ ID NO: 323438 - protein, 417 aa, unidentified
MKYYTSTTEYNCGIDLHAHQMYVCVMDRQGKKLVHCNIKNNDFDYFLKLVEAYKHSLTVCCECMFGWYWLADACQAAGLTFVLAHALYVKAIHGGKNKNDRIDSEKLTHLLRSNLIPPAYVYPAAQRPLRALLRQRVFYVWRRSELLARIYSHQLAHNRTPARQTRRNRDPWEQQLLKAEDHPLRQIALQNDLAMIRHFDQQIFQLEEELQRQTKKVASRDYALLQTVPGIGEALGLTILYEIGPIKRFPTVKDFVSYCRLVKGTVASAGKIKGLRGAKLGNPYLRWAFGEAAVIAKRDHALIGPLAQRLEAQMNGNKFKANTVVAIKLARAVYFMLKNHTGFDPDRLVAALQKPFSPGRRQPGRLTGCVKKVRPPSVADHSSCASSTPVCVGPASNPALSIGTCGQRLTSPPTPNP

SEQ ID NO: 323439 - protein, 401 aa, unidentified
MNAVGIDVSKGKSTVSILRPFGEIVYSPFDINHSSSDINALIQLINSVEGESRIVMEYTGRYYEVLAHQLSEANLFVSVVNPKLIKDFDNDSLRKVKSDNADSVKIARYALDKWHKLQQYGDMEELRNQLKTMNRQFGFYMKHKTAMKNNLIGILDQTYPGVNTYFDSPARSNGSQKWVDFASTYWHVDCVRKMSLNAFIEHYQKWCKRRKYNFNKTKAEEIYEKAKELVPVLPKDDITKMIIKQAVDQLNNTSATIEKLRSLMDETASKLPEYPVVMQMKGVGPSLGPQLIAEIGDITRFHKKSALTAFAGIDPGVNESGSYEQKSVPTTKRGSADLRKTLFQIMDVLIKTAPIDDPVYQFLDKKRSQGKPYYVYMTAGANKFLRVYYGRVTEYLSTLSD

SEQ ID NO: 323440 - protein, 342 aa, unidentified
MEISTIGIDLSKTTFHVIGLNTQGEIVLRRKFSRKQLLQFTSNRQQMLIGMEACGGAHFLGRVLRTQGHDAKLMPAQFVKAYRKSNKNDYLDAEAIAEAVQRPTMRFVPIKTDDQLDLQALHRVRDRWVARRTAVMNQMRGFLLERGITVRKGPSHLTTQLQRMLEDADTPLSGRLRLLILELKHEWDELETRIEAANAELQLIAKQDDACNRLMEIPGFGPLVSTALVAAIGNGITFRKGRDLAAWLGLVPRQHSTGGKTRLLGISKRGNEYLRRMFLHGARSVVAQIGRKPSALGLWIADLSARSHRNVTVVALANKMARTAWAILSKGTRYCAPAMAAA

SEQ ID NO: 323441 - protein, 440 aa, unidentified
MGAQSNGAALTETRGDPAAAGTHLFVGVDIGRFYHLVAAIPQERMENGSWERAVARRFATSADGFEELVAWLHSFDVSVDDIRVGLEPTGGLYSRTVVAWLVRHGFQVDWLQNWAVHDRRHLLIGKQAKSDALDARLIARLLYERECLGLVGGFLHRTPMAAEGLRMLVRNRFKLLSLHTRHRLQLAALEDVLFPEFKEVFRGSQTKLAARRVLEHFPTPADLAVAPREDIREVIYRQAKAMRLVEAADRLQTLAARSAGLVEGIEEIVRTQRHVLRELNVLDEELRIADAAIAEALESWPPRQRAILDSLPGMSVQRQAVLLSAIGDLGTFRTDRELRKLLGWYPETLESGTSVSKHRLGLSGNRPARRELWLWSMSIVAPRFPANPFKDYYARLRARNLAGHVAIGHVAGKLISVLFYCMRNGEPYDPVRHARDLGFG

SEQ ID NO: 323442 - protein, 328 aa, unidentified
MLHVGLDLSRRRLDVCVLSDEAELVEELAAPPDPEGLRHLMGKVGRHGQPVRAVIESMTGARFVHDTLEQLGWDVLIADAQRVKGLAPLTCKTDKVDARVLAVLSHRNLVPAIWLPDPRVRREREQARFRLHLVKHKSMPGHRIHATLMTFGQPCPVSDLFGLEGRKLLDQFQIPQPWRETVDASLYLIDYLESEIDAIERELRSSGAEHRYVPLLLTVPGIGWVLAFTIAAEIGDITRFPSARKLVGYTGLCPPVRQSGDSDRRGPCPNRGPDTCAGRCSKRPCTRSGTPPTVSATSATNSAWANSAAPASPRSTLPESSPRRSGTC

SEQ ID NO: 323443 - protein, 377 aa, unidentified
MPDVTASLHPADVRLWVSLDVHKFSIVAATLPPSGGKPEVSRIETTERAIRRFIDRLGGPEGLAVCYEAGPGGFALWRLLTRIGVACDVVAPSLVPVRAGDRVKTDRRDAKKLVALYRAGLLRFVFAPTPELEGLRDLLRCRDDLRCARSAARHRVLKALLRHGRIFRDGKTAWSQKHRRWINAQRLRDPLAHEALEQLLIHVDGIERQRDALDAKLEQIARSDRWREQVQILTRFRGIGTLTALGLIAEIGDFARFGHPRELASWLGITPGEYSSGDQQHRGHITNAGNRHARRLLVEAAWHYRHAPRRPASGPQPDQRAWQAQVRLHHRYRHLTGHGRRTTVVNIAIARELVGFLWAAMTDQPLTTRNQPEEVAA

SEQ ID NO: 323444 - protein, 388 aa, unidentified
MPVAHHRSNTRAAIRTDLGAIFVSLELSRSVWLITSLSSGAGEKMSKHSVRSGDIASLLARFARLKEKARTRTGKNYPVLVIQEAGLDGFWIHRVLQSEDVESHVVDPASIATSRRRRRAKTDKIDGEALLRALMAYKRGEPRVCAMVRAPTPQEEDRRRIGRERKTLTRERVEHVNRIKGLLFAQGICTYDPMLRNRRQRLSELKTGDGRPLPGHLKKQISRELDRLELLLQQIKAVEAERDALLAAMDDSAPAPASMLMSLKGIGPEFAGILWLEGLFRNFGNRRQVAAYAGLAPTPWRSGSVDREQGVSKAGNPRLRTTMIQVAWLWLQHQPRSALSVWYQQRVKVNGARVRKTTIVALARKLLVALWKYVTAGIVIEGATMTAA

SEQ ID NO: 323445 - protein, 383 aa, unidentified
MDTAATRTYEYSVFDPVLYLAFELSDANWKLGFTTGAGRRPRQRNIKARDLDALQEEIHRTKKHFEMTGAARIVSCYEAGRDGFWLHRYLVEQGIENLVVDSSSIQVNRRARQAKTDRMDVEKLLSQLIRYRSGERDVWSVVHVPSKEEEDSRHLHRELETLKKDRTRHINRIKSFLVGQGIRMKVKKEFLEEIEGVRKWDGTPLPESLKARLQREYRRLQLVQEQIRELEQERVNAIRHSESESVKTVRSLLQLRGIGLNASWLFGMEFFSWRMFNNRKEVGSLSGLVPMPHQSGDSYRERGISKAGNRHIRAMAIEIAWGWLRYQPESELTKWYEKKFGQGSKRIRKIGIVALARKLIIALWRYLETGVVPEGAVLKTRLI

SEQ ID NO: 323446 - protein, 357 aa, unidentified
MNRDKYVGMDVDQATIVAHVTDGDGKFLMETFLKTKAEGIRQFLRSLEGRVHVAFEEGQQASWLYDIIRPLVTETIVCDARRNKTMGSKGDRIDARKICQWLRLGELHAVYHGQHGRELKELVHCYSKLVGDTTRTMNRLKSLFRGQGIVCRGQGVYNWQRQEEWKSLLKSEALRTRADLLYKQLEVLKALREEAKKAMLEEARRQTSNKLLLGVPGIGRVRAAMMMGIVGTPHRFRTKRQYWGYCGFGVVTHMSGEYEIKDGRRERRKKPLQTRGLNDNFNRRMKAVYKGAAVTAISAEPFKSYYQRMIDNKMRSEMAILTVARKIAAISLAIWKKGDKFQPGLVNQAQSAGDEKG

SEQ ID NO: 323447 - protein, 318 aa, unidentified
MQISGCFIGVDVGKFELQVAGHEGAIVSGVLPNSRSGIVGWLKRLPAGSVIAMEATGGYQELLARLAHERAFVVYVLNPTHVHHYAISLGNRGKTDRLDAQVIAQYIAQRHAKLHRYEPISPELQQVRALQALRSTVVRVGTSLRLSAQRHGCASKHQKQALASLGCWAEQLERELIAKIKAQSEWAKTYGLLTGICGIGPINGAALTTLFNRIHFASSDAAVAFCGLDPRPNESGRKVGRRRLSKQGDKAARTLLYNAASSAARTDHFKDYYAMLRARGLASTAALVVIARKLLRIAYGVWRTGQAFDPGRLNLKKA

SEQ ID NO: 323448 - protein, 319 aa, unidentified
MLVGIDVAKAELVIARRPNGERWSVTNDERGVATLVERLRALAPQVIVLEATGGYELLAVAALAAAALPVVVVNPRQVRDFARATGQLAKTDRIDADVLALFADRVRPAVRPIADAEAQELDALLTRRRQLLEMLGAERNRLGQVFGKGKRPVKKSLKAHISYLERELHLADTDLGDMVRESPAWRERDDLLQSVPGVGRVVSFTLLAELPELGRLSRRAIAKLVGVAPLSRDSGTLRGRRFVHGGRASVRAVLYMGALVATQRNTRIRAFYQRLLRAGKPKKLALVACMRKLLTILNTMVRTRCPWCPELTAGTPMPA

SEQ ID NO: 323449 - protein, 424 aa, unidentified
MDQLFQYFVGIDWGTQTHRVAVLDGNGRVVEQYDAAHSGDGLVALINKLKQRTECAPARVAIGIEVAWGALVETLVESGFTLFSINPKQVDRFRDRFTVAGAKDDARDALVLASSLRTDRQSYKRVNIDCPDLLRLRELSRFEDELKVELRRATNRLWQQLHRYYPQMLAISPAADDRLMWDLLTVAPTPAEGARISSLRVQRILKANRIRRLSADEVLSAFRTAPLALAPGSAEAACEHVLLLLPHVKLLDDQLREVGNRIARLLGTMTEMITGSDQPPCDAGLILSIPGIGPAVAAALLTEASRPIRERDYEALRCYAGTAPVTRQSGKRKTVGMRHACSPRLRNAVYHWATSSLSCDSKSRRQYDSLRASGHHHARALRGIADRLLGVLIALLKSQKAFDRARRDGNASAKNLPVVALACR

SEQ ID NO: 323450 - protein, 360 aa, unidentified
MAADDLGSVSIELKEPAVTTFVGMDVHRAQITYNALNTDSGEVRTGRVCPANRGTVRAFLAAFTAGETIVAVEAMTGWRFIAEECARAGVDVRLAEPAETRLRQDRKRRAKTDKLDARLLRELLVEGRLPESWIAPDHILDLRAKVRLRKTLVSQRTQWLQRVHAVLFHHGVPVQPERLARLEARSAHAQLADLELPAVAEQQITVALRVVEHLNDEVHELDLELERFARRQPGCRALMGHYGSGPLVSTAIVAELGDARRFSSSKQAVRCAGLDVTVHESDVRRRGGHLSRQGSPVLRWAVFEAAQCAARPSSPDHAYYVQVKERLGANRAALTIARKLLRRAHHTLRELGEDAIAPAT

SEQ ID NO: 323451 - protein, 348 aa, unidentified
MAHFVGLDVSVKETSVCVLDDAGKVVCERKVPTEPDDIAVLLTSVGGDYVRVGIEAGPLSQWLVNGLAEASLPVICVETRHMKALLQAQQINKSDRNDARGIAQMMRVGLFKPVHVKTLAAQEQRMLLTSRKLVQRKLIDIESDMRGTLRNFGLKVGVVSTIGYEARIRHLVEGFPRLAAIIEPLLTVRRVMRQQLATLHKMLLDTVRHDPVCRRLMTAPGVGPVVALTYRASIDQPQRFVHSRAVGAHVGLTPRRHQSGEIDYDGGISKSGDTMLRTMLYEAAQILMTQSRHWSWLKAWGMKVAQRRGMRRAIVAVARRLAVVLHRMWADGTDFRWGSQPAIAVAAA

SEQ ID NO: 323452 - protein, 373 aa, unidentified
METSITYVGMDTHKKTHLVALHYPGHEDIVQWTVTNTAREVQKMVRKVKRQAPGAVAFCYEAGVCGFTLKRWIEALDCRCAVIAPSLTPIKPGDRVKTDRRDAKKLLAMFKAGLLTEVHAPDPEQEAARELTRCRQTARENLQRIRHQLLKLLTRHGYIYTAGDHWTQKHLRWMRGLDVEQPYLRDVFDNYFTEMQHCLQRLASLDKDVEKLAFSTPYQEIVGLLRCFHGIDTLTAVTLITEIFEFGRFSNPGQLMSYLGLTCSEASSGQKERKGSITKAGNKRVRRLLIETGQHYRRPYNPRSKTLRERRKDQPQWVIDIADRAGQRLRKRYWYLVQQGKPPCIAIVAVARELAGFIWSVFHEYEARNNQAA

SEQ ID NO: 323453 - protein, 411 aa, unidentified
MESRGGPSVEVSGSGPGQAAISACKAGALYLPSDRIQLDDSVSGRCAKPVVPQSSKLERQPLVNAPASSFETKPEQLSMMNMHQQGGATEGKRPNAGIDVSKDFLDVCVGDAEVRMPNDPTGCAAVVELMVSSQVDLIVLEATGGFERGAVGALQDAALMVARVNPRQARDFAKSMGALAKTDKVDARLLRDFANVIANHKDRAKYVTPMVEPERQLLSEMITRRRQLIEMQVAEGNRLAGARHKDMVRSIKRMLRAIESQIKELDEDIDNHLDGHFGPQKALLDTVKGVGPVTIMTMIAALPELGRLDRRAISKLVGVAPLSNDSGHRRGKRSIWAGRSHVRAVLYMAALVAKVHNPIIKAFFDRLVAAGKPKKVALVACMRKLLTILNAMMRDQRVWAASSSLVVVQNG

SEQ ID NO: 323454 - protein, 409 aa, unidentified
MLLFVGDDWAEDHHDVELMDQTGKRLAKARLPEGVAGIARLHAMIAEQLGEDAEEQADQVLIGIETDRGPWVQALLAAGYRVYAVNPLQASEYRKRHGVSGAKSDAADAHVLADMVRTDSHQLRTVAGDSSQAEAVKVVARAHKTLIWERTRHMQRLRHALRDYFPAALLAFDDLAATDTLVLLTRAPDPASAAKLTIVQISAALKQARRRGIPARAAAIQAALRTEQLGQPEIVAAAYAATVRATAAVLTTLNEQIKTLEGQVETHFGEHPDAKIILSQPGLGPILGARVLAEFGDDPKRYASAKARKNYAGTSPITRASGKKKVVLARYIHNDRLVDALGVQAFAALNASPGARAYYDKQRAREVSHYTALRQLANRLVGILHGCLKTGTPYDEATAWSHHTEPLTA

SEQ ID NO: 323455 - protein, 274 aa, unidentified
MRFYQATHSFYCGIDLHARTMHVCVVDAGGRTQEHVNLPCDPGRFLKLVEPYRERLVVACECLFAWYWLADLCRAEGISFVLGHALYMRAIHGGKTKNDKIDSEKIARLLRGGMLPQAYVYPREMRATRDLLRRRMKLVRLRGQAIAHVTNTFTQYNVAAPEKKLSYHANRVGIAERFSDASVQRAVRSDLAFAEHLDEQLRGIELYLTQHAKIDDPQAFGRLQTVPGIGPILAMVVLYEVQDISRFGSVQQFVSYCRLVKCSHESAGKKTYDF

SEQ ID NO: 323456 - protein, 400 aa, unidentified
MLSIGIDVSKGKSTVCGMKPGGEIVYTPFEVQHTREGMSELVSLLRSSGEEVRAVLESTGSYHCPVVAALLENGIFVSVVNSLRMKRFCSQSIRKVKTDRIDAMQIALYGLAYWQELQPTKLPEDTYRELQLLARQYYQMTSMLIKAKVDFNAICDQVLPGMQELMSDHAGRHKLSDFVLRYCHTTHILEMGETRFRKDYCKWAEKKGYRNCERMAVLIFATAQNGIPVLPNAPSTQIVITEAIRVLHTVEASRDAILTQMQALAKTLPEYSLVREMPCIGDTLAPRLIAEIGDVRRFHSKRALIAYAGIDAPPYQSGKFCANNRHISKRGNRYLRKTGYEVMQSYVMHKPANDPIFTFIEKKRGEGKSGKLAMVAGLNKFLRVYYGKVTELYRSLPAIE

SEQ ID NO: 323457 - protein, 426 aa, unidentified
MINPSNTYPIHPRMTRTYSGVDSHRDTHTVVFLNCFHEKLGEITVGSAPSEFSKFLKRAKKYIQEGTTLCFGFEDTSAYGRAFVKYLVERDYLVKHVEASKVATERGQTLHKSDSYDAECACRVLINQFDSLPDACPQDKYWILTNLVTRRNALVKINVMVKNSLHGAVAESYPHYKQFFSCVTRDSALAFYEAYPSPHHLDKVDNETLANFLYAASKGRLSDAKAEIILNHVKRDKVPKLEYQEAQDFTVRSLVRQVKTNLAELKAADKEIETMLTHFNYPLTSIMGIETITCAKIIAEVGDIRRFKSAKHLAKYSGVAPVTYASGMTNLQMANARGNRKLNEIFFKIALTSVTPIGKNKVLVNPICYEYFQKKLSEGKTKNQALKCVQRRLVNIVFNVMKHHQPYNSPDAICLEDYENSTKTVA

SEQ ID NO: 323458 - protein, 339 aa, unidentified
MELYAGLDLHSRNTYIGIMDKAFNRVFKKRVPNHLEHILQTLAPFRDQIKGFVVESTFNWYWLVDGLMDAGYSSAHLANPSAIKQYEGLKHSDDQHDAFFLAQLLILGILPQGYIYPKMDRPVRDLARKRMFLVQHKTAHILSLQSLIQRCCAMKVRANDMRHLTVKELEAWLEEEYLVLSAQANLDSINFLKQKIQGLEKAIRKKVKLKKAFHHLKTVPGIGDILALTIMLEVGDIKRFSKVGNFTSYCRCVPSRRLSDGKTKGDGNRKNGNRYLSWAFTEAAQLGRRHNERFRRYYNRKVAQANTSLATKALGNKLARICYFIIKDQVPFREELFGQ

SEQ ID NO: 323459 - protein, 428 aa, unidentified
MKYNTQNAKIASITEKTLIVGIDVGSETHFVRAFDWRNYEFTKKPFEFSNSEAGFQTFKAWMEDLLEKNGKSVVIPGMEPTGHYWFALGKFLQDNGMRPVHVNPHHVKKSKELDDNNPNKNDRKDPKTIASLVNEGRFSYPYIPTGVYAEIRSLSNMRFQAQEELTRAKNRIARWFSIYFPEYKDVYRDLKAVSGRMVLETAPLPEDICKLGVEGVNRIWRDAKLRDAGMKRAKTLVSAAEHSVGSKEAPEAARIELKNLLKDMDVYASRVEELLGVIEEKLKEIPYIDKLMAIKGVGLVTVSGFIAEVGDIRRFDDPKQLQKLAGYAIVSNESGKHKGESRISYRGRKRLRYVLYEAALSLIGRNPEFKAIHEYYRTRKENPLKKMQSVVAIACKVIRIFYVILTKGVDYNPEKMMGDIRRPQIQAA

SEQ ID NO: 323460 - protein, 402 aa, unidentified
MQVDDIDVFIGIDVGKSEHWATALTTAGECLHDRPLPNDEARLREVYEHLGEHGRLLVVVDQPATIGALAVAVAQDMGITVGYLPGLSMRRIADLSPGSAKTDRRDAAVIASAARTMPHTLRSITSSDEDAAALSMLTGFDLDLARQVNQVSNRIRGLYTQIHPALEGVLGPWLEHDSVLEVIATWPTPAALRKAGRARIDAKLKANGCRRHAAWAQAIVEALSKQTVTVAGTDAAGVVLPHLARQLIALHTQRADIAAQVEALVEAHPLYPVLTSMPGVGVRTAAVFLAGTLGKTFTTGAHLASYAGLAPVTRRSGSSIRGEHVSHGGNKRLKRAMFLSAFASLRTDPASRTYYQRKRAQGKRHNQAILALAHRRILTLHAMIRNGTLYNPQPTAQLPTAA

SEQ ID NO: 323461 - protein, 427 aa, unidentified
MKQEGQEQQEFGAYIGLDWADRTHVISLRGTDSGKVEHYQLVHKPEVLAEWVSDLQRRFPGQRVAVALEQARGAVVHALMGYDFLVLYPVNPKTLAKYREAFSPSGAKDDPTDADLLLELVTLHRDKLRAWLPDDELTRTITLLVEYRRQLVATQTSLSNRLTSLLKLYYPQALAWAGELTTVQACDFLQRWPTLAQVQQAAPAKLRQFYLAHGCRKADVIVQRLQEIKLAQPLTRDGAVITASVLMVQATTTQLRPLMEAIARMEKQIAELFTQHADHELFSSFPGAGPVLAPRLLAALGADRGRFAAATEVQQLSGIAPVMERSGKTCWVHRRWACPKFVRQSFHEFAGQSIRWSTWARAFYDQQRQRGNGHHAAVRSLAYRWIRIIFRCWQMRVPYCEETYCRALQRRQSPLARVLAAPMQNAS

SEQ ID NO: 323462 - protein, 407 aa, unidentified
MKKIAGIDVHKQVLMVVIADAANPELVLQKGKFGTGQAELERLRMVLQQAEVTEVVMESTAQYWRPVWSEWEPHFTLHLAHAQSNRAPKGRKSDWADAKRLVKRFAAEELFLSFVPEPEQRDWRMLTRARYALIRDHVHLQNQIEALLEQASIKLSSVVSDLFGVSGLRILWALSQGQTDPAKLADLADGHLRCGREVLVDALRGHFGEVHRHLLEQALQRLRMLSEQVAALNQLAAKRMQPHASTVQRLIEVPGVGAEAAQAIVAEIGPTAAAFPSSAQLASWMGVCPGTQESAGQNYSGRCAKGNRYIRSVLCQVAHAAVRTKGSHLQTVFRRFLAKLSCYNKAIWAVAHKICKIIWHILHNGARYLESGGALNPKAAQKAIQHHLKALSRLGYVLPSPTPDPQV

SEQ ID NO: 323463 - protein, 323 aa, unidentified
MAKRTIEFEQVIERGCGLDVHRDTVVATVMGKGIQTETRTFGTTTSSLKELGEWLESLQVTDGAMESTGIYWKPVLHVLRDYPLNLLVVNARHIKNVPGRKTDKADSQWICKLLISGLLKGSFIPPENIQSLRDLHRYKKKQVGTIASEKNRIIRVLEDANIKLSSVVSDTSGVTATYLINGLIAGRRDLEKLVAECYHKKLQATPGQIVEAINGRLTPHLTFLLKSMQKHIQSVEEQIAEIDVEIEKYIKDFEKEIELLQTIPGVGKEGAIGIVSEIGVDMDVFPSEHHLASHSGMCPGNNESAGKKKVQEHDRGTNTSKQP

SEQ ID NO: 323464 - protein, 349 aa, unidentified
MRVLIGVDPHKSVNAVAAIDENGELLAHEAFPADRKGLRALERWSKRFPERRWAVEGAAGIGRPVAQKLLAVGEEVVDVPPKLSAKVRVLSVGNARKNDRLDATFTALAALGNERLAAVRTEDGPEGRSEVLRLLTERREDLVAERTRALNRLHVLLRDLLSDGVAKGLSANAAAKLLRRARPDHETGRVRKRLASELVRDVRALDRKVASLDERIREEVEASGTALTEIFGIGPILAAKLAGIVGDVGRFPSKAHFASYAGVAPIEASSGEVVRHRVSLAGNRRLNKVMHMVAVCQARSDPRGRAYYLKKRGEGKSRREAMRCLKRRVSDAVFRALVADSELALRAVA

SEQ ID NO: 323465 - protein, 415 aa, unidentified
MTATQDKIEFDQVIEKGCGIDIHKSVLVSTVRGKGIKTETRSYNAFTESIEQMRDWLKSLGITHIAMESTGVYWKPVFNILEKDFEIILVNARHLKNIPGNKTDKKDSRRIAKYLLAGLLKGSFIPPKPVREMRDLTRYKRRIIEQMASEKNRIHKFLEDANIKLSTVVSNLSGATATKIIDAMIEGEGRVEELAKLRHGKMKASEEELMVALTGNLTEHHKFMLKMVKQSIKDKELLIRELDKQIDNKLKENAMAHDAELLSTIPGVDKEAAAYILSEIGNDMERFPDEQHLASWAGLSPGNNESAGKKKGSRTTHGDKWLKAMIVQCAWAATRTKGTYLRSKYDSLVGRRGKKRALIAVGHKILIAAYFILKNKESYKELGGGYLDKITKEKQIKRHLRRLRELGVDVSQNAA

SEQ ID NO: 323466 - protein, 344 aa, unidentified
MKRFIGVDLHKNRFTVCYLGEGGEYKLAVFNLEVHGLERFKRTLTQEDEVAVESTGNAGYFAREIKGLVNETRIINPTQFKIISHSVKKTDEHDAVTIARYLAKGLIPEVRMRSKEESQIASLIGTRDKLVKLRSALKNKIHNILNANGIVTAREIFGSEKGLAKILTLNIDQSYLFELRIIVEQIRSLNQSIDQISREISSRGENLKGHKNLTSITGIGTLSATILLNTIGDIKDFSDDKKLAAYFGIVPRVYVSNETNHYGRITKMGNKIARTALVQSTLIAIKYNDYLRSFYLRLKSKKGSGKAIIATARKLLGIVYKTLKNNWVFEDFNKFKLVTPLQAG

SEQ ID NO: 323467 - protein, 420 aa, unidentified
MIPAVIECCAGIDVGKKTLAVCVMVGAAEAEPQTTQQEFGTTNSELERLRLWLVAFGCTHVVMESTGPYWKPVYEVLEASLTVILANAEHVKARRGHKTDWNDARWLAHLLRHAMVRPSFIPPRGIRYLRDLTRRRRQIIGDATSERNRVQKALETCNVKLGNVLSDVFGVSGQRILEALLEGTATPEQMAHLKDPRAKAQVPELVEALSGHRMDPHHRWLIQQSLEHLAFLEQQLASLDEQIHRHIEQSGYLQTYALLQTVPGVQAETAAAILAEIGPDMQQFPSAAHLSSYAGVCPGNYKSAGKSYSSHRHGGDRWLRTALVESAWAVAARKQGVLRDKFWSLAGRGGRKKALIALAHNLLIAIYHTLASGQPYSQADAPLMSDSQRQRLIRHHIRRLGKLGIAVRSRACTARYPNSQ

SEQ ID NO: 323468 - protein, 309 aa, unidentified
MSSFVGIDVSKATLAVAVRPAGSSLSFTNDAQGHRDLLQSLKGVSVSRIVLEATGGYERALLVALLDAGLPAVRVSPHRARAFATAMGRLAKSDPIDAAVLAHLAEVLDVGSTPAVSPKLQALRDLVQRREQLIQWRDGERRRVQQATSPFVRRSLQRSLVATQREIARCDREIAAALATVDLESSQRLLAVPGIGPVTTASLLAYVPELGALDRRQVAALVGLAPYNCDSGAHTGKRRIHGGRPRIRRVLYMAAWSAIRSQPDFKARYQALRQRGKCAKVALVACMRVLLIRINAMLRDKTEWKMAHA

SEQ ID NO: 323469 - protein, 340 aa, unidentified
MTIVTIGLDLAKSVFQAHGVDEDGNAVLVKKLHRKQMLPFFSKLPSCLIGVEACGTAHYWARTLAAMGHEVRLIPPAYVKAFVKRGKSDALDAEAICEAVQRPTMRFVPTKTVEQQGILMTHRARSLLVRQRTMLANALRAHLAELGHVANPGVANLAKLAEQVMATKDGLPSYARAALEVLIRQIMAVSAEIAELDQQLAVWHAASEDSRRLAAIPGLGIITATAIAATVTDAEQFSSGRQFAAWLGLTPQQHSTGGKTRLGGISKQGDRYLRRLLVVGATAVMRHVKDKPTPMADWIRKLSEKKPFRLVSVALANKLARIAWVVLTRKEVYRPYQLAA

SEQ ID NO: 323470 - protein, 347 aa, unidentified
MRIVSHSFAVYGVDLGKTTFHIAGADQHGRPTLRIKLRRDALLQFFATASPALVGMEACPGSHWLARKLIAFGHDVKLIPAQFVKPYLKSNKNDTLDAEAIAEAVTRPTMRFVPVKRHEKLDMQALHRLRAQFVHQRTALVSQFRCFLLEYGIAIHTGIGMFRRDATRILADDSNDLTPTMRQLLTDLWSDFLRIDERVTALSGQIEVSAKHDDVVQRLTTIPGIGPLGASALCAAIGNGKQFRSGRDLAAWSGLVPRQHTTGGKPTLLGISKRGNTYLRRLLVLGAQSCLMHLDRSRDRLGRWLDTLESRMHHNKVVIALANKLARVAWVVLTRPGALYEKMDPRF

SEQ ID NO: 323471 - protein, 326 aa, unidentified
MQGKEASEQETKVQSNVGIDISKCWLDAHVLPGNDRLHVANNCTGIRQLKRWLSHYRIALVAIEATGKWHRHLHRSLVASAIPVAIVDPYRVRMFAKAQGILAKTDQLDARVLALFAAIMAPPVRPVAPQAMAELAELVVARASAVEAQATLKNQFGTAESTFLKRQLDRRIGRAGKDIAALDREILKRIKADGSLARRYAVLTSIPSFGFAVAATLIACLAEIGSATAKQIGMLAGLAPIADQSGDREGTRVIWGGRPAVRRVLYLAALSASRFNADMKAFYNRLIDNGKPSKVALIAVARKLVVLANTLVSEDRTWQPRAPIQA

SEQ ID NO: 323472 - protein, 438 aa, unidentified
MSNKVFFNLDDLFISVGIDVGADFSWMSIALPNQQFVGKPFKILHNSIDSLTTAVSKIKEAEELYSLESRIFLESTGIYHYPLFCYLRDKGFNCSVINPIITKNSTNINIRKVHNNRFDSKKATLVGLKPDLKVSLMPSDLALNCRNLCREYYDLMDNRSAYVNKLQGELRMAFPQYLGIFSKVTINTSLTLLETYTSPSAFLEADKQEIIDIIKSTARFGLTYAQNKYNAIIQAATDANQFGYIIDSNIKRIRLYISFIRKYDEEINSILESLHELVDANEDTDFVKQIHLIKTFKGAGFLSAVSIMGEIGDFSAFSKPKQLFAYFGLDPAVKQSGKFEGTKVQMSKHDSAIARRVIHTLTLQSISISRNGEAKNPVLREYYLKKCDSKPKLVAMGAVSHKVCNMIFAILRDNKPFKIIAPQEHIKQYNAAKCDMTA

SEQ ID NO: 323473 - protein, 347 aa, unidentified
MEIIGFDLHKRESQLCRRHPDGRISDERIPTTRARLTATFGGLAPARILLEASTESEWVAAYLEQLGHTVIVADPNFAPMYATRTRRLKTDKRDAHALMEACTVGAYHPAYRLSAARRHLRAELIVRDALVRHRTRTVAVVRTLVRRDGLRIPSGASATFGARVGALDLATQAPTLGAELAPLLALLPALTTAIAAADARLAALAAADSVIRLLATAPSVGLVTAAGVVAVLDDITRFPSAHAVEAYLGLVPREYSSAEHQRRGGITKAGNSRARWLLVEAGWRLLRSRAPEAAALRAWGRGIAARRGSRIAAVALARRLAGILYAMWRDERAYDATRLGRPRSRRA

SEQ ID NO: 323474 - protein, 442 aa, unidentified
MKVQEMKIIHEHAAGIDVGSRSHFVAIGQKQEEVKEFGVYTPDHLDMIQYLKDHRITTIAMESTGSYWQTLFAALQDAGFEVILVSGHQTKNVRAKTDVKDCQWIQKLHSMGLLQGSYLPSSEIARLRTIHRHRQSLIEQSSKMSNKMQKALRLLNVRLDVVLSDITGKSGLRIIEAILGGERDSIILSSLADKRVRKSQKEISDALQGQWEKEELLYELEDCYEIFKFLQNRINQADKKMEALLMEFNVKSAYKKPEIELTKKQTKGKNQPRFNISLLSYQYYGVDLMAIESISSSTILALLSEIGDGIYRFRSAKAFASWLRLAPNNRISGGKTISSRTPKGSNKFALALRNAANTISNKKNGALVSFFKRIAYKKGRAAAITATARKLACIIYSMIIRQEEYRPMGSEQYQELIKLKRINSIRKMMKNSNILASELSMS

SEQ ID NO: 323475 - protein, 351 aa, unidentified
METRVTALPKLFIGIDIHKRSWKIHCSTDLFGGKSFTMPPEPEKLYEYVQKHFCDHQVTTAYEAGCCGYSAHRSFEVFGWKSLVVNPADIHRKGKERYTKTDRIDAQLISRELKDGRLDGITVPDIEREGLRSLFRRRNELVKDFRRIKSRIKMHLLYFGIKIPAEFDNDHWSHAFRHWVDSQEFHYPTAQETMASKMRTFRFIDKELREVSSQLRAYCRKHFKKDYYLLRSVPGIGGIVAVGILAELGDLRRFNTLKHLAGYVGLAPGIYQSGATSKALGMNPRCHRLIRSYFVEASWQAIRTDPVIQAYYRKHMGKDVKKIIVKVAHKLLSRTLAVIKTEIPYEVGVIA

SEQ ID NO: 323476 - protein, 356 aa, unidentified
MTNTTKYIGMDVHKESISIAVRNAAGKIVMECVIETKANTILQFIEGLSGDVHVTFEEGTWAAWLYDLLRPHVTKLLVCDPRRNALLQEGNQNDRVDARKLAELLQNNQLRSVYHGDHGLRTLKELVRSYLTITQDLTRVMTRVKAIYRSWAIPCSGKQVYGTRHRGEWLGKIVEVGVRQRAEFYYRQLDELRLLRQQVRRDLLAESKKHKAWKQLCEIPSIGPIRAAVLLGILQTPHRFRTKRQLWTYSGLGIEVHSSADHQVVKGQLQRKKKHVEVRGLNENCNHDLKNLFKGAAVVASTKSGPFEKFYAALLTKGMRPEMARLTLARKIATIVLIVWKRGVCFDANHLKPQTA

SEQ ID NO: 323477 - protein, 412 aa, unidentified
MTGVTTCWFAGIDWGSERHQACLLDAAGKVVGERAFAHGGAGLAALCDWLTSTAGHPSTVAVAIEVPHGPVVDTLLERGFAVHAINPKQLDRLRDRFSVAGAKDDRRDARVTASGLRTDLHLFRPVQAGDPGVIELREWSRLAEELQQERVRLANRMRQQLWRYYPQLLALADDVTAEWILELWTLAPTPAKAARLREATLARLLRQHRIRRLDAAGALDILRQPAITVAAGVTEAAVLHLRSLVVRLRVANAEFRQAECKLEELCAGLSQDAAVEENGPCDAEILRSLPGVGTVTLATLLTEAGDPLARRDHAALRTLSGVAPVTKRSGKTCIVVMRYAAQVRLRQAVFHWARVAILHDPKSRSRYDALRGRGHSYGRALRGVADRLLGLACVLLQRQVVFNPDHGAGKAV

SEQ ID NO: 323478 - protein, 342 aa, unidentified
MNRSKKAVRIGIDLGKNTFHLVGVDKSGMPAVKKKLRRKQVLVYFANLPVCLVAMEACGGSHYWARELGKLGHDVRLISPQFVKPYVKGNKNDYNDAEGICEAAGRANMRFVTVKMIEQQDIQGLHRIRQSVVKQRTALGNQIRGLLGEYGIVVGYGISQVRRRIPEILEDGDNDLTDRFRGWLAELLEAFRVLDERIKRYDKEVQQAYAANHACRRLGAIEGVGPQIATAVIASYGDGKQFRNGRQFAASIGLVPRQYTTGGRPVLLGISKRGDKYLRTLLIHGARSAIRWMEKKDDRRSRWLQSLVARRGKNKAAVALANKNARIIWALLARGECYQPAL

SEQ ID NO: 323479 - protein, 437 aa, unidentified
MNHQRLQAQRGQLADKIVIGIDPAKDKHQAAIVDPHGNQRGASFSFPVSAAGYGETLWRNIAKVLPSYKADDVVFAIETACNLWETLAFYLRTRGYTVVLVSPLSTHHARPIMSLEFSRTDPKDAYLVATVAQRGAYHHYEQFPPESNAMHQLAITYDKLRKNRAQNRARIRALLDRVFPEFPHILEPDTNTAVSLLKKYLFPDEFLAMDIRTEAKAIEKISRRQCGRSVLEDIQHAARTTIGMIRQSDERLSDRLTLDAYLALIDTIELHMTRVLDALIARAKELPQFARLNSLSGVGKKLTALFLGEVRDLSRFSHYQHLEKLAGFNLRLFDSGRYSGTRHISSIGNSRLRWIIYKMTEETAKRVPEVRLKYLRRQLKRRKHVKNIVAAVPQLLQLILAMEKHQRSYELRPETVAVMHELEEQDEALKTRKKTAA

SEQ ID NO: 323480 - protein, 349 aa, unidentified
MAMTIVEAPPGITGGVDTHLDKHVAAALDPLGRLVGTESFDADAAGYKALLVWLEDFGEVTKVGVEGTGSYGVGLTRFLRRKGIEVVEVNRPNRQSRRNHGKSDPLDAVEAARAAISGRASGVGKTKDGPVEAIRVLVVAKRSARQARVKAIVQMRHLGFTAPDQLHSRLKGLSVTALVAEGAKLRATKSADTVTAATKASLSSLAHRIQSLDQEIAGLDEKIESLLLATAPDLMARFGVGPDTAASLLLAAGDNPERLHSEAAWAHLCGVSPVPADSGKNAGHLRRHTGGDRQANSALWRIAMVRIAHDPETTHYFERRVKEGRTKRDVIRILQRYIAREVYRYLPRG

SEQ ID NO: 323481 - protein, 356 aa, unidentified
MKIHKVQDFIVKGKEVFVGLEDSKTTWKIAVRCERMLIHRVSMDARYEVLIRYLRNKFPECTINLIYEASFKGFNLYDRLTEDGIDCVVIPPHMVTEPKVNKVKTDKRDANRLSLILENHDFEDACHVPDRERREDRQISRTLIAMQKDVIRTRNRIRKLLDFHGIELSFPDRWRRDQFRALRKVSLPEPLRISFDVLLTQLEELWAHQITLRAALRKLCRKERYAKAYTIARSLPGIGWFTAIRLVLELGEDLSHFTSGKKIASFVGLSCSEHSSGETEWKGHITGMGSGFIRGTLIENSWMAIKKDPALLAKFSRVWRSSGSKKKAIVAVARVLIVRLRACVLSGMPYAIGVVE

SEQ ID NO: 323482 - protein, 358 aa, unidentified
MRVGADLAKRVIQVHAVDAAGRRVVSRALKREQFMAWCAQLPAGCLVAMEACSSAHHWARKLRALGLDARLIAAHFVSPYRMEGKSGKNDMTDAAAICEAASRPSMRFVPVKTCEQQGVMSLHRVREGLKEDRTGCINQIRGVLAEFGLVFNKSPKVLRAALADVIEDASNELSALARRVLQRTFDHWRELDEHMRWCDSQVGQHVRSSPAARRAAKITGIGELGASALTAGVGDFHQFKGGHQLGAWLGLVPKQNSSGGKTSLGRITKRGDDYLRTLLIQGAKAAVMSAGKRDDPISRWLVQLVARVGWQKACVAMANKNARILWAVMTRDAGFDAHHVSVKPQATRSSPTTTACTV

SEQ ID NO: 323483 - protein, 397 aa, unidentified
MCTKETVVACVRLATAGPAETHVQTFSTTTTGLLALADWLGGWRCTHVAMESTGVYWKPVWHVLAADFELVLVNAAHLRHVPGRKSDVADAVWLADLLAHGLVRGSFVPPPAVQELRDLTRTRKQLVREKGRHVQRLHKVLEDANLKLTTVVTDLMGRSGRAILNAVLEGERDPAALAALGTRLKCSPEALRDALRGHVREHHCFLLRQHLLIIDSLDVRLAAFEAQIGAILEPFRRAAEQSTGIPGVSGIAAHVIVAEVGIDMTRFPTVRHLISWAGLCPRMDESAGKHRSTRIRKGAPWLKTVLVQCAWAAARTKGTYLQAQYQRLKSRRGARKAAVAVAASILTAAYHMLRDDVPYRDLGPEHFNRRDKGKTAQRLARRLRDLGYQVDYKLAAA

SEQ ID NO: 323484 - protein, 311 aa, unidentified
MNTVRYLGVDLSKLELVADLAAEAKPRAFTNNAAGHAALIAALPTEAHVVCESTGGYQRPLVRALQQAGVRVSVVMPGRVRALAHARGLRAKTDPIDARLLSAFGQAMALGAPPPPPSPAQAELQELMRARRALIARLNEESSQVDHCELPFLQAQATERRELLERQVREIEKRLRRLIAADPVWQQRAARVQEVDGVGEVSAWTVLAEMPELGQLEKGQAAALLGVAPDPDDSGPRQGRRHISGGRSSARKVLYMAALTASQRNPVLAPFYQRLVHERHKPKLVALTAVMRKLVELLNRLLADPDFKLAG

SEQ ID NO: 323485 - protein, 426 aa, unidentified
MNEVESIRLEEFRQLKKAIRGSNEYLIVGIDVAKDKHNAFFGTATGKALFKRLVFENTREGFERLLIQTDAIKVQHGLTKTVFGLEPTANYHKPLAEFLIKSDHMVVLVSGVAVKRNRELLDGRWDKHDTKDSANVADLISQGKCLFYEYPSMALRELRSLLSLKRRLKKQEHGLKVRIRNHLLAAYFPELDRHFGQSESDSLEIVKWCFNPSVIAGLEYEQFLQLVAPQKRAIGHQNRLKTIWKKAADSIGCDAGESLVFEAKVMVEGLQQMRKTIRDTDNKIGDICCEFPEYRYLLTIPGFGPDVSSKVLGAIGDPFRFKTGKQVLKMAGLDLSAERSGKRSDAARPVLSKKGKAYLRYALYQAALIASSRNRYFIAYYTNKLRGREKEKGIKTKMRVKLAAKMLIIAWTLMKKKEVFYTPQAY

SEQ ID NO: 323486 - protein, 391 aa, unidentified
MVCVGIDVAKDKHDCCILDSEGTTLVDCFTIPNNMDGFKSLLQTIQDCSQKSDKIKVGLEATGHYSYNILGFLLDNDLPVYVMNPLHTNLYRKSLSLRKTKTDRVDAKTIATMLLSDVDLKSYTDTAYHNEELKSLTRYRFDKVQERAKLKQSVSRLVTILFPELEQLVSSIHGTSIYALLSEYPGAKQISEAHLTRLANILVKTSRGHYRKDKATHIRDAARTSIGSVMPAKSLELKHTIKLIQELTSEVNEIEDAIRKIMDELKPPILSIPGMGFHSAAMILAEVGDFSNFNSPDKVLAYAGCSLSTYQSGKLTNCYAHMEKRGSRYLRYALYTATKYVCYWNPVFTEYLTKKQAEGKHYNVALSHATKKLVRLIYALQKSGKAYLAVI

SEQ ID NO: 323487 - protein, 323 aa, unidentified
MSNHTIICAGIDTGKHKLDAAIDGCAEQLQVDNIADGHVRLSAWLKHRRVKRVGIEASGGYEQDVVAHLRRDGFVIVVFQPGQVRAYAAFLLQRAKNDKIDAALIAACTAAVKKIHTPPDVRLGLLAAHMTLIEQLTDQVAGCKNYREASRQPHLRRFWSAEITRLNKLLRSELKQLVGTIRQHRDLAERFDLIESVDGVGIKTAAAILVRMPEIGRVTREQAAALAGLAPFDDDSATHVGLRHISGGRERLRGALYTAALAAAFHWNPQVIALYRRLTAAGKPHKVALVACARKLLIFVNTVVARGTPWVSSKSPSTLSNAV

SEQ ID NO: 323488 - protein, 391 aa, unidentified
MIYVGIDVAKDKHDCFITNSDGEVLFNVFTIANNLDGFNDLCQKIASVMEDVTKVKVGLEATGHYSYNLLGYLIDKGLPTYVINPLHTNLYRKSLSLRQTKTDKVDARTIASMLMSDVNLKSYSDTSYHNEELKSLTRYRFDKVKQRAKLKSSVSRLVCILFPELEKLVPTLHMASVYAMLSEFPGAKQVANAHLTRFTNLLSKVSKGRYGKETAIAFRNAARTSIGSNMPAKSLELKHTIKLIQELSSEIDEIENEIKLIMDEINSPILSIPGINYRMGAMIIAEIGDFNRFDSPDKILAYAGFSPSTYQSGQLDGAYSHMEKRGSRYLRYALYNAAKYVCNWDPTFAEYLAKKRAEGKHYNVAISHAVKKLIRVIYHLEKTNQQYIKAV

SEQ ID NO: 323489 - protein, 377 aa, unidentified
MKSIKFVGLDVHAETIAVAVAEQGGEVRALGVIPNREESIRKLVKKLGPVEQLRFCYEAGPTGYVVYWQLTALGAQCEVVAPTLVPVKSGERVKTDRRDALKLARNYRAGELTAVWVPDAAHEALRDLVRAREAAKKDQLRARHRLSKFLLRHGRRPPTGVKLWTLNYLAWVKQEVHFEQLAQEATLLDYLYEVEHAAGRIARLDLAIEEAVKLTPPKMRAVIDALQALRGVAQVTAVTIVAEVGEVSRFTRARQLMGYGGIVASEHSSGQSTRRGGITKTGNAHLRRVVVEAAWAYRHRPNVGGALRKRQELVSEEVREIAWKAQHRLHTRYRKLTARGKEKGKVVTAIGRELLGFIWAIAVKVEAAQKEIEQRAA

SEQ ID NO: 323490 - protein, 350 aa, unidentified
MQGNGRWIGLDLSKKTYEMCYFDQKGKVGRSGGETTKGGRAKLYAKLKAEDIVAMEVNSLAFVMEKEMRVIGCTVVILDASQLSVIYASTKKTDKEDALKLARLVKIYEKEDLPIVDVPTEKEYYRRKLTKECKTLKDDRTQEINRLHALFLQCGITTMKRSNLQTDANRQKVLPQLFGYEVGQAKRVCERLTLLEVQIKELEQTITKECKADKDIERLKTIPGVGDKTALAFTAYVGDGKRFNNGDEVANYLGLVPRVDCSGSINRYGHITKKGNRIVRALLYQAAWSIVRSKHGGALKAKYFYMTEHGKGKKISITAIARKMAKLMYLIMKNKGEEYKELPAPASRAG

SEQ ID NO: 323491 - protein, 338 aa, unidentified
MAIVFVGIDLAKNVFAVHGVNDAGKPELVRPKVARAKLHELIASLPPCTIGMEACSGAHHWARLFQAHGHTVRLIAPKFVAPYRLSGKQGKNDAADAAAICEAVQRPSMRFVPPKSIEQQGQLMVHRARQAFVEARTGTINRIRGLLSEVGIVLPLKAQTVRTQAAAALEDLPGWANTVIGDLLSELHRLDERIAAYDRHLATIARDDDRARQLMRLRGVGETTATALLATVGNGHEFKSGRQLSAWLGLVPGQYSSGGKTRLGRITKAGDGYLRSLLVLGARAVLAAAKDRADSVSRWAIALQERRGYWKAVVAIAAKNARMAWAVLRRGEAFTLPV

SEQ ID NO: 323492 - protein, 341 aa, unidentified
MGKVITIGLDIAKHVFQVHGVDAAGTVIVRQKLRRSDLLAFFERTEACLVGIQACATAHYWARSIMALGHRVKLMPPTYVKPYVKRHKNDAADAEAICEAVTRPTMRFVPVKGEEQQGILVLHRARELLIRQRTMLINALRGHLAEFGIVTRVGRAGVSTLITLVEDDEHDMIPAIARDALLAVVDQLRDAHERCGVIERKIQAWHRSNVQSRRLETIPGIGPITASAIAATITDASLFRSGRELAAWIGLVPRQNSSGGKERLGHISKKGDAYLRRLLVIGAHAVLRFARNGKASTTKWAATLLARKPYKVAAVALANKMARIIWALLTKNEEFKGQPAT

SEQ ID NO: 323493 - protein, 335 aa, unidentified
MHYLYYVGLDVSKETFDASLVAFEDANEMAHRKFANSRKGICSCLHWVEKRHGIRLVDVIFCAEDMGSYISEMAVCASDRTLNFNFSLISPLVIKYSMGIARGKTDRVDARRIAEYAITHYRKIALYLPAEKELCQLRTWLILRAHLAKQRVAKLVLLEKLDYKEKFADVSIQRSMLQEEIAYAETHMKTIEREMKELIAADSNICRNYKLLTSIKGVGPITAIVMLCSTLNFTKITDHRKFACYCGLAPFEHSSGTSVRGGCHTSSMANRDIKVQLNRSALIAIRCDPQLKAYYERKVAEGKHKFSVLNAVRAKIAARCFAVVRRGTPYVALQI

SEQ ID NO: 323494 - protein, 344 aa, unidentified
MEISTIGLDLAKNVFQVHGIDAGGNVVVRRTLRRAQLLAFFASLPPCLVGMEACGTAHHWARELIKLGHNVRQMPAAYVKPYVKRGKTDAADAEAICEAVTRPTMRFVPVKSPEQQAALSMHRARDLLVKQRTQLVNMVRALLAEFGINIPQGVRLALEMARKIVDGEAPPVPREAAKIAGRLSQQALDTHAQLREIDLDLLAWQRTNDTAPRLMSIPGIGPIGATALAASVTDANQFRSGREFAAWLGLTPRQHSSGGKERLGRISKMGDKYLRTLLVVGMTSLIKGVKRKPETADPRLVALLARKPVRVATVAMANHTARVAWAIMARGETYRAGHQPRLAA

SEQ ID NO: 323495 - protein, 410 aa, unidentified
MAYKVAGIDVHKKVLMVVILDADDPASEPPRRRFGATTSELRNLSSWLRQQGVQQAVMESTAQYWRPVWYELEPYMKLSLAQAFSNRAPRGRKHDFRDAERLIRRLVAGELTLSFVPEPQQRLWRTMTRAKVQLTEDKSRLHSQLECLLEEMRIKLSSVISDLLGVSGYCMLRALAGGETDPQKLAALADDRLQCSEKQLIDALTGNPQPTHLQLLTLYLDRHQMLVGQIAKLDRLVAEALKPHQEAVARLALAPGLGVDSAQQIIAEVGVDAGTFPSAAHFSAWVGTCPGRDESAEENHTSRSAKGNKYLRRVLNQAAHAAVKKKGSHFQAIFRRLLPRLGYKAAIWAVAHRLSRLVWKMLHEAVPYVEQGSEPDARTKRRRTQKLVRTLRKLGYEVSLKAINPTPVPA

SEQ ID NO: 323496 - protein, 456 aa, unidentified
MAQNVARKLISSEIDSISPDSQSLLILQFVSGGLFVFKIFRNNCCGLDVHKTWIYACIGITDDKQRTVYHEARFSSFTKDLQRLSLWLHSHQCSDVCMESSGKYWIPVFNVLEQTCNVVLAHPKYTKPQKGNKTDRKDARWICDLFMCDMIRPSFIPPPDIRQLRDLIRYRGKLTNMISSEKNRAQNCLTVSNLKLDDVFADVFGKTSRSITEYILAHPGEKFDVAPFINHRCKTSVEVIQDAVDGAVSHEQAVKLRECLDHIDQLQEHKSRIEQEIQRLAEPYAVHLNLICSVPGLDKNPMTAIAILSEIGADMSVFPSSKHLVSWAGCCPRNDRSAKHVKSTRISQAGSCLKPLLVQVANALIRSKDHPEFGARYRRIKAHRGHKKAIIAVCKMLLTAIWHILSYGEVYNSDGYLSAEPYPAQKDRVLSTKQALDLLRSRGFIIKDLSEDPATA

SEQ ID NO: 323497 - protein, 508 aa, unidentified
MIPINNVVAGQDDSRTGGADPDEEIRNMEQAGPDKDKTRLWRSGSMSKLSKRDNVGNNGKRPFAGMNKMRSHAAGLDIGAHEIVGCVPSEIANTQEVQTFGTYTSDLAAIGDWFQAKGITSVAMESTGVYWIPAFEYLESLGIECCLISAAALKKVPGRKTDVLDSQWIQTLHSYGLLNASFRPEADIVALRTLLRHRAQLVEHRSPHILHMQKALLQMNLQLSQVLTSITGQTGLLIIRAIVAGERDPQQLAALRNWRCQKDEAEIAESLTGTWRDEHLFVLKQSLAMYDFYSGQTAECDQEIERAFSVIKPRWEATAAEEAVIMADGAGKKDNRSKNAPQNVQSRAHIKRITGVDLMAVPGISASLAQTILAEIGTDMSKFPNEKHFCSWLGLAPKNEVSGGKTLKSRTLKTKNRAGQAFRLAARAQVRSDSEFGAFYRRMKGRVGPAQAMVATAHKMARVIFHMLSKGEEYRPLGAAEYEEQSKERQIQFLKRKAAKLGLQVVPT

SEQ ID NO: 323498 - protein, 368 aa, unidentified
MHEVITAYIGLDVHKDSIAIAAAGKDREVPHFVGTVRPDFKQIRKALGHYGPPGSLQVVYEAGPCGYTLARQLQAEGFHCQVIAASRITRSPTERIKTDRRDAITLARLARSGDLVAVRIPDERDEAIRDLSRARQDAVSACLKARQQLKAFLLRHGRPLRGSKPWSPTGELYLSKIAFAHCAQNIAFADYRQAVLDTRARVERLTEALRAQCEVWRMRPLVSALACLRGVDFLTAVILVAEIGDFSRFAHPKELMGYLGLVPSEYSTGQQHHRGDITKTGNAHARRVLVEAAWNYRFPARLSHPITRRQEGQSKPVRDIAWKAQLRLGHRYRKLQSRNLHQNKVIVAIARELSGFLWDIARHVTIAA

SEQ ID NO: 323499 - protein, 348 aa, unidentified
MDNTSDRSVIGMDIAKNVFQLHVVSAERGQIQRIKLKRAAVEDFFANTPTSLVAMEACGGAHYWGRRIKALGHEVKLLPARQVKPFVVRDKTDARDAHAISVAALQGHIKPVPVKTEDQQVCMTLHRMREQMMKMRIMQTNALRGFLYEFGVVLPVGHRALLEKIGPTLAEEEERLPKQIVQSVLEQMNRIHQLQQDIIRIEARLTAISKNDNAMQALQSIPGIGLLTATAMIAKTGDFTDFKTSRQFSAWLGLTPRQTGTGGRIRQLGISKRGDAYLRTLLMHGARAIIARRAHSAWVASLLSRRPYSVVVAALANKLARTAWAVLTKGATFNPSQWAGVDEAAQVA

SEQ ID NO: 323500 - protein, 347 aa, unidentified
MALATISVLGVDLGKNVCSVVGLDASGAVVMRRKMRRETLIGLAEKLPACVVGMEACCGAHHLARVFASHGHDVRLMSPEYVRPYVKAQKNDDRDAEGVAEAATRPTMRFVDLKSQDQLDMQTLHRSRDRLVGERTALINQLRAILLERGMVAAQGKRKLEQFLIVLMDEQGGAGLSPRMILLVADARAQWAELDRRIAAFDAEFVRWAKENEDARRLTTIPGFGAIVASALVTTVGHAESFDHGRDLAAWLGLVPRQFTTGGKPKLLGISKRGNKYLRKQLIHGARAALPYVAERDTPLGRWAKALMMRTHHNVAVVAFANKLARIAWAVLRRGERFAATGMPMTA

SEQ ID NO: 323501 - protein, 443 aa, unidentified
MKPLPVLNPKAAGIDVGSEHLHVSIAGDTPKVFGTFTVQLEALRDWLQENGVRTVAMEATGVYWLYVYEVLEAAGLEVVVVNGRHVQNVPGRKTDMSDCQWLATLHAHGLLRGGFVPPARIRHLQDYQRLRNDHVSGAASQVQKMQQALERMNVKFHDVISDLTGVSGLRVVRAILQGEREPDRLLALCDVQIQNKKAAAVKESLRGCWKDAQLFALRQAVELWDTYQQKIAACDKELEKLLQELAGPQGPAGGAGAGELKLAPAKSPGKNAPVIERFQALLARLCGGRDATQIPGLSVYLVLQLVTEVGTDMSRWPTEKHFTSWLGLAGGRKQSGKRKGSVKAHRNRAGRIFCAAARALAQSVDKALGGFYRRLRGRLGGLAANVALARKLAQLFYRLLRYGSEYVEQGLKRYEARVLETEVRLLRKLAKKQGFTLMPAGTN

SEQ ID NO: 323502 - protein, 399 aa, unidentified
MLAVGIDISKSKSVAAILNQDGSMHTSPFEFHHTQPELDAFIKYILNSKQSATILMENTGHYHYPVLKAFQEAGLPVCMVNAYQIKKFGDMDLRKAKTDKKDAVRIARYALEKSYSLVPYTSMEQKYEDLRFLARQYNQRMLTLKTNKVFLLNLLDETMPGITNILPLTTRTPETSLSVLFINRFKSYDRIKKMGKSRFLDAFEKIARKSRNRQTKTYGLAIYEAALRNITTRGENEYTLAAQDQCLELVCESQKAADSIILKMKTLAETLPEYAVLRSMAGVGDRLGPLILAEIGDIRRFHSGKALNAYAGNDPPPYQSGTFESYNRHISKRGNAALRKYCFEVMQTLKLTRPQDDPVYLFLLKKEQEGNPYNVAKMAGVDKFLRIYYARAMETLKQQ

SEQ ID NO: 323503 - protein, 405 aa, unidentified
MTIQSQVSQSPVSIYSPKSVQLQGAAFIPRDYDVFAGLDVDHHSIAATFTDHDRLLQSLRLSYSAAQLLNYVQKHFPQQRLAFVYEAGPTGFGLYDELVAAGHPCLVVAPSMVPTAPGQRVKTNRLDSKKLSTALRGGELKSIHVPAPKYRELRHLVQLRDTHVQQLTATKCRIKALLLYEGIAFPSDAGKEKQWSARVLDELLELPCSEMVRFKLDQLIGTLHFNFNAAAAAQKQLRHYCKNDAQLRQSIAWLKSLPGIGEIVATHLVARLGDPALITNVRQIAGFLGLVSSEHSTGDKQNRGEITRAGDSRLRNKLIQSAWVTIRKDPELREFYRRVYQRHPQKVAARKAIVAVARKLTTRIYAVLKEQRPFVLREVSTAPLTAEETAGPGNASTVNRTNSVS

SEQ ID NO: 323504 - protein, 370 aa, unidentified
MKDGNTLYVGLDVHKDSIAVAYASQDGPAEPVHVGSIGTRQCDIDALVRKLQSKGARLVFVYEAGPCGYWLYRYLTRKGLTCFVVAPSLIPRKPGDRVKTDRRDAATLARLARSRDLTPVYVPEVADEAIRDLARAREDTRRDLNAARFRLKALLLRNDIRYTGRANWKPEHLRWLARLVFATPAQQIVFQEYVRTVTERTERLGRLEAQLLEQAKPWRFFPVIEALQALRGVQFTVAVITIAELGDLTRFDSPRQLMSYLGLTPSEYSSGDRRRQGGITKAGNGHARRALVEAAKAYRHRAKVSEQIRARQQNLPPAVCDIAWRAQVRLCGRYRKLHARGKHPNTIAAAIARELAGFVWAIVKAHPVAA

SEQ ID NO: 323505 - protein, 335 aa, unidentified
MRLYTAFDLHANNSYGAIVGEQGQRVKRQRLANDPELVFQFLLPYKAEIVGVVVESTYNWYWLVDALMSEGYKVHLANTAGIQKYKGLKHSDDQDDAFWLAEMLRLNILPEGHIYPKEERPIRDLLRKRGHLVKLRTSLIISLQNIIDRNCGTRIKVNDVKRLKEDMVAPFVAGNEDLALAGLVSKEAIDFLTVKIRTIESSVESRIKLKEPYKHLLTIPGIGKIMLETGAMDRFEKVGNYASYCRKVSTRWTSNDKKKGKGNKKNGNKYLAWAFSEAAEFARRYDPQARAFYNRKLQKTNFMIAHSALAHKLARATYHVIKEQKPFMPEKLFAS

SEQ ID NO: 323506 - protein, 346 aa, unidentified
MEHYVGLDVSLKLTAICIVDQTGRIEREGVVASNPEAIAAFIKSHAPHVARIGLETGATSTWLWTELNKMGLPVICIDARHAKAALKMQINKSDRNDAVGIARIMQCGWYKEVRVKDLDSHAIKALLVSRALLVKIKRDVENQIRGLLKNLGLVIGRAKMNVFALRAAELTEDRPELAGAVEPLLKAREAIERQIADLDRKVLRLARNDAQVRQFMTAPGVGAITALCFLATIDDPTRFKRSRSVGAYVGLTTRRYASGEVDWTGRISKCGDKLLRSYLYEAANVLLTRVAKWSALKAWGIRLAKRSGLRKAKVAVARKLAVILHRMWIEGTEFNWSSKKTANQLA

SEQ ID NO: 323507 - protein, 426 aa, unidentified
MSGEETGGQEPQFAAFVGIDWADQKHVWCLQARDSTKRETGELEHKPEAVEAWVGQLCQRFGNRPIAVAVEQSRGALVFMLTKYEPLHLFPVPSTTSARMRKALYPSGSKDDPRDADVVLDLLLQHRDKLRRLSPDTDATRRVQNLVEERRKLVDEKTEQSNRLTSHLKIYFPQMLDWFEHLDTELVCALLERWPTLQELQKVPPAKLRAFFSKHHCRDQELIEWRILAIRQSIPAIRDRAVIEAKSTVAKVIVQLIRTLREGLADLDEKIEEAAEVHPDFFIFESLPGAGPVLAPRLLVAFGSQRERYHNASEVQTYSGIAPVMEKSGKKQWIHFRWACPKFLRQSFHEWASHSIGYSVWARNYYQQQRNKGQDHHAAVRALAFKWIRITFRCWKDRVAYDESKYLTSLARRGSPLAATATAKTL

SEQ ID NO: 323508 - protein, 409 aa, unidentified
MNPLYVGIDVSSRSNVVYLMKPDGSKVKNFSVVNSKDGSQKLVKEILTALTSLSLTDVIIGMEATSVYGDNLVFFLRENGSLTPYNRRIHVLNPKQVNKFKESYNDLPKNDYVDSFVIADCLRFGRINNEVYLDDYRYKALQNLTRARFLAVQNLTREKQRFINVLFKKYSSLAQEKVFTDTFSTTALAVYEEFDSADTLAYMDLQELTEFLQKKGKNHFSNPEEVAKAIQKAARSSYRLPKTVNDSVNQVLSISISSIKALESQIKEFDKAIAAQMELIPNTLTSVKGIGPVYSAGIIAEIGDINRFPNQAKLAKYAGLAWQQHQSGGFESQNTRLIRTGNRFLKYYLGEAAMSLVRCDAEYSRFYHLKYNEVNKYQHKRALALTARKLVRLVFRLLKDNRLYIAPEA

SEQ ID NO: 323509 - protein, 341 aa, unidentified
MSIVTVGIDLAKNIFAVHGVDEAGTAVLVKPKVAREQLSALMVQLPPCLIGMEACSGAHHWARLFRQYGHTVKLMAPKFVTPYRMSGKRGKNDAADAAAICEAVTRPKMRFVPIKEEHQQIILCLHRTRQGFVEERTATYNRLRGLMSEFGIVLPQKVANLRREVGAHLEDLPGYANRCIGDLLAHADQLNERIDEYDRAIAQAAREDARSKRLMQLPGIGPITASALLASIGGGHDFANGRQVAAWIGLTPGQYSSGGKARLGRITKAGDRYLRSLLVMGGRAVLSGLGDKQDRFSRWARSLEERRGYWRAVVAIAAKNARMAWAVLKYGEDFRLKPSAA

SEQ ID NO: 323510 - protein, 391 aa, unidentified
MTKRKTETVNDLSRCLDPLDMDATLIGVIEMSQSSWLVGGIIPGVERQPLKKLAIDEHALLKLLTRWRGEAEKKGRRITRIAVAFEAGHDGFWLARWLAAQGVEAHVIHASSVAVTREHRRAKTDRLDTELLKRAFLGWLRGERGHCKMVAVPTLAQEDAKRPSRERETLVGEASRIITRVKSAFVRLGIRGFNPKLKAAATRLETLRTPEDEPIPPNTLAALKRDLERHQIVKKQIREIEQTRLDVLKQAPEKGPHAMVLLLARVIGVGVETADMLVQEVLSRTMRDRRAVGRYAGLTGSPDESGAKRRDKGLARSGNARVRHGMIQLAWRFLLFQKDSALAQWYRQRTADAPSTRKTLIVALARKLLIALWRLARDGVVPEGIRMRPAA

SEQ ID NO: 323511 - protein, 383 aa, unidentified
MQPTQEMDVTRVDQMLAVSLELSSKSWKVGLHDGRRERASIYTLKQEVAGARLGAAIELIEQTRARWALGKDARVEVIYEAGQDGFWIARALEGRGYAVRVVDPASIPVERQARRAKTDRLDVLRLLSSLLGWLRGEHDRMRVIRMPDETAEAQRHWARERGLLQKEIGQHRDRIRKLLRTVGCWVDLERDVGAQLKRGELKDYQGRALSEPLHERLLRECERLAQVEAQLKCVEQALAERLSPEAQRRVEALGQLRGVGPVGARRLVLELFWRNFGNRRQVGACVGLVPQPYDSGNSRVDQGISKQGNRRVRALLIQMAWMWLRYQSGSVLAKWFAQRWAGGGGNKRAKRIAIVAVARRLAIALWRYLKDGTVPDGAALKSA

SEQ ID NO: 323512 - protein, 338 aa, unidentified
MQEQQYVGIDLHRRRSVIVRMNDAGEVLGTVRINNDPLKLAMAIAEAGPDPEVALEACYGWYWAADLLAAEGARVHLVHPLGLHWDSRRVKNDLKDATELANRLRRSDLPEAWISPPEVRELRELVRYRARLVALRTSAKAQVHAVMAKLGILPTQVDMFSPTGQVVLDQMPFEGVYGLRVESLRDLLEIFDREIAMVEREIHRFLKDDRGYKAIQVLSGIGPITAAIFVAEIGDVTRFPTARHLCSWAGMTPKLHESDTKSRRGRITKQGSTIVRWAAVEAVVRYHGGDVIAPAYRRIAERRGNSIARVAAARRLLTLVFYGLRDGEIRCVARKEAA

SEQ ID NO: 323513 - protein, 417 aa, unidentified
MSMNPSASSQEEAPLKYICGIDVGSQSCAGCVYRLDKSLVVKPLAFANAKEGWNVLLDKLTQLDALPKQILIGMEATARYSENLYHALEQRGYRLCLLHPGQTHQFHERQGLRAKTDRLDAITIARVLLSGEARASYIPDEQVATYRELVRLHSQLSEQVARYQNQIHALVVVLFPEFTQVFADPCLPSALSVLKVSPSAQAMAQAEEAALYALLRMHKHAHYGHPTAKKLLSLASTSVSSQRAEAGRSLSLRILCGQLEQTQKYLEELQVELEQLIANDPATKSLQQIPEFGTQTVAVLRAELGDVDRFARTDQAIAYAGLDVQIKESGLWKGKAKLSKRGSGLLRQMLYLAALRSLHLQGSAFGAYYQRLVARGLKKGSALMAVMRKMLAVTVHLLKHEQEDYDRSLVAVGNLAG

SEQ ID NO: 323514 - protein, 475 aa, unidentified
MAAVEVVARTGYGEAVRVFDLGPRDETMNRGPGDRIAGRTCEGDCNQRDRSSAAHDHQEINMESVDRCIAGIDVHKKMLAVVIRKQNGERVEYEKRKFGTTRAEIQHLEAWLQARAVSEVVMESTAQYWRPVWYGLEAHFRLHLTHPLKTRAPRGRKSDFRDAQRLADRWNSGDLEESFVPGAEQRSWRWLTRTRVQLKKKVGVIRCHVEGLLEQGGIKVSAVVSDLFGVSGWAMLEHIAGGETDVEVLAKEARGALRKKDQQLKEALVGQLEPVYQLLLKQHMDQVRLLRRQVEEINQAVAEAMKEHIQALYRLSKIPGVDVYAAQELLSEIGPNAAAFASAEQFASWAGVCPGSKESAGVNYSHRSAKGNRYLRRLLCQIAWAAIHTKETFFAGLFARLKPRVEAKGAAWAVAHRIAKVVWLLLHQQVEYQEKGAAPPNERTLLRKFKRMLKEFGHLGLDVRALLDQHLPAPA

SEQ ID NO: 323515 - protein, 334 aa, unidentified
MEKITTVGIDLAKAVFSLHGVDAAGRVVLRRTVRRDQLVEAVAGVSPCLVGMEACSGAHEWGRRFQAHGHTVRLMAPKFVAPYRKSGKNDGNDAEAICEAVTRPNMRFVPVKSIEQQALLTMHRVRQGFVVERTAIINRLRGLLTEFGVVLPLRSVTVRRQAAAAAETLPELARRAIGDLLDQLRVLDERIGGYDREIEAQANLCEPAQRLMKIRGIGPTTALAIVATVGNAREFKNGRQFAAWIGLTPSQYSTGGKPRLGHISKRGDSYLRNLLVQGARSVLNSAGMHQDRMSRWILELQPRRGYYRTLVAIANKNARIAWALLAKNETLRSA

SEQ ID NO: 323516 - protein, 343 aa, unidentified
MNIASIGIDIGKATFHLVALDEHGSIVIRKKFSRKALLAYSAKLTTSLIGMEACGGAHCLARLLRDQGHQVRLIPGQFVKRYREANKNDYLDAEAIAEAVTRKNLRFVPIKTEDQLDVQGLHRVRERLVHNRTEVINQIRGFLLERGVTFNRGPLSLRKGMPDLLEDAEQNLTPSLRTLLSHLWQEWQGLNSQIDRISAAIEEVAESDAACQRLRKIPGVGPLVSTATVAAIGNGAAFKRGRDFAAWLGLVPKQHSTGGKAKLLGITKRGNRYLRKLFVHGARAVLLRVKYDTGGFGQWVHRLAARAPRNKVIVAIANKLARIAWVVLASGNEYQHQPVAAAA

SEQ ID NO: 323517 - protein, 343 aa, unidentified
MEAKRFIGIDLHRDCFTACVRLENGREYLKKWKLEDMPKFAGKLRAADQVAVEMTGNTRLFHDQVAPLVDRIVAVNPTQFQVITHSVKKTDPNDARLLALYLAKELLPEVRMKDKTQAQIASLTQTRDTMVKLRTALKNKVNNICSANGVNLNRESLASEKGLRAVGKMPFDSLVHRELKIIVDQIRSLNQSIAELEEIIGQEGQKLDGHKNLTSIKGIGKLSGGILLSIIGDIGDFADEGKLASYFGIVPRVSNSNETEHSGRITKRGTKLGRTTLIQCALIAQRYSPYLKTYYEKIKSRRGAGKAIVALARKFLGIIYRTLKNNWVFEDFPNFVLAEQATA

SEQ ID NO: 323518 - protein, 442 aa, unidentified
MAMRKREDSPEVFPNAAGIDVGASSHWVAVPRSAAEEPVREFGAMTDDLHAMADWLLACGVDTVALESTGVYWIAVYEVLEQRGLTVWLVDARQMKYVPGRKSDVLDCQWLQKLMSLGLLRAAWRPGDEVCVVRAVARQREVLLTEQASWVLRMQKALVQMNLQLTEVLTDVMGMTGQAIVRAIVAGERDPKVLASHRHGRVKASAAEIQRALTGNWRDEHLFVLGQALAMFDSLAQRVLECDAKIEALLIPLGRHDVELTGPGKRCGKNTLQFDARTALARWAGVDLTRINGLSVTTVMTILSEIGPDLSHFANVKHFCSWLGLCPGTKISGGKVLSARTRRSANRVRQALKLAAMSLSRNDSALGAFYRRLCARMDKPRANTAVAHKLARMVYFMLTRGEAFVDQGQHLYEEQQRERSIAALRRRASALGFEITPTGQQA

SEQ ID NO: 323519 - protein, 402 aa, unidentified
MNAVGIDVSKGKSMIAIMRPFGEIVSSPFEIKHTTSDINSLVELINSVEGESRIVMEHTGRYYEVLAHQLSKANLFVSAINPKLIKDFDNDSLRKVKSDKADAVKIARYTLDKWQNLKQYNVIDELRNQLKTMNRQFGFYMKHKTAMKNNLIGILDQTYPGVNTYFDSPARSDGSQKWVDFASTYWHVDCVRKMSKNAFIDHYKNWCKRKKYNFSKSKAEEIYEKAKELVPVLSKDNITKLIIKQAVDQLNSVSTTIESLRTLMNETASKLPEYSVVMAMKGVGTSLGPQLMAEIGDVSRFTHKGAITAFAGVDPGVNESGSYEQKSVPTSKRGSSVLRKTLFQVMDVLIKTHPQDDPVYQFIDKKRAQGKPYYVYMTAGANKFLRIYYGRVKEYLSSLPES

SEQ ID NO: 323520 - protein, 326 aa, unidentified
MFYLGIDVSKAKFDCCLFLDDSSGKIKTKCFSNSNKGFHQLLSWLNRFGLVAEETRALMEATSVYHELLAQFLFDLKFQVCVANPARTRYFAQSISKLNKTDKIDSEVLARFAMTVDLHLWQPTPDNIRLLNALLDRRSSLANDLKREQNRLEKANSTLIVVPILKSIKTNIKSLTRQIQNLDTQIQNHIDQDHELKRDQKLLESIPAIAERTSLLMLVFLRAHSFEKASQAAAFVGLVPIHRQSGSSVLGKSRLSKAGSPKIRSGLYMAAIVATRYNPHIKELSERLLAKGKTKMVAIAAAMRKLIHLCYGVLKNQQPYQANYKA

SEQ ID NO: 323521 - protein, 339 aa, unidentified
MSFKILKNNCCGLDVHKTWIYACIGITDSFKRTEYKQARFSSFTKGLQELCLWLAKYNCIDVCMESTGKYWIPVFNVLEKNNIFVTLSHPKYTKPQKGNKTDRKDAKWICDLYMCGMVKPSFIPPADIRQLRDLVRYRFKLTCMITGEKNRAHNCLTVSNLKLDDVFSDIFGKSSRSITEQILQHPGEVFDVAPFVDSRCKTPIEEIQAAVDGAISHEQAVKLRQCLKHIDELEMHKAEIEREIFRLSQKYESVLDLIRTIPGFDKNPLTAIQVLSEIGADMSVFPTAKNLVSWAGCCPRNDQSSRKIKSTRISRAGSYFKPVLVQIANALIKSKKHLK

SEQ ID NO: 323522 - protein, 338 aa, unidentified
MKSLGLDAHSASFTLAVLTPLGKLSSCRSNTTSAKNLIDAVSAVNGPKVLVVEESHMAAWVKRTLSPYVDKLVVCDPQRNAWIAKDEFNNDKSSAIKLAKLQLDGYIKEIIHPEEEGAKLRSLFLHYYDLNQQLTRFKNKLKAVFRSEAIATGGKKIYEEDGREKWLELLKEQSHLQHTAGQRFEIIDTLEELKEKTYKAMVQLAKKHKAFKLIDGMPGAGPVIACGYIAMIDTPHRFSRKNKLWKYACLGNKYHDSDGEVYLSGASKSGNRVLKWVVVEHFMHAVERSKSDNKFKRQYQAMQKKGTDKRAAKRHVCRGLLSTVRAMWTKEEEYRDKP

SEQ ID NO: 323523 - protein, 359 aa, unidentified
MKIIGCDFHPSWQQVAVFDAETGEVTEQKLVNGDGEAERFYGALPVPALVGVEACGNSQWFIDLLERLGHEVWVGDAAQIRASYVRKQKTDKRDASHMLKLLMEGRFPRLWTPSAEQRDLRQLLIHRHKLVEIRSRVKNGLQHLALNRGVQKKSRLWSVRGRACLEKLPLQGWTARRRKDLLQLLAELDRQIGELDRAVGDAAEQHAQARLLMTQPGVGPITALAFVLTIGDVGRFKHSKQVASYLGLIPREHSSGGKQRLGAISKQGNRFMRQLLVEAAQTANRLDEGFRKQYQARCHHKPKGVAKVAAARKLTVRLYWMLRQNVGYPEIARIESSPRVALVGASQTDELIGRSRIQQ

SEQ ID NO: 323524 - protein, 365 aa, unidentified
MKHVTTYVGIDAHKKDLFIAMLIGQEATPVTWTVPNEPNAVRRFVRRLERDAPGPVRACYEAGPCGYVLQRQITTPRVSCQVIAPALVPRKPGERIKTNRRDARTLAELLRANVLTEVRPPTPEEEAVRDLCRARDDAREDLQRCRHRLGKFLLRRGLHYTGRNWTRAHRQWIDSLAWTHAAERVLLEDYQLAIDHVEARLIELDRRLVEIAEAAPYREPVGWLRCFRGIDTLTAMLLLAELHDFRRFKSPRALMAYLGLVPGEDSTGEKHRRGRITRTGNALVRRLLIETAWHYQHRPSVGAALMRRRKGQPGRVIAIADRAQQRLCRRFRRLAEQHKPAPKIAVAVARELAGFLWAALQAPAA

SEQ ID NO: 323525 - protein, 463 aa, unidentified
MSKLSVREKLGASGQRPFAGMRKMRPNAAGLDIGAHEIVGCIPGEDETSQEVQTFGTYTVDLRAIGDCFHSKGIESVARESTGVYWIPVFEYLEGIGIECCLISAAALKKVPGRKTDVLDSQWIQTLHSYGLLNSSFRPEGDLVALRTLLRHRAQLLEHRSPHILHMQKALVQMNLQLSQVLTAITGQTGLLIIRAIVAGERDPQQLATLRNWRCQKDEAEIAEALTGTWRAEHLFVLQQSLATYDFYTNQLEECDREIERIFSLIKPRCEVTAEEEAAIMADGAGKKDNRGKNAPENVQSRAHIKRITGVDLVAVPGLSASLAQTILAEIGTEMNKFSNEKHFCSWLGLAPKNEVSGGKTLRSHTLKTKNRAGQAFRLAARSLTRSDSEFGAFYRRMKSRLGPAQAMVATSHKLARVVYHMLSKGEEYRPLGAAQYEQQFKERQVQYLKRKAAKLGLQVVPA

SEQ ID NO: 323526 - protein, 388 aa, unidentified
MMISLESVKDLSIPRGGGRLPEGWIGGTVCPLVKTTVGELGPPVLRARPEQMIGSKSRMQGKVMSEHCASNEVAVGIDVCKEWLDIHVLPANTVLRFSNTKKGHKQLLSALTPLKVRIAVMEATGKYHRGVHRFLHDAGIAAAVVNPLRARLFACSLGALAKTDAVDARMLASFGLMAGLAATPPLAKTIETLREIVRNRDAAIAAKVALENQLAAAAVAGVQRQIRRQIKTAKAAADAIEALAVQAIRADPALSRRFDILVSIPGVGPITACGLLANMPELGSLDAKQAGMLAGLAPVACDSGQRNGARRIQGGRPAVRTGIYMAAHSAARFNPHLKRFYERLLAAGKAKKLALTAIMRKLVVLANALLKEDRLWAAEPPIAETLHA

SEQ ID NO: 323527 - protein, 404 aa, unidentified
MSVQVAPATSSTIVVAVDVGKASAMFSVTDGARQRLLGPVEFAMTYAGLSSTVHQVMAMVKPSTQVKVGVEAAGHYHRPVVDYRWPAGWEVLGFNPAHVAEQRRVAGRRRVKTDAIDLEAITELALAGRGQPVTAHEACIGELTAWAHHRSRRVATRTATKNQLLGQLDRAFPGLTLTLPDVLGTRIGRLVAAEFADPARLCALGTNRLIRFAAAREVQLRRPLAQRLVAAAADALPTRDAVVARQVLATDLALLADLDAHVKAAETELAALLPLSPFATLTSVPGWAVVRVSNYAAALGDPCRWPGPQQIYRASGLSPMQYESAGKRRDGRISREGSVALRRALIDLGIGLWLTEPTAKAYTLGLKARGKRGGIIACALAHRATRIAYALVRDHATYDPTRWG

SEQ ID NO: 323528 - protein, 352 aa, unidentified
MQQFWAGLDIGEGKTAVCVTSDAGEVLLEQLATSDIPGVAEVLEPFTQIGGVRVSIEAGMGNQLARKLRKLGYPVVVFDTITSNKFLTIRRNKTDANDARGLADLGRMRRTAAVSVHVKSVEIQRLRSQLVFRDQLLRQRTALDSALRALLRENGADPKAAPPNKGWRIRLEQELTRLKHDEEVDLTAQAGPMAEVREALDRYVKAADKQVLQTAESNPVTKRFLQIPGVGPISALSFYSAIENPVRFATSADVGAYLGLVPRVKQSGTICQRSRITKAGNKLTRGHLVMAAGVLISRTKTECAIKDWGRQLAARAGHGKAKVAVARKLATLMLSLWKSGRDFQPFPIPSRT

SEQ ID NO: 323529 - protein, 369 aa, unidentified
MGQDITYVGLDVHKDTIAVALAEAGKRGEVREHGKIANTRSALKTLVAKLGRAGSELRFCYEAGPCGYGIQRQLTGEGHGCVVVAPSLIPRKPGERIKTDRRDAINLAKSHRAGELTPVWVPDQTHEAIRDLVRARLAAVRTLRQARQQLSGFLLRQGYHYPRPAWTLTHRRWLAGLKFEQPVHHIVLEDCIAAVETATARRDRLEAHIEAVLPDWSLAPVVHALQALRGVALVSAATLVAELGDITRFTNPRQLMAYLGLVPSEHSSGSKRRQGGITKAGNGAARRMLIEAAWSYRFPARISREQLLRQETLAKPIRETAWKAQERLCRRYRKLARAGKLPTVITAAIARELSGFVWAIAKQATVRFT

SEQ ID NO: 323530 - protein, 338 aa, unidentified
MAMYCGIDLHSNNSYVAIRDEGHRDVVCRRLRNDLEVVKGFLEPYRNELEAIAVESTYNWYWLVDGLMEAGYDVRLVNTTKASDYSGLKVTDDRHDARWIAHLLALGILPEGHIMPREERGLRDLLRRRLFLVQKRTSHLVSIKTILARSTGKRVSVADIQKLDTETIRKVISDPFVVESIMCMLPVVRVLTAQIKAVEKTAVETGKLRDEFRLLQTAPGIGNVLALTIMCETGDIRRFPSAGNYASYCRCVKSERTSNNKKKGPGNRKNGNTCLSWAYSEAAHHAIRYEPLAKRYYTRKRSRSHPMVASRAVANKMAQACYYVLRDQVPFDASRTFH

SEQ ID NO: 323531 - protein, 446 aa, unidentified
MAKRKQEVEIHYPHAAGIDIGSTRHFVAVPVDRDPQPVREFEGHTVGLRELAAWLKTCGITEVAMESTGVYWIPLYELLAEQGFTVFLVNARHVRNVPGRKSDVLDCQWLQRLMSFGLLRGAFRPEDEICTLRALWRHRDMLIAYQGSHVQHLQKALNQMNVQLHHVIADIVGVTGQRIVRAILAGERDPRALAALRDRRIQADGEAIAKVLLGNWREEHLFALRQAMELYDVYAQKIADCDQQLQSLLENLRTHELPAAGLANPKARKSRPKNAPGFAVREALYGLAGVDLTRIDGIDTSTAMKIISEVGSDLSAFPTVKHFTSWLGLCPGTKISGGKVLSGATKRSANRAAQALRIAAQSLRKSDSALGAYHRRLCARMDRPKAITATAHKLARLIYTLLTKGTDYVDVGAAQYERQFRDRTLQNLKKRAQALGFELTPLPEAA

SEQ ID NO: 323532 - protein, 345 aa, unidentified
MMDHYVGLDVSVRETSVCVVDETGKLLKEAKVPTEPGSIASLLAKGGYVCKRVGLEAGPMSQWLYAELAAAGLPVICVEAQHMRSALAAQRNKTDRNDARGIAQMMRVGLYRPVHVKTLQSQERRLLLTARKLLQAKLLDLEAELRGTLKNFGLRVGIVGKGGFRQRVRELIEGREALTAVMSALLEAHEALQTQYNILHKRLLDLVRDDPLCRRLMTAPGIGPVIALTFQATVDVPTRFPKSRLVGAHFGLTPKRYASGETDHSGRVSKCGDAMMRTALFEGAQALLVCTKKWSSLKAWGMAIARRRGVKRAIVAVARKLAVILHRMWLDGTEFRWGKEVPSAA

SEQ ID NO: 323533 - protein, 342 aa, unidentified
MDHFAGLDVSVKETSVCIVDDTGKIVREVKVASEPEALLQVLKNPTYHFKRIGLEAGPLSQWLFSALAEAGLPVICVETRHMRAVLKAQINKTDRNDARGMAQMMRAGIYRPVHVKTLRSQKLRMLLTHRKLLQSKAIAIDNDLRGTLRNFGLKVGVVRTVKFEARIRELVENLPDLAALIEPLLIVRRTLREQFCILHRRLLAIVRDDEVCRRLMTTPGVGPVVSLTYRATVDVPARFRKSKSVGAVFGLTCAKYQSGEVDWSGRISRCGDEMMRVMLYEAAQAMLRSKKWSWLKAWAMQIARRRGMKKAIVALARRLAVIMHRIWVDGTEFRWTREAAVA

SEQ ID NO: 323534 - protein, 318 aa, unidentified
MREPIIVGIDVSKSEFSVAVYPSGEAWTSATTVSAIDVLVDRVRDVAPALIVLEATGGYELAVAGACASAGLPVAIVNPRQVRAFAQAIGRTAKTDAIDAAVLALFGARVQPPPRAIPDAATRALADLITRRRQLLEMLGAERQRLAQAPPTGPITRDLRTHIRWLERRLTDVDDDISRAIQGSPVWRVHEDLLRTVPGIGPTTARTLLAELPELGSLDRRAIAALVGVAPFNCDSGQYRGRRRIAGGRGSVRASLYMAALTASRRNPPLTAFYRRLRAHGKPAKVALVAVMRKLLTILNAMIKQRAPWNPCASTVTT

SEQ ID NO: 323535 - protein, 381 aa, unidentified
MKEEQATAGHRSIVGGVDTHKDLHFAAVVDEHDRVLGSESFPTTRHGYKQMLLWMRSFGELVRVGVECTGTYGAGLLRYLQQAHVTVLEVTAPDKSDRRKRGKDDTLDACNAAHAAFAGVRTVTPKTRDGMIESLRVLKVCRKTAISARRVALQLIHNTIISAPDELRESLRTMTRMQLIRTLAAWRPDLSDYRNVTSACRIALKSLGRRYLELHDEIADLDVMIATLVDELAPDLVSRNSIGYESASQLLLTAGDNSDRLQSEASFAAPCGVSPVPASSGKVTRHRLNRGGDRAANSALHIIAIGRLRTDARTKAYVDKRVSEGHSKLEAIRCLKRYIAREVYYVIRHEKPTDRAGANYPLIFRRASRAASSPVTTGSRS

SEQ ID NO: 323536 - protein, 337 aa, unidentified
MSIIRIGLDTAKHVFQLHGVDEKEQPVLRRRLSRKEVEPFFAKLPPTRIGLEACGAAHYWARVLRVLGHEAVLLPPQYIKPYVKRGKNDALDAEAICEAMSRPGMRFVPVKSAEQQAALMLLRTRELLVKQRTMLINAMRGHAAEFGVVAAKGLGKVSELLQRAHAEGAGVPTLALEMLSVLASQLDALELRLKTIEAKLMAWHKADPVSQCLATQPGIGPIGAVSFALKVTDPKAFRSGRHFAAWLGLTPKENATGGRSRPGRISRQGDESLRRLLVLGATTVIQFAKPGRASPWLIQLLARRPRKLAAVALANKMARILWAMMVSGELYRRPQPA

SEQ ID NO: 323537 - protein, 234 aa, unidentified
MEYFAGLDVSLRSCALCVVDASGSVACGRDLVCQVGEITDCLASFSHPVARIGFKAGTTSQHLFYLLTNNGFDVVCVETHQVCAALSAMRNKTDRNDARGIAHILRTGWFSPVHKKSREAHGTRALLSCRKALLNRTIDLAARSDEVCLRMMTLPGVGPIAALTPKAAIDDPTRFKRSRNVAAHFGLKPRRYQSGEHDNPGRTSRVGDRCVRATLYAAANTLLMRTMAGSQIKS

SEQ ID NO: 323538 - protein, 344 aa, unidentified
MSLTIGLDIAKHIFQVHAVNDSGEPVVRRKLRRSEVLAFFAKLEPGVIGIEACGTAHYWGRALSELGHEVKLMAPHYVKPYVKRSKTDAADAEAICEAVSRPTMRFVPVKTTDQQAVLMVHRARSMLVRQRTMLVNAIRSHLAEFGLVTGLGLAKTAALVAEVLKAGEDECPIPEVARTVVRCLTQQVGLLDKQIRRLDVELLAWHRSNAASKLLASIPGVGIVTATAIAATVPDPAYFESGRAFAAWLGLTPRANSSGGKDRLGRITKMGSQYIRTLLVVGATAVVRSARIKDGSWLSEWARSLLEKKPARLVTVALANKMARVAWAVLTRGQQFRPSLVAAG

SEQ ID NO: 323539 - protein, 409 aa, unidentified
MKVLLQRCAGLDVHKETVVACARRMVGQRVEYVLEQFGTTTSELLRLAEWLHAQGCPHAALEATGVYWKPVWHILEGQIELTLANAMEVRNVPGRKSDVSDAAWLADLLAHGLIRGSFVPPRPIQELRDLTRTRKQLSRQVAQATQRIQKVLEDANIKITGIITHLLGVSGRAILRALIEGETDPERLLARTNGRLRAPRERLIEGLRGAVTDHHRFQLRLLLSQINSLEHLLAELDEEIARHLEPFRSQLQRLSTIPGVSDYVASVLIAEIGTDMSRFPSAGHLIAWAGLCPRMDESAGKRRNTRTRKGARWLRSTLVQAAWPAARSKGTYLQAQFLRLKSRRGPKKAAVAVAASILTAAYHILRDDGVVYLDLGGDYFDRRDKNRAARRLVKRLHDLGFTVTLQEAA

SEQ ID NO: 323540 - protein, 339 aa, unidentified
MNVIYLGIDLAKNVFQLCGLNQAGKPVYKKRTDRNTLLQTVANIPACLIGVEASTGAFYWQREFEKLGHKVKVISPQYVKPFVRGQKNDGNDAQAIAIALMQPTMQFVPPKSPEQQDIQALHRARQRIVNHRTATVCQIRGLLLDRGITIGAAVSRVRHAVPLILEDAENGLSARMRRTIAELYDLFNDLGRRINFFDKEIDTVFRQSEACQRIAKVKGIGPKTATAVVAAIGKGTEFKNGRHFSAWLGLVPRQHSSGDRQVLMNMTKKGDKHLRTLFIHGARAVVRVAANNNEGYLNQWVNQLKERRGFNKTTVAVANKNARIIWSILHNETEYRPAV

SEQ ID NO: 323541 - protein, 435 aa, unidentified
MLSKSLGAHVLMKQEISMTSHLTKTNYKAFVGIDWANDKHDLCVQDPSTGKREFSIIKHDVNEIDKWVKGIHKRFGSPIAVAVELTKGPIVYALQRYEFVVIVPINPTTLAKYRTAFKPSKAKDDPTDAELALELMLRYPNHFPPLNQQSVNMRKLMFLVEHRRKVVDDKQRVVNQMINAIKQYYPQANEWFCKKDTHIFCDFIARWPTLQQAKKAHKSTLVKFFNDHGIHNSTIVDHRVSLIKKAKPLTDDKAVIDSHTMLVIFYIERIVNSMKCIQQYNKSILKLMDKLPDAPIFNSLPGAGAALSSRLLAAFGEQRDRFKSAKEVQQYAGIAPVTERSGQKSWVHWRWQCSTFLRQTFIEWATHSRLKSYWANLYYLQQREKGSSHQAAIRALAFKWIRIVYKCWQDGKPYNETQYLRALKDRGSPLLSDKV

SEQ ID NO: 323542 - protein, 358 aa, unidentified
MKYVGIDVHKRMCQAAVLDEDGSILDELRFPNDAKGVEEFAGKLTSFRDEVRAVVESTGNLWIQIHDRLEEHGVDVALSNPSKTKIISEAKVKTDKRDARMLANLLRVDLLYTCYVPGEELRSRRELLRHRMNLVKTRTAVRNRIHGLLDKHGLRMPEATPFSTGNVEWLRGSSLGFMDDAILRSDLALLEALDGQVDVMEDKIAAVAAEDRRVRLLMTMTGVGYFTALLVLSEVGDVSRFRGDKEFASWMGLTPSVHQSGERTRTGSVCGPGNKRLRWAMVEAAQTAVRHDPRLGGMYERLSRRRGSGCAVVAVAHEMARIMYFMLVRDEPYRESNAALTERKLKSLGKRAFEGLRN

SEQ ID NO: 323543 - protein, 343 aa, unidentified
MDHFAGLDVSVKDTSVCIMDGAGKIVREVKVGSEPDDLLQVLRNPAYCFKRIGLEAGPLSQWLFSALAEADLPVICVETRHMRAVLKAQINKTDRNDARGIAQMMRVGLYRPVHVKTLRSQKLRMLLTHRKLLQAKAIAVENDLRATLRNFGLKVGVVGAVKFEARVKELVDNFPDLVTLVESLLVVRRVLREQISILHRRVLGAVRNDEVCRRLMTVPGVGPVVALTYRTTVDVPARFRKSKSVGAAFGLTPARDQSGESDRPGAISRCGDEMMRTTLYEAAQVMLLRSAKWSWLKAWAMKIARHRGMKKAIVALARRLAVIMHRIWIDGTEFRWTREAVAA

SEQ ID NO: 323544 - protein, 426 aa, unidentified
MSAANQSSQEPIAAFVGIDWADEKHDIALRATEPEAKVERTKIANQPEALSDWVLALRERFKQGKILICLEQSRGALMHFLMGYDCFELYPINPTQLENYRKAFKPSGAKDDPTDGELLCKYLSLHHQELRPWRPNDKQTRKLALLCEKRRQAVDARSALSNQLKSELKQYYPLALAVLDNDLTTVLAADFLLKWPNFASLKKASAHKLRGFFYGHQCRSEQKIEARIQRIQSAQPLTRDSAIIEAGTLTTQMLARQLQALAPFIRQYDQQIAELFSQHPDRALFDNLPGAGDALGPRLLSAFGSEHDRFDNVLEPLSFFGIAPVTERSGKTTFVHFRWACSKFLRQTFHEFAGCSVHFCAWAKAFYDQQRARGKDHHAAVRALAYKWIRILFRCWKTRQPYDPQRYLAALAQHGSPLARAVKNSP

SEQ ID NO: 323545 - protein, 321 aa, unidentified
MKHHTSIAAPVVAGVDVSKAHLDVYLYPAGKRRRFSNDKTAWRALRGWLVKAAPDHVVYEATGRYHKGFERYLGGHGLPIARLDPRRARRFAEAIGVQAKTDPGDACVLAQFGAFLKPATTALSGPALEQLKELVAARRGLIQQGTRIANKSKTAIAPLLKRQLKQTGAQVQRQIKAIDKACREIAASEPALAQRLAILLSIPSIGEITAMAILAEMPELGVLNDKQAASLLGVAPIARDSGTFQGKRHIRGGRAKLRQALYMAALVATRFNPDMKQKYQALIKNGKPPKVAITAIMRKLIILANALIKDNRNWSEIRPCQ

SEQ ID NO: 323546 - protein, 414 aa, unidentified
MPETAYALYVGIDWGTVTHQVAVLDAQRVLLGERAIAHEAVALHALTEWLTQLARGEPARVAVALEVPRGAVVDTLLERGFHVFALNPKQLDRFRDRYTVAGAKDDRRDAFVLATALATDRPAFRALTPEDPLIIELREWSRVEDELREEWGRLASRLREQLHRFYPQALALCPAADEGWFWALVGLAPTPAAALRLRRAAVVTLLRAHRIRRLTADQVLAALQSPPLRVAPGTVQAASAHVALLLPRLDLVDRQRRDCARRIERLLDALATTGEHQGHRDVTILRSLPGVGRVVAATMLAEASRLLAARDYHGLRTQAGVAPVTRQSGKRLLVGMRYACNPRLRNALYYWGFISVRYDAHSRQHYQLLRGRGHSHGRALRGVVDRLLTVLMAMLAAQTTYDPARRSAMLALAP

SEQ ID NO: 323547 - protein, 349 aa, unidentified
MTIVGGFDVHRAQITFDYLDTGTGEVSTGQIRPATRAVLHGWLAERFAGVDDVAFAVEGCTGWRFVVEEMVRAGVEPHLAEPADTATQRGRKKRAKTDRTDARLQRELLAGGRLPESWIPPGHVLEVRTLGRLYVALMDERRAWQQRIHAQLFHQGVPPVRGMLTEAGRAGLGAADLSPAGRQMVDTALSTIDSLTEQILPLRAQLQSVSRRHPGARALMAHYGIGALTAAVIWCELGDCRRFTNSDQAVRFSGLDVTVWSSDNKRSPGRLARQGSPVLRWALFEAAMSASRTTSPDHDYYAAVRDRLGGKRPTLSVARKLVRRCHHTLREMGDEAWAPLPLAKDKQAA

SEQ ID NO: 323548 - protein, 435 aa, unidentified
MTTLGIDLAVRAPHIATLSDERGEVIWTKRRFSSHPKDLVAISRAAGDPAQLTVVIEPTRSAWVVVAAHFRATGAKVVMVAPERAADLREYYKKHTKNDRLDSMILSRIPLLHPEGLTQIDGLGPADPLKRAVRRRVRLLEAQLACRQRLDTMLDLLGPAYNEALGTRGTKTSYVILERYGNPRTLRRLGLSRLTTIVQRASRRHLGVDYARRLFAAAGEALELWRDGGLDFDELAWDLAQEVRLIGKLGEEIEALEERMEVLYQEADPKGIVRSAPGVASVLAAGITGRLGDATRFSNLAGVRKFSGLVPGVKQSGFTETRQGITKQGDPGLRRDLCMAADLARHQDPQLAAKYHRLIVERRLHHTSAICHLATTLLTRIAACVRSGQPYELRDVDGTVVSLEEARAIIAERYAIPPAARKRSRVPDTASEPTR

SEQ ID NO: 323549 - protein, 345 aa, unidentified
MQVTTIGLDIAKRVFQAHGVDGTGKAVLRRKLQRAEVLTFFRGLSSCLVGIEACGTAHYWAREIRALGHEVRLMPASYVKAYVKRGKTDAADAEAICEAVTRPTMRFVPVKTPEQQAVLMLHRTRDLLVRQRTMLVNALRGHMAELGIIAPQGISRVADLVAVLLAEDETTMPALARQALRGLAAELETLGERIEAIEAAILTWHKENEASRRLATIPGIGPITASAIVASITDPVQFRSGRHLAAWIGLVPKQNSSGGKERQRGISKQGDRTLRRLLVLGATAVMRHARTKATNEASWLKGLLERRPAKLAAVAQANKTARIIWALLVRGGTYRAPATAQAVTV

SEQ ID NO: 323550 - protein, 414 aa, unidentified
MELLHERCAALDIGKKDLKACVRTPSPKGKRSRRQEIRTFATTTNALLELRDWLVGERVSLVVMEATGDYWRGAFYLLEDDLEVILVNAAHAKGLPGRKTDVCDSSWLCQMGECGLLRASFVPPEPIRHLRDLTRYRTTLATERTREAQRLEKELEDAGIKLSSVATDILGVSGRAMLAALIDGERDAQVLAEMAKARMRPKIPRLVQALTGNFGEHHAFLCRLHLERIDQLTAAIGELSARIEEQMLPFARQLEYLATIPGVGQSVAEVIVAETGADMSRFRTAAHLASWAGVCPGHHESAGKRRSGKTRHGNRWLTGALGTAALAAARTKDTTYLGARYRRLTRRAGKKKALVAVEHSILIAVWHMLTNDVEYTDLGGDHFARLDPERAMRRIVRQANALGFTVRFDPIQAA

SEQ ID NO: 323551 - protein, 369 aa, unidentified
MNKNILFIGMDVHKESIEIAIAEGSNQEVRRYGKIGGTRDAMRKALRKLVSSGKELHFCYEAGPCGYELYRYLVSEGHDCWVVAPSLIPKKAGDKVKTDKRDANQLASLFRAGELTPVYVPDREDEAIRDLSRAREDAMLVQKSARQRLKSFILRHDIRYQGKTSWNEAHLRWLADEVQCPSAAQKIVFQEYVNTVTEAQHRLQRLNEQIEIFVKQWRLYPVVEALMSMRGVKMIVAVTVVSELGDLSRFDNPKQLMSFLGLTPSEYSSGPRQTRGRITKTGNGHVRRILIEAAWCYRYPAKVSREIQLRQEHLSLSIRDIAWRAQLRLTQRYQHMQRKGKPHNVTVVALARELAGFMWAIANEVKYPR

SEQ ID NO: 323552 - protein, 488 aa, unidentified
MAKTKRKQSTFERLRRGELNRKQRRNLARRLAGNDPGLTIIHTNAGGIDVGNESHFVAVPPDRDANPVQEFGCWTADLKRMAEWLKACHIDTVAMQATGVYSIPLYDILSGHGIQVVLVNAQHSKNVPGRKSDVQECQWLMKLHTYGLLRDSFHLEERMEGVRTIWRLRDRHVKDASRAVQHMQKALTKMNIQLANVLSDITGVSGQAIIAAILAGERDPWKLADLKHEMVKASREEVARCLEGNWRDDLLFELRQAVDSYHFVHQQMRACDQQIESFLASLPTKILERPSQPDAPAATTKKAKKPRKPRKTRRNEPTVDLTTALKRICGVDLTSIDGIDVVTAQTIVSEIGTDISKFKTEDHFASWLGLTPAKDITGGKIIGSGRRKVQNRVAGALRMAATTLLESKTYLGARYRHLRQRLPSYAAAIKAMARYLAVLVHRLLTHGEAWVDRGAAKFEQRRTESELRSLTAKALAKGFQLVPITATS

SEQ ID NO: 323553 - protein, 355 aa, unidentified
MNGLRYIGLDVHQDTVSAAVLDRDGKLLMQSVFATRAAAIFDFLQGIRGTLHVTFEEGIHSAWLYDLLQRRVAQVLVCDPRKNKLLKSGNKGDLIDARKLAELLRNNSLSPVYHGGMSALEVQHRTRSYTMLTEDTTRVMNRLRAVFRSQAIRCHGKKLFRPDLRESHLAQLPTPGLRHRAESLYRELDALHPLRLQAKREMLAECRKHPAMKWLQSVPFLGKVRTAVLIGRVQTPHRFRTKRQFWSYCGLALETHDSAEYRVINGQVQRKSRPAQIRGLNWNHNHELKGLFKSAATMAAFREGIFRDYYAGLLAKGMRPEMARLTLARKIAAITLKIWKEGATFNAEHIKPQAA

SEQ ID NO: 323554 - protein, 275 aa, unidentified
MHQSSTLYIGLDVHKESIAVAYVAKADHAEGVSLGNIGTRQCDIDHLIRKMQSKSTHLVFVSEAGPCGDWLYRYLTTKGHICWGVAPSLIPKKPGDRVKTNRRDAIKLARLMRSGDLTPVYVPQVEDEAIRDLCRAREDAIRDLQTAKLRLKAFLLRHDIRYTGQAPWSPAHLRWLSDVVCPTPAQQSVFHEYVRAITDHTERLARLEQELTEHGQTWRLAPVVDALQALRGVPCTVAVTTVAELGDLTRFANPRQLLHYLGLTPSEYSTGERRQ

SEQ ID NO: 323555 - protein, 389 aa, unidentified
MYVVGIDISKYKHDCCIIDSDGVIVQGPFSFSNDRGGFNDLLEILHSIPASEEIRIGFEATAHYALNLKLFLEEAHYSFMEFNPVLLSKFNKSQTLRRTKTDAIDCLSIARWLMTVNYKPHPVGFYHSFSLKSLTRLRDSLVRERSYYLVKITNILDLTFPEFKPFFNDRFSATALYLLENYGTAEKISHMNSQSYENLRKISYGKFSPQQFIKLKNLARNTIGEGNDIFTMQLESLLKLYKQSVTEIDTLESRITELILQINPKYLSIPGIGPLSAAVIYSEYGDFSKFDSPAQMLSYAGLEPGYYQSGTSVHKGRMVKRGSSYLRYTLMNLCAPLTRFNYVFAEYYDKKRAEGKPHRVACTHVIKKLIRVMFYLEKNDVDFDPSLLR

SEQ ID NO: 323556 - protein, 362 aa, unidentified
MEKIAHQSVGIDISKDSFTCCICKRDDKMSLNFSKVSEFKNEKTGFNRFVKWVRKQTEKGVPMNYVMEATGVYYEPLAYHLNKLKQEVHVALPSKIKYYFKSLNVKTKTDINDARVIAQFGAERKLSVWQPPLPVLLSLRDLTRMYEQFQVQKTAFSNMLHSKEHSNEVNKFVLKSNKSIIFSIEKQLKKCEEEIQKLIASEDWLTEKVKKLTTIKGVGFMTVAIIVAETLGFEQFYNIKQVASFAGYDVVERQSGTSINGKSRISKKGNSHIRRALHFPALIAKRYNEDLKNTFNRIQDRTPHKMVGYVALQRKLLTLMFTLWKNDTEYIENYEANKKVAPCNQEATQDSEKITSLDVVEM

SEQ ID NO: 323557 - protein, 335 aa, unidentified
MKKLLIGIDVSKEKLDLCVKKKGEIKNETIVKNTSPLIKAYLMKVLKENDLTVTDLLICAEYTGQYTYPLCCACAELTIDLWLENPAQIKYRSGVQREKNDKIDARKIADYAERFQDKAKIFSMPEKSINMLKQLISERDMYIIDRGKYKGQLTDQKRFMDKDDYKKKSKRLKGLIKELTRTIEQIEKDIQAIIDNDKTLSNQQKLLLSIDGVGEQTAVKMIVETNAFQDFNNPRKFCCHAGVAPFSYTSGSSKRSRNKVSNRADKSIKVLLHMAALIAATRMKGELHEYYIRKVAEGKNKMSVLNAVRAKLVYRMFAVIRNEKAYEKNYINALA

SEQ ID NO: 323558 - protein, 344 aa, unidentified
MNYYAGIDVSLELSSVCIVDATGKIVKEAKVETHPEALVKFFNAFGLPLTVVGLEAGPLSQWLYAGLTEAGFVTTLMETRHVKAALSATTVKTDRRDARGIAQLLRMGWFRPVHAKSAGSQEVRALLVARKLLQHKLTDIELSLRGILRGFGLKVGKVSDKGFEARIRKLVTGHPMLEQIAEAMLAARATLLEQFNKLHKAVLDIARKDEVCRRFMTTPSVGAIVAITYKSALDDPTRIKKSRNAGPLFGLTPKRYQSGETDVTGAITRVGDAMVRTALYEAANVLLSRVTRFSALKRWGLEVARRRGMKRAKVAVARKLAVILHRMWIDGSTFRWTKTEAAHA

SEQ ID NO: 323559 - protein, 427 aa, unidentified
MHYTQNDKIRQATEGTIVVGVDIGSEKNYARAFKGNGIEITRKAFYFPNTLEGFKSFEEMVTKLTVPLVEKKIVVGVEPTGHYWFNFADYCMDKKMTVVTVAPQHVKHSKEMDDNTQRKDDRKDPRVIAKLVIEGRYCIPYRPKGVYAELRVAYNRRCEIVEAETRAKNRIRRWFDLYFPEYRTVYGSAAAITGMVILKQAPLPQDIVSLGVDGILQIWRANKMRAAGLKRAKTLFEAAQRSICPPDAGRAVRMQLWQLLEEYEYIKKQLHEADIMIGIVTADIPEVNELMKIPGIGLITAAGMISEIGDIRRFDDPREIQKLAGLAIVVNESGKHKGQSEISRRGRKRLRKILFQAALVLVRSNKEFKSIHDYFTTREKNPLKKKQSLMAVAAKLIRVCFGMVKNGTPYDPTKVLKDIRRTEPKAA

SEQ ID NO: 323560 - protein, 318 aa, unidentified
MALHLVFVGIDVSKDWLDLWLAPRQRYERISNDAAGWATTIGLLGFLGGPPGVVVAFEATGGYELGLRQSLLEAGFDVRRLNPLRVRLYARSLGRNAKNDRIDARLIARYAEAAETTPDILDPARERLAELVSHRRRLVDERVAVGNQLRMLRSLSLQNHNRKRLALIERQIEETDALILEAIAAVPSFLAKLQLLKTLTGIKDVTARALVALLPELGRLSRRAIAALVGLAPFDHDSGKFTGTRSIAGGRAAVRTALYMAARAAARSKSTLGAFYKRLIEAGKKPKVATVALMRKMLVTLNAMVRLNEPWKHAAIQR

SEQ ID NO: 323561 - protein, 315 aa, unidentified
MEQPSSMPSYVGIDVSKDRLDVHVLPSKQAFAVARNGEGLERLAAELRGLRPVLIVLEATGGFELTVAAALAGAALPLAVVNPRQIRDFARATGRLAKTDALDAEVIALFAERIRPEPRPIAEAEAQILAELVVRRRQLVEMIGMESNRRRQARAPKVRRTLETMLKTLEAQLAELDREIDTTVRASPAWRAADELLTSVPGVGGVTARTLIAELPELGHLDRRRIAALVGIAPINRDSGHMRGRRTIAGGRTAVRNVLFMATLTAVRWNPVIKAHYTQLVERGRPKKVAIVACMRRLLGILNAIVRTASPWQTA

SEQ ID NO: 323562 - protein, 354 aa, unidentified
MMIIGCDYHPGFQQIAFVDTDSGEFTERRLAHREAAEGFYRELGAQGKRVRVGMEASGHAGWFERLISELGFELWIGDAAEIRAKRVRKQKTDRQDAQLILRLLMEDRFPRIWVPSGENRDLRQLLWHRHRMVQARTRIMNQLQAVALNQGLRCKKRLWGETGRTRLESFRLAPWASRRRRDLLELLDRLTPTIAELTQAVEQEAEKCPQAQRLRTHPGVGALTALAFVLIIGRAERFPCGKQLASYLGLVPLEESSGQRRRLGHITKQGNSLLRFLLVEAAQVTVRSDPTWRSKYFHLAMRRGRKIAKVAMARRLAVRLYWMWRKGWDYEQMTKFSSHAGEPGNRDGVQSNTE

SEQ ID NO: 323563 - protein, 370 aa, unidentified
MLYLAIDQHSKQLTVNLRDEQGDVVLRRQVSTRWVSVEAFFKKLAEDTSREGEFVAILEVCGFNDWLVRLLEDSGSGCREVVLIQPERRGKRKTDRRDANELGEILWVNRQRLLAGKRVQNVRRVIRPTEEEAEDRQLTALRRRMIQRRTGVINKVWRIIHKHNLQHDRPTKGMQTKRVRQWLATLDLASIDRLEMDALLAEWSLLEEHLQEVDDQIDGRHRENDKAILVSSMPGLSRYGSLAVASRVPRIECFPRAASLANFLGLAPGCRNSGNTTDRTGSITKQGSSMVRFILGQAVLHVLREDPWMRRWYREVKRRRGSKVARVAVMRRLATILWYMLKYNVPYVRGGPEEYRRVRERMETLSAGTG

SEQ ID NO: 323564 - protein, 398 aa, unidentified
MSRIWAGIDSGKGHHHGLALNADGKTLLSRRVANDEPELLQLIGDVLDLADGREVTWAIDMTGGEPALLLALLVNHGQEVLYMPGRLVNRASDGYRGEGKTDARDAYVIADQARMRRDLRSIRPGDEAALELKLLTGRRSDLVEDRTRVVNRLRGTLLSMFPALERALEVTNTGPLRLLTGYQTPAAIRRAGTARLTKWLANRKIRNARALAEAAVEAAERQHTAVPGEKTIAKLVHTLAEEVMALNEQIREMDKLIEGRFREHELADIVLSVPGIGLVLGAEFLAAVGGDLDEFDSPDALAAFAGVAPAPRDSGKVSGNLHRPVTYHRRLQRVFYTSALVSVGCDPNSRKFYDRKRAEGKKHVQAVLALARRRVNVLWALIRDRRRYQVMPPVTTAA

SEQ ID NO: 323565 - protein, 333 aa, unidentified
MVEGTEGSHHKEGTTKMSKHSMVCAGIDTGKHKLDVALDGHPEQMQVDNTPDGHRVLSTWLRKHRAQRIGIEASGGYEQAVVATLHRNGFVVIVFQPAQVRAYAKFHLQRAKNDKIDAALIALCSAATKTVHAPPDPRLVPFAASLTMIEQITEDIARLKTRRESCRDQRLRRFWNEEIGRLKLLMRGELKQLIAAIRQHPDFAEQLDLIASVEGIGHRTAVAILVRMPEIGSLTREEAAALAGLAPYDDDSGKRLGERHIAGGRERLRTSLYAASLPAAFNWNPQIIALYRRLTAAGKSHKAALVACARKLLIFANTVVARGTPWVSKTATS

SEQ ID NO: 323566 - protein, 417 aa, unidentified
MEKIETKKHKVVNEKTLIVAVDIGKVVNTGYCRCPNGTEVKPFAFSNNRHGFQEFFERISETKERHHLDDLVVGFESTGSYGEPLMHDLLKRSVRIVQINPLHTKRLKEVRGNSPGKTDRKDPKVIADIIALGHALTVVIPEGVSAELRRLTQGRERGIQRRTALFNQLHALAFLLFPEFLQVMKDIKRRSTQYLLRHYPTPEAIVNCGLETLTVILRRISRGRLGRERAKALYEAATQSVGIREGQQAIVMEIREILSSIEASDRFMRAVEEEMSRYLKEVPYSHSILSLKGIGEVTAAGLIGEVGDFRKFQTLSEVIKLAGLDLFEISSGIQKGNRHISKRGRPLLRKLLFFAALNTARKGGIMHGLYMRYLQRGMPKIKALVAIARKILGIIFALVRDHSEYRENYSSRHAIAA

SEQ ID NO: 323567 - protein, 347 aa, unidentified
MDKPMIAVLGIDLGKNLCSVAGLDMNGAAVVRRRMRRESVIEFAQSLPACVIAMEACCGAHFLGRKLAAHGHLIRLMSPEYVQPYVKAQKTDDRDAEAIAEAATRPTMRFVSLKSEAQLDLQILHRARERLVHARTTLVNQLRAVLLERGIVLPKGRALLMRRLDEIGLDGLSVSPRTTQLIADLREECAALDRRITTYDDELAALVRTDKQARRLASIPGIGAINATALLAAIGDGSAFAKARDLAAWLGLTPRQHSTGGKTKMLGISKRGNRYLRKQLIHGARAALPHLAAKPTRIGLWLKRLLVRSHPNVVVVALAAKLARIVWAVLRKGTSFDQSALAVADQH

SEQ ID NO: 323568 - protein, 316 aa, unidentified
MKNPDTNPSPAYAGVDIGKASLDLSLAGQPPCRHPNDTAGIAALIKALKKLPAPAQVICEPSGGYERDLLEALWAAGLAVSLVHAARVRAFARAQGLLAKTDPIDAVVLREFGERLQPVTLAAPSPQRERLAALVQRREQLVNLLSIEEQRQAQTRDAVVKKMGERLLGELQTQIEQMDTLIETQIASDATLKGQSERRQQVKSIGPVTASTLLAELPELGTLSRNESGALAGVAPYNRDSGEHRGRRTIRGGRVRVRRVLYMAAVVATRLNSILKAFYDRLVKAGKPKKVALTAVMRKLVVLLNHLLKNPQSKLA

SEQ ID NO: 323569 - protein, 417 aa, unidentified
MNKRTYRSKEVKNIDWNMLEKSLSGEDISVAIDVAKQVQFAVLTNKDASISELFRWQHPAQTPEMLEAIRGLGCAVTVIVESTSTYSDALRYQFSVCGFDVHQANAKRVHDAKEVYDGVPSLHDAKAATIISRFYRDGLTMPWRELSDDERRLNALRRQYEIHQDHYQRNQNRLEAYLSRHWPEITYLLETDSVALEALLIKYGSPEKVATHEHEARQVIRQACRNMLSPEKIDAIIECARTTLGMPCIDAEWKYLQALGAEMKHSRLQRRATKKSLETDIDGDTQLAEMAQLIGKVTTAVLLSFHLDPRNFKCARSFQKAMGLNLKEKSSGRYVGQLKLTKRGSSKARKYLYFAALRLIQKNPVVKKWYLNKINPKAKNKTVIAVMRKLSKALWHVAQGQPFEANKLFSVPTQKAA

SEQ ID NO: 323570 - protein, 311 aa, unidentified
MVCAGIDTGKHLLDAVLHKRRERLAVENSPEGHSKLSAWLREHGVKRVGIEASGGYEIDVVAKLRRDGFKVVVFQPAQVRAYAKFHLQLAKNDKIDASLIAACTAAVVNIHAPPDPRLAPLAAHLTWIDQIGEDIKCHKTRLETCRDPRARQFWKQEIARLEKIIKAERAALEKAIRQHRDLAERLDLIASVDGIGLKTAVIILVRIPEIGRLSREQVAALVGLAPYDDDSGDRHGRRQIAGGRKRVRCGLFAAALPASFHHNPQLIAMYQRLIAAGKEHKVALVACARKLVIFANTVVARGTAWQPQGAL

SEQ ID NO: 323571 - protein, 410 aa, unidentified
MQVLYPCCWGLDVHKKFVVACLITTTAEGQVHKETRTFSTMTQDLLALLDWLHATGCTHIALESTGSYWRPVYNLLEGQFTLLVGNAQHMKTVPGRKTEVKDAEWIADLLRHGLIRGSFIPAPAQRELRDLTRYRTHVVEERARLTNRLQVVLEDAHVKLASVVTAIRGASARAILAALVAGETEPTVLAELARGRMRSKRELLAQAVVGRFTAHHAFLITEHLSQLDYLEEAMERVSAEIGRRLAAEQEALELLDTIPGVGQRAAEIILAEIGTELARFPSAKHLASWAGMCPGNKESGGKRLSGKTRKGNPWLRHVLIEVAHAASKSKDTYLAAQYRRLATRRGKQRALVALGHSILVMVYHILSRRVPYRELGPLYFDARNRQRVQQRLVQRLERLGYSVNLQPVAA

SEQ ID NO: 323572 - protein, 290 aa, unidentified
MTIMTDELIFKIFVQQPEPKVLHDYLQKNFPVGVYHSAYEAGFCGYWIHNKLASLGIHSIVVNPADVPTTNKEKVQKEDKRDSRKIARSLRSGDLVPFYVPSSKTLEDRGLIRTRSMLVQDLTRNKNRIKSFLYFHGIKFPASFENAKTHWSNRFINWLEAIELKEDSSKATLSLLISEGKKLRGTILDVTGRIKELSQTESYREQEALLRSVPGIGAITAMIILTEIETITRFSNTDHFHSFVGIVPSTRSSGEMHVVGEITPRGHGTLRSAIIESSWKGFNFNGKTSY

SEQ ID NO: 323573 - protein, 334 aa, unidentified
MSKNSIVCAGIDTGKHKLDVAIKGVKGQLLELLVENTVDGHKVLSAWLREHKVKRVGIEASGGYEQAVVLYLRKKKFVVVVFQPKQVRAYATFNLQIAKNDKLDAALIADCTAAIKEIHAPPDERMTAFAKRMTFIDQITEDVARIKTRCESCRDKQILHYWREEIARLERRKKAELKALAAAIREHDDLSKRLDLIESVDGVGLVTAVAILVRMPEIGTVTREEVAALAGLAPYDHESGNHVGERHIKGGRGRLRKSLYCAALPASMRWNHQLVSMYRRLIAAGKLHKVALVACARKLLIFVNTVVERGSPWEKSRAPGQFEPGLPSRLIRSS

SEQ ID NO: 323574 - protein, 348 aa, unidentified
MTLVGCDLHSRKQQVAALDTATGEVLEQELVHEGDAVERFYRALRPPVTIGIEATGYTQWFHALMHRLGHTVLVGEAAKIRAMVVRKTKTDRRDARHLLDLLRHDRFPTVWIPDPATRDLRALIAHRVRLVRMRTMVKNGLQAIALNQRLTLRSGLWTQRGLAQLEALSLPTYATRRRDDSLELLAWLTTRIDHLDDRIAASADADPRARLLLTHPGVGPLTALTTVLVLGPIARFPDSKHVVSYIGLAPAINASADKHHLGKITKQGSALLRWVLSQAAPLAARADDDLRRRYFAILHRRGRPKAKVALARKLLVRLYVMLRDRVDYDEFCRRGRARHQSRRATTVM

SEQ ID NO: 323575 - protein, 459 aa, unidentified
MTKRKKMEMEIINPNAGGIDVGSKSHFVAVGQSLEDVKEFGVYAEDLTSICLHLQSYGITSVAMESTGDYWQNLYVALINHGIEVVLCNGKFTKHAKGKKTDVKDCRWIQKLHALGLLTSSFLPDETTEILRTYCRQRNNWIDLSSSASHKMQKYLKFLNFRLDVVVKDVCGLTGLKIIEDICNGNLDPESLAGHRHYNCRKSKEEIAKALHGNNRKDYLFGLKQEYESYNFFQKKIKDCDREIERLVKTELKKDPAKLKLTTTEKPYKRINKNAPEIKDFNQIAFRYFGGIDFMAIEGVSHATIMSLMSEIGLEGFRKFITSKAFCSWLRLAPNNKISGGKVLSNRIPKGSNRLKIALRQAANAIGNLKDTHLSDFFHRVAYRKGRQAAVSATARKLATIIWTMVTKKVPYKPPTEYLFLDQKRKQKVMQRIKKNIVKFDLKPEDVGFGNSLNMRLSF

SEQ ID NO: 323576 - protein, 414 aa, unidentified
MDAGYRSVAGIDVHKKMLAVVIRQQGSGKVEYTKRKFGTTKSEIGHLAAWLQGYGVSEVVMESTAQYWRPVWYGLESHFALHLTHPLKTRAPRGRKRDFRDAQRLADRWHSGDLEDSFIPGAEQRSWRWLTRSRVQLKRMIGVIRNQVEGLLEQGGIKLTAVASDPFGVSGWAMLELIAQGETDVNVLAGQARGALRKKEAPLKEALAGSLDPVYRLLLRQHLDQVELLRRQIDDLNQALAQAMSAHVAALHRLSKIPGVDLYAAQELLAEIGVGAAAFPSGDQFASWVGICPGSQESAGICYSHRSAKGNRYLRRLLCQVAWGAIHTKNTFFAGLFARFKPKLEAKGAAWAVAHRIGKVIWLVLHKEVEYEEKGTAPQNPRTLVRKFRRLVREFARQGIDAKSLLDQELAANA

SEQ ID NO: 323577 - protein, 395 aa, unidentified
MKKHSYIGLDVHKESISIAVAEAGRRGEVREQGSVGGSLIALERALRKLKQPGVELHCVYEAGPCGFVIYRRLKQLGIDCQVVAPSLIPRKPGERVKTNRRDAIKLARCHRAGELTVVHVPDARDEAIRDLCRARTDAVRDQRRSRQQLKALLLRLGHHYTGKSSWTGAHLRYLRELELSHPAQKTVLEEYLLAVSQAGERVARLSGQIELHVASWRMKPAVEALMALRGIQIIAATVLLAELGDLSRFAHPRQLMAYLGLVSSEQSTGNSRRQGAITKCGNQHARWFLIECAQHYALPPKVSRELSRRQEDQPQWVKELSWKAQTRLHRRFWMLLQRGLCRQKVVVAVARELCGFIWALVRDLPPLALAAGPQKSHLHSLGNHGSPSPSSKGNS

SEQ ID NO: 323578 - protein, 343 aa, unidentified
MAHYVGLDVSLKQTSICVVSDTGSVVREGVVDSDPEAIAAFVRSRAPDTVRVGLESGPTATRLWTELKRMGVPVICIDARHAKAVLKMQINKSDRNDAVGIARIMQTGWFKEVRVKGLDCHAVKALLTSRALLVKIKRDLENQIRGLLKNLGRVIGRAKFNGFAARAAELIEDRPELVAVATPLLKAREAIEKQIDDLDRKVLKLARHDAQIRRFMTVPGIGPITALCFKATIDDPARFKRSRSVGAYIGLTTRRHASGEIDWSGRISKCGDAMLRSYLFEAAGVLLTRVPKWSALKAWGMRLAKRNGLRKAKVAVARKLAVILHRMWIDRTEFTWSNKEAAA

SEQ ID NO: 323579 - protein, 316 aa, unidentified
MEVTPIFVGIDVSKARLDVAIGPTGERDSVVNDKVGIKALVKRLAEIQPTLIVMEATGSIEREVSAALGGAGLPVVVVNPRQVRDFAKATGQLAKTDSIDALVLARFAEAVRPAVRPLPDEVTLELRALTSRRRQITEMIVAERNRIANASRAVRKRIDAHIRWLEAELERADKDLDQSIRQSPIWRENEDLLRSVPGIGPVVSRTLLAELTELGKLNRKQIAALVGIAPLNRDSGTFRGRRGIWGGRATVRAALYMAALVASRRNCVIRAFYKRLRDAGKAPKVALVACMRKLLTILNAMIKHKTRWSETTLQTS

SEQ ID NO: 323580 - protein, 345 aa, unidentified
MKVTTVGIDLAKNVFQVHGIDERGKAVLRKQLRRAQVAVFFGNLPPCVIGMEACASAHHWARTLQGVGHTVRLIAPQFVKPYVKTNKNDVADAEAICEAVSRPNMRFVPIKSIEQQAILSVHRVRQGFVKARTAQANQIRGLLGEFGLVIPQGIYNVAKRVPELLEDASNELPVPFRHLIDRLTEHLKELDRQVKEFEQEIIAWHRSSELSRKLEKIPGIGPLAASALVASIADARSFANGRQVSAWLGLVPRQSSSGGKPTLLGMSKRGDAYLRTLLIHGARSAILAAKNKADNTQGWLSNLLNRRHPNIAAVALANKNVRTVWAMLAHGREFKADYVPIRLAA

SEQ ID NO: 323581 - protein, 320 aa, unidentified
MMAQNNLVVAGIDVAKDKVDVCIRSLSLRQAFEATAEEQRKLIRWLRKHKVGKAVMEASGGYERDWAKALREAGIEVRIVDPKRVRSFARSAGRLAKNDPIDAEMIAWFAETFTDAPGQVYDAGRENLAKIVNARQGLLDLQTSLQNSGEHSAPDAVQKMQARLLKKIALEIAELEVAIAALVKATPHFAELAEIIESVPGLGKITSAGLIAAMPELGQVSNEAISALLGVAPYDDDSGKRRGERQIKGGRRKMRNLFYMACLGAATRHNPVLKAFYDRLIAKGKLKKVALVACMRKLIVILNIMVARRQKWDASRHAVG

SEQ ID NO: 323582 - protein, 341 aa, unidentified
MMHVGLDLSRKRLDVQILNEQGERVRRLAAIPTADGLQDLVCLVAPYQQPVRAAIESMTGARFVHDQLELAGWDVAIADGVKVKGLAPLACKTDRIDAWVLAELSRRDLIPAVWLPDPGVRAERERARWRLHLVHHRTALKNRIHQTLITFGHPCPVSDLFSVGGRKLLAGFALPQPWLGSVSAALRLIDDLNQQIADRERELRELGADHPYIPLLRTVPGIGWVLAYTIAAEIGNIHRFASPSNLVGYTGLCPSVRQSGEHDHRGPLTKHGPRFLRWALIEAAQHAARLPAYQTRYQTMKRRLGRQRGAKVATVDVARQLTKAIWHMLIRNQTFAPGGAS

SEQ ID NO: 323583 - protein, 356 aa, unidentified
MEQYTEVFVGLDVAKARHAVAVAEDGRHGEVRYLGEIGADTESVRRLVAKLEKRHVRLHFCYEAGPTGYGLHRQLSKLGHPCTVVAPSLIPRKPGDRVKTNRRDALQLARLLRAGELTAVWVPDEAHEAMRDLIRARDSAVDDLRRKRQSISSMMLRQGRIYPGKKTWGARHQRWLQEQNFEQPSQQLVLQELLLAARHAGERLQRMEAAVIEFLPKWSLAPTVEALQALRGINLVTAATIMAEIGDLRRFDSPRQLMGYLGLVPGERSTGATVRRLGITKAGNGRVRRALVESAWSYRHLMSPTVRNIATKAQVRLCGRYRALSGRGKKLTVAVTAIARELAGFVWAIGKQVQVP

SEQ ID NO: 323584 - protein, 375 aa, unidentified
MRQDRAGEVIASYYGIDLHKDQITWHCIHKTGNGETARENGRISTDRILEELVPMLSVNDSYLIVEASGSSFFFYSLVESHCKKALVVNPVAFRELYMTGKKTDRIDAKKLAERLKYHIECGDTESGFPEVFVPDAEIVKIRKMVTAYELVVKQGTQIKNQAKSVFRSKLMSVAVDIMEKGLEDALKDKRIDEADRSILIMLKRIYDTLMEEKEEIKKQILLLGSFRFREEVKLLMSIPGISLMSATVFMADICTVERFKSEKKMTSYLASVGTVDSSGGITRNGGLSRRGRRTSYRYILQGLEHIVNGNKDFQKFKERHALTRSNKVRAAIVRKTFVSMYFMLKNKETYRYLNEAIYTRKIRDLKKYGIDFKCA

SEQ ID NO: 323585 - protein, 397 aa, unidentified
MNAVGIDVSKGKSTVTIRKPGDIPHTQSAINDLIKQIKSLEGETKVCMEHTGRYYEPVATWLSDAGIFVSAVNPILIRDFGDDSLRTPKTDKADSKKIARYTLDRWAKLKQYGIMDKTRNQLKTMNRQFGFYMDQKTAMKNNLIALIDQTYPGANDFFDSSARNDGSQKWVDFIHTYWHVDCVRSKSLNAFTEHYQNWCKRKNYNFSAEKAAKIYQISSDLIAVFPKDDITKMLIWQAVALLNTASKTVESLRSKMNELASTLPEYPVVMDMNGVGATLGPQLIAEIGDVSRFTHREALTAFAGVDPGKNDSGKHIQNSVRTSKKGSPYLRKALFQIMDSLIKRSPVDDPVYAFMDKKRSEGKPYYVYMTAGANKFLRIYYGRVREYLSNLSNNETI

SEQ ID NO: 323586 - protein, 345 aa, unidentified
MKITTVGIDLAKNVFQVHGIDERGKAVLRKQLRRAQVAVFFANMSPCVIGMEACAGAHFWARSLQGFGHTVRLIAPQFVKPYVKTNKNDVADAEAICEAVSRPNMRFVPIKSIEQQAILSVHRVRQGFVKARTAQANQIRGLLGEFGLVIPQGIYNVAKRVPEILEDASNALPVPFRHLIDRLTQHLKELDRQVKEFEQEIIAWHRGSELSRKLEKIPGIGPLAASALVASIADAHSFDNGRQVSAWLGLVPRQSSSGGKPTLLRMSKRGDTYLRTLLIHGARSAILAAKNRVDNTQGWLTELLKRRHPNIAAVALANKNVRTVWAILAHGREFEADYVPTRRAA

SEQ ID NO: 323587 - protein, 349 aa, unidentified
MKHSVTTIGLDIAKHSFYVVGTDGQRREVLKRKLTRAQVLEFFVNLPPAAIGIEACAGAHHWARALNAMGHDARLIAGQHVSRRVVGNKNDYRDAKVICELRGNPETKYVPLNTEQQQDIQMLHRVRQRLVANRTALLLQIRGLLGEYGAIFAQGVAALRKGLAEVLGGEHVNLSPSALETFCDLQEQVAQLDEQVKRYDARIRLLAEQNETATRIMALPGVGPLTSTALIASLGDARHFRAGRDYAANLGLTPREFSTGGKQRLFGISKRGDRYLRTLLIHGARSALRCAEGKPDRLLQWALRLKEAKGFNVAACALANKLARVAWALIAHGRTYQAQWNDSTATAAG

SEQ ID NO: 323588 - protein, 386 aa, unidentified
MVNGQKVNDYAISNDMVGFNRLLGDLKQVTKPQIIFEATGVYSRRLQAFLDMHELRYVMMNPLEAKRKTKDDLHQNKTDKLDALYLAKLQSEHPQRLAYVQNKEYQELMANNRIYEQASHDLITNKNRLHKAVQLTFPEIEHLLANPRGKNYWSIALRFPHPDIVLETKEADIIDFLKGLSGIGKKRANDITQNLIRLAKVACPAVKKNSAHIRGLKMAINNILSAEEECQTALQEMAKLAPKRDLEILTSIPGIGENTALRIISELGDIRRFNNPSQLNAFVGVDPQVYESGNLTAHLSISKRGTAIGRKVLYLAINQIQSAKKAGNPCHIADYYEKRKRSSETASHKKAAIASIHKLLRTIFALIKNDQLYSYDVAKHNQRLLS

SEQ ID NO: 323589 - protein, 354 aa, unidentified
MQYIAFDSHKRYTYAVVEEKEKGRVMEKRIEHRRGEIGAFLSQCEVGSPVALETIGSWYWIVDEIEAAGMLPRLVNARKAKMMIASSKKTDRLDAKGLNTLQRTGTLPTVWIPSSELRDIRELYRTRMVLTQMVIRLKNRILSCFSKYGISFDETSDAFNIKGRASLEAALEILPTQTCFAVKELLRQLDLLQEAVKEFEARMLQVQSNDPEIKLLQTIPGVGAILSYVIAYETGDIHRFPSASCFASYAGTTPSVHASGGKVRYGHTASDVNHYLHWAFIEAANVISMRHEVLRFRHTARLYERLRQAKGHGIAVGAVARHLAEATYWILTTKTAYREPNQNKQVVLVSSKEG

SEQ ID NO: 323590 - protein, 379 aa, unidentified
MPKKLHHVGLDVHAETIAVAVAEPDGSVRELGTIRNRPEAVRKLITKLGDARQLRVCYEAGPTGYPLYWQLTALGVHCDVIAPSLMPRKAGDRVKTDRKDAVMLARCYRAGDLTAVWVPDAATEALRDLVRAREVAKQDQLRGRHRVSKFLLRHGRQRPDGMRAWTLTHAQWLAQQHFALPTLQIVFDEYRAALALLADRVARLERAIQAALPTLAPAQQALVGALATLRGVQAVTAATIVSELGTLRRFASARQLMGYTGLVPREHSSGSGVHRGAITKTGNAHLRRVLVEAAWAYRHRPTPASGVLRARQQGQPAPIIAIATRAQQRLCPRYRRFHEQGKPPLAIATMIARELLGFIWAIGQAVEPAPTPVGAPMSA

SEQ ID NO: 323591 - protein, 411 aa, unidentified
MELLYDRVAGLDVHRDSVAACVRLPGPRGGAVTDKQRFKTTTAGLGHLAGWLAEQQVALVAMEATGVYWKGPYYALEDRFQVWLCNAHHVKNVPGRKTDMSDAEWLADVAAHGMVRPSFVPPPPIRELRELTRYRKTQIDARVAEIQRLEKVLQDAGIKLTSVASKVLTQSGRAMVEALIAGERDPGRLAELAKGKLRPRIAELTEALAGHFGSHHAVAARRILDHLDFLEATVTALTEQIDARTRPYAAVFELLLAVPGLDRLTIDVVIAETGADMGRFPGPAQLASWAGLCPGNHESAGKRRRGGTPPGNQWLRRALVEAARAAARTKDTYFAAQYRQIARRRGPNKAAVAVAHSLLDLIWHLLSTGECYQDLGDDFFVRRRDPARETRRLVHQLEQLGYTVTLATAAA

SEQ ID NO: 323592 - protein, 431 aa, unidentified
MDRVVDRPGALDVHKEQVTACVRVPGKDGRSRLQEVREFKTTVRELLALGDWLRAHGVTVVAMEATGVYWRPVWAVLEDEFELMLCNAAHVKNVPGRKTDVADAVWLCQLLEFGLLRGSFVPPKPVRELRELTRRRRTLVRERAQEVNRLHKALEDTGIKLDCVATDILGVSGRAMLDALLAGERDPAKLAALAKGRLKVKSPALIEAFEGCRFGAQNALLIGGILRHIDFLDAEIAALGEAIEAHLQAERPHEDRPAPFELAVQTACSLDGIQQRTAQMLIGEFGTDMSRFASDKHFASWAAQCPGNDQSAGKRRSGRTRKGPRWLDGALHDAAMGAIRVKDGHFARKYRRIRARSGHKKAIGAIKHAILIALYHMLKNGELYRPPTPNPEAERRAHERATKRLIAQLEKLGHTVTLQTATSTAPAAVAP

SEQ ID NO: 323593 - protein, 460 aa, unidentified
MNHKRSKPKIDRTMPMVHQNAAAIDIGATMHMAAVRADRASEPVRSFGTFTADLHRLVDWFTECGVETVVMESTSVYWIPIFELLDARGFTVFLVNARDAKHVPGRKTDVSDAQWLQRLHSFGLLRASFRPKGKIAELRAYVRQRERLLEYAASHIQHMQKALTEMNLQLHHVVADITGATGLRIIRAILAGERDPEALACLRHYSCHSSAETIAKALTGSYRTEHLFALEQALALYDAYHEKASACDARIEAVLKELSIHRGRGHEAIPPALRRRNRTDQANALAFDARAALFALLGKDLTTIDGLGPYLSLKLIAECGDDLTSWPSAKHFTSWLGLAPSNKVSGGKMLSSRTRRSGGRAAALLRLAAVTVGRTDTALGAFYRRLSSRIGKAKAVTATARKIAVLFYNAVRHGMEYVDPGASSYETRYRTRVINNLHRRAKAFGFVLQPLEPKAGAAVS

SEQ ID NO: 323594 - protein, 351 aa, unidentified
MPCKKDVAVVRTIGIDTGKNTLHMIGLDEKGAIVLREKVSRNRIAARLVNIPPCLIGIEAGMATHYMSRDLLALGHEVKQVPPAYAKPFRQGHKNDFRDAHAVAEAVQRPSTRCVPVKTDDQLDLQALHRVRSRLIGDRTAVINQLRGFLLEHGIAVRQGPRFLRQQLPQLLATRTDVLSPRMLRIMGDIVDDWRYLDDRIERVTDEIEGLARTDVNCGQLMTVPGIGPIIASATVAAVGNGTAFAKGRDFAAWLGLVPKQMSTGDRTILGRITKRGNRYLRMLFVQGARAILLRPKSWAKHSFGPWLTAAARRLHRNILTIALANKLARIALTVLVQGRSYETRIEAAAA

SEQ ID NO: 323595 - protein, 429 aa, unidentified
MKEKANFNQFAALLGLDWADEKHDVALRTPDAATVEHSTFAHTPEAIAAWVGSLRQRLGSGPIAICLEQSRGALLNALSSHAGLVLYPINPQTLAKFRTALHPSGKKDDPVDAGLLLELLEKHGDQLSPWQPEDPATRQLALLVEARRGFVDRRTALINQLQSVLKSYYPQAFELMGEDLGSPMATAFLKRWSTLAAVQNAKPSALRAFYYGHNSRSADLLTERLRLIKNGLALTKDTAVLAAQSLAAESLAAELAALRPVIAPYDQQIERLFAAHPDAPIFASLDGAGAVMAPRLLAAFGTDRNRFADAQAMPCYSGTAPVTEKSGKQKWVHRRWSRPIFVHQSFLEFAGHSVRFSAWAKRCYEGLIQKGKGHWAALRVLAVKWQRIMWRCWQDRRPYDEAIYLQSLHQRGLARYADLVVAGAKTHGE

SEQ ID NO: 323596 - protein, 354 aa, unidentified
MSREVKYIGLDVHKEAIVIAVLNTKGHQVMESIVETKASSILQFIHGLQGELHVTWEEGTWAAWLYDLLKPHVHQVLVCNPRRNALLKEGSKNDKVDARKLADLLRTGMLRPVYHGEHGLRTLRELAHTYQTLSQDLNRVMNRLKALYRGWGIACGGTQVYAPRYREEWLTKIEHAGVRRRAELLYQQLDGLQTLRRTLRPELLAESRKHKAAKLLRQIPCIGPIRAARLLALMQTPHRFRSKRQLWTYSGLGIETHDSAQYRFVRGELQRAKKPQQIRGLNHNHEMKDIFKGAANRASCGMSPLRDFYVALLDKGMKPEMAKLTLARKIAAIALTLWKKEERFDAEHLKTQAA

SEQ ID NO: 323597 - protein, 334 aa, unidentified
MDKVTTVGIDLAKSVFSLHGVDGAGRVVLRRSVRRDQLLEVVTGLSPCLIGMEACSGAHEWGRRFQELGHTVRLMAPKFVAPYRKSGKNDGNDAEAICEAVTRPSMRFVPVKSAEQQALLAMHRVRQGFVVERTATINRLRGLLSEFGVVLPLRSVTVRRQAAAAAENLPELARRAIGDLLEQLRVLDERIGGYDREIEAQARLCEPAQRLMKIRGIGPTTALAIVATVGNAREFKNGRQFAAWIGLTPSQYSTGGKPRLGHISKRGDAYLRNLLVQGARSVLNSAGMHQDRMSRWILELQPRRGYYRTLVAIANKNARIAWALLAKNESLRTA

SEQ ID NO: 323598 - protein, 392 aa, unidentified
MVVSVGIDVSKDKHDCFIVNSEGEVLADVFIIPNNMDGFHYLLQRIQDCTNTQDKIKVGLEATGHYSYNLLGFLLDNGLSTYVLNPLRTNLYRKSLSLRKTKTDRVDARTIASMLLSDAGLKPYTDTAYHNEELKSLTRYRFDKVKARSKLKSSISRLVCILFPELEKLVPSLHLASVYALLEEFPGAKQVAGAHLTRLKTLLETVSNGRYKRDMALEIRNAARNSIGSRMPAKSLELQHTIRLIRELNAEITEIEEQIQSIMAELHSPITTIPGLGFRMAAMILAEVGDFTRFESPDKLLAYAGMSPSIYQSGQLKNCYPHMEKRGSRYLRYALYNATKYVCQWDPTFSDYLAKKRAEGKHYNVALSHAVKKLVRLIFAMEKSRTTYRLAA

SEQ ID NO: 323599 - protein, 367 aa, unidentified
MKKVSTVGAKPSKKISQQKLTVGLDLGDRNSWYCVLDESGQIQLEQRVRSNAKALREVFGQLPHSRIVLEVGTHSPWISRLLSELGHEVIVANARKVRLIGESRKKDDRLDAQTLARLARIDPGFLSPVKHRSAQAQADLMMIRARAGLVRARTALVNTVRGLAKSYGERLRGCNVRNMNPEKADGLSPELQSALEPLLAGIEELSEQIREYNERIEKLAQESYPQVALLRQIKGVGTLIALTFLLTLEDPHRFRKSRDVGCYLGLQPGRRNSGQSEPQLHISKEGDPYLRTLLVQGAQHILGPFGVDCDLRRWGLKLAERGGRSGKKRAIVATARKLAVLLHHLWVSGEVYEPLHNSRRTAVAAAA

SEQ ID NO: 323600 - protein, 351 aa, unidentified
MIIIGVDYHPSFQTIAFLMEETGEYVEQELNHSDGEAERFYRKLKEKGVSVRVGMEATGHARWFERLLAELGFELWIGDPAEIKTKRVRKQKTDREDARLMLKLLQENRFPRIWVPSPENRDLRQLLWHRHRLVQMRTRIMNQLQAVAMNEGYRWKKKLFSAKGRGLLEKLPLAPWASRRRKELLELLDQLDPKIAELTAAVEQEAKKRPEVVQLMTHPGVGPITGLAYVLVIGTPGRFPCGKQIGSYTGLIPCEDSSAGKQRLGHISKQGNTLLRFLLVEASQAAARCNPDWRRRYAHLRMRREKRIAKVAMARKLAVRLYWMWRNNWQYSQLVEFGSNAGKLGIVHGVK

SEQ ID NO: 323601 - protein, 338 aa, unidentified
METYAGIDLHSSNNYIGIINDKDEKLFGKRLPNNIDDVLMALEPYKDTLKGVVVESTYNWYWLVDGLQEHDYPMHLANPSAIKQYEGMKHTDDKWDSFWLAHMFRLGILPEGYIYPKEKRHIRDLLRRRLFFVRQRTAQILSFQSMVTRNLGRKMSVNIIKQLAKIDVEKLFDSPHLVLAAKSNIDTIDFLTKIIKDIEKEVLFQVKLRDEFALLQTIPGIGKILALTIMLEMDTINRFEKVGNYSSYCRCVNSQRLSDGKKKGENNRKNGNRYLAWAYVEAANFAVRYNAKAKRFYQKKKSKRNSIVAIKALSNKIARASYYILRDQVPFDEARLFD

SEQ ID NO: 323602 - protein, 452 aa, unidentified
MKKEKMALDVVNPQAAGIDVGSRSHYVAIGQRDEDVKEFGVYNEDLIALAQWLLDNEVKTVAMESTGTYWQSLFTTLQGVGLEVILCNGKFTKNIKGKKTDVQDCQWIQKLHTLGLLSGSFLPDEATEQLRTYCRHRANLLEQAADTSRKMQKYLRLLNLRLDVVVKDVTGLTGMTIIDAICKGEMSPEKLASFRHGNCKKSEQEIAKALQSNGRKDLLFALTHEYELYQIFQGKIGECDKQIQKLLNEQINNDDNKKQHHIDGKVHKRLNKNNPDININLLSYQYFEGVDLLAIEGVSHSTVLTLMSEVGHGINKFESAKQFASWLRLAPNNKISGGRILSNKIPKGSNRLKIALRQAANAVGNLKDTALSNFFKRIAFRKGRTSAISATARKLAVIIWNMITKKVPYKTDNQYEFLDQKRKRKVMEMKKLIHKFDITPDDLGLQLNINNL

SEQ ID NO: 323603 - protein, 375 aa, unidentified
MEHHSEAFVALDTAKLRNAVAIADAGRNGEIRYLGEIDNTEAETRKLVTKLASKHARLTFCYEAGPTGYGLYRLIKSIGHDCLVVAPSLIPYKPGDRVKTNRRDAVNLVKLLRAGELTAVWVPDERHEAMRDLVRARDAAAKDYRIKRQNVSSLLLRLGRHYPGKKTWGRAHINWLTALKLEHREQRIAFEEMLLAVRQVRERIERLEQAMREAVADWTLAPVIEAVQAMRGIDIVGAIAFLAELGDLSRFENPRQLMAYLGLTPSERSTGESVKRGGITKAGNTRARRLLIEAAWSYRFPPRVSKDMQARIGAAPRTAREIAWKAQMRLCGRFRTLTRKGKRPTIVVTAIARELSAFIWAINREVVGSHAAANQ

SEQ ID NO: 323604 - protein, 315 aa, unidentified
MEQPSTAPSFVGIDVSKDRLDVHVRPVGQTFSVTRDSKGLEQLTDQLRDLAPALIVLEATGGFEITVAAALAGASLPLAVVNPRQIRDFARATGRLAKTDTLDAQVIALFAERIRPEPRPLANADSQSLAELIARRRQVVEMIGMETNRLHQARNTRVQRMLRTTLRTLTGQLAQLDRDIDDTIRRSPIWRATDDLLTSVPGVGDVTAHTLIADLPELGQLDRRRVAALVGVAPVNRDSGQMRGKRTITGGRAGVRGALYMATLSAIRWNPVISKHYGSLVERGRPKKVALVACMRRLLGILNAIIRTQIPWQCV

SEQ ID NO: 323605 - protein, 330 aa, unidentified
MEVRRFVGVDVAKARLDVFIQPSGESFSAANDERGISELLRQLEPADFVIIEATGGLEVPVASALATAGIAVAVVNPRQVRDFARATGQLAKTDALDAQVLARFGEAVKPQVRALRDAQAQALEALVNRRRQLVEMLTAEKNRRANSPKVIHKSIDEHIRWLEKRLSWLDDELAGLVRETPIWRERDELLRSVPGVGKVLSTTLLAHLPELGALNRKQIAALAGLAPFNRDSGSLRGSRCIWGGRAQVRRVLYMAVVAAVRSNPVIKNFYAQLRARGKYPKSALTACMRKLLVILNAMLRSKMSWQTPALAASSATLSPLLGAVPQHGCC

SEQ ID NO: 323606 - protein, 315 aa, unidentified
MNPNAESFVGIDIAKKHLDVCLWPQRQSFQFPHTEKGLADLITQLLQIKPTLIVVEATGGYERRLAAELLAAGLTLAVVNPARVRHLAKGHGTLAKNDRIDAFNLAQFAEIVRPAPRQKTTQKQAELSDLVARRRQLVEMITMESNRLEKQPAAEVRQSIQRMMNLLEQQRQEIDNRIAQELRSDDEWNGKIQKLQSVPGVGPVTAATLVAELPELGKLNRREIAALAGLAPFDADSGSWHGRRFIRGGRKSVRVALHMATLTATRCNPLIKTYYQRLIAKGKSFRCAMVACARKLLILLNSLLKENRSWSPLPS

SEQ ID NO: 323607 - protein, 563 aa, unidentified
MGRSVHSRSTYTVTPYGTAVPPLNRLRKGRDGMTIVEGTRTITGGIDTHGEVHVAAALDEVGGLLGAESFRADPDGYIALFSWLSGFGKVTKVGVEGTGSYGAGIARFLARAGVQVVEVDRQNRQARRQSGKSDPLDAVEAARCRLSGRARGVAKSRDGSIEAIRVLVVAKRSARAARVKALAQMRQLTYSAPDQLQCRLKGLPIPKFVSVAQGLRPTRSADPVTAATKASLSSLAHRVADLEDEIEKLDAMITPLLEATAPELLAVYGVGIDTAATLLVAAGNNPERLRSEAAWAHLCGVSPLQASSGKVTRHRLNRGGDRQANRALWHIVMSRLSSDPETKSYMERRVKDGGSKREAIRMLKRYVAREVYRYSRLDPRTMDLAHITPVVLGGLTLSRFAGPWSGFTEFSKTRDLIRACPPQRVAHHWSVRCLFSRKIPPWGLTSSIGASAWGRELSVSLSRLLIFASSTDSGPWRAPAHWSHSAGSQSSVVPTSRTGLPSILAPTWDDPQAGEASKRPTVLIRIPPPTPTKSEAGEYFYRVNWGNLLPIFCRDVLRKSTEA

SEQ ID NO: 323608 - protein, 381 aa, unidentified
MQPTLVKDFTRDEAILAVSLELAKGSWKVALYDGRREQPAVHTVAHPQAAGRLAEAMRVVEERKHAWGLGPATRVVVIYEAGQDGFWVARALTGQGYEVQVVDPASIPVARRARRAKTDRLDALRLVLSLWAWLGGERDRLRVVRVPKLEDEARRHWVRERGELQKEIGQHRDRMRKLLRTVGCWDEVDGEFERRLRQGAVVCYDDGALPAELRVRLARECERLALAQRQLAALEAELHQALPAPVQQCIARLMQLKGVGRVGATRLQLELFWREFDNRRQVGACVGLVPQPYNTGESRVDQGISKQGNRRVRALLVEMSWLWLRYQPDSALTRWFMRRTQGGQKRGKRIAIVAVARKLVIALWRYLKDGVLPEGAVLKAV

SEQ ID NO: 323609 - protein, 340 aa, unidentified
MAILAGLDVHRAQITFDALNTETGEVVRGRIRGDREAVGEWVAQFAGEHVEVAVEACTGWLFVYEALDAAGVVTHLAEPAETSALRGKKRHAKTDRADARWLRTLLAEGRLPEAWIPPAHVREWRTKTRLRKTLIDERTSWLQRIRATLFDHGVAPAPEQLLRAEGRAFLRALPLPASAAQRIDVALAIIDEIDRQLVPLERELAALARRQAGCQALMGQYGIGPVTATTILCELGDVTRLSASRKAVRASGLDVGVYRSDRHTRTGRITRQGAPALRWALYEAAQCACKPASPDHADYLALKARGLSHTRASLTIARKLARRSFHILRELAPDALAPIN

SEQ ID NO: 323610 - protein, 361 aa, unidentified
MGEITRVGVDLAKRVIQVHAVDESGRVIVAKQLQRNGFTAWCGQLPPGCLVAMEACSGSHHWGRRLRAMGMEVKLIAPHFVSPYRLSGKTGKNDAADAAAICEAASRPSMRFVPVKSVEQQSMMALHRLREGYKEERTACINRIRGLLAEFGLVFAQRPEVLRAALAEVIEDAGNELGAVARMALQRAHLHWIELECHIAWCDERIARHVRSDEQAKAAAQLCGIGPVTASALVATVDDFKQFKNGRQFSAWMGLVPRQSSSGGKAVLGEITKRGDEYLRTLLIQGAKSAVFTAHRRSDRLSRWIVQLRERVGWQKAAVALANKHARILWSMLVNGQSFDPEHVPTQHRMTSLAALPVLAG

SEQ ID NO: 323611 - protein, 481 aa, unidentified
MSKQEKHLPESGEKKTEAGKGKEGRRRKGMCLDDRPLLEPNAAGIDIGAREIFVAVPPDRSENPVRVFSTFTEDLEAMARWLVSCGITTVAMESTGVYWMPPYEVLEQHGVKPCLVDARGMKNVPGRRTDWHECQWIQFLHSVGLLRAAFRPDGDVCAVRSLMRHRSDLVQMTSQHIQHMQKALTQMNVQIHHVISDITGLTGLAIVDAIIGGQRDPLELAKLRDPHIKASEETIGKSLRGNWRGEHLFTLKQSRQMYQHYQEQIAACDEEIEKLLVAFQPWVDPEEKPLPPDRKKKQRGRKKKNVNPKTGFDLRTESYKLFGVDLTQIPGLNAMVLTLFSEVGRDMSRWRTSGQFVSWLALCPDNDITGGRVAWRGMRTVHNRAGELFRLAAYSLHHDPSPLGDYLRRMKSKKDAPAATTATAHKIAIIFYTMVKRQVEYDATLWEQRDAERDRRFEAKLKRQAARRGYKLVPIEEKPAA

SEQ ID NO: 323612 - protein, 298 aa, unidentified
MTHYVGLDVSQKLTAICVVDDTGRRLWRGQCTSDPEQIERTVRRHGGEDARIGIETGPMTPWLVHELRGRGLAVTCLDARHARAALKMQINKTDQNDAEGLAQIMRTGWYRSVHVKSFDSHRARALLGARAQLVGMTTRLSNHIRGVLKTFGMLPGAGRGLPFDRRVEILLADQVEVAPIVRPMLAAWRQLRQQTAAFDKAVRVLVKSSPICRHLMSVPGIGVLSVLAYVSMVEDPARFGRSRSVGAHLGLTPKQYQSREIDRSGRISKCGDTLARTLMYEAAVVLMTRVKRALGLKD

SEQ ID NO: 323613 - protein, 437 aa, unidentified
MSEKKSVEIRVSVDVGYRRHSVAIGLPSGEVLEEFEIAHRPEGFAEFFSRIEKHQKVRDCEVAVAMEGFNGCARPLDAMVRRRGYRLYNINNLKLARFKEIFPGAAKSDRIDARKGLELFQLSDHLPLAKEVLQEVKGTPRENEVLKRLTRRRRRLVDERVRVISNLQTDLQAVCPGLLEITKNAGNQWFLNFLVSAPTLSQLARLRPATLRKIPAVGRKYAGLIEDWQKRAHFSEEVEWVGEMIQEDAQRCLELDEKIKALRAKIKEVAKDSKIAKTLLSIPGFGTICTAELAGEIGTIERFSKEGSLALYLGMSTLDNSSGKYQGSKQPKHVNTRAKAAMMVALDRHRKYVPESQRYYEKKRSEGKKHNQAIRALGRHLSRIIYKMLTEEREYEIRPEKGNTKTKVSPRSSIKRQIRKPKISDKGKNNKIYQQIT

SEQ ID NO: 323614 - protein, 312 aa, unidentified
MIEQCFGGIDVSQDRLDVLLLPQATGFSVANDEAGWNALIARLRDLPVAAIGLEPSGGYERGVIRALLTAGLSVRRINPNRLRQFARARGALAKNDRLDAGLIAEYVATMPTRVVRHDPAAARIAEIVTVRRQLCDEHVAVENQAAQLEDAMLRRLAKRRLARIEADIRLLEKRLAQMIATDPDLARRYARLTSMPGVGPVLAFTLIALLPELGRMSRKQIAALVGLAPYDFDSGKLRGHRSIYGGRMPVRNVLYMAALRACRCNPALKTFHKRLAAAGKKPKVIIVAVMRKMITTLNAMLRDGARWQPQTA

SEQ ID NO: 323615 - protein, 309 aa, unidentified
MKIHPGFVGIDISKDFLDVFDGSVGAVRRIDNRPDAILQLVAGWAGSYVFVLFEATGRYDRALHQALSAAGIGFARVNPARARDFARAAGFLAKTDAIDARMLAAMAQCLRPSADGATDPAREQLAELHKRRDQLVACRKQERTRIAATGADLLDDLAQHIAWLDQAIQRIDLRIAGLIAEQQGLQDAQRLMRSVPGIGPVCATTLLALMPELGSRSPKAIAALAGLAPFNADSGKWRGTRRIHGGRRRVREALYMAAVSVTRTHSRFARIYRAMRDAGKPAKVALVAVARKLLVTLNAIIREQQSFQP

SEQ ID NO: 323616 - protein, 340 aa, unidentified
MEKRYIGIDLHRNRFTCCIRLENERTYVTEWELEDLGKFVKKLRPSDEVAVEITGNTRLFHDAIAEHVGRVVVVNTSQFRVIRQSVKKTDPNDAQTLALYLSKNMLPEVRMKDKEHGQLASLTQTRDTLVKLRTALKNKINNILSARGLNLPKEALSSEKRLAEVLELPFDEIVRIELRVIVEQIRSLNRSIAELEKTIGEEGSKLDGHKGLLSIKGIGKITGAILLSVIGDVNDFADEGHLASYFGIVPRVSNSNETERSGRIHKRGTKLGRTALVQSALIAANYSPYLKRFYEQVKARRGAGKAIIALAKKFLGIIYRTLKNKWVFEDFPNFVLAEES

SEQ ID NO: 323617 - protein, 290 aa, unidentified
MNKYKETFGVDISKDVFDVHGSSSGHDRFKNGEKGFKSFLKMLPEGALVAMEATGYYHYRLAQFLYKNNVVVSVVNPLSVKRFIQMKLAKVKTDKSDAKAICEYALANEVPLYNALTDVQAECLQLFRLMDSYLKKRTATKNKLHGEETLGIPSKFVYRSLKRDKKHLDKELAGIEERLLKLVKQEQQHQLTLLQTVPGIGAKTALFLIVATDGFSKFETGAQLCSYVGITPPSASLAAACAAAAGSVRLAIRNCGTYCSFVPSMPVSKTRPATNFMSVSLTRERVRSWH

SEQ ID NO: 323618 - protein, 346 aa, unidentified
MKHYVGLDVSVKETAICIVDETGKIVREAKVTTEPEAVVALLNDAGLGYARVGLEAGPMSQWMVAGLLAAGLPVVCVETRHMKVVLKAQQVNKSDRNDARGIAQMMRVGLYKPVHVKTLASQQERMLLTSRKLLRDKLQDTENELRGTLRNFGLRVGVVSSGRFEARIRELLKGYPPLGAIVAPLLAVRRVLREQFAVLHKMVLDRVRSDRLCRRLITVPGVGPVVALTFRATVDQPQRFAHSKMVGAHFGLVPRRFQSGETDYDGRISKCGDAMMRTALYEAAQVLLTRTQKWSWLKAWGMQLARRRGGKKAIVALARRLAVILHRMWIDGTQFRWRKEADAVAA

SEQ ID NO: 323619 - protein, 343 aa, unidentified
MSEYVGFDVSEEETSFCVKDVSGKILARGKVATDPVALFEVLRAHCVCPERIVLETGTLSGWLSRELGKLGIAVEVIDGRQAHAVMKLQHNKTDANDAALLAEIARTGFCRPVCVKSEAAQADRILLKARAHLVGQRRATQNTIRGLLGSLGIRFAKGSGKLAGLVREALEGRDELRATIDPLLRAAAALEREIARLDKAVSGRAKDDPAVRLLMTVPGIGPVTALAFAATIGDAERFAKSRTVGAYIGLTSRRWQSGEMDYSGRISKYGDAMLRALLYEAANSLLTVVRKAHPLKDWARRRIRKRTSHKKACVALARKLAVILHRMMITGEPFRWPQKEAAA

SEQ ID NO: 323620 - protein, 475 aa, unidentified
MARQAAYTSSNVVPLFPHETLYVGIDVGKFRHVAGLLSRTLLKRHDHFEGCPTFVFDQSREGFRAFVDRLRELVPLEQVRILLEHTGHYHRLLEQYLLELDITVYRIHVQRRPKGREKSDKRDALGLANRLYTQLELGAQVEEKMQLVRRAYPPTKAASQLKGLIQHRYELSHQSTQLRNKLTAICDELFPEFTQIFRDPNREWALAYREKFPTPQALATASRAMLQEVRARNFPSDAQLLKLQQLARETIGTKDRDRQHGLLIEQGLLIKELRVVQEHLDILHTTISEVVANSREGQILLSIPPIGPIQAATIIATVGNIANFEKASELKSYFGWAPERSQTGVSFDTSKLSKRGVRPMKQMLFLMVGRAITLECEWARIYQRLLPRLAIYDERTKNYRGKLRVIGRIAGQMATMIFALLKTDDETLSQVPAGEVPPPPMLYDPTIHRKHQEGHYRALKPGTRPRKIIQLPRLS

SEQ ID NO: 323621 - protein, 412 aa, unidentified
MEVIHPRCAGMDVSKKDAKVCVRIAGAGRRKTVESVTTWGSTTRQILALRDHLVAKKITCVVMEATGDYWKPFYYLLEDLPGVQMMLVNARHVKNLPGRKTDVNDATWLAQLGAHGLVRGSFVPAAPIRQLRDLTRTRTAVTRERGREVQRLEKMLEDSGIKLSAVATDIVGVSGRLMLEALIAGNTDPAAMADLARYRLRAKIPQLTEALAGRFTAHHAFLARMHLELIDRHTEVIDQLTQRIEVMMQPFQHFRDLICTIPGIGDKTADVIVAETGADMTRFPTAAHLASWAGTTPGNNESAGKVKSSRTRPGNPYLQGALGAAALSISHTRGTYLAAKYRRIATRRGPLRANVAVQRAILTATWHMATTDTAYIDPGADYFTRLNPAKARATAVRQLEAMGYHVTLDHAS

SEQ ID NO: 323622 - protein, 356 aa, unidentified
MLNDKKYIGMDVHKESISIAVRNDAGKIVMECVIETKASVILQFIDGLRGDLQVTFEEGTWAAWLYDLLKPHVTKLVVCDPRKNASMREGNQSDKIDARRLAELLRLNHLSPVYHGEHGLRSLKELVRSYLTITKDLARVMTRVKAIYRSWAIPCTGKQVYAPRHRAEWLGKITEPGVHRRAEFYYQQLDALRALRQEVRRDLLAESKKHPAWKLLCQIPSIGPIRAAVLLGVLQTPHRFRTKRQLWAYIGLGIETQSSADHRRVDGQLQRVKKPSSIRGLNRNCNHDLKNLFKGAAIVASSKPGPFQEFYNALLTKGIRPEMARLTLARKIATIVLIVWKRGASFDAQHLKPQTA

SEQ ID NO: 323623 - protein, 341 aa, unidentified
MKYVGVDLHKQSISVCVMVKDGEQRKVERRCSFKCVEEEKIRQFFQQLGSFRVVVEATSSYEWFLLLIEDLADRWVLAHPKKLRVIAESKNKTDKIDAHVLAEFLLLDMIPQAYRPTPRVREHRVLVRHRDGVQRQITAVKCKLRHKAAFYNADRPNLFTVQGRKHLAGMSMSAADRFECQALEHQLEFLQSQLRAVNQELANFAKTAPVVERESRAVLATMPFVGTVTTDVVLSETGDVRRFKSAKRIVAYAGLDPAFRESAGKSKQLSISKEGSRLLRWAMIETAWRLVGKTARWRRLFEQLRASTGHKKKAIVGVARRLLCVLFAMLRDGKAYRPAAE

SEQ ID NO: 323624 - protein, 410 aa, unidentified
MLRLIRERCAALDVHKKMLIGCAITPDGRQLRRFATHYADLLRLAEWLQDLGVEEVAMESTGVYWKAPWNVLEAKGFKLTLVNARDVKAVPGRKTDIKDAEWLAELHQHGLLKASFVPDREQRELRELVRHRKQLVEQRSATAQRLQQVLEGGNLKLGTVATDVLGVSSRAILDQLVAGADNAEQLAEMAKGRLRNKREDLAQALTGRVEPHQRFMLATLLRQIDFVNAEIANLDKEVKARTAGRFRAAIELIDQIPGVGERAAEQILAELGIDMDQFPSAQACASWAKICPGTHQSADTNKRVGTGKGNIWLRRALIEAAKASVLKRDSYYSALYRRIKARSGSGKASVSVAHSMLVTIYHMLKNGSAYQDLGPAHFDRHDRDRMQRSFVRRLERLGFKVTIEDSTAVA

SEQ ID NO: 323625 - protein, 309 aa, unidentified
MEHFVGIDVAKDRLDVHLRPSGETFAVARDGEGLAQLVDRLQTLAPQLVVMEATGGYETIVASAVVAARLPLAVVNPRQIRDFARATGKLAKTDRIDAAAIAHFAEAVRPPVRPIADAEAQALGELVARRRQVIEMMVAERNRRRRVSQSRVRRAIDRHLELLQTELSELEHDIDGAIRKSPAWQADADLLASVPGVGKATLRTLIAELPELGRLDRRKIAALVGVAPINRDSGTMRGRRSIAGGRPTVRTALFMAALVASRANPIIAPYYVKLRAAGKTGKQALTACMRKLIVILNAILRDRKPWQPA

SEQ ID NO: 323626 - protein, 309 aa, unidentified
MEVLLERCAGMDVHQETIVVCVMTTNAEGDAHSEVRTFGTMTKHLFELLRYLEAQEVTHIAMESTGIYWKPVYNILEGYFTIILANAQRIKNVPGRKTDVCDAEWIAKLLRVGLIEPSFVPSEDLRELRDLCRLRKKRIGSLTAEKNRIQKYLEAGNVKLSSVISDVFGVSGRNLLQRLIEQGYVDTEDVEMSVKGSIKNKKAEVTDSLFGTITPHQIGLIKDCWEHIEYLEKSIARLEDEINEHLEPYRTEYELLQTIPGVSERTASALLAEIGVNMNQFPTADHLASWAGVAPGNHESAGKKKVQKA

SEQ ID NO: 323627 - protein, 406 aa, unidentified
MKQIVSVGIDVSKGKSTVCAMIHPNTIIKESFEVLHTVEEMSMLADYIGSLDGEIRIVMESTGHYHLPVAQFLYQKGFFICVENAYIIRQFSRIMLHGAKTDPLDAKKLAKYGLAYWSELKPYKFHPSCYTELSLLSKQYQTYIKLLIAAKQNVIHLMDEMLPGFKEALDTASSVQFSKVKYVDFAKEFYHVDMIKTMGKEIFRENYKQWCKEKGYRFQSEKADELFHLAEDGIPTLPTEFPSTRLCMEVATEQVSQLGYALEQILSQMQNLAKTLPEYQTIRQMGGMGEKLCVRFIADIGDVRRFHNGKALVAYAGIDAPPYQSGQYTGTKRRISKRGNSALRKTGYEVMKSLKSHPPKTDTRVYDFIIKKENEGKSKKQAKIAGLNKFLQIYYARVMEIYKNIV

SEQ ID NO: 323628 - protein, 369 aa, unidentified
MTKVRTWVGLDVHAAKVVACVVDAESGEMTVLRLPGETAEMVAFCAGLSAPTRVAYEAGPTGFGLARALAAAGIGCVIAAPGKIERPAQDKVKTDRRDAERLVRLLMIDGLHPVRVPSREEEALRDVVRAREDIRGDLMRARHRLGKLLLRHDVRYDGSGDNWTHRHRQWLSKVRLAERGAQTTLLDYLGAIDALVIRRDTLEAAIRELIPSSPWAQDIARLRCMRGIDTLTAVGLCAEINDFERFAHPKQLMSYVGLVPSEKSSGQTRRQGAITKSGSQHARRLLVEAAWHYRRPPRLGPPLKNRQQDQPAAVIAIAWRAQQRLHHLWRRLDTQRGKRKTIVAAAVARHLTGFCWSIVTTDTDTHTTD

SEQ ID NO: 323629 - protein, 383 aa, unidentified
MKKTQETLRKDVSTKAAVLHVAFELSNSKWKLGFSDGNKMRFKSVDARNLEQLEEEIEKAKSRFRLDDDVRIVSCYEAGRDGFWLDRYLLSHGIENVVVDSSSIEVNRRKRRAKTDRIDARKLLRMLMRYHGGERKLWSVVRVPSVEAEDGRQLSRELESLNKERTSHRSRIRGLLIREGLEVKNPSGKKFLEELDSLCTWDGNGLPGDFKARIVREYERLRMVEEQMGILRKEREKRVGSAETLSMRKVAQLRTLYGIGVTSSWDFVMEMFGWREFRNRREVGAFAGLTPTPYDSGGSQREQGISKAGRGRIRALNIQIAWGWLRFQPQSKLSQWYQERFAGGGSRMRRIGIVAVARKLLIDLWRYLEYGVVPEGARLRPVK

SEQ ID NO: 323630 - protein, 346 aa, unidentified
MEHYVGLDVSLKLTAICIVDRTGKIEREGVVASDPKTIAAFIKSHAPHVARVGLETGATSTWLWTELNKMGLPAICIDARHAKAALKMQINKSDRNDAVGIARIMQCGWYKEVRVKDFDSHAIKALLVSRALLVKIKRDIENQIRGLLKNLGLVIGQAKMNVFSVRAAELAGARPELTAAVEPLLRAREAVGRQIADLDGKVMRLARNDAQVRRFMTAPGVGPITALCFLATIDDPTRFKRSRSVGAYVGLTTRRYASGETDWTGRISKCGDKMLRTYLYEAANVLLTRVAKWSALKAWGIRLAKRSGLRKAKVAVARKLAVILHRMWIEGSEFKWSSKEAANQPA

SEQ ID NO: 323631 - protein, 414 aa, unidentified
MRIVYPRCCGLDVHKKSITACLLTPTEQGETQQEVRRFGTMTRDLLELSDWLTGNGVTHVAMESTGVYWKPVWNILEPACTILLVNAQHVKAVPGRKTDAKDCQWIADLLQHGLLRGSFVPPTPVRELRDLTRTRASLRQDHTAVANRMQKILEDANVKIASVATDWLGVSGRLILNRMIDGEQDSGKLADLCRGRLRDKIPQMQLAVEGRMTEHHRWMLRLQRQQLEFLEQQITQLDARIQEQINDYQRAVDLCTTIPGIEVVAAGNLIAEIGVNMDQFPSAQHLASWAGLCPGNNESAGKRLSGKARNGNFWLRRNLCQAAWAASHTKNTYLSAQFRRLASRKGKKRAIVAVGHTILVIVYHMLKNQQPYRDLGSDYFDRRNSEQLKWSLIRRLEGLGLQVSIKSQNQPEER

SEQ ID NO: 323632 - protein, 444 aa, unidentified
MAVRKREDEVFPNAAGIDIGASSHWVAVPRHLAEGASEEPVREVGAMTDDLNELARWLVKLGVDTVAVESTGVYWIPVFEVLEQHGLKVWLVDARQLKYVPGRKSDVQDCQWLQRLMSLGLLRAAWRPSAEVCVLRAVARQRETLIAEQTSWVQRMQKALVQMNIQLTEVISDVMGQTGQAIIRDIVAGQREPGTLARHRHRRVKASEAEVVKALTGNWREEHLFVLRQALGMYDDIGRHLAECDARLDQLLDARAIKTVDIGKLPRQGSKSRVEHDVRQRLADWAGVDLTRINGLGVTVVMKLLTEIGPDLSRFASVKHFCSWLGLCPGTKISGGKVLSSGTKRSANRARQALKMAAMARCRSESALGAFYRRLCARMDKPKANTATAHKLARMVYFMLTRGEAFVDQGQQRYEEQQRQRSIAALKRRAAALGFQINPVETAA

SEQ ID NO: 323633 - protein, 465 aa, unidentified
MKSNRRPHRKKPAAGPSLLERLNPNAAGIDCGSDTHYVAVPADRAPTPVRAFQTFTADLHRLADWLTACGVTTVAMESTGVYWIPLYEILEGRGVDVVLVNARHVKNVPGRKTDVVDCQWIQELHSVGLLRGSFRPTAAIAALRAYLRHRETLVQSAATHVQRMQKALVQMNLQLPIVISDITGVTGLRILRDIIGGQTDPHALAQHRDHRCQASAAEITAALTGHYRPEHVFVLQQNLELFDAYQHQLAACDTAIEAHVLTLAAHAPTPASPVPAARTRKTPRNNEPRFEIRTPLHQLTGVDLTQIDAIGPYSALRLLSEIGTDMSRWPTEKHFTSWLTLAPRNKISGGRLLSSKTQPSANRAAVILRMAAMNLGRTDTALGAFYRRLAYRVGKAKAVTATARKLAILVYRTLREGLVYQDPGAAAYDAQHRVRVLYRLRQRAAHLGFSLLNRETGELLEGAVS

SEQ ID NO: 323634 - protein, 393 aa, unidentified
MVYVGIDVAKDKHDCFIANSDGEVLYDVFTIQNDMDGFEDLLFKIKTASKDLNKVKVGLEATGHYNCNLLGFLKSKGLPTIVINPLHTNAYRKSLSLRKTKTDKADARAIASMIMSDVSLKPYSDTLYHNEDLKSLSRYRFDKVSERAKLKQSVSRLVNILFPELEKLVSIIHAKAVYVLLSEFPGAHQIASANLKHLTALLSTASKGHFGRDKANEIREAARRSISTYLPAKSLELKHTINLIRELSSEIDEIETEIKKIMDSIDSPILSIPGISYGIGAMIVSEIGDFSRFDSPDKILAYAGCSPTTYQSGQLYSSHAVMEKRGSRYLRWALINAAKYVCNWEPTFTAYLEKKRSEGKHYYVALSHAAKKLVRLLYHLETTGEKYIPQTLS

SEQ ID NO: 323635 - protein, 343 aa, unidentified
MQIRSVGIDLGKTTFHLVALGDNGKVLLKKKFTQKQLLAFTANMQTCLIGMEACSGSHFLGRALREQGHDVKLIPAQFVKPFVKSNKNDFIDAEAIAEAVDRENMRFVPIKTDDQLDLQALHRVRDRLMTRRTALINQIRAFLLERGIVFAKSPIRLREALPEVLENVNKNLTPRMRNLVAMLWSEWKDLELQIVEMNDQMERIAASDDACRRLRQIPGIGPLVATAIVASIGNGSAFRKGREFAAWLGLLPNQHSTGGKVRLYGISKRGNSYLRKILIHGARAVVLRSKRDRIAMGAWMSSLETRAPRNVLIVATAHKLARIAWAVLSTGQDYRAVPEALTA

SEQ ID NO: 323636 - protein, 340 aa, unidentified
MKKVSIVGLDLAKNTIQVHGAAADGSIIFRRKVSNGKLLEFLSGINPCTVAMEACAGSHYWGREIGRLGHHVRLIAPKYVKPFVKRQKNDAADAEAICEAALRPTMRFVAVKSEAKQASAILFKVRDLLVRQKTQIIHALRGLLAEFGVVVAQGPAHVGILIEYVEDPCSNLPEAARAPCLALVATLRSLVGEVRELDQEIARRSRQDDVAKRLMTIPGVGPIIATALEALAPPAETFSRGRDFSAWMGLTPRQHSTGGKAKLGKTSKMGKRDLRRLLIIGASAVVRWASKHGAAEGSWLSRMIGRKPPMLITVALANRMARIAWALMTNGSRYEATRAA

SEQ ID NO: 323637 - protein, 400 aa, unidentified
MRVIFGIDVSKVSSEVAILVNGEKVHNYTMSNDAIGFSRLLGDLKTVHKPEIIFEATGVYSRRLQTFLDDNGYAYTRLNPLEAKKQLDSLRVRKTDQIDAEKLAQSQFVLNRKTTYVQEEVYQNLRDLSRFYQNLTEDIVRAKNRLHKALQITFPELENILSTPTGEQYWNLVIAFPCKDFVLDLSKNELSKSIRQSTSKRISDKRVAYLAEKLTALANQSYCAVKKTSPILEEVHYYAKELLRLSEQRQAVLDQMVELAQPLPEYDILLSIPGIAETTATSIIGELGDIRRFQFANQINAFIGIDLRHYESGNFLAKEHITKRGNPYARKILFKCIHNIASASHTNPCHIADFYEKRKRQSQMTSTKSHTIASIHRLIRTMYYLIMHNKLYDYASTQNR

SEQ ID NO: 323638 - protein, 323 aa, unidentified
MIKKDFNIVIGADIAKKKFDVAYLLEGKFKHKVFTNDAVGFAGFVAWFLSLCGDANPLICMEATGSYSLPLADYLVNHGFSVSLVNPAKIHAFAKSELSRAKTDKADAKLIARYAFMTQPPLWIPPPATIRELQALVRRVEHLLEMIQMEQNRLETADASTQLSITNVLNTLETELKSTRKAIKDHIDNNPDLKQRSDLLETIPGIGEACIAHLLLALSEHHGFTHAKQVVAFAGLAPVLRESGQWRGNTHISKTGDSALRKVLYMPALCAKRYNPVIQVFWDRLQRNGKNGKAITCAAMRKLIHIAFGVIKSGKPFDPNYAI

SEQ ID NO: 323639 - protein, 350 aa, unidentified
MVVIGVDAHKRTHTFAAVDELGRELANRTFAATPDGHLDALDWARRWPERTFALEDCRHLTRRLEGDLLRAGEAVLRVPPRLMAEARRSGRERGKSDPIDAVAVARAALREPGLPVAQLDGPARQIRLLVDHREDLVAERTRMCCRLRWHVHELFPGLVIPPKALRRQKVIADLEQRLADAPGPVAEIARELLGRIRELTVRANELQRQITRLVRPLAPNLLALEGCGPLSAAKIVGEVARASRFGTKATFASWNGTAPIPVWSGNETRHRLNRGGNRQVNAALHRIALTQWRGVGPGRDYVLHRIESGNSKTEGLRLLRRRLSDEVFRRLLADEAACAEVPAPEEVIAA

SEQ ID NO: 323640 - protein, 413 aa, unidentified
MALKIVYPICCGIDVHKTFVVACIASTNKGVTTYKSHRFSTYTKGLKELSQWLCENNCPDVCMESTGKYWIPVFNVLEDSCNITLAHPKYVKAIRGKKTDKKDAKWIADLFKHDLIVGSFMPPLAIRQLRDLMRYRFKLTNFMSSEKNRLQNSLTVSNIQLGNVVSDTFGKSSMNIINRLLVNPQDNSFDIEPLIHGSMKDKLPELELAIDGFITPEQAEKIKVIKHHYEDIKSRKAELENIILSLSVSYTEEINLILTVPSFKNIFSAIAVISEIGVNMDVFPTAKHLCSWAGLTPTNNESAGKKKSVRISRAGCYIKPLLVQCATAVVKSEKHPEIRNRYLTIKKRRGHKRAIIAIARMILTAIYNILKKKEPYNADLYRKADVLPVNREITVEQAILLAKTQGYRIRAAS

SEQ ID NO: 323641 - protein, 355 aa, unidentified
MVSPILAQRTTLSEDFVLLGAIMDTVSLIGIDLGKHCFHLHAQDGSGRMVLRKKLTRNQMFTLLSNFPSCTVVMEACASAHFWARKLQTLGHTVRLMAPQFVKPYVKTNKNDVADAEAICEAVARPNMRFVPIKNVDQQAVLALHRARQGFVRARTAQANQIRGLLGEFGLVMPRGITSIAQQVPQLIEDASNELPGSFRLLIQRLTDHLKELDRQVAEIETQIKAWHHASDASRRLAEIPGIGPITASALVASIGDGKCFSNARQLAAWLGLVPRQHSSGGKPTLLGISKHGDTHLRTLMVHGARAVVRYCANKDDAFSGWLHRLLTRRHKNVAGASMYVGGDRSDYLTAPIPI

SEQ ID NO: 323642 - protein, 343 aa, unidentified
MLYAGLDLSRQKLDVHVLDEAGRRVDAFAVRPDADALRTLAERVGGPVTAAIESMNGARFVHDELERHGWDVAIADAAKTKGLAPLATKTDKIDARVLALLCYRDLVPEIWLPDLDTRAERERARFRLYLVRHRTSLKNRIHATLITFGHPVPASDLFGTRGREFLASLAVPEPWATTLERSLARVDALDAEIGRCETELGRLGAEHPDVRLLRTVPGVGPVLAYTIAGEIGDIARFASAKRLVGYTGLCPRVYQSGETDRRGPLAKTGPKYLRWALIEATVHACRHPRYRHKYERTKRRLGKQRGSQVARVELARELATAIWYMLTRREPYRAEGPTPGLVA

SEQ ID NO: 323643 - protein, 318 aa, unidentified
MLNESFVGIDVSKDWLDVGWEPSQQSERLAHDEVAMVGLCERLVQERPCLIVLEATGGLETHLASALAAAGLSVAVVNPRQVRDYARACGRLAKTDRIDALVLAAFARAIRPQVRAPKDDETLELGALLARRRQLIDMRVQEKLRLERASPVQRDSIKEHIAWLTERIARLDTDLTHRLRSSSLWRDKEDLLKAIPGVGTITRVTLIALLPELGKLNRREIAALVGVAPFNRDSGQHRGERVIWGGRAQVRRVLYMAAVAAIRSNPVIRAFYQRLRAQGKPGKVALVACMRKLLTIMNAMLKHNTPWNPNALDLEHSC

SEQ ID NO: 323644 - protein, 345 aa, unidentified
METMYYIGLDVHKKTISYCVKDGSGRIYAAGSIPATRLTLDLWMKTLPQPWTVAMEATIFTAWIYDHLQPHAAAVKVAHPLMLRAIAVAKKKNDRIDARKIADCLRCDFLPECYMASTEIRERRRTLRYRNLLVRQAVQMKNKIAVLLMEAGVSYNKQKLHKVGYFRELLATNQDIDEGLKPLLRLCRETVVRLGKTESALVRSLERDSFLVERVERLMTIPVVGPIIALIWAFEVGDVKRFSSIKKAISYCGLCGAERSSANITQRTPLSKQRNKHLQTVLIEAAKMAPRNSPELAMLYEQEKQKGNANRATLAVARKMVAYLVAVDRRQKGFLVVENENRTAA

SEQ ID NO: 323645 - protein, 366 aa, unidentified
MTNSINWIGIDDHADKLTIAQYAGEQKAPAKEWEVDASEQGRRHLVRWLRGLPGGVRCVYEAGPCGYELYRLLTSKGMDCAVAAPSLTPRKPGDRIKTNRRDARKLAELHRAGMLTTIMVPERRQESIRDLLRARDDARKNLMSARHRLSKFLLRHGLRYREASTWGTKHWQWIRAIIMAEPYEHVVLNEYIRALEERQSELRRLDAVVLEAAKESDYAPLVGQLCVLRGIDTLSAMTILSELGDLRRFASARQLMAAVGLVPSEYSTGDKTRRLSITKTGNAHVRHVLVQAAWHYRHAPRTGAAIGKRRHAQRAELVAIAKKADERLHRRYCRMTGRGKRSTIAVTAMARELAGFVWAIGQHGRE

SEQ ID NO: 323646 - protein, 352 aa, unidentified
MKKIVVGIDISKEKIDVSAIDVRESQTGMVKLDYQVFENRPLGFRRMLVWARHLIKGIGLEDILFCCETTGGYDRCLCDYIYAKGLYIWREGALQIKRSMGVRKGKDDKADSLMIAEYAMRHMDKAVMYETPSETIRELKALFLYRHKLVQEKAEKKVRASHLDDTAAKSKSMRFILRDAKKSVKALEKSIEECEKQIMELIEGDEDLKRNYGHIVSIKGINIVNATAMIAYSNNFKGITTANKMASYYGVASFREQSGTSVDKKACVKYYSSSLLRATITQAAEWTIKENGIYHDYYLRLKADGKPYGIIINNVKNKLIHLVYSLVTNDIDYENNHEFLRAKRKCEQAESD

SEQ ID NO: 323647 - protein, 315 aa, unidentified
MTTRSGKFVGIDVAKEKLDIAVLGEKKASQVANEEKGIAKLIEQMQALAPELIVVEATGGYQRAVVLGMYEAGLPVAVVNPCRVRQYARACGLLAKTDKLDAFNIAEFGKQVRPRQFEAKSESGRYISALLVRRRQVEEMLKAEKNRLRTVHADMRSSLERMIEVLKEEIKHLDNELDRFMIEHEEWKEQEEILCSAKGVGRVTAATLLAELPELGKMDRKKIAVLVGLAPMNSDSGKKQGYRKTKGGRIDVRSVLYMSTLVATRYNPLIKRQYQELLKRGKIKKVALTACMRKFLTILNAMLRDRVPFRQTVTI

SEQ ID NO: 323648 - protein, 387 aa, unidentified
MYFVGIDISKYKHDCFICTETGEVIESNFSFPNTNDGFEQLLNLLKSIDNSKKIRIGFEATGHYGMNLKLFLEKNNYSFMEFNPKLVKEFISGQTLRKTKTDKKDAYQITKYLISVDYKPHPKQFYHKYSLKSLSRMREKLVKQRSYYEVALTNVLDHIFPEYKSFFNNTFSASSIFILSKYKSPDKIKNMKDYDSIRKISRGKFTSAQFYLLKDLAKNTIGTSNEIFELELETLLILHSQIEAEIKKLESNIEKIIKELNPPILSIKGIGYILGAGIVSEYGDISRFKSADAMVAFAGIEPSICQSGTESHTGHMVKHGSGHLRYCLLNAADCIFLHEPIFTEFYYKKRNEGKSHRVALNHVAKKLIRIIYKLETENITFDSSKVK

SEQ ID NO: 323649 - protein, 368 aa, unidentified
MKKRIESTKSKNNNDYYIAVDIGKRKCVVCITDKDGSILEETKYDNTLQEAERFASNLDKKYCNRKCQAVCESTANMWLKTYEAFEKHGIDVKLANPMKTKAIAEARIKTDKLDARILAHLLRSNLIAESYIAPDKVREDRSLLRLRINLVSDRTRVMNRAHSLLDKYDLKCKYDHIFGVNGIRWLKSIELKLKGNDQIQLGNYTHSIEFLNSEITQIEKQISVEASNNENVKILMSMTGIDCFSAMLISSEIGDISRFITADKLVSWCGLCPTVHQSGSTMYMGRMKKDGNKKINWIMTQAANTASRTDERMKKYYTRIAKRHGHHVAITHVANKMIRIMWSMLTYKQLYNERKKELYETKLKRIQK

SEQ ID NO: 323650 - protein, 372 aa, unidentified
MQTGSNFLWVTSYRNSGFRPSIKVSKNAHKNDCVLKRSFMNYQFCVGIDVSKSTVDVALLNNTQPELVHHNKFTNDEAGVNGLFDWLYAVPGFDQSQTIFCMEATGLYCHTLTEQLNMRGAAIWIENSVQIKRSMGIVRGKDDKIDAIRIAKYAAKNTDRIRLWKPVREVVEKIKHLATLRERLVQTQKRLLTPIEELKAVGNPNMARLLEKSISKSVQAIEKDLKKIETEILSLINKDESLRKLYLLITSVVGIGFVTAINLIIHTNEFTMINNSRKLACYCGVAPFPYQSGTSIRGKTRVHAMANKKLKTNLHMASLTAVKLDYDLKAYYQRKVAEGKSKMSVLNAVKCKMLARVVAVVNKQTLYVKKSA

SEQ ID NO: 323651 - protein, 456 aa, unidentified
MGKKKISLEVVNPNAAGIDIGSKSHWTAVGQNAQDVKEFGVYSEDNYGLCLWLQEHGVETVAMESTGTYWQNLFSSLTAFGFEVILVNGQQTKNIRGKKTDIKDCQWIQKLHTLGLLTGSFLPDGTTDIIRTYSRHRQGILEQSARTVLKIQKHLRLMNMRLDVVVKDITGLTGTKIITDFMNGQTSGKELAKNRHYNCRKPESEIAKALQYNGRDDHFFALRQEWATYLHLQGQITQIDEQIKKHLEHVIDNDGDKKQHIPSEKPYKRKNKNTIRGLDMNQVSYQYFEGVDLMAIEGVNDATIMAIISEIGLEGIKKFASAKQFTSWLRLAPNNRISGGKVLGHHLPKGSGRLKTAFRLAANAIGNLKEGHLSDFFKRINYKKGRATAVSATARKLAVIIWNMLVKGTPYNPPTEYLFLDQKRKLRLVSRIKKNIVKFELKPEDVGFGNTLNISN

SEQ ID NO: 323652 - protein, 358 aa, unidentified
MRLKGGAMNRIYIGVDFHARQQTICYLTTEGGELLFHELKHQNKAEVRAFYAQFSGQVIVGLEASGYSPWFERLLNELSCEVWIGDATEIRRRARWRHKNDRRDAELILDLMLHDEFPRLYLPPIQSREVLRMLRYRQKLIKIRTMGKNSLQALALQSGLAKGSHLFSKAGLQELRTAEMSPAMQWQRDQWLQLLDPLNQRLLETMQWLKLQSVDDSRIALVRTHPGIGLLTALCIVHSLAPVTRFRNTRKVAAYAGFDPLERSSAERQRFLGISKAGSRVLRYLLVEAAHTAVKRDDELNRFYKRLVERRGRPKAKTAVARKLLIRAFIMLRDEIDYAEFQRRAVAARCARQSTSLP

SEQ ID NO: 323653 - protein, 339 aa, unidentified
MNEVTLIGIDLGKYSFHLHAQDATGRMVFRKKLSRHQLLRTLANVPSCRVVMEACAGSHWLARQLAGMGHEPRLISPQFVRPFVVGNKNDFGDAQAICEAACRPSMRFVSPRNEAQQTVSAMHRLRERLVRERTATVNQIHGFLLEFGISLPRGAALMSRLPTVLDHETLPPRLVGLVVRLHAQVHYLEEQIRQVVQDLKASLREDDKGRRLLEIPGIGPITASALAVELGDARQFANARQFAASIGLVPRQYSTGGKPTLLGISKRGDRNLRRLLVQCARAVMQHTASRTDALSLWVKTLSTRRHSNVVACALANKLARIAWAVLARGTHYQARALTT

SEQ ID NO: 323654 - protein, 478 aa, unidentified
MARAHQQVRRVAQAGAGKQGSPATQVADLAITHRHAAGLDIHAAEHFVAVAPEDVPAGFVNPDPKLPAGVRKFGTNTADLEAIADWLKVCGVTTVAMESTGVYWIPLYDLLASRGFEVLLVDPRQTKHAPGRPKTDVVDCQWIRRLHSYGLLTGSFRPGDEIVRWRGFQRQRETLIRYAAQHIQHMQKMLEEMNVKLPEVVSDIVGVTGMKILKDIVRGERDPLQLAKNRHESCKRTEAEIAAALHGNWRPELLFGLKQALKLYEFYQQQLRDCEAQIEACLRSLKDQSDGRPLPPSLRKRKPEKNAVRFGARALLFRMSGVDLTQIEAISETTALVILSELGIDLSAFPHEKNFVSWLGLCPQHRGSGGKIFKRGTRRGANRVARALRMAAQGCHRAQNAMGAFYRRIQGRSGGAKAVVATARKLAERVYRMLKYGQEYVRQSQEAYEQAYQLRLMKSLAKRAAAMGYKLVPETTGS

SEQ ID NO: 323655 - protein, 455 aa, unidentified
MAQRNRSVSLKPVKSRAALTIIHPNAAGIDIGNAVHYVAVPPDRDDEPVREFPSFTVDLNAIADWLKVCGVDTVAMESTGVYWIPLFELLESRGFTVLLVNARHVKNVSGRKSDVLDCQWLQQLMTYGLLSGAFRPTEQMCVLRSLWRQRVMLLRTQGRHVQHMQKALTQMNVQLANVISDVVGETGQKILRAIIAGERNGQILGAMKNARIRASIDEIAKSLQGNWRDEHLFALKQAVDAFDFIGKQLVECDREIEQQMHRLQAHEGEPAKGKQRGRTRNAPKFDLRSQLFKMCGVDLTRIDGIDVTTALAVISETGTDMSRFPKVGNFTSWLGLCPGTKITGGKVMSSKTKRVANRAAQALRLAAAALRSSQSALGAYFRRMCARMDKAKAVAATAHKLARLVYTMLTKGEEYTDQGQDYYEERYRARVLRQLSLRAQKLGMTLVATEQPEPA

SEQ ID NO: 323656 - protein, 428 aa, unidentified
MSERDYNKQLKRRQKIGDSTLVVGVDIGCKFNAVALMNKGGEVLGTYPKVYNSRKGFDYFVDVVEGAKTEHDLKEVLIGMEPTGHYWRKLAFFVMERGYAVRFVRTTALKHAREINESSSSKSDVKDALTITNITREGKTIDTVIEDGVYRELRTLAKVREKILKHSVSSQATLGAVLDDYFPEVKDLFCSMKTRSLWATLERCPFPEDVLKMRVSTLTKLIAKSSRRGATAAEKAKKLYQAAREGIGLKRVSAADRYRLKMCLEEVKRTEVMLKGIKKEMKQLLEQIPCAEYILSIPGAGPITAAVFLGELGNPEYFKHPKQIVKYAGYDPQEKDSGKRIGRRFISKKGRWLLRKYIFFMTMKVTQNSDFFKDYYKRKLENKNRFGQLLKKREALCAVAIKLIKVIFALLRDKRRFSDNIFCLALAA

SEQ ID NO: 323657 - protein, 323 aa, unidentified
MSEHSIVCAGIDTGKYKLDVALAGSPAQLQIDNAADGHAALSAWLKQQQVKRVGIEASGGYEQQVVAQLRRDGFVVVVFQPAQVRAYAMFLLQRAKNDKIDAALIAACTAATKKIHAPPDPRMAPLAERLTLIDQLTEQVAGFKNFRESSRDPQIRQFWKEKIADFNGLLRAQRKALVVAIRQHPDLAERLDLIESVDGVGLKTAVAILVRMPEIGRLTREQATSLSGLAPFDDDSGKHQGIRHIAGGRQRLRGSLYNAALPAAFKWNAQLMALYQRLIAAGKPHKVALIACARKLLIFVNTVVERGTPWVRTAPAPVALKAA

SEQ ID NO: 323658 - protein, 389 aa, unidentified
MKIYVGINIAKLNHFAAAISSDGEIIIEPFKFTNDADGFQLLVSKLESFDKNSLIIGLESTAHYGDNLVRYLVAEFYQVCVLNPIKTCQMRKNNVRKTKTDKVDTYVIAKTLMIQDNLRFVSFFDLDMMDLKALGRFRQKTIKQRTRLKIQLTTYVDQVFPEIQYFFKSGLHQNAVYALLKEAPSPKEIASMHMTHLANLLKVNSHGHFTKEQAKELRVLAQKSVGANDSTISIQITQTIQQIELLDSQLEKIEAEMTDIMKFNDSVIMTIPGIGYINGGMILGEIGDIHRFSNPNKLLAFAGLDPSVYQSGNFQAKTTRMSKRGSRVLRYALVNAAWNVVRNNATFKAYYDAKRAEGRSHYNALGHCAGKLVRAIWKMLTDEVEFNLE

SEQ ID NO: 323659 - protein, 318 aa, unidentified
MSEPVFIGIDVSSQTLEVADATRPETWQVVNDEVGIAQLVQQLGELAPALIVLEATGGYEFEAACALQATGLSVAVVNPRTARDFARAMGALAKTDALDARMLASFARVLHQHPDRERFVKPLADAELQRLQALVLRRRQLVQMLTSEKLRMRLAHAAARPSLERTIEFLKKELADSDTDVAAHVQQHHAALAAALTSVPGVGAASVAVLLAELPELGKLDRRGIAALVGVAPLNRDSGKMRGQRAIWGGRHDVRRALYMATLVAVRRCSVFQAFYEHLIASGKRKKVALVASMRKLLTVLNAIAKHGSRSNPMLHDA

SEQ ID NO: 323660 - protein, 429 aa, unidentified
MKIIYPRVCGIDVHKKFIVAVICISESVEPIYLKKRFSTFHNDLIRFREWLIQNDCQNVCMESTGKYYIPVYNVLESHISNIVVANPKWVRAVKGEKDDDKDAKWIADLFKFGIVRSSFIPQKDFRILRELTRYRYKLVNMRSSEKNRFQNALTSGNCKLDMVFTDVFGKSASNIIDLILSDNPYTDEDILSKVHKKCKASPDMILDSVNGTDLTPVQKARIELVNDHIKQLSSNIQKLDKLIDLMIEPYEDYISFLCQIPGVSRNSAIIILSEIGIDMNQFTTSRRITSWAGLTPSSNQSAGKKKSVRISRAGVYLKPCLVEVAHAAVKDKSHPYYANKFNKISKRRGKKRAYIAIARKILVAAYHMLLTGEIWNPADLSEVETPVEQRIKYVKNNLKSDIKQLLDIGLTVEELTLMIQQNANIIATQ

SEQ ID NO: 323661 - protein, 359 aa, unidentified
MRIIGCDLHSRQQTLAMLDTTTGEIEKTTLKHEENIVREFYSNLPRPVRVGIEATGSMQWFVNLMEELGIECLVGHPAEIRAAEPRKQKHDRRDADLLLSLLVEERFPTIWLPTKELLDIRALLRHRHQWVGLRVKIQNALQAIALANGLRRGPSLWTQAGQHAIASLPLSPHAAYRRNELQAMYVKFEAEIEKLNQRVEQQARERSGARLLMTHPGVGPITALATDVFLGDPARFADSKELASYVGMIPGEYSSGKRQRLGGLTKQGNPLLRFLWSEAAIHAVRRDPELKHFYHRKLVQKGLGKARAAVARKLGIRMWIMLRDRIEYHEFCRRGQVQQTSGDACAGMPGPRYGAKVTG

SEQ ID NO: 323662 - protein, 429 aa, unidentified
MRTESTPGARGPVFCGVDTHADSHWLCVLDWRGRKVLSRQFPADAAGYEALAGAIAAAGEPACVAMEGTSSYGAGLTRHLASLGMPVREALSPARMQRRRPGQGKCDEADAERAARAAMSGSKLGTPKSQDGWVDGVRCMLAARSGAVKARTSAINTARSLLTTAPEGFRSRFRGMGGPRLMEELPSVRAEGALGAALGALADLWAAARDAALDMERAIEASLEENCPALLAMYGCGPVSAAKLAVAAGDNPGRLRSEASFAAICGACPIPASSGKTVRHRLNRGGDRQANSALHEIARQRVMRDPETAEYAERARARGKSDREVMRCLKRYVAREAYRALMRPHEIRRPEDASELVAARRAARVSQVRAASILGTSEKYISMLERGQRELKPIRRAYEAWVEAGLPLDWDRQAFEAERKMDSKKHLAK

SEQ ID NO: 323663 - protein, 421 aa, unidentified
MNQLADTLFTAYVGIDWADAKHDICVRSPDGELVEFDCISSRPEAIADWALGLYQRFGGPIAVAVELTKGPIVTALTKYDFIVMFPVNPLMLARYREAFTPSRAKDDPTDAELAVDLITRHPKRFEPLQPQSVEMRKLMALVEHRYKVLCDQRRISNRLSHALKQYYPQVLEWFRQHNTVLFCDFVVQWPTLQQVKRARASRLERFFGAHNMRRKGVIERRLTAIKESTPLTEDTAVIDPYRLQVEVLIDQMRVTITALKRYDNDIDAITEQLPDYDLLFSPLPGAGHILAPRLLAALGEDRERYQRADELQMHSGIAPVTERSGKKTWVRWRWQCPTFMRQTFVEWAAQTINKSAWAGAYYRQQRAKGASYEVAVRALAFKWIRILYRCWKDRKPYDELKYLETLRRKGSPLLKYLADPA

SEQ ID NO: 323664 - protein, 362 aa, unidentified
MMMTTAKTTAATDTILAIDLGKYKSVACHSPVLNEQSFVKFATTRAELTKLLDKQRPDVVLIEACLLSGWVHDLCTEKGVRCLVANTSSEAWKFKHLKRKTDRDDALRLVEIYRLGKFPTVHVPPKEVREQRGLIEMRQKLVGRRVALQNRIRAILVGQGLPAPRGARAWTVVGLVGIAQYAQPIADCAALELWRGRLHLTLTELAYVRELLVQAEKKLDALGQDNAGVQLLQTIPGVGPRTAEAVVAFLPKPELFRTSKQVSAYGGLVPRQYQSADTDHRGRITKRGPRTLRKLLVECAWVMLRYNAWARKVYRRLTHGGKTRKKQAIVAVARKLLVRCWAMLRDGTVWREDPTPAAAATT

SEQ ID NO: 323665 - protein, 347 aa, unidentified
MRFYTKQHQFYCGIDLHARSMYVCIVNQEGDILVHRNMKAAPEPFLTAVAPYRDGLVVAVECIFTWYWLADLCAPEGISFVLGHALYMKAIHGGKAKNDKIDSHKIAALLRGGRLPQAYVYPAKMRATRDLLRRRTHLMRKRAELLAHVQHTNSQYNLPEIGKQLAYKANRTGVAERCADAAVQKTIEVDRALITYDDELLKDLELYILKTAKHHDAQTLYLLQTIPGIGKILSLVLLYEMHQIDRFPSVQDFASYCRLVKCSKESGGKRLGTSGKKIGNAHLKWAFSEAATLFLRNNPPGQKLLARLEKKHDKGRALSILAHKLGRAVYFMLKRQVAFDMEIFLQT

SEQ ID NO: 323666 - protein, 401 aa, unidentified
MKKNTTAKRNQKAVPKRHKNQIRHMAAKQRLTIGLDLGDRNSRYCILDEAGEVVSEGQLPTTKTGFRALFEKMPSSRVALEVGTHSPWSSRHLAGMGHEVIVANPHQVKLITQSTRKNDRIDAEQLARLARVDPKLLSPIRHRGEEAQGDLAVIRARAELVEARTGLINCARGLVKPMGERLKKCDADQVGESLLGGLSDQVGRVVGPLLKSVEGLNEQIAEYDRRIEAVAQRYPEVELLTQVYGVGILIALTFVLTIEDAERFAHSRDVGAYLGMVPKQRDSGDSQPQLGISKSGDRLLRSLLVQGAHCILRKGAPDSDLRAWGMARLPSGDYPGKQPGGGKNAPPPRSGSKRGKRRTIVAVARKLAVLLHRLWVTGEVYDPLYNRKAMQAGQGKAQVAA

SEQ ID NO: 323667 - protein, 355 aa, unidentified
MTKTVMAGIDLHSNNLMIGIVDQDGQRLKHQKLDCDLGQVDGFLRPFKRRLKSIAVESTYNWYWLVDGLRALSYPVELANPAKIDQYSGIKHADDQNDAYFLAELQRLNILPTGYIYDPALRPVRDLLRRRLSLVHQRSALMISFKSLSTRTTGRAMNLNRLKSMEVAEAGALYDHPANQLIAQVQKEHIERLGQSLERLEKAVLQCVRKLPCYDRLNTLPGVGRILGMTITMEVGEVGRFKTTGNFASYCRAVDSRRTSNEKNKGDNNRKCGNKYLGWAFVEAANFAKRYDEPCRRWFDRKAARTSTVIATKALACKLAKAAWHVMSQQVAYDPKRVFPTINLESRRQPEKRVG

SEQ ID NO: 323668 - protein, 401 aa, unidentified
MIGVDPHKRSHTAVALGADEAVLGQVRVRASAAQAQRLLEWAAAWPERTWAVEGAGGLGHLLAQELVAAGEPVLDVQPKLAARVRLLAAGAVNKNDPNDARSVAIAALRSPSCLPVRPDDHAAVLKIWAKRHRDLSRTRNQVACRLHATLCELVPGGLNAEIYADQAARILAGAEPRGAVAQARAELAAELVADLRRVDALLRETKKKLAVAVRASGTSLTEVFGVGPVIAATVIGDVRDVSRFASPDRFAACNGTAPIEVSSGNRIIYRLSMRGNRRLNHAIHMAAITQIRYQHSDGRAHYDKKKAEGKTPKEALRALERQISDAIYKRLKADAARAAAADAQGPGGHAGNDSVASAAGSHPERRLFGQATPGPAPTLRPPVHQREKATSHARKKTARTT

SEQ ID NO: 323669 - protein, 338 aa, unidentified
MKSNIGTPVSVGIDVAKATLSVSICDHDGHEQALAIRNTDTDITTKVLPYLRHYSGKVVMESTGHYHWTPALVLREAGIDIRIVNPLLAKQYTSGTIRKVKTDPADARGLARMAMVCDNLPETFTVSRARLIIRKKLATISTMSRHLQALKANITSLREGQALLNEPDTTVVMELAESIKQLGLSIKHLENECVRLTTSDTNSRETMERLETIPGVSEFCAALATNWFDINTATSAKSFIGYAGLDVSSRESGTWRGHCRLTKRGNPFLRKRLYSAAWGAAMNYPEYRLYYDQLKASGRGHKEAVVIIARKLVRTMYCLLRDGVSYDSVKVSFPNRII

SEQ ID NO: 323670 - protein, 454 aa, unidentified
MTSTGTDHNPTTIAARAGIDCAIVANHQCELIEYRDDGTTRTTRKTIPSTAAGMNELTRFLAAVDVAVDVVAEPTSLTWVGIQAAVGAAGGRFYLIGTRHSSRLRAAVAGKNKSDVIDAHLLAKALDLFDLEPLVVADVGSEALKRSALSRGDARVHYDQCWRRLRSYVTATVPDIDKILAGSRTRTLAVLGRWPDLRALARAHRATIAAVLREHSHCGGRQEQIADQLRSAAAAWVSILEDYYDLDFWRLKVAGMLADIDQAADRFDRYTEQLDGLWHAFYGPDDLLLSVPGTGPITAATIRGWLGDGSRFARPEDFASYCGLTPSNWSSGTMEHKHRAISKEGPSALRMAVFLAANAARTSDPQLARVYHRLMVDKGQHHNKAVCAVARKLAERIWIVVDRDAPYEYRDDDGAILDITQARAIVRERYQVPAEVRARHRSHTSAQRRARLAA

SEQ ID NO: 323671 - protein, 340 aa, unidentified
MEHATIIGIDLAKRSFQLHGARADGSVAFRKKLNRDKVLHFVASHPPCVVAMEACASAHHWGREIGKLGHEVKLVPPIYVKPFVKRQKNDAADAEAICEAASRPTMRFVAVKTREQQSQGMLFRTRDLLVRQRTQTINALRGHFAEFGVVAPQGPAHVDRLADAIEDADSGLPGPVRDLGALLFVQLSELDEKIAELEQELRERAREDEQTVRLMSIPGIGPLSAMAIQAFAPPMESFRRGRDFAAWLGLVPRQSSTGGKPKLGKISKMGQRDLRRLLVVGAMATVGWAARRGTKDPWLARMLARKPRMLVAVALANRMARIAWALITKNEQYRAPAVTA

SEQ ID NO: 323672 - protein, 339 aa, unidentified
MNPATVGLDLAKNVFHVHVADASGRTLDSKRLTRRELMPYFESLPLCLIGIEACATAHNWARQLQRVGHDVRLIPPGYVKPFVRRGAKNDATDAAAICEAVTRPNMRFVPIKSREDQAFLMLHRARGLLVRQRTMAACAFRAHLAEYGVIVPQGRHRVDALVAKLDELREDLPEDAYFALDALVGQLDALNRQIDSIDIRLAEIHKTNSICRLLATIPGIGPITATAFAATIPDPSAFRSGREFAAWLGLTPRQNSSGGKHRLGGITKQGDRYLRHLLVLGARTVVRYPKARSRVDGPWIEALLERRRPMVVAVAVANKLARTIWAMLSTGEVFRSAQP

SEQ ID NO: 323673 - protein, 364 aa, unidentified
MLANRTSVGLDVHARSVVGCGLDGQTGELFERRLCPDHSEIISWIRGLPGPVGVTYEAGPTGFGLARFLTGQGIDCQVAAPSKLQRPSGDRVKTDVRDARHLARLLHLGEIVAVTVPSAEQEAARDLVRAREDVRGDLMAARHRLSKLLLRQGIVYSEGTAWTGTHDRWLRAQRRGSVFATAGLGTAFDIAYDTLLATTARRDRLDAAIAEMAAASEFTPIVTRLGCLRGIATLTAFGLAVEIGDWHRLTGRSIGAYLGLVPTEYSSGSSRSLGPITKTGNGHARRLLIEAAWHHRPPNRTGAELRRRQDAASPAARDRGQRANRRLHDRWVQFNLRRKRAVVANTAIARELAGWCWSLAVLDD

SEQ ID NO: 323674 - protein, 353 aa, unidentified
MKVTTIGIDLAKNVIQVHGIDERGKVVLRRQLRRGQVMDFFALRTSCLVGMEACGSAHAWARRLMKLGYTVKLMAPQFVKPYVKTNKNDAADAEAICEAVTRPNMRFVPVKSEEQQAVLSLHRARQGFVRQRTAQANQIRGLLAEFGIVIPQGIRHIARHLPEILEDAENTLPGAFRQLLRQLGEHLKTLDELVRAMEVQIQQWHGTNEASQRVSAVAGVGALTASAMVASVGDARNFSSGRQLAAWLGLVPRQHSTGGKSKLLGISKRGDCYLRTLLIHGARSVIAAAGRRKQSTVGQPAVQQRADRWLEALIARRNRNIAAVALANKNARVIWALLAHGDHYQAFHPLVAA

SEQ ID NO: 323675 - protein, 392 aa, unidentified
MTTTLDNKVTTPAHVLYLAFELGEVEWKLAFTIGVAQKPRLRSMPARDLPRLHEEIAKAKKRFQLPAEAPVRSCYEAGRDGFWLHRYLVVSGVDNVVVDSASIEVNRRQRRAKTDRLDASKLLALLLRYHGGERQVWSIVRVPSVKDEEARQLHRELQELKDERTEHINRVKGLLASQGLAVAEVNRHFAEWLQQARLWDGSAVPQELQRRLLRELERWQLLDRQVKSLEDERRQRIRCDDTPHVDKVRSLLELWGIGFNGAWLLVYELFAWRRFDNRKQVGSCVGLTPTPYQSGASHREQGISKAGNRRLRRLMVELAWCWLRWQPDSELSRWYARRFGVGNGRARKIGVVALARKLLIALWKYLERGEVPAGARLASWQKKVKGCPKAVA

SEQ ID NO: 323676 - protein, 413 aa, unidentified
MVEVLYERCCGLDVHQKTVVACLITPGRGGQPHKELRTFGTLTADLLELADWLRAAQCTQVAMEATGVYWQPIWNLLEDAFTLLLVNARHIKAVPGRKTDVKDCEWLADLLRHGLVRASFVPARPQRELRELTRYRTALVRERTAEVNRLHKTLERANLKLGAVASKVLGLSGRQIVTALLAGTTDPAVLADLAQGKLRAKRPQLERALVGTPGEHQRFLLARQLAHIDFLDETLAEVSAEIAERLRPFDGAIERLDAIPGVGRYTAEVLLAEIGPDMSRFPSAAHLASWAGMCPGNYESAGKRQKGKTRKGNKWLRAALLEAGHAAARTQGTYLAAQYHRLVPRLGKKKAAVAVGHSILVAVYYLLQRGTTYAELGGNYFDARNREHVERRLVRRLEKLGFAVTLTPKDPAA

SEQ ID NO: 323677 - protein, 402 aa, unidentified
MNAVGIDVSKGKSMVAIMRPFGEIVSAPFEIKHTASDIHSLVELINSVEGESRIVMEHTGRYYEVLAHQLSKANLFVSAINPKLIKDFDNDSLRKVKSDKADSVKIARYALDKWQNLKQYNVMDELRNQLKTMNRQFGFYMKHKTAMKNNLIGILDQTYPGVNTYFDSPARSDGSQKWVDFASTYWHVDCVRKMSLNAFIDHYQNWCKRKKYNFSQSKAEEIYGKAKELVPVLPKDAITKLIIKQAVDQLNSASTTVESLRTLMNETASKLPEYPVVMAMKGVGTSLGPQLMAEIGDVSRFTHKSAITAFAGVDPGVNESGTYEQKSVPTSKRGSADLRKTLFQVMDVLIKTHPQDDPVYQFLDKKRAQGKPYYVYMTAGANKFLRIYYGRVKEYLSSLPES

SEQ ID NO: 323678 - protein, 354 aa, unidentified
MNTTQVFEKRKIAVAIGIDLAKDHCDVVAYNADNKICFTKANWAYPHLMEWLANAQPAVVLMESCKGCHVRARDIADLGHDTRLVKGADVKALRNVCQKNDIRDADYIARLLYVPGTKFVFVKNQRQQSLQFLQNEYKSIQELRIQVGNQIHAGLEEFGCPGPKSKKFIQSRMMAHLEKNVEPIPEEVMSSFLRRREMWLNLFEQEEEAKKRMEEIAKTDDDAQRIMTVPGVGAQTAVGMLVHIGGDIGRFKNSGQFAASIGLVPKQNSTGGNTTLNGITKCGPKRLRANLVQCGQVILMHADKLKGNFGDWVRKLRDSGKKRGVIVCAIAAKIARIVYRLMKDKVDYTPVPSR

SEQ ID NO: 323679 - protein, 310 aa, unidentified
MEAIYVGVDVSKDRLDVAVRPSGEAFVVTRDGKGLNELVERLQGMAPTLIAVEATGGFETIVAAAIAGANLPLAVVNPAQVRHFAQAVGQRAKSDPIDAAIIARFAEAVKPEPRPVPDADARLLMELVSRRTQIIEMLVAERQREKRADAVRVRKSLARHIATLEKELPVIDRDIDTLVRGSPVWREKEDLLTTMPGIGNTLARTCLAQIPELGSLDRRKIASLVGVAPFTRQSGRWRGKSMIAGGRAGPRAAVFMAALTASRCNPVLRAFYRGLLARGKPKMVALIAVARKVLTILNAMLRDKKQWQPA

SEQ ID NO: 323680 - protein, 376 aa, unidentified
MKDNTKYVGLDVSKEKIAVAIADEGRNEPRYFGMIPNKPEALKKLIKKLGSIEQLKFCYEAGPTGYGIYRVLLSIGVECEVIAPSLIPQKPGDRVKTDRRDAIRLAQLYRAGELTPIHVPTKEDEALRDLVRAREDAKEDELRAKHRLTKFLLRYDIHPPKGINKWTYAYREWLDSLSFESSMQKVVFQEYRQHLVEIDQRIQRLEKEIEIHAEEGYHAPMIQALRVLRGVATITSTALVAEIGSFQRFKTAKQFMSYLGLVPSESSSGEVRKQGKITKTGNQHARRLLIESAWSYRYKPVVKGKLKKRQEGQSTSMTAISWKAQHRLHNKYYRLLSKGKAAPKAITAVARELAGFIWAIAKEVETNREPFLEIVK

SEQ ID NO: 323681 - protein, 523 aa, unidentified
MQVNPRHQGEWRFNMSNREEKRCRFRNEQKELHLLVNARRQAEHQACVVGLSPERILYVPLDIGKNVNWSRADTASGRMVMAPQEFSTTQEGYLLWRQQLRNNLNSGQFDLVILGNEPTGIYHEAWTRQILTDFAAELSRETGPRLRYRLLNPYQVKLERTKLVLRSRKSDQIDLLAMTNLLRQGQGNPAVLPNAEVAALNQSVALSYQALRKLKACRIDLCREFDRIWPGAIVNVERFRRAHPDMPVPTPIVQTKPLERITVRLLLEHASSPYEVRQLGIEGIIALFHQHDVSCGLRTAQRIVDCANQALPAPRALVEVYQQGLRQLCQDEQHWLARQAQHEAQLTRLVQETPARFLLSIKGISPTFAAYYLSLVGAPSFFDWADQVWAYIGFDPIQSQSGDSNPTQRLCISRRGDPFYRNVLTWMACLVAGHHPAFGLTFIQAEQRGLGLWGAAIHTAHKLNRTCFRLLLDQRPYNDTTHPDDFARWRTFWLAHRQHRKSPKTTLAPAAWRPTPVVTEPSI

SEQ ID NO: 323682 - protein, 439 aa, unidentified
MVRFIGLDVHKRVVQVCLLDAAGQPLGQQRFALSRATLLDFARTQLQPDDRLVLEATTNTWALVGLLRPFVAELAVSNPQQTRAIAQAKVKTDKVDAHVLAQLLRCDFLPRVWEPDAATQELRRLCSRRAGLVGQRTAVKNRLHAVLAMRLLLPPVDDLFSAKGRAWLQSCELDAEGRSLLDSDLRLLEALEAELAALDGLLVGKAYADDRVKLLMTLPGVDYTVAQTLLAALGEIGRFRSADQAASYLGLCPSTKQSAERCVHGPITKRGSGQARWLMVQAAQHLGKHPGPLGVFFRRLARKKTRNVAVVATARKLVVIAWHLLTRREPYRYAQPRTTETKLQRLRVKATGQRRKTGPKAGQGTGGPKLAAGVRSRTIKPLAQVCQEEGLPAPGAPPAGEARTVADSGTAAYVGSLQAAQVLAQRPRPTPPAAPAAPD

SEQ ID NO: 323683 - protein, 429 aa, unidentified
MQNESIPDARGPVFCGVDTHADSHWLYVLDWRGRKVLSRQFPADAAGYEALAGAIAAAGEPACIAMEGTSSYGAGLTRHLASLGMPVREALSPARMQRRRPGQGKCDEADAERAARAAMSGSRLGTPKSQDGWVDGVRCMLAARSGAVKARTSAINTARSLLTTAPEGLRSRFRGMGGPRLMEELPSVRAEGALGAALGALADLWAAARDAALDMERAIEASLEENCPALLAMYGCGPVSAAKLAVAAGDNPGRLRSEASFAAICGACPIPASSGKTVRHRLNRGGDRQANSALHEIARQRVMRDPETAEYAERARGRGKSDREVMRCLKRYVAREAYRALMRPHEIRRPEDASELVAARRAAKVSQVRAASILGTSEKYISMLERGQRELKPIRRAYEAWVEAGLPLDWDRQAFEAERKMDSKKHLAK

SEQ ID NO: 323684 - protein, 346 aa, unidentified
MNYYAGIDVSLEQSSVCVRDEDGKIIREAKVASEPEALITWFASLGLAMTRIGLEAGPLSQWLYPAMKEAGLPVELLETRHVRNAFKTMPVKTDRKDARGMAGLMRMGWFRQVHCKSMSAQETRAILTTRRLLESKLRDVEMSVRGVLRGFGLKVGKTTPASFAERVRELVSGHSTLEVIAASLLAVREVLLREFRGYEKRVRTMARHSEDAKLLMTTTGVGAVISLIYVSAIDDPKRFKSSKQVGAYYGITPKRYQSGETDYSGRISKIGDKSVRTALYQAAHIILTRPVKASALKTWAMQLAKRIGMAKAKVALARKLAVMMHRMLVERTSFDHKLVVNQAAAA

SEQ ID NO: 323685 - protein, 350 aa, unidentified
MVEGTMGSHHKEGSTKMSKHSMVCAGIDTAKHKLDVALEGRSETLQVDNTADGHMALSAWLRQHWVERVGIEASGGYEQEVVAQLRRDGFVVVVFQPAQVRAYARFLLQRAKNDKIDAGLIAACTAATKKIHAPPDPRLAPFAEHLTLVEQITDDIARLKNRRESCRDPRIRGFWKAEIARCNKLLRIELKALAAAIRQHRDLAERLDLILSVDGVGLRTAVAILVRMPEIGRITREQAASLAGLAPFDDDSAEHEGVRHIAGGRERLRGSLYAAALPAAMRWNPQLMALLRQKAVDLRQCGGRAWNAVGHRSAGLDRDQSQVRSQLALIAWMAKLRDGALASRAAFAAA

SEQ ID NO: 323686 - protein, 368 aa, unidentified
MNEVTTRHLGLDVHKATINVALADSGAAPVLYGTIANEPGAVRKLVGQLKRGCKLVAAYEAGPTGYGLHRQLTELGVECVVIAPALIPRRAGDRVKTDNRDAITLARLLRSGDLTPVWVPGQEDEALRDLVRARFDAKDDLRRAQHRLSKFLLRQSIQGPAGTTNWSARYQSWLNTLQLERPANRLVLEDYRATERAARDRIRRLDADLKRCAEQSPRLDLILALQVLRGIAFLSAVTIVAEVGDFRRFPDAPRFMSFTGLTASEYSSGQSRRQGGITHAGNRYLRHILVQAAHNARYTPALDGTVKHRLKGAPADLVELSLRAQTRLHRRYRHLDRRIGRAKAVTAVARELAGFVWAVGQRMEAGGA

SEQ ID NO: 323687 - protein, 349 aa, unidentified
MFIIGCDFHSRFQQIAMLGPTTGEVLERRLEHENEEAKKFYASLPGPARVGMEATFNAQWFERMLQEHHHELWIGDAAEIRAAMVRKQKTDPRDALHILDLLLTNRFPRIWVPSPVERDLRQMLRHRHKLVRFRTSVKNQLHALAMTQGLCRRKKLWGRVGRKELESLVLDPWASRRREDLLKLLDQLDPWMDNLDEAVIQAADGFPQAVCLMEQAGVGSVRALAFVLTIGPVSRFANSKKVVSYLGLNPSEDSSAGRQRLGAISKQGNSMMRYLLIEAAQGASRLDPELRRDYQRLKFRRGSAVAKVAIARKLTVRLYWKLRAAQPVPSARMQGSPGTPVVGESLSPN

SEQ ID NO: 323688 - protein, 355 aa, unidentified
MKQEKYIGMDVHQATISVAVMDSNGKLIMECILETKAATILEFIHGLRGSLSVTFEEGTSAAWLHDLLKPHVTHLVVCDPRKNALLKDGSKSDRIDARKLADLLRGNQLHPVYHGEHGVRTLKELGRSYQTLTKDVTRVMSRIKSLYRSWAIPCSGTTVYAPRHRAEWLAKIPQPGVRLRAERLYQQLDLLQPVRQEARRDLLRESHQHHAVKLLRQIPSIGPIRAALLVALLQTPHRFRTKRQLWAYSGFAIETHDSGEYRYVRGKLQRNRERITVRGLNDNHNHDLKNLFKGAALSASTRPGPLYDFYGVLLEKGMRPTMARLTLARKIAAITLTIWKKGASFDAKQLHRQAA

SEQ ID NO: 323689 - protein, 454 aa, unidentified
MEQESISMEVVNPQAAGIDIGSRSHWVAVGQSEQDVREYGVFNQDLFDLADWLKGKGIKTVAMESTGTYWQSLYAVLISKGFDVILCNGKFTKNIKGKKTDIKDCQWIQKLHTLGLLTGSFLPEGKTEELRTYCRHRSNLLRSAASASKKMQKYLRLLNLRLDVVVRDICGLTGLLIIRSVCEGETDPQKLASLRHGNCRKSEEEIAKALQSNGRKDYLFALQQELETYDQTQQKIASCDIEIEKMLEEIINSDDNKREHHIEAKPHKRINKNTPKDIDLNLKSYQMFEGTDLLAIEGMSYSTVLALMSEVGIEGIKKFKTAKHFASWLRLAPNNKVSGGKLLSSKVPKGSNRLKIALRNAANAIGNLKESTPLRDFFQRISFRKGRVSAISATARKLAVIIWNMVVKGTPYINPEGYLFLDQKRKLGLVKRIKKQIDKFGLTNQDLGLEIDQI

SEQ ID NO: 323690 - protein, 315 aa, unidentified
MKESVERSVVYYVGIDVAKARLDVATSQLNAVFTRNLTGLDRLVQWLHQLGGPVHVVLEASGGYEREVVAALQGRDFAVSVVNAGWVRNFARSQGRLAKTDRIDARVLVDFAAANAPRLSVPVCPEQQKLTDLVRARQQLVAVRTLLQNQLEHTRERLARRSQEELVELTDTRIRRLEKALAQLIADTPALAAKVQKLTAVRGIGPTTAALLLAELPELGTLNKAEAAALAGLAPRNHDSGTFRGQRHIAGGRPAVRTGLWMPTLVATQHNPILKAFYQRLRAKGKPAKVALTATARKLIVYLNGLLKSPSLSSC

SEQ ID NO: 323691 - protein, 408 aa, unidentified
MKTLHQRCAGLDVHKQDVVACLRLATKGRVHREVRRFPTTTRGLLELAAWLEAARCTIVAMEATGVYWKPVWHLLDGSFELVLANAAHIKGVPGRKSDVNDATWIADLLAHGLIRASFVPPQPIQDLRDLTRTRKQLSREIVRHTQRLQAVLEEANVKLASVITDILGASGRRILKAMITGETDPSHLAELGSRRLGCSRDTLVEALDGRVRDHHRFLLDQHLKTIEQLEETMAAFDARIEAALAPFRDTVERLTQVPGLSTRAAEVVIAEIGLDMSRFPTAGHLLSWAGLVPALDESAGKRRSTRVTKGAPWLKPVLVQCAWAAANKKNSYFEAQFLRLKGRRGPKKAAVAVAASILTTVYHMLRDGTCYQDLGPNYFARRDPARTARKLADRIRSLGYVVEIRSAA

SEQ ID NO: 323692 - protein, 343 aa, unidentified
MLKSNIIGIDLAKNILQICHISKYGELISNKAVSRQKLKQILANQQPAVVAIEGCGSSHYWGRYAEQFGHDVRVISPKKVKCFLQGHKTDANDALAIANASLQIGLKTSKPKSEEQQTLQTLDTSRLFLSRSITALGNHLRAMLYEYGIVSTVGVKGLTKAVLETLEASLLPECLRSTVNQLWVTYLNLKTELAQLIKTKNGLVRQLQPCKALMDLEGVAEVCAGMLYSSIGDGKQFKSGREASAFVGLTPKQHSSGGKVFMTGIDRAGGIKELRSALYQGALSYICRLPDEPKTAKQAWLIKLVQRAGIKRSCIALANKTVRTAWAMLRYENQYKQQSLLVI

SEQ ID NO: 323693 - protein, 356 aa, unidentified
MNAIKYIGMDVHLATISIAVLDAAGKLIMEVTIATQAGALLDFIRGLSGTLYVALEEGTSAHWLYTLLEPQVAKVVVCDPRQNPRRLGEKKSDRLDARKLAELLRLGTLKPVYHGNALGPALKELARSYRTLMSDTTRVMNRLKALYRARGIRCAGTRVYSARFRDQWLAQLREPGARGRAERLYKQLDLLLPLRQEARAALLAESRKHPAQKILRSIPALGPVRVALLLALLQTPYRFRGKRQLWTYAGLGLVTRTSSADYQMLDGQVTRSRKPAWVLGLNANHNHALKGLFKDAAVTALTRPGPLKDFYTTRVAQGMEAELARLTLARKIAAIALTLWKKGECFNAEHLKAQAA

SEQ ID NO: 323694 - protein, 448 aa, unidentified
MAKRKLEMEIINANAAGIDIGSRSHFVAINQVHADVREFGVYAEDMKDLLRWLLENDIKTVAMESTGSYWQNLFTELQNSSIEVILTNGKFTKNIQGKKTDVLDCMWIQKLHTLGLLRGSFLPDLQTEQLRTLVRHRGNLIDTTSKASKRMAQNMRLMNLRLDVVVKDIVGLTGLRIINAICNGEISGEELAKLRHGNCKKSEEEIAKALQSNNRQDYLFVLKQELQKYQDAQKLILECDLEIKKLLDECINHDDVKKSLYIDKKVHKRINKNTPKNIDLNLISYQYFDGIDLYAIEGFSHGTVLTLISELGENGILKFQNAQHFTSWLRLAPNNKISGGRILSSRTPKGSNRLKIALRQAANAIGNLKDTHLSNFFNRIAYRKGRAVAVSATARKVATILWNMLYKKQQYNPPTIYEYLDQKRKRKVIELQKQIANLDARMSKVKPA

SEQ ID NO: 323695 - protein, 344 aa, unidentified
MKLYTALDVSLRSVAICVVDERGEVRHESKVEAEVDHIVARLRSVSSELKVVGFEAGTLTQYLTYGLQAAGFEVICLEARQVSAALAAMRNKTDRNDARGIAQILRTGWYSRVHVKSPQSHQMRLLLSSRRAVLSKCVDLENELRGLLKVFGVRLASKVPHGAFDAAVHPLIKNDPMLARALLPMLEARLVLYRTYLKLDNEIKAVVRTDPTCQRLMTVPGVGAVTALTFKAAVDDPHRFKSSRTVAAHFGLTPRRFQSGETDNPGRISKAGDPEVRSALYVAAHALVTRASAWSSLKAWGVRLAKTRGHRRAVIAVARKLAVILHKMWINGTDFRCTGAEATA

SEQ ID NO: 323696 - protein, 478 aa, unidentified
MNGTGRKAKKQANINNSVNALSQEELGRRIAAVEAGLKSSTWKDLETGGKFDKNAKLTFISDDMLILGCDIGSETHYVRAIDTRGRELSKDAFPFTNNAEGFQRAKAWAVQIAAEHSKKQIVLGLEPTGHYWFCLAAWMITNGISVVQVNPYAVKQTKELEDNSQLKDDRKDPKLIANLVKDGNYGMPYLPEDVYAELRRLSMLRDQLTEDRIRYVNRLHREMKIYFPEYMDAFGKLDGVFTLMILKKAPFPADILELGADGLREIWSEAKLRGRGYSRAEHIVKLASESIGLKHGTGGGKEAVRCFVEQILYLTAKLDEIEGSLHQKCREIPYAENLLEIEGIGENILAGILAEMGDIRRFDDVKEIQKLSGLGLVACSSGKHKGETKISHRGRKRLRYWLFQAARSAVSHAEEFKTLHVYYTTRPDNPLKKMQSLIVIACKILRVIFAILRTGQKYDPTRMLRDIRHPEKAESQVA

SEQ ID NO: 323697 - protein, 375 aa, unidentified
MKEKLRFLGLDVHAETIAVAVAEPDSEVRSLGTIPNRAESIRKMIKKLGPAEHLRACYEAGPTGYVVYWQLAELGVQCEVVAPTLVPVKAGDRVKTDRRDAEKLARCYRSGDLTAVWVPDEGSEALRDLVRAREAAKQDQMRARHRLSKFLLRSGQRPPTGVRPWTRPYLIWVAQLRFTQSAQESTRQDYLHEVEHMRARVARLEQAIMEAVKLASPALQQVINDLQALRGIADISAVTIAAELGQVSRFGSARELMGYCGAVPSEDSSGKRIRRGGITKTGNAHLRRIVGEAAWSYRRPPCIWYGLRRRQESISEEAREIAWKAQHRLHKRYMKLGAAGKPQGKIITAVARELLGFIWAIGIRAETIAGQQAAA

SEQ ID NO: 323698 - protein, 407 aa, unidentified
MLFVGDDWAEAHHDVEIQDETGRALARRRLPEGIGGIATLHALLAEHLPGDAEPDQVVVGIETDRGPWVQALLAAGYQVYAINPLSASRYRERHVTSRAKSDPRDAKVLADLVRTDRRHHRPIAGDSELAEAVKALARTHQNLIWTRQRQTNALRSTLREFYPAALVAFDDLASRDALAVLAKAPTPTAGAALRVTQVEAVLRAAGRQRNLHTRAEEISAALRTEQLSAPPLVAAAFGAAVAALVAVTAELVRQTAAVEAKLAAAFEQHPSAEILRSLPGLGPVLGARVLAEFGDDPHRYADAKARKNYAGTAPITRASGKSRVVLARVARNRRLADALYQWAFSALSSSPGARAYYDAHRARGATHHAALRALGNRLVGILHGCLRRHQPYDEARGWQHAAVPRAA

SEQ ID NO: 323699 - protein, 343 aa, unidentified
MNEVSIVGLDIAKKVFQVHGVDAAGVVKVRRSLRRSQVLRWFAKLAPCLIGLEACATSHYWARELRKLGHEVRLIPPAYAKAYVRRNKNDAADAGAICEAVSRPGMRFVAIKTEAQQAIGGVHKVRALLLKQRTMLINHLRGLMAEFGHVVAPGPQHVGELLAILADPLADPEEGGLVEPLRGALLGMTEVLRGLERRIEAIDRQIVAWGRSNTTYRHLITIPGYGPILASAVAALVTDPTTFRSGRDFSAALGLVPRQEGTGGKVKLGPISKRGNGYLRRLLVNGAMSVLGSKRARQDPWIAKLLASKPRKLAAVAVANKLARIGWAIMMRQEDFHTQPAAA

SEQ ID NO: 323700 - protein, 418 aa, unidentified
MATVDIVYPICCGMDIHKNFLVACIATTDERSNTTHQIRRFSTFTGDLRILADWLASNGCKDVCMESTGKYWIPVFNVLEKSCNVFLTHPKYVKAIKGKKTDKRDAKWISELFKCDLIRASFIPPIDIRQLRDLCRYYVKLTYMNTSEKNRAQNCLTMCNIKLDAVFSDVFGTSATRILDAFFVHNSPDFDIAPLLHRKCKSSVEDIRAALEGELSDAQVEKLKFIRQHQECIKTLQDALEHLILQLSAKYQPQIDLLLTVPGISEPLTAIRIMAEIGVDMSVFETAKKLCSWAGLTPQNNESAGKKKTTRIGRAGVYHKPLLVQVALAVGTSNKHPELRDKYQALKKRRGGKKAVIAISRKLLTAIWNILRKSEPYNAELYRKADNPPENRVLNHEQAFVLLRSWGYLVCDADGVVT

SEQ ID NO: 323701 - protein, 337 aa, unidentified
MKYSGIDLHSNNSLVTVTDETDRVVAEKRLPNELSTILAFLSPWRGELAGVVVESTYNWYWLVDGLQAAGYKVHLAHCTAIKKYDGLKHSGDEADARHLAHLLRLGILPTGTILPPAQRAVRDLARKRMQLVRSRTTHILAVENITARELGARISSNQVKRLTAEVIDQMPIAADVALAIKANLAVVTAVSAQIELLEKRLQESVKAGSDYGLVSSIPGIGRVLATTILLETGPIDRFASPGNFASYARCVDSQHTSNGKKKGEGNTKNGNKYLAWAFIEAAHFAMRYCAEAKRFYERKKAKTNNVVAIKALAHKLARACFHMLKERKPFDVTRCFA

SEQ ID NO: 323702 - protein, 389 aa, unidentified
MSQAFDASRSLTALEQHNTITAVVEMGQSKWLVAAVVPGIKRQPLKKLDADQESLLKLLHRWRKEAEQAGHPIKRVVVAYEAGRDGFWLARWLRMHDVEAYVIHPTSIAVSREHRRAKTDRLDTELLLRALLGWLRGEKRHCSMVAIPTAEEEDAKRPNRERDSLVTEQTRIVNQIKAILIRFGIRSFRPKLRKAEQLLKDLRTAEGSPLPDNTRAEMYRQLVRLRMVREQIRAVETERLQKLKAEHGRKKGPHAMVRLIARVVGIGVETADMLVNEVFSRQFRDRRAVARYAGLTGSPDESGKRRREKGLARAGNARVRTGMIQLAWRFLRFQEDSALAQWFQTRAADGRGSTRKTMIVALARKLLIALWRLVTAGELSDGIVLRPAS

SEQ ID NO: 323703 - protein, 364 aa, unidentified
MESMPAAAIAVTVGVDTHLDQHVAAVIDQSGRLCGTKAFAASTRGYVALVTWAERFGPVERIGVEGTGTYGAGLARFVRAYGLQVVEVDRPDRSTRRRHGKSDPIDAQAAARATLAGVATTIPKTREGQVEMIRVLRVARRGALKARVAAAEQLHGVLYSAPEELRQPLLGLKTKALVSSCAAMRPGPLTSPTAATKTTLRTLARRWQQLQAELDQLDSQLQELVAAAAPSLVALPGIGVDTAGQLLVTAGDNPQRLRSEAAFAHLCGTAPIPASSGRTDRHRLNRGGDRRANNALWRIALVRMHCHPPTRAYVERRTNQGLSKLDILRCLIGRVSLPRSAWSGSCSSAGVGGWPRCRAARRPV

SEQ ID NO: 323704 - protein, 354 aa, unidentified
MTDSEPVSARRVVGGVDTHKDLHVAAVVDERDRILESRSFPTTRQGYRQMLAWMRSFGHLERVGVEATGSYGAGLLRHLQAAGVEVLEVTMPDRSDRRRRGKNDDLPSGRGGAEAAAHAAFAGKRAVTPKTRDGMIEALRVLKACRKTAVTARRVALQMIHNTVVAAPEELRDALRRMTRMRLIRTLAAWRPDLTDYRNTLSAYRIALKSLARRYLELHDEIADLDDMITAIVDELAPELVARGGIGHGSAAQLLLTAGDNPERLTSEASFAALCGVSPIPASSGKVTRHRLNRGGDRAANSALHIIAIVRFRSDQRTQAYVARRMAEGHSKLEAIRCLKRYMVSLVGEFQIPR

SEQ ID NO: 323705 - protein, 367 aa, unidentified
MKKISTAAVKQTRNISQQKLTIGFDLGDRSSWYCVLDETGNVLLEQRLSTTPKAMKEVFGGMPRSRIALETGMHSPWVSRLLSELGHEVIVAHARNVRLIGESRKKDDRMDAQTLARLARIDPQLLSPVKHRSAKAQADLTVIRARAGLVRARTALVNTARGLAKSYGERLRGCNVRNMNPEKAEGLSPELQRALEPLLAAIESLSERIGECNERIETLAQESYPQAARLKQVKGVGTLIALTFLLTLEDPHRFRKSRDVGSYLGLQPGRRNSGQSEPQMHISKEGDPYLRTLLVQGAHHILGPFGMDSDLRRWGLKLAERGGKSGKKRAVIATARKLAVLLHRLWISGEAYEPLHNSNQRALPAAA

SEQ ID NO: 323706 - protein, 461 aa, unidentified
MNRYGRKKKGVPQKGGSGSFPIINNNAAGIDIGSEEHWVAVPDDRDENPVRPFGCFTSDLHAMARWLKACGVTTVAMESTGVYWIPPFQILEEHGLEVKLANARHVKNVPGRKSDVSDCQWLQRLHTYGLLSGSFRPDDQICLLRSYWRHRANLVRYASDHIQHMQKALTQMNLQLHKVLSNVTGVTGMNIIRAIIDGERDPHKLALMREPGVKNTPEAIAKALEGDYRQEHLFALKQAVELYDFYHQQIEACDREIERYLHTFETKVDSAQNPLPKQKRKKEARYQSFVDLRTELYRMSGIDFTQIPGLDVVSVQTILSEIGLDPGKFPTEKRFVSWLGLCPNNRITGGHIKSSKTRKTVNRAANAFRMAAQALANSNTGLGGFYRRIRSRLGSPKAITATAHKLARIFYRMWTTRQTYADLGSDYYENRYKERVLRNITKRTRELGYDAVLQPIGQRVA

SEQ ID NO: 323707 - protein, 341 aa, unidentified
MEYFGLDVHKRYTVFTHVDEGGRLLGQGRVGNVAGSLCVLLSRSAQPAKVVLEAGGIWPVFTDALEDHAVEVVLAHPLKMRAIASARIKTDRIDSATLAHLLRTDLVPRSYLAPKSLREVREVLRYRVQLVRLRTAIKNRIHALLAMRGLASPVSDLFGRAGRRWLADLELPAVPRRAIDGFLAVLETINVQIRLVETEIRRRVRESPDARRLWTIPGVGRFGALLIWAEVGDVHRFPDARHLVSYAGLAPSVHSSGGRTYHGRITKQGSPLLRWILVEAAVAASRQEGELRERYRRIAARKGPNTARVALARHLLTIVYHVLGDGVPYRSTAAISSALAA

SEQ ID NO: 323708 - protein, 340 aa, unidentified
MELYTGFDLHANNSYVGIIDANGRKEARKRLPNDIGLILQFLEPYKAQIVGIVVESTYNWYWLVDGLMEAGYQVHLANTTAIQKYSGMKHSDDKDDAFWLAEMLRLNILPTGHIYPKDERPIRDLLRKRGHLVKLRTSLIHSLQNIIDRNCGTRIPVNDIKRLRENKVAPLMEENQDLAFAGQVSKDTIDFLTVKIRALESFIEGRAKLKGSYDNLLTIPGIGKILGLTIMLETGSIDRFEKVGNYASYSRKVSSQWTSNDKKKGKGNKKNGNKYLAWAFSEAAEFARRYDQQARAYYNRKLQKTNFMVAHNALAHKLTRAAYHVMKEQTPFMPEKMFAS

SEQ ID NO: 323709 - protein, 319 aa, unidentified
MKDIKILGVDIAKDVFQLCGIDEWGKVIYTRRVKRAQYVSTVASLKVGCVVMEACGGANHWYRTFMGMGIPTQLISPQHVKPYVKSNKNDRNDAQAIAEAASRASMRFVRGKTVEQQDVQALLKIRDRLVKSRTALINEIRGLLQEYGLTMARGAKRFYEELPLILASEAVGLTPRMKRVLNCLYTELLNRDEAIGDYEEELKAVAKANEDCQRVQSIPGVGYLTALSVYASVGDIHQFHRSRQLSAFIGLVPRQHSSGNKEVLLGISKRGNVMLRTLLIHGARALLRHVKNKTDKKSLWLKALIERRGMNRACVAVSE

SEQ ID NO: 323710 - protein, 418 aa, unidentified
MEKSYVVAGIDVHKSMLAVVVADAGREGEFQFQRRKFGTTTGELNALEAWLSEQGVREAVMESTAQYWKPVWQHLEERFEMYLAQAFSNRAPRGRKRDFADAERLLRRHVAGELIRSFVPNGEQRLWRTMTRSKHQLTRDRVRIHSQIESLLEDGRIKLAAWVSDLLGLSSRRILRALVEGETDPAKLAALAERSLRATPEQLQDALSRATALSGLHREILGMFLSRLELIESQIELLNQRTATAMGVHHDAVQRLAEVPGFGIDSAHQVIAEVGPTAETFPSPQQLASWVGVCPGREESAEVSKNNRSPKGNRMMRRVLTQVANAAVKSKGSVFESLYRRWVARMGHNKTIWTIAHRLCRLAWKILHEGVRYIEYGKRENPQSVRKRASKLLRQLRALGYQVEAQPPALPLDQQAAS

SEQ ID NO: 323711 - protein, 367 aa, unidentified
MTNEKLNNSKAGVEQVASTKPQTIKLGLDVHADSIMMVRIVDHRAPQPAQKFTPAKFREWVKGQLGLAEAVHSCYEAGPFGYSLHRYLVELGVQNLVVQPVCLDERHTGVNHDKSDAKELALRLDRYVAGNTHALATVRVPTVAEEQKRIASRQREQLKREVRRLTAQGRSLLLTQGYRAKGGWWGTRRWAQLQVQLPAWLDERLEVFRRLLAVLTVELDAATAVLEAAAPAVRPKGLGGLTYEVIEREVGDWGRFTNRRQVASYTGLCGGVSASGQSHHLLSITKHGNVRLRTALVELAWRLVIWQRECKLVKKWWPVLGQAKATKAARKKAIVAIARQLAVDCWRWRTGKVTPQDLGWVMVGPPA

SEQ ID NO: 323712 - protein, 337 aa, unidentified
MDDCTVFVGLDYHQSSVQVCVMDRQGEVLLNRACRNDWPCIVRAVLRCGCPARVAIESCTGAADLAEELIQHAGWHVDLAHPGYVQRMKGSPDKSDFTDAHMLADLERVGYLPRVWLAPEEVRELRRLIRYRQQLVNDRRNIKLRISALLRDQRVRNAPGRPWTQAWLSWIRETRALSEQSTWIVGRMLGRMDAVLQDIVAVEERLTHVTRNDSVVETLQTFAGIGPVTAWTLRAEIGRFDRFRNGKQLARFCGLSPRNASSGTRQADAGLIKAGNRQLRAILMQTAHRLIRWEPRWIDFAGELTRRGKPKCVVVAATANRWVRWLYHQMQPQRLAA

SEQ ID NO: 323713 - protein, 359 aa, unidentified
MQSQNQELDFNGKDIYAGIDAHLKSWRVSIMTNGIMCKTFSQNAKAEDLKKYLENNYPNGTYYSAYEAGFCGFGPHRKLREMGITNIVVNPADIPTTDKEKKQKEDSRDSKKIVRSLYNRELEAIYVPNMEIEGLRSLVRYRRTLVKEISRYKNRTKSFLYYHNIEIPTELATGSTHWSKRYSNWLDSLELGTIHGRETLTHIKHTVEHLRAKLLEINRSLRGLEQDSEYSAMIALLRTVPGIGLITAMTILTELDSIGRFKSIDGLCSYVGLVPRTNSSGENEKIGRITPRSNRQLRSMLIESAWIAIRHDPALMMKYGELVKRMDAPKAIVNIAKKLLSRIKHVLVNKTPYVKGVVK

SEQ ID NO: 323714 - protein, 409 aa, unidentified
MGLYCGIDWAENHHDFAILDDLGDVVRRGRVSNDAVGFARLLEAFAEAGDTAQDLIPVGIETDHGLWIAALRASGRVIYPINPLAASRYRSRHSVSGSKSDSADAVMLANIVRTDAGAHRPLPADTDTALAIRVLARAQQDAVWSRQRFQNEIRSLLKEYYPAALVAFQSLEDGLTRPDARSVLAAAPTPTAAAALTRPQLRAALKRAGRSRYIDRDVERLRGIMRAPELRQPPQIEAAMGISLMTLLQQFDAACAAAETLAEHVSVLFAEHPDAKIITSFPGLGTLAGARVLAEIGDDRTRFVTARGLKAYAGAAPITRASGKKTFVLHRHVKNRRLAAAGTIWAFSALQASPGARRHFDARRAGGDWNHQAQRHLFNRFLGQLHHCLTTRELFDELHAFPPPLPIAA

SEQ ID NO: 323715 - protein, 391 aa, unidentified
MVCVGIDVAKDKHDCCILDSEGTTLVDCFTIPNNMDGFKSLLQTIQDCSQKSDKIKVGLEATGHYSYNLLGFLLDNGLPTYVLNPLRTNLYRKSLSLRKTKTDRVDARTIAAMLLSDAGLKPYTNTAYHNEELKSLTRYRFDKVKERAKLKSSIARLVCILFPELEKLVPSLHIASVYALLEEFPGAKQIAAAHLTRLKALLETASKGRYKRDMALEIRDAARNSIGSWMPAKSLELQHTIRLIRELDVEIAEIEEQIQSIMDELHSPITTIPGVGFRMAAMILAEVGDFTLFDSPDKLLAYAGMSPSTYQSGQLKNCYPHMEKRGSRYLRYALYNAAKYVCHWDPTFAAYLAKKRAEGKHYNVALSHAAKKLVRLIFAMEKSRQPYCSAS

SEQ ID NO: 323716 - protein, 321 aa, unidentified
MTYVGIDVSKTTFVVAYSSAKGNKTNSFKNTIKGIHEFIQTISVAEHHCVLEATGNYSALLVYLLSEAGIAVSLENPLKIKNFARVMLSVTKTDEIDARLIALYGEKMQPTSYKLRSDTILILKQKRTVIRQLKKQLVATGNLKGSMEVLPFFDPKCKKTIEKTIIFLEKQIKGLEEELASLAQSEYKKQMDLLTSIKGIGVTLAAALIMATGGFTYFDNAKQLTRYLGLSPTYQQSGTSVNVKGHINRNGDSSLRSQLYVAAFASLRCNTECKACFDRLRSNGKPGKVALIAVANKLIRQAFAVITQEKLYVDGFKSAKP

SEQ ID NO: 323717 - protein, 442 aa, unidentified
MEILYRCVGGVDVHKKQVTVTARTPGPLGGARQETTRTFRTFYGELLAMARWLVAERGVTHVAMESTGPYWWPVWSALREVGGPGLVIEVVNAAHVKAVPGRKTDVKDSQWLAQLMEVGLLRGSFLPPEQVRQLRDLTRYQTKLTEERSREKQRLLKVLEAAGIKLDNVASDTFGVSGRSMLEALVAGERAPAVLAGLARGVLRGKLEDLRLALAGRFTAHHGQLVALHLARIDHLDQMLAQVKQTIGRAGQDPPCGLAAPFATQIGLLVTIPGIGERAATAVISEIGVDMARFPTAKHLAAWAGLAPGNHESAGRRRSGRRRKGNAHVCSILVEAAFAASRTRSRIGARYHRLHRRFGGRANPGAARKAAFAVAHTLIKIIWSVLAGGEPYTDLGDDYYTRRVDPQTRTRSLIAQLEALSGKKVVFCEHGDDPGGGQPRAA

SEQ ID NO: 323718 - protein, 358 aa, unidentified
MDSNLTTMNETNNCLFVGIDVHKKQWSVCIRTTEFEHRTFSQPAQPEVLRGYLQKNFPTYNVTCGYEAGSFGYWISEKLQSFGYKCLVLNPADIPGSDKESKQKTDHNDCRKIARELSKGEIQSIYQPDLTQQSFRNLFRQRNSLCELQRQIKCQIRSFLSFTGIEVGQQFENNVWSFRFKQWLKELPIDGNNRLTLNSMLRRLNFLYDEFILIEKQLRQYVRTNHREEYKLLNSIPGIGPIVSVAVLSELGDISRFKRIDNLCSYVGLIPNIYQSGDTTRINGLTNRCHSLLRSYFIESAWTAVRKDPELISYYKKFVGKKVAGKIIVKVARKLLVRMYYCMKYKREYKINMNNPVK

SEQ ID NO: 323719 - protein, 341 aa, unidentified
MDIDILGIDLAKRVFQLHGADRRGHALHSSKVLRAELLSAVRKLQPRIIAMEACSSAHHWGRQFKEMGIEVRLISPQYVAPFVKTNKNDANDAAAIVEAASRPTMRFVTVKSVEQQDMRAVHRARELLVHQRTALINQVRGLLAERGVIMAQTPTAFKRALPSILAKCDGELTSICQTLITELLEQLRMLEERIARTNQWITSFLKSSELCKKIEAIDGVGPITATAMVAAVGDAKEFKNGRHLSAWLGLVPRQYSSGGKSRLQGISKRGDTYLRTLLIHGARVVLRYAIGKADARSRWLQDLIARRGYNRAAVALANKNARVIQVLLSGTEEYRSPAVPG

SEQ ID NO: 323720 - protein, 379 aa, unidentified
MNRIIKIGMDVHTTNYTLCIFEPSFEHDATVHCITQVKPEVKNIIHVIKTFKKKHENEELNIVCGYEAGCLGYSLYHELKEKGIECVILAPTTMKTEKGGRKLKNDYRDAKMIAECLAYGGYSAVHVPTELDNSVKEFIRMRDDIKENLKSIKQQIIAFLTRNGKQFEGKSFWTRKHIDWINTVSFSEPLLQDTLKEYMIEYNHLCDRVETLDRQIEEISLKEEYVEKVQQLQCLIGIKTHTALSLIVETSDFNRFKKGNMYSAYLGLIPGDDSSGGHEDKLGITKAGNNHLRRLLVEAAQGYTRGRVGFKSKDLKSRQEKCSSEVVAYADRANERLRRKYYRMTLRGKKFNVAKTAIARELACFVWGIMTDHIDLCSL

SEQ ID NO: 323721 - protein, 342 aa, unidentified
MRIVGCDLHAAQQTIAMLDRDTGQVSEHVIKHEGTAVRNFYAGLAPPILVGIEATGSMGWFLRVMEDLSITCRVGDPAKIRAVDTRRQKHDRRDARLLMQLLADERFPAIWMPSREMRDLRALLLHRDQWVRIRTRVKNALQGLALAHGIRRRAGLWSHGGQAMLAALSLPPHTGHRRSALQALHDHLTTHIETLDQQVTQQAEERPQARRLMTHPGVGPVTALATEVFLGDPARFPNGKAVASYIGLIPSEYSSGDRQRRGRLTKQGNPMLRFLWCEAAIHAARRDPALARFYRRKLQQKGLGKARVAVARKLGIRLWILLRHEIDYAEFCRRTAARATAR

SEQ ID NO: 323722 - protein, 352 aa, unidentified
MEAYDGRQVVGMDLHRRRSVLVRMTEDGRRLGTAKISNSPQELRREIARAGQSPKVVLEATYGWYWAADTLAAAGAEVHLAHPLGVKAFTYRRVKNDERDSADLADLLRMGRLPEAWIAPHEVRELRELTRYRHKLVHLRTSCKDQVHGVLAKLGVTVTCTDIFGAAGSAWLDALSLPQPYAGKVTSLRHLAGELTTEITMLGEVIADLLAGDRGYRVIQQLPGIGPVLAAVITAEIGDVTRFKNAGQLCSWAGLTPRHRESDTKVARGHVTKQGSRLLRWALIEAIQRIPKDCVIGAAKAAIIARRGKEAKNIAKVAAARQLLTLIFYGMRDEQIRCLARPAGPTTPATAT

SEQ ID NO: 323723 - protein, 375 aa, unidentified
MATIYIGVDFHARQQTISYLKTEDGELVTVTLKHQNKDEVRAFYGQFSGHVIVGLEASGYSPWFEHLLESLGHEVWLGDATEIRRRARWRQKNDRRDAELIWELLLHEEFPRLHRPSLTSREVLRMLRYRHKLVKMRTIIKNSLQALALQSGLSRGTKLLTKAGKQELRTALLSAVMEQQYEQWVELLEALNERIVETTQWLKQQSQGDQRISRLRTHPGIGLLTALGLVHTLMPVSRFRNQRKVTAYVGLEPMERSSAERKHFLGISKAGSRVLRYLVIEAAHTAVKHDDELKRCYKQLVARRGRPKAKVAVARKLLVRSYIMLRDEIDYAEFQDRAVAARLARQSSRPNVPDRLIGPPASPEVKESLTAGVEQ

SEQ ID NO: 323724 - protein, 444 aa, unidentified
MPRGRKLNDYVAGFSVDKYKQNQRITRISERTLVIGADIAKKIHVARAVDFRGLELGKECTFYNDQEGLMKLALWMKELQQANAKTEIVFGVEPTGHYWFPLAAFLEGQGIKVVVVNPHHVNKTKELEDNSPTKSDYKDAKVIADLIRNGKYSEPSLPTKEYADLRILMNFREKVSINLKQVKARIGNWFDRFFPEYSSVFKEWDGKTSLMTMRRFPTPEEVVSTGARGILTHWKTEVKRGVGIKRAEQLYAAATSSIGLTEGTMAARLELSALLEQFDLFIKQLESTMQKVMEILEKIPGAAHMLSIPGVGEVTVAGFLAEVGDLNKYDHGQQIIRLAGLNLKENSSGKRKGKTGITKRGRSRLRALLFRCMMPMVAKNEVFKALHKHYTTRSQNPLKKKQSIIALCGKLIRILYTLGTKQKEYDAIDVLGPVRQAQLQRSAA

SEQ ID NO: 323725 - protein, 339 aa, unidentified
MEIATLGIDIGKTWFHIVGLDSKGKPLFQKKLRRPRLMEFVATCRPCSIGMEACSGSQHLARRFIEFGHDVKLMAPRFVKAYLKSNKNDFNDAAAIAEAVQRPTMRFVAIRSIEQVDMQAIHRVREHLIGERTATINQIRAFLLEYGITIPVGGRNLRRRLPEILEDAENGVSDLMRALLHRMLMRLRRIQDEVDELTVLIKTLAASDPQCQRLCTIPGVGPIVATALVAAVGNGTQFHRSRDLAAWIGLVPRQYSTGGRTRLLGISKRGNRYLRRLFIHGARSVIHNVDRRPHRFGNWLTQLEQRTHANIVAVSLANKLARIAWAVLRRSEPYRAAPA

SEQ ID NO: 323726 - protein, 355 aa, unidentified
MCAKKTGSIEDIAVVGIDIGKDTFHLVGFDRSGQLVMRKQIKRLALNTTFEQLPRCIVGMEACLSAHFVSRTLRGMGFEPRIIPAIYVKPFNKGQKNDYNDAEAIAEAALRPNLRTVSEKDQDQLDLQALHRVRARLVSRRTATINQIRAFLIEQGITVRTGLRALKNSFETILEQRRDEISPRMRGILIGLYGDWLWLDKRIEDVSGEIEEISHTEENCANIMTIPGIGPMISTAMVAAVGKGEAFDRGRDFAAWVGLVPRQFSTGGRTILGRITKRGSRYLRMLFVQAAKVIMMRPHRWSDFSFGSWLTEAVARMPRNKAAIALANKLARTAWSILRNGTRFDAPQDAAMEAI

SEQ ID NO: 323727 - protein, 400 aa, unidentified
MDERQRFKWFLGIDVSKETFDACCIPRHGERLFNLSASMDRKGFEELIKQLSGLSVFQESVLVGMESTACYHVNLYSFLISLGYTVIVINPLLISNFVKLQLRKTKTDKKDAYVIAQFLLLNRDCLSQTMLSSEISDLRDLSRQRESLVDQMSSTKSEIKRLLTITFPELEHISGIFTKSMLRLLCHYPSAASIKQAKRSKIAKILIPGSYGKQTDGSVDRIVKAAQESVGTSSATKEIILRQKASLLVQLEEHLQELTDILKELCQAKIQQDTEILTSVKGIGQKSAVNFLIEIGGDMKQFESHKKVIAMAGLDPALYQSGKIDRKGRISKRGNRHLRRVIWIMATKVIQFNERFRQYYLKRLKDGLPYKMAVLATAHKLIRVMFAMLTNRTLFDARMN

SEQ ID NO: 323728 - protein, 311 aa, unidentified
MYYIGIDVSKKDLSVFDGKDLNFINKEGLKSFKKYLKKKYRFSEIAIIFEPTGIYSLYLKEFCAENSIKAYIVNPKQSHNFARALGIRPKTDKIDARILYQFHKLIEAKDIKVPKIDQQAKTLASYLVSYEFALKQRISLSHHLEGLRDKRLITLMKKEQKRAKKLEDKIFNDIKEYLKQNQNLEEDYQRLLTIPGIGEKAAIALLTLFKTYQGTNRAQITALTGLDPVRRESGTSVKYKVKISKNGKGIYRKILFLPTICATVHNQKIRLLYQRLLTNHKPKKLALIASMRKILLIAHAMYRDKTEYVTT

SEQ ID NO: 323729 - protein, 338 aa, unidentified
MKITTIGLDIAKSIFHLFAVNQMGRFEKKKQLKRKQVLSYMANLEPCLIAMEACGGANYWAREFIARGHQVELIAPQYVKPYVKGNKNDYNDAEAIAEAVQRPNMRFVPIKTVEQQDVQNFHCQRERINRDRTALVNQVRGLLAEYGIVINKGVSAVRQALPEILEDAENGLTPISRELFAELLEELRDLDQRFKQCDRRIQSLNQENEVCQRLDGILGIGPIIASATYAAAGDGKNFVNGRHFSAWLGLVPGQHSTGGKTVLLGISKRGNAYLRTLFIHGARAVLRHSANKHDSFSRWAQSLLARRGHNKACVAVANKMARMAWVIMAKGETYRAFT

SEQ ID NO: 323730 - protein, 366 aa, unidentified
MEKYKFVGLDVHKATIAVSVAEANGGEVRYFGEIANTPEAVVKLVRQLKKGDATPTFCYEAGPCGYVLYRQLKALGLECLVVAPSLIPTKAGDRVKTDRRDSLNLARLYRAGELTAVWVPDGAQEALRDLTRAREDMKHFEKQAKQRLLAFLLRHGKSYGGETNWTKMHFRWFETVKFEHPVQQIVFQEYVDTVKAMTRRVEGFDGQIATSAAESVFWPVIQGLMALRGISLLAGTIIVAEIGDLRRFASAPQLMAYLGVVPSEYSSGPTKVRGAITKTGNGHVRRILVEAAWTYRHPARKTEYLQRRAKHAPEKIQEIAWDAQKRLCGRYRLLEAKGKLKQKFCTAVARELAGFIWAIGQALPQQ

SEQ ID NO: 323731 - protein, 412 aa, unidentified
MDVMYPRCCGLDVHKKTVAACLITSTEGSELVKEIRTFRTMTADLLALADWLQEAGCTHVAMESTGVYWRPVYNLLEGQFELLVVNAQHIKTVPGRKTDVKDAAWIAELLRHGLLRGSFIPSKPQRQLRELTRYRSTLVQDHARTLNRLQAVLEDANLKLASVVTDIYGASARAMLAAILTGERDVDTLADLARGRLRAKRDQLQEALEGRVTAHHSFLLTEHLSTLEYLDEAIARVSAEIDQRLTAEQEAIALLDTIPGVGQRAAEILIAEIGTDMRRFPSAKHLASWAGMCPGNHESGGKRLSGKTRKGNRWLRQILVEIAHVASKTKNTYLAAQYKRLAARRGKKRALIAVGHTVLTIAYTLLTRRQPYQDLGAVYFDQREQQRVERRLVQRLERLGYEVSLQPRALAS

SEQ ID NO: 323732 - protein, 447 aa, unidentified
MLQEGMKAATWRELETNGKFTKNDKLTFISDDMLIIGCDIGSEMHYVRAIDSRGRELSQDAFPFSNSSEGFQSAKAWALELAAANDKQQIVLGLEPTGHYWFCLAAWMVSNDISVVQVNPYAVKQTKELEDNSQRKDDRKDPKLIANLVKDGNYGMPYLPEGLYADLRRLSMLRDQLTEDRIRNINRLHREMKIYFPEYRDAFGKLDGAFTLEALKAAPFPEDIVRLGVDGLKDIWHRAKLRGRGYSKADQIVQYAKESIGLEHGRAGGRKAVKIFAEQIESLSEALEEIEAELHQKCREIPYAENILEIRGIGENILAGILAEMGDITRFDDASEIQKLSGLGLVACSSGKHKGETKISHRGRKRLRYWLFQAAKSAVSHGEEFKELHAHYTTRKDNPLKKMQSLIVIACKLLRIIFTLLRTGCRYDPMKMLRDIKRPERAAAQAA

SEQ ID NO: 323733 - protein, 376 aa, unidentified
MQNDITLFVGLDVHKDSITVAYALGNGEVEVLGKIGTSARDIDRLCKQLQSKARHVKFVYEAGPLGYDLQRRLAAKGFECMVCAPSLIPRRAGDRVKTDRRDAVKLVRSLRAGDLSAVHVPTVEDEAFRDLARVWAAARDALKRARQALKSFLLAHAVRYAGTANWGPAHRRWISSFSFGNAWQEFAFSELRRAIEDRFAQCERLESAMREAVPQWRFYPAVLALQTMRGIQFTTAVGLLSEIVDVTRFAHPRQLMAWLGVTPSEHSSGGSRRQGSITKTGNSLARRLLIEAAWGYRHPAKISPEIQQRHEGVPKVIVDRAWDAQVRLCGRFRRMVAKGKNKNVAIVAIARELAGFIWDIGRLGMQQAINQSRTAV

SEQ ID NO: 323734 - protein, 343 aa, unidentified
MNVFIGLDVSLASTAICVLGPQGKIVEELDAASEPEALVRAMASLPYAVDAIGLEAGPLSQWLSKGIEEAGFDVVLMETRLVKAALKAMPIKTDRRDAQGIARLLQMGWYRPVHRKSVSSQEIRALLTARKSVQQAIINIELSMRGVLRNFGLKLGHVTRIRYEARVKELVAQNDILSASALSLLRAREQLRAELASLDTTIAGLAKHDDVCRLMMTMPGVGPIVALTVRSAIDDPTRFARSKDVGPWVGLTPRRTQSGEMDIVGQITRAGDRGLRSALYQAAMILMHRGAPNWLQAWALRVAHRRGKKRALVALARRIGVILHRMWVDGSPFRFTQSSGPAA

SEQ ID NO: 323735 - protein, 418 aa, unidentified
MAFKIFRKNCCGLDVHKTWIYACIGITDANNCTEYKQARFSSFSKGLQELSSWLAKYSCTEVCMESSGKYWIPVFNILEKTCWVTLAHPKYTKPQKGNKTDRKDAKWICDLFMCDMIKPSFIPPPDIRHLRDLLRFRMKLTYQITGMKNRALNCLTVSNLKLDDVFTDVFGKSSRSIIQQILDHPNVNFDVTPYVDKHCKHPIEEIQAAIDGAICTEQATKLKICLDFIDEQKKRIAELDTEIFRLAESYTSVLEFMRTVPGFSKEPLTAIRLLSEIGPDMSVFPTSKNLVSWAGCCPRNDSSAQKVKSTRISRAGSYLKPLLVQIANALLKSKEHPEFKERYRRIKARRGHKKAIIALCRMLLTAIWNVLSKCEPYSAKGYLADKLTEHSVVISKAEGLALLRQRGYIFKDEVADFT

SEQ ID NO: 323736 - protein, 399 aa, unidentified
MMFVGVDVGKRSHAVCFMDAAGQQVARPLRVPHTGAGLRQIQARLHGLPGPTQVIMEASGAHWMGLARRMRAEGLAVQVVNPLQTAGLRKVGIRKTKSDQKDALVVADLARIGRARPSYVPEDGLLELREVERFRWHLADQLGDAKRRVLGVLDKVFPEFAEQVGDPFGATGHALLERCASAVEFAAVDLGDLEAWIHTASRHQLGRQRAESLKAAAQDSLGLDCLGTAARLELQALLAQISLLEQQIATADAELEGRVAALASHLLSVPGARGLLAATLLAELGDVQRFDRVEQVVAFAGLDASVFESGDFRGTRQHISKRGSPHLRRALYLAAFNAIKTDSELAAYFQRKQAEGKPFRVALVALSRKLLARVYVVLRDARPYKPAVQSTLLHRSCPP

SEQ ID NO: 323737 - protein, 325 aa, unidentified
MNLSVVLGVDIAKLKFDVCLVKENQKVKHKVKALTKHGFDQLVAWLASHQVGSLHICLEATGSYGEALALHLFDAGHQVSVVNPAAVKAFAASRLTRTKTDKVDAELIARFCLAQQPEAWQPPLPQVRYLQALVRRLESLVEMRVAEENRLSSGISIDAVRYSVEEHIAYLIKEIKQTELMIRGHIDSHPDLKEQSDLLDSIPGIGQTTAALLLAEIVNIKQYKSARQVAAYAGLVPRERRSGSSVRGRVQLSKIGNARLRKALYFPAMTALRCSSFFQQWASGMRERGKCKMAVIGAAMRKLIHLAYGVLKTGKPFDPNWAKTA

SEQ ID NO: 323738 - protein, 341 aa, unidentified
MSVIIGIDPHKLLHAACAIDEREIELARLEVRTNSAQVSDLLSWAAPFECRSWAIESAGGLGYLLAQQLVARGEQVVDVPATLSSRVRLLGSGKSTKNDANDARAVAVAALRAPSLAQVRVEDHVTILRLLAKAQLDTSRAKSRACCRLHALVAELVPGGIRKEIVVKQAEQVLIDIVPTSAAQRQRLDLAYDTLSEIVMLDDRAKRNKQRITTEVIASGTSLPGIFGVGPILAGMLIGYTGDVTRFPTPGHYAAYNGTAPVEFSSSGRTVNRLSRRGNRTLNHALHMVAVTQIRFAHSEGRGYYDRKITEGKTPREARRALKRQISDRVYRQLRSDIASK

SEQ ID NO: 323739 - protein, 343 aa, unidentified
MRPSAINQHGRSNGIEFINPMAFIGIDVSKDCLHISRRPQLGQSAKQCCEVIPNDVSSIRQFLTLNSTAQYVFEATGVYSRRLEYTLSQQNLPFSKVNGLRAKSFTIACGGLKKNDRLDAVGLRLYGEKVDLKVSKPITEDQINRQRHTQLLGNFDKMLQNLHNIKHVLAHEAFEMPELMQSCLSVENAIKKEKDNILDFLGTTNTEEAQQGQALLKTITGIGEVCSKLLWEATDGFKDFDKPRQTARFLGLVPIEDESGTIKRKRGICSTAHPALRAALYVAAGAALQHNPFCKELYTRLRAKGKSVKVARIAVVHKLVRIAHAIVKSGKPFDPAYKKYKTE

SEQ ID NO: 323740 - protein, 373 aa, unidentified
MSSNLRYLGLDVHAETIAVAVAEPGGEVRSLGTIPNAPTAVAKLVRKLGAREQLRACYEAGPCGYVLYWQLTKLGVACDVVAPTLVPTKPGDRIKTDRRDAEKLARCHRAGDLTAVWVPDAAHEALRDLVRAREAAKADQLRARHRVSKFLLRHGVRPPADAKPWTQRHRRWLDTVTFVPSAQQATLADYVHEVDHAGARLERLETALDAAVAAAPAPMRAVMAALQTLRGIRQITAATIVSEVGPLSRFTHPRQLMGYSGTVPSEHSSGSSVHRGAITKTGNAHLRRVLLEAAWAYRFPPKCADALRARQRGQPPGITEIAWKAQHRLHTRYRRLLGRGKPVPHVITAVARELVGFIWAIGIAAEREVAIAA

SEQ ID NO: 323741 - protein, 403 aa, unidentified
MAIRLEVWVGIDVGKSMHHACAIDTDGKVLFSQKLGNDQRAIEQLIARASAAAQRAQWAIDVTSPMALLLITALLAADQSVTYVPGRVVNTMTHGFRGEGKTDAKDARVIAETARLRRDLTEVTMPDELAVSLTQLTSYRADLMSDWVAGINRLRALLGSIFPALEAAFDYSNRTPLILVAGMCTPAEIRTAGIGGVTTHLTDNKAWGPAIGKTAATAVAAADAQDLVLPGEADAAMLVKRIARKLLDLDREIKDTDKLITARFRRHPWARIIESLPGMGPGLGAEFLASTGGDLATFATAGRLASYAGLVPVPRDSGRVSGNLRRPKRYNRRLRRVFYMAALSSLRTQGPSRRFYDKKRAERLIHTQALLALARRLVDVLWALLRDGREFTLDTPNPVTVAA

SEQ ID NO: 323742 - protein, 437 aa, unidentified
MSEKKSVEIRVSVDVGYRRHSVAIGLPSGEVLEEFEIAHRPEGFAEFFSRIEKHQKVRDCEVAVAMEGFNGCARPLDAMVRRRGYRLYNINNLKLARFKEIFPGAAKSDRIDARKGLELFQLSDHLPLAKEVLQEVKGTPRENEVLKRLTRRRRRLVDERVRVISNLQTDLQAVCAGLLEITKNAGNQWFLNFLLSAPTLSQLARLRPATLRKIPAVGRKYAGLIEDWQKRAHFSEEVEWVGEMIQEDAKRCLELDEKIKALRAKIKEVAKDSKIAKTLLSIPGFGTICTAELAGEIGTIERFSKEGSLALYLGMSTLDNSSGKYQGSKQPKHVNTRAKAAMMVALDRHRKYVPESQRYYEKKRSEGKKHNQAIRALGRHLCRIIYKLLKEEREYEIRPEKGNTKTKVSPRSLIKRQIRKPKISDKGKNNKIYHQGA

SEQ ID NO: 323743 - protein, 401 aa, unidentified
MTANQVWAGVDVGKEHHWVCVVDVNGNMVLSRKFINDEHTIRDLATEIDGLADEVFWTVDLSNVYATLVLTVLADAGKTVRYLAGRQVWQASSTYRGGESKTDAKDARVIADQSRMRGEDLPVLRPGDDLITELRMLTAHRADLVADRTRTINRLRQQLVAVCPALERVAELTQDRGWAVLLAHYQRPKAIRRNGVSRLTKALTTAGVRNAATIAAAAVTAAKAQTVGLPGEDVGAALVAELAQEVMNLDDRIKTTDADIEERFRRHPLAEVITSLPGIGFRLGAEFLAVIGDPALLESPDHLAAWAGLAPVSKDSGKRTGRLHTPKRYSRRLRRVMYMSALTAIRCDPTSKAYYQRKRDQGKRPIPATICLARRRVNVLYALIRDNRAWEPTSQITTAAA

SEQ ID NO: 323744 - protein, 413 aa, unidentified
MKDLLECAMGLDIHRDTIVACLLKGELDTRPEVEIRSFGTMIHEMQKLREWVIETNCRYIAMESTGIYWQPIYETLEPCFDGDMHLLVVNARHMKNVPGKKTDMRDAEWIATLLRAGLLKGSFIPERAFRELRQLTRYRKNILSDVTSQKNRIDKFLHSAGFRLSAFISDIFGASGRNIMRHLCEHGSVDKAALDKCLKTQTRRKIDDILVSVNGTLSIHQRNCLRMMLSYLEQIEAHKHEIEAAIAAEVENHTEALSLLCSIPGIDVISGTAIVAEISTNMEHFPTAEHICSWAGLCPGNNESAGKRKSSHVTKGNRYLKSMLCEVAWVIAGKRKTYLSNWYWRIKQQKGAKRATIALARKLLVVIFTMLKNGTPYDEDIYEQRRLQCERKRANRLIHELSKMGYQVSPVSA

SEQ ID NO: 323745 - protein, 326 aa, unidentified
MEHELHYIGIDTAKEKLDVDVLRPDGRHRTKKFANTTKGHDELVSWLKGHKIDHAHICIEATGTYMEPVAECLYDAGYIVSVINPALGKAFAQSEGLRNKTDTVDARMLAEFCRQKRPAAWEAPHPLERALRALVVRHQALTDMHTQELNRTETAREVQRPSIDAHLLWLEAELKRLEKQIKDLTDDDPDMKHRRKLLESIPGIGEKTSAVLLAYIGLKDRFAHARQFAAFAGLTPRRYESGSSVRGTSRLSKAGHVSLRRALYMPAMVATSKTEWGRVFRDRLAANGKKGKVILGAMMRKLVQVAYGVLKSGVPFDAARHNPVAA

SEQ ID NO: 323746 - protein, 416 aa, unidentified
MNAAGIDVSSRKSTVAVLRPFGEVVRLPFDVAHSTEGLASLAEQLKALDGETRVVLEHTGRYYEPVAKALHEAGLYVSAVNPLLIKEYGANSLRRVKTDKADALKIARYALDNWTDLRDYTPMDTIRYDLKTLNRQFQLASKQRTACSNNLIALLEQSFPDIRKCFDSPVRSDGTQKWVDFAHTFWHVDCVRKQSYNAFSERYRKWCKRHGYFFKQNNAEEVYALAKNAVVLVPKSKVTKVLVQEAANQLTSTSRSVETYRTEMERLASMLPEYPVVMKMYGVGKSFGPQLMAEIGDVRRFERKQALVAFAGIDPMPNQSGDKNVRSNRSSKRGSPYLRKTLFNVMGIYLKCAPLDEPVFQFLDRKRSEGKPFYVYMTAASNKFLRRYYAQVRDYLTALDDLPPVDMDSTGLKTSD

SEQ ID NO: 323747 - protein, 370 aa, unidentified
MSKNTIKFIGIDIDDKAYHVSVYQPSDKTFISFKTGSSPELLLKSFKKYKITPIDKVCYEASYIGYSLYRSLTKAGYFCQIIAPSLIPRQPGMKQKTDKIDAKKLSEYYSKDLLHVVAIPDETDEAVRDLLRSKLFVKSTLTKVKNHILAMCRRLGINYRMETDKKSHWTTHHLAWLTGRISKLENKITIKNFRILFKQFEVLNSSIGLYENEIEAISCEERYKDKVNTLLAFKGVKKESALTLITELGDIKRFDHPKRITSYAGFDLVEYSSGGKERKSGISKMGNSNIRKIAVSAVQYSIRSPVAGVELRKRRKNCNAKVLQIASKCDARLHKKGSRMLYTGKPIMKIQVACAREFLGFIWEALNEAA

SEQ ID NO: 323748 - protein, 455 aa, unidentified
MRLWCGIDWAEHHHDVSVVDETGRQRARLRIEDTAAGFGQLMGLLAEQNAVSEAPITVAIETSKGLLPAALRAAGVPLIAINPLAVSRYRDRHSPSRGKSDAGDAFVLANILRTDPHSHRPLPVDSALAQSIQVLARAHQDAVWDRMQIANKLRAVLREYYPTFLAAFTDLASKEARATLHIAPSPVQGQRIRAGSLATALRRAGRTRGIPAAVAQIHAALHEDQLRQAPQIEAAMAEHATALLHALDTAVNNVARLEQSLTDAFEQHPDAPIITSFPGMGTVLGARILGEIGDDRTRFATARGLKAFAGTAPITRASGMKTVVTRRIVRNKRLGQAAYLWALPMIAHSPAAHAHFTGRRDRGDSYNAAARNLTNRGLGMLHHCLQTRQHYDETKAFRAPRPEPVTSRKPPAHQAHPETEAPSAHPTRTSNRTRSVTSIAPPADQARPKTEAHTA

SEQ ID NO: 323749 - protein, 348 aa, unidentified
MLADELDYVIGVDKHRDEHVLAVVAAPAGTVVAGRAVRANARGYREALRFAARYACGRRAFAIEGSGSHGAGLARYLGERGETVLEVSRTPRTERRLRGKDDPLDAARTARAALASDTFALPRAGDRREALRLLLIARRSAVGVRREALTQLRGVIVTAPERLREQLRGLPTGKLLDRCSRLRRTTSAGADELATKLVLRSLARRIDAATCEAEQLERELLGHVRALAPALLDEPGVGPIVAAQLIVAWSHHGRLRSEACFARLAGVAPIPASSGQTQRHRLSRGGDRQLNRALHTIVLHRRQHDQTTKDYIAKRIAEGKSKRDATQLLKRYLARHLYRLLQQQPLMT

SEQ ID NO: 323750 - protein, 386 aa, unidentified
MHDGTNLPVPERTGIPGDCATLFVSLELSRSTWVATSLAPGSKKMSKHTLVGDDGRKLLDLLARLKTRAEQRIAAPVKVVAIHEVGLDGFWIHRLLEANGVESHVVDPASIAVPRRHRRAKTDAIDGETLLRTLMAWQRGEPRVCAMTVPPSPSEEDCRRVSRERATLLRERIQHTNRIRGLLFGQGITNYNPLHKNRRECLEELRTGDGRSLSTHVKAEILREIDRLELVLRQIGEVEAERDEILRPAEASSPAALLMRLKGIGAEFATVLYFEGLFRHFENRRQLAAYAGLAPSPWKSGSIDHEQGISKAGNPRLRTTMVELAWMWVRYQPDSALSGWFRQRVGSERGRTRRISIVALARKLLIALWRYVTHGEIPAGAVMKPV

SEQ ID NO: 323751 - protein, 348 aa, unidentified
MALTIVETCAVTGGVDTHADVHVAAALDPIGGLLGVGEFPATPAGYARLLGWLRGFGTVCLVGVEGTGSYGAGLARHMAAAGVRVVEVDRSDRQDRRRQGKSDPLDAVSAARAAQSGRARGAPKGRDGQVEAIRALMVAKRTARSERTQTINQARAPVLTGPDDLRTRFSRHTPAGLVAGLASLRPRPGEVVGYATRISLRELGRRAQFLDGQLERLDELIVPLVTARAPGLLALYGVGPDTAALLLIAAGDHPGRLRSEAAWAHLCAAAPIPASSGKVTRHRLNPGGDRQANHALWRIVITRMGSHPPTRAYVERRVTEGLSKTEIIRCLKRYAAREVYPHLRPGAG

SEQ ID NO: 323752 - protein, 347 aa, unidentified
MKFYTKQHQFYCGIDLHARTMFVCILDQSGKICLEKNLHSCPDEFLTTIEPFRSDIVVSVECLFTWYWLADLCSEQGIPFVLGHALYMKAIHGGKAKNDRIDAHKIAVLLRGGMIPQAYVYPPGMRSTRDVMRRRLYLVRKRGQLLAHIQNTNHQYNLPEITAKLAYKANRKGFVDRFDDPSVRKSMEIDLELVAHFDQIIRDLELFIVRQARQHDADMFHRLRSIPGIGKVLALTILYEIHDITRFERVQDFASYSRLVKCAKESAGKKYGTGGKKIGNVHLKWAFSEAAVLFLRNNPEGQKWLARLTQKHGKGKALSILAHKLGRAAYFLMSRERSFNVDKFLAS

SEQ ID NO: 323753 - protein, 341 aa, unidentified
MAEYVGLDVSMKETALSIRRDGKRVWRGKCASDPKLIAEVIRRRAPGVARVVFETGPLSVWFYHALTAEGLPAICIDARHAQAALDMAPNKTDAHDADGLAQLAEVGFFREVRVKGFDSMLGRTLVAARNRLVQITTELSNQIRGLMKTFGLVVPAGKGSRFEAHVRALLADQAGLAPILLPLLEAWRAMRLRAAELGRQLVASARQSEACQILMSVPGVGAVTATSFATAVEDPENFRRSRSVGAWLGLTTRRYQSGEVDYDGHISRRGDTHLRGLLYEAATVILTRTSAESSLRTWGLKLKERIGFKRAAVAVARKLAVVMHAMLRSGQLFDRTAGMAA

SEQ ID NO: 323754 - protein, 332 aa, unidentified
MYLGIDVHKRDAQVAVMDEAGEIVEEVRVDNANLDDLARRYAGAQAAIEATSNYYHIHDTLSKHLDVTVAHPKELTQIADTDKKTDRVDAKELARMLRLNSLPESYVPTDEIRQARALVRGRQDLVETRTEYANKIHGLLSDHGVGKDVKPLSVKGREFLRELSLPAPWDGVLESYLDVVETLTAQIETLEVEIEEFAGSVEETQLLMTIPGVSYYTALTLYAEIGEIERFDRDKEVVSYVGLNPVIRESGDSRIEGSISKRGSSRVRWLLVQAAHTAVHTCKDEYLRRFYERLAGRKNAQKAIVATARKLLVSVYHMLDRREGYDPPGVKA

SEQ ID NO: 323755 - protein, 343 aa, unidentified
MGEVITIGLDIAKSVFQIHGVDGDGAVVIRKRVSRSKVLEFFADLSPCLVGVEACPTAHHWSRELQSLGHTVKLMPPSYVKAYLKRAKNDANDAAAICEAVTRPSMRFVATKSKEQQGALMLHRTRQLFVRQRTMLSNAIRGHLAEFGIIAPVGRLGLARLFEMMDGPEELGVPKTAWICLMGLAEQHQRIQGEISKLDQCIQAWHRSSELSRRLEEIPGVGPIVATALVGTITDPHAFASGRHMAAWIGLVPQQNSTGGKDRLGGITKQGNRYLRWLLVAGAMAVIRYAQKHGTAKRPWLARLIERKPTKVAAVALANKIARIAWVIMARGERYRAPPLLAA

SEQ ID NO: 323756 - protein, 367 aa, unidentified
MKKVSTAATKPSRNFSQPNLTIGLDLGDRSSCYCVLDETGRMVMEQKVSTTAKGLQAALGGMPRSRIALETGTHSPWVSRLLSKLGHEVIVAHARNVRLIGESRKKDDRLDAQTLARLARIDPELLCPVKHRSAKAQADLTVIRARAGLVRARTALVNTVRGLAKSYGERLRGCNVRNMNPEKAEGLSPELQAALQPLLAALESLSERIAEYNERIEKLAQESYPQVALLKQVKGVGTLIGLTFLLTLEDPHRFRKSRDVGCYLGLQPGRRNSGQSEPQMHISKEGDPYLRTLLVQGAQHILGPFGVDCNLRRWGLKLAERGGKSGKKRAIIATARKLAVLLHHLWVSGEVYEPLHNSGRITMPAAA

SEQ ID NO: 323757 - protein, 345 aa, unidentified
MLIIGCDFHPGFQQVAILDNQTGEITGKRLQHPEQARGFYASLGEPALVGMEACGYTQWFEDMLAELGHELWLGDAAHIRASVVRRQKTDERDAEHLLTLLLEERFPRLWVPTAEQRDLRQLLLHRHHLVRSRTQVKNQLQAMALNQGVQKKRKLWTEAGRAELQKLVLPGYTAARRDECLQRLDYLDEQIRQLSRKVAGEAERDEKARSLMTHPGVGPQTSLAFVLTIGEVGRFENAKKVASYVGLIPAEYSSGGKQRLGRISKQGSPLLRFLLVEAAQTAARLDPTLKRMYVRLCMRRSRGQAKVAVARRLATRLYWMLRTGKNYAQLTASGAGEPVSSRGAA

SEQ ID NO: 323758 - protein, 344 aa, unidentified
MVEFKKVRTFVGVDAHARHCSLKGLSRQGSTELEAEVPTEVEALRKAVKDLRGPVWAMVEASAMAAFVKWALDPVVDRVIVCETRENRWISHSEEHEDARDADKLARLLRMKEFKEVYVPGRDGQELRGLVRLYGKIVQDGTRLKNRIKAKYREQGVAVSGHGVYEVEGRKAWLDKIDRPTVRLLLEVLYDELDAVEAAGERLGRRVSAMLRHRQEFKRVVTVPGFGPVTGAAIVAVIVDPNRFATVRRAWKYAGLSVRRHSSGDSKEKTGGSFSGNRLLKNAVMVAARRALQGDNQFSRHHAQMLGRGLDPAMADKTIARRLLATALAVWKSGKDYQEPGRTG

SEQ ID NO: 323759 - protein, 412 aa, unidentified
MKDLLEISCGLDVHKEKIVACILTGPLGKPTRSEIREFSTLIPDMIALRNWIVSKNCHHVAMESTGIYWMPIYEILEDAFSGDITLLVVNARHMKNVPGKKTDMRDSEWISTLLRAGLLNRSFIPEKRIREFRDLNRYRKSVIRDITSQKNRIEKFLQSSGFRLSSFISDIFGASGRNIILHLIEHGQIDKTALDSCLKTKTRNRIDEILMSVNGTLSEHQKAFLRILMTHYDSLKKHLAEIETSLEEDMAPFALQVEQLNSIYGISTTASCAIIAEIGIDMKPFKTAEHICSWAGLCPGNNESAGKRKSTSVTKGNPYIKSMLCEIAWVIAGKRNTYLSAWYWRIKQKKGAKKAIVALARKLLVIIYTMLKQGTLFDESCFETRRKHCEQKQLSRYIRELEKHGYHVEAQS

SEQ ID NO: 323760 - protein, 350 aa, unidentified
MKTAHPIIIGIDTHKATHVAVAIDTQGTRLAALSIPTNPKGYSELERWSQSHGKVLAFGIEGTGSYGAGLSRHLLSQGHTVVEVTRPNRQLRYTQGKTDSLDAEGAARSVLSGQATARPKTQTGSSEMIRHLKIARDTAVKSRSQAMVTLKTLIINAPAELREALDQIRGKVALIRHIAAFRPGDIDTPLASAKMAMKALARRWLWLNDEIIAHDAELQRLVTERAPTLMASHGIATLTIAEMLILVGDDPTRIRSEAAFAKLCGDCPIPASSGKTRRFRLNRGGNRQANAALYRVAIVRMRSHEPTLAYVKKRTKDGKSKSEIIRCLKRYIIREIYSQLCVPKTDEIAP

SEQ ID NO: 323761 - protein, 374 aa, unidentified
MHKYIWVGLDVHKVTIAVAVAKGEEVPHSLGTIPNDPDAIAKLMRKLGPSARLRVCYEAGPCGYVLYRQLTAMGIDCAVVAPTLVPVRAGDRVKTDRRDALKLARLLRSGELTAVAVPDEAHEALRDLVRAREAAHKDLRRARHRLQKFLLRQGHRCPLRTKAWGVRYLAWVSGLHFAHAPQSVVHREYLAEVERLAERRTRLDRELEVALAQAPAAIQTVVRALQVLRGVAFVTAVTAVAEVGQFRRFTRARQLMAYSGLVPRESSSGDTVWRGAITKTGNAHLRRVLIEAAWQYRHQPRAGITIRQRRKGQAAALCAIAEKADHRLHLRYRRLLARGKSKGKVVTAIGRELLGFLWAVAVHAENGSTMPAAA

SEQ ID NO: 323762 - protein, 469 aa, unidentified
MDLLKLLIYTFYCEFLDMEEIFMKKVFIGIDVGKFKNSISIIDTEGNPIIKKGLSIENDYYGFARLEEQIDLIINNYGFTYDDCIAGVESTGHYWFNLRDYLKDIGIETVMIKTDSVKHRRALEEGQKGKNDTLDARVIASCLRNGNYVYIRDNERELRALQKLTRMRNDISDELVALKNKIHRCIDICNPVFFKIFENLNSKTGVALIKLYPSPEDIIKVDLDNIKKELGEIVDKPNMRMVSLYKEECEIWSRLIKEPSYAEKVEMIAYIDKFLLQNESKEHLDNQIKEIAKNIIPLYSEFEKIKGIPLIQLISILSEIGDIRNFKNTRAILAFLGLSLKGNASGKYIGEQKINKAGSRIVRKHLFNIMDSLVKHNEQFRIVYCYYKSYNHKNPTKKRSMQIAVMCKFVRVMYGMLKHNTNFDYKEMLKGYYFGDCNMKVFKEEFEGEKRTKKIENYKLAYSIFINYS

SEQ ID NO: 323763 - protein, 338 aa, unidentified
MKLYGAIDLHSTNNVTVVINEQDQVVYQKRLPNDLSLIAQQLSSYRASLQGIVVESIYNWYWLVDGLMEKGYRLHLANTAAIQQYNGLKYTDDHSDARWLAHLLRLGVLPEGYIYPKQERVVRDLLRKRGQLVHQRTANLLSIQSLISRTTGNSIGAKYIKALDIQHVDGVLPNPDLVLALKANLAVMNSADAQIEILEKTVQDRVKLRPQFRFLKTVPGIGPILALTIMLETGEIERFASVGNYASYCRCVGSRKISNGKRKGSGNTKNGNKYLAWAFVEAANFAIRFSSRIKSFYQKKKSKSHAIVAIKAVAHKLCRACYYIIKDQVVFDITKAFA

SEQ ID NO: 323764 - protein, 380 aa, unidentified
MRENTRFIGLDVHAEKIAVAVAEPGEEVRSLGAIPNGPDPVRKLIRKLGPVERLRVCYEAGPCGYVLYWQLTGLGVKCEVVAPTLVPVKSGDRVKTDRRDAEKLARSYRAGDLTAVWVPDAAHEALRDLVRAREAAKKDQLRARHRLGKFLLRHGCRPVEGVKAWTQKYMSWVKAVRFEQPVGQVVLLDYLSEVEHARGRIERLERELDKAVEGAPQEMRAVIDALQSLRGIAKVSAATIVAEVGELSRFPHARQLMSYSGAVSSEYSSGSRIHRGAITKAGNAHLRRIVVEAAWAYRHQPSIGPTLRKRQERLSEPVKEIAWKAQHRLHHRYRQLIARGKPQPKVVTTVARELLGFIWAIGVQVEGQSRQQAPKRKRAV

SEQ ID NO: 323765 - protein, 407 aa, unidentified
MDRVNPRCAGLDVHKDSVWACARVDGVKSVEKFGTSSRELLRLGDWLASLGVAAVAMESTGVFWKPVWNLLEGRFELMLVNARHIKQVPGRKTDVRDCDWVCQLLEHGLLKASFVPGRPQRELRDLTRQRTQLLNDRARVVNRVQKVLEDANIKLASVATDITGKSGRAILDALAEGGLSPGQMAELVHRRMEAKKPLLREALEGKVTGHHRFMLRSLLDQVDHLDRAVGSFDARIEEVMGPSGREAVKRLDDVPGFDVRTAQNVIAEVGTDMSRFPSPHHLASWAGLCPGNDESAGKRRGGRTRKGDRWLRAALTQAAWGASRTRRSYFSARHRRLAARRGKKRATVAVAHSLLVTTHCLLSDPSPYADLGAAYFENARSPQQQADQLVRKLQRLGYTVDLKRPAA

SEQ ID NO: 323766 - protein, 405 aa, unidentified
MEILVDRGCGIDVHKATVVACIMGTGIKKEIRTYTTMTNDLLRLKEWLKGHGITHVAMESTGVYWKPVFNILEDSFEVILVNARHVKNVPGRKTDVKDSEWLCKLLRSGLVRASFIPPKEVRQLRDLTRYKRKLIHTITSEKQRVEKILEDANIKLSSIASDTFGASGKRIIQELMKGELRPDEMADLSKGKLRNRKAELKEALVGNMEDHHTFMVQASLSHIAMMEELLSTIEQKIQKKIERHFKEEYELLKTIPPVKDSASVLIAEMGVNMDLFPTEGHLSSWSGMSPGNNESAGKKKPGVTTHGNKHLKTILTEFGWIASKMKGTYLWSKYHSLVGRRGKKKALVAVGHKILIMCYHILKHKVPYKELGPRYLDERRKDRIAKSYIKRLTSLGYAVTVKEAA

SEQ ID NO: 323767 - protein, 347 aa, unidentified
MLHAGLDLSRKKLDVCLLSDDGEHLDQLAVPPDVDSLRTLARRIDEVHREPVCAVIESMTGARIVHDTLEACGWSVEIADAQKVKGLAPLACKTDKIDSMVLAVLSHRDLVPAIWLPDPRVREERERARFRLHLVKHKSALKCRIHSTLINFGRACPVTDLFGVEGRRLLERLEVPEPWRSNVTASVELIDDLEHQIAEINRRLREGHADHPYIPLLMSVPGIRWVLAFTIAGEIGEIERFSSPEKLAGYTGLCPRVNQSGEKDRRGPLTKHGPTYLRWALLEATMHALKHPAYSERYQRNKRRLGKQRGAKVAQIDIARRLAHAIWHMLTRNQPFAPRGAAFRLAA

SEQ ID NO: 323768 - protein, 436 aa, unidentified
MLAIWRRPIPSPFAGKHDIALRRRRITIALVLAALLFSLGPATATSELRGTGDLGIVVERAAGSIVIVDTTKRIALGRVEGLGDLDVAMEETAICVIDREGKVVLETMVTTDPDAILKVLKPYLSKLRRAGHEAGSLSPWLQVELKQRGVPAICLEAWHARAALSAMRNKTDKADARGIAHIMRAGWFREVHVKSEESYRLRLLLTQRRNLKRKFLDIENAIRHSIKTFGLRIGRVGRGQFEARVRELVADDSLVAGLTDCMLRARAALWQEYPRLHEVVVAIVRRDELCRRFMRIPGVGPISALAFKTAIDDPHRFRHSKTVGAYLGLTSRRWQSGSSIDVQGHISRAGDGDVRHPLYEAANGMLTRYRGFCSLKAWGLKIPKTRGYKRACVAVARKLAVIMHAMWRDGSEFRFKEPKPPVGRTSTAPKLIGAAM

SEQ ID NO: 323769 - protein, 387 aa, unidentified
MQKPHDNSKASPAAFMQDNTLIAVIELGLSNWLVAGLIPGVSREPLKKLEPNPEDLLKLLHGWRDEAIKAGRPITRIAVAYETGRDSFWLARWLRERGIDAHVIHATSVAVSREHRRAKTDRLDTAMLKRGFLGWLRGERGHCTVANVPTMEEEDAKRPHREREGLVHEQTRVVNRMKSALIQFGVRNFNPKLRKARVKLETVRTPEGKSLPPNTIAALRRDMERLKIIKEQIKAIEQTRLQQFEQKPEALANRMVYLLVRIYGLGWETADLLVHELLSRTLRDRKAVARYAGLTGSPDESGSKRREKGLSRSGNARVRKIMIQLAWRMVKFQPDSALVQWFKQRTENAKGSRKPMIVALARKLIIALWRYANDGVIPEGFRLHSAA

SEQ ID NO: 323770 - protein, 362 aa, unidentified
MHNHRTLVGLDVHARSSIAAGLELGSGELRFRRINGPPRSVVSYLEQLPGPVLATYEAGPCGYGLAREAAGRGIEVRVCAPGSVPRKPSERIKTDRRDAERLVRSLLAGELSFVRVPTVEEEQFRDLARCREAARVDLMRGRHRLSKFLLRRELEFPGPGGSWTEAYWKWLRSLQFSDHPSRSVFCDYIAGVAFGEQRRGGLDTQIEIAAPESPWARTIANLRCLRGISTVTAYGVCCEVGDFRRFEHPAALTAYLGIVPSEHSSGEQVKRGPITKAGSPHARRLLVEAAQHYRHKPAIYKTLAARQRGQDPRAVEIGWRCQQRLHRQWQRLRLERGKPGNVVVIALARELANFVWEVGQLT

SEQ ID NO: 323771 - protein, 327 aa, unidentified
MEVLYPRCAGLDVHAGSITACARVAAGVHVTYEHRTVPTTTRGLLELAEWLTAHGCTHVAMEATGVYWKPVWHVLEAHFTLVLANAMHIRNVPGRKSDMNDATWIADLLAHGLIRSSFVPPAPIQELRDLTRTRRQLVHEVARHVLRIQKTLEDANLKLTQVMSDIVGVSGRAILNALIAGETDPDRLADVTRGRLKATRADLVDALHGRITDHHRFMIKLHLGQIDALETAITAIEARIGDALGPFRAAISLLTTMPGISETTARVLVAEIGTDMTRFPSVGHLISWAGFCPRLDESAGKRRSTRTRQSAPWLKPTLVNAAWAATK

SEQ ID NO: 323772 - protein, 338 aa, unidentified
MDIVKVFVGLDYHMDSVQVCVLDEAGKMRCNRSVPNDAGVIFQIAQAYGAVQAAALEACCGAANLAEELVAKGWSVSLAHTGYVARMKQNPDKTDYGDARLLADLLRVGYLPKVWLAPDRLRRLRRLVRHRQDFVDQRRDIKLRIRALLRENRIKSPVGMSPWTKAWLAWLETEAPLQEEDRWMLENHLMMLKLTGEQISRTEEQLERWSADDAVIQKLRTMPGVGLVTATTLRAEVGHFDRFQRGKQLAKFCGVTPQNASSGSRQADAGLIQTGNPQLRRVVVELAHRLINRGPERWCQLAGKLLKNGKKKNVVVSAIANRWVRWLHHQMQPEALSI

SEQ ID NO: 323773 - protein, 343 aa, unidentified
MPTSTPSPPRYHLVVGVDSAAQTFTTVWMTPDTAPGRPVALDQTPQGFAALQARLLTTGHAAADILVVIEATGSYWVALATTLAQSGFAVAVINPDQAHHVAKALLQRAKTDAIDARTLARLAATLQPAPPPPPAIYTELQQRLAERDARVGLRQQVRNQRHALVQLPVVIPAVRARMEELIATFDAQISAIAREITQILPQDAGWAANADLRVSIAGIGVLTAAWLLVTTLHVTIGATPEAVTAYAGLAPVPTESGTSGRGRGASGHGGNKRLRTALYRATLSATRYNPPIKACYDRLRAAGKPTTVARCAAARKLLHLAWAVVRKGRAFDPLYAQQRQEAA

SEQ ID NO: 323774 - protein, 355 aa, unidentified
MNQEKYIGMDVHQATISVAVRDSSGKLIMECILETKAATILEFIAGLRGTLSLTFEEGTSAAWLHDLLKPHVSHLVVCDPRRNALLKDGSKSDRIDARKLAELLHGNKLHAVYHGEHGLRTLKELGRSYLTITKDLTRVMSRIKALYRSWAIPCSGATVYAPRHRAEWLAKILEPGVRLRAERLYQQLDLLQPVRQEARRDLLVESHKHHAVKLLRQIPSIGPIRGALLVALLQTPHRFRTKRQLWAYSGFAVETHDSGEYRFVRGKLVRNRERITVRGLNHNHNHDLKNLFKGAAISAASRPGPLCDFYVALVEKGIRPTMARLTLARKMAAITLTIWKKGVEFDAKQLNRQAA

SEQ ID NO: 323775 - protein, 442 aa, unidentified
MIDTNRSPDLVIGLDRSDRKADLHFIDTTTGQTRSETLASSPENLRQWLLDLRQRHPKASVAICLEQPAGHLIPFLETYNWITLYPINPISLQKYRETFVTSRAKDDGKDAQYLAELLLNHRHKLKPWQPQDSQTRLLQQMVSHRRAVVDERTALTNRLQALLKAYFPQALELCGEDLWRPLATAFLLKWPTLLAVQKARPATLKQFYYLNGSRSQKLIEQRLKLIEQAVPVSDEPALNLSFAMRVQLVCRQLQQVVRTIKQYDEQIAQTFAQHPDRQIFTSLPGAGPVLAPRLLAAIGSERERFESAANLQRYTGVAPVTKQSGKMRYVHRRYLCPLFERQSFHEYAKESVLWCRWAAAYYLDQRTKGKPHHTAVRALAFKWQRIIWRCWQNRKPYEEEIYEAALRKNGSKLVSLFDRIEVGKNPVKNPAKPLEKTDAKKI

SEQ ID NO: 323776 - protein, 366 aa, unidentified
MKKIAYVGIDYHQAFLAVVVLPEGVALPHHRVQLDNDPKKIKKYMEKLSEQFDIKTCYEASSCGYVFHRQMQGWGYPCQVVAPSKIPTKPGDRVKTDFKDAENLAYQFRNGSLTFVHVPTSDQEAVRTLIRCRHAFKDDSKKIKLRIFALLKTLGFHYPRSNWTKSHQAWLASLTLPALSQQVLTEYRTHLEFLNCRIADLDKEIGKLAESAPYAEAVKALASLRGISTLSAMTLISEIVDFRRFPTAKALMAYLGLTPSEYSSSAVKKYGGITKAGNGTCRRMLVECVQHYRKPPVPTAAFRKKCEGQPAERVQKSIKCMQRLHKRYWALAHRKPQNVALTAIAREFAGFIWSFMQPKEMLAQTA

SEQ ID NO: 323777 - protein, 459 aa, unidentified
MENKFYLGIDVSKGYADFTILNGNKDVVENNFQLDDTFEGHNQLFKILSGFFAANADAHLYAAVESTGGYENNWFNCLSKFQAQFNISVARLNPFGVNYNSKATLERIITDKQSAKNIAGYMISHPKKVNYQKEDYFAAERRQFTFIKMLTKQRVQLLNQLESFLYIANTEILSYCKDGVRLWVLKLLKQYPTARHLAKAGVTTVSKIPYVTKERAEDLVANAKRSVASALDDTTAEVIRSLTIQIISLSKLIALQTKQLEKNCNLPEVELLKTFPGIGTYSAIGLMIEIVSASRFSNVKKLASFFGIHPVFKESGDGISGFKMSKRGRKQPRQILFNVARMSLIHNPLIKEIYASHLKKGMSKMSAIGALMHKILRIIYGMLKNNSAFDPKIDKKNSNKIVNAKPNGKQNKERRYLKFNKNAPISRRQSKKRKEQNSSQDEISSNTGSSSDSFQITSL

SEQ ID NO: 323778 - protein, 355 aa, unidentified
MMAETAVTGGVDTHKDFHVAAALDQLGRLLGTEQFPTSAEGYSQLEAWLRGFGELSVVGVEGTGSWGAGLSRFLRRQGIEVREVNRPNRQRRRTGKSDPADATSAARSVQSGEASGLPKAGHGPVESIRVLRMTRRSAVKSRTQALNQVKAMIDTAPDKLREQLIVLPNRTLVTTIRRFRSSGAPELVPLKISLKLLAGRILELEQEIAQLDDLLQDLLQSTAPRLLAVRGVGPEAAGALLVAAGDNPQRVRSEPSFASLCGVSPLDASSGRQQRHRLNRGGDRQANCALFRVVLCRLAWDQRTKDYMARRVGEGKTKKEVIRCLKRYVAREIYAAFQLDLRCESPGFPAASIAA

SEQ ID NO: 323779 - protein, 337 aa, unidentified
MTDVYILAIDLAKRSFQVCATDRGGAVLFNRMVSRSKLELLLKAQTPGIVAMEACATSHYWGRFAQDHGHEVRLIPPIYVKPFVKRQKNDAADAAAIAEAALRPNIHYVSVKSAEHQARAVAFRTHQCFVGQRTQLINALRGHLAEFGVVVAQGPANLKSVTGLLAGDAVDLPDGVKDIARLYLDQIEALTSRIDELTLGMREATKANDEMRRLCTAPGVGPVTAGAIMAFAPDLKTFSSGRNFAAWLGLVPRQRSTGGKTRLGGVSKMGQSDIRKLLIVGAMSRIRWIVRKGVLPDNWLGRMLGRKPRMVAAVALANKMARTIWAMMTREENYRLA

SEQ ID NO: 323780 - protein, 433 aa, unidentified
MHEVEDEPLFAERAAGIDIAKAGIEVTVRVPSDTRAGRRQQETRSFATTRRELLSLADWLRAWGVTKVGMEATGDYWKPVYFVLESQGLGCVLYHAAQVKALPGRPKTDRADSVWLARITERGSLPSSFVPPAPIRALRTHTRYRRHLTQARTAEKQRVEKLLEDGHLKLSAVISDIHGVSGRAMLEAIIAGERNTAALAQLARGTMRGKIARLEQALDCSFLTEEHVAILAMMLAAIDSFTTQIDKLTARIEILAEPYWRQIQQLDAVHGAGVTSAQDVIAEIGVDMTVFPTAAHLVSWAKWCPQVSQSGGKRKGSNAAGRGNPYLSAALGEVSMSAARTQSFLGAKYRRLVKRMPKKKALVATGNSVLTIFHALLSDPAATYHDLGPDYYEQRASTRHQARNHVRSLERLGYHVTIQAINPDTGELLIATA

SEQ ID NO: 323781 - protein, 430 aa, unidentified
MKNASRSNRKLEAITYKTIVVGIDIAKSRQWARFVDYRGMEIGKAVSFNNDRDGFEYIVSEIRTKIKTFDAEKVIVGMEPTGHYWKPLANYLMKQNIAVVLVNPYHTKKAKELDDNSQTKSDKKDALTIAKLVKDGRYYDTYMPHDKYADLRVLTTARISLNDKKSAIENKITAVLDEYFPEFTTVFKHPYKGKAAVQILKSCPLPKDIKALGIDGVLTEIRKAVKRTVGRKTAGKLVDAANISIGVDYGEAEATFKIQKLVEELELVNKQLEEIKERMGNILNDLDIGKYLLSVNGLGVVTVAMLLGEIGDPLRFDDAKQISRLAGYNLIEDSSGKNKSGTAISKRGRKNLRRVLYQISLTMVATNSEMKKLYHYLKTRKENPLKKMQALVVIGKKVLSLIYALAKKKEYYHSDRVLGAVRQSQLLLAA

SEQ ID NO: 323782 - protein, 396 aa, unidentified
MNKRVHYIGLDVHKETIAVAIAPGGDSEVRLYGIIGGTLDALDKLIKKLQQPGIELHFVYEAGPCGYVICRHLKKKGLHCEVVAPSLIPRKASDRVKTDRRDAQQLARLYRAGELTTIYVPDEEDEAVRDLVRARNAVVIDQRKARQRLKGFLLRLGFRYTGKSSWNDAHQRYLARLTMPRPQQQIVFQEYIEAINVESQRLERLTRAMENALPGWKWEPVVRALMSLRGVQIIVAMTLVAEAGDLSRFDDPRQLMAYFGLVPSEHTSSDKRWLGGITKCGNGACRRVLTEAAWQYRLAPKVSPQLRVRQEQQPKVIRDISWKAQQRLHQRYKVLSAHRKKSGVVVTALARELTGFVWAIACQLNATHKLKERKPIQPAAISGRDYKLNPQKKFKK

SEQ ID NO: 323783 - protein, 341 aa, unidentified
MNSCKVSANLLSVGIDVSRDTLMVCEYYNDDRKKINEINNSEASIKKLASRLKNDNFSGKIIMESTGRHHMLGSIIFSKNKLDTRVINPLITKKYSSSSIRKVKTDKRDSEILAEIGIKERSLPEPFKLDKTGLVLRKKMRLIASLSRQLQNLSTCANEHKKTLAGLKCKPSSVEEQIFKTITMFKKQKEQLEKELENDICNLNEKNNEQAKKYNSVPGISPYVASLATLIFSNEYSQSAKQWIAFVGLDISVKQSAKWIGEGHLTKRGNDYLRKRFYSAAWGSTMHNEKFKEYYDYLRSKKNRKHKEALIIIARKLIAILFSMHKNDTVYDPIKPLFITS

SEQ ID NO: 323784 - protein, 392 aa, unidentified
MIYAGVDIAKVDHVVGAIDETGDEVAKPMPFKNSKEGFERCVAWLEGVAETQDDVVIGMEATGHYWQACFSYLTSCGYRVAVINPMQVKAVRKLKSLSKVKNDRIDSVVIAETLRIGNFDETALATDELQSLKTLTRYRQSLKEQIAAVKTHVVCLMDTYFPEYGGIFSNMFGKASLAVLAKCPLPDEIAHVRESTLEKIITEASHGRSGARQAAKVKARAKESIGFTLGSAAASFEVKSYVAQIEFLLARVAEAEARIAALLESIEPLILTVPGISTTTGAQIVAEIGDVSRFRNAAAIVSYAGINSSVNQSGKFELEGGSITKSGSPYLRRALYLAAQGAYRNDSGLRAFYDKKRSEGKCHRVAVMAVARKLCHIIYAILRDRVPFESRG

SEQ ID NO: 323785 - protein, 321 aa, unidentified
MNKSTEIFGIDISKDVFDVFSLEMGHNQFSNNEKGFKQFIKKLPKNSLVVMEATGYYHYCLAQYLYEKGYTVSVVNPLSVKRFIQMKLSKIKTDKSDAKSICEYGRKNEVPLYTAKDKNQAECLQLLRLVDTYIKHRTAIKNKLDGERVLGIPSKAVYRSLNRAVKQLNQEIEVLEERLKTLVKEEQQGQLTLLKTIPGIGEKAAILLVVFTDGFSKFENSKQLCCYAGITPTIRQSGSSVRGRSRISKIGNKKLRNQLFLSSFTACRYNKACRELYERIVGQGKSKKLALLAVCNKLLKQSFAIAKSGLPYNENFVSKLV

SEQ ID NO: 323786 - protein, 417 aa, unidentified
MKTMTMQPYAAFVGIDWADTKHDVCIQSADSLRREFAVIPHKVEEIDAWAQSLHRRFSGPIAIALEFSKGPIVYALQKYDYFVIFPINPSTLAKYREAFQPSRAKDDPTDAELALDLILRHPERFEPLHPQSVEIRKLAALVEQRRRLVSDRVRLTNRLRNTLKQYYPQTLEWFDRIDTKLFCNFVERWPTLIQVKRARTTTLTTFLRAGHTRNPALLATRLASIRSSQHLTLDEAVIAPNKLHALMLVGMLRVILDAIRTYDQTIAELAPEHDDYYLFSSLPGAGPSLAPRLLVAFGEQRNRFKNAAELQKYSGIAPVTERSGTKHWVHWRWRCPNFVRQTFVEWAAQTINKSYWAGEYYRQQREKGSAHQSALRALAFKWIRILYCCWQTKTQYDETTYLKALQRRGSPLVAKAA

SEQ ID NO: 323787 - protein, 341 aa, unidentified
MYSIGLDISKASISIHVPLNSLDLEIENNLKALKSFYVKLKKLYKKDLDKLVFVYEPTGSYSAILTKFCSMKNIKAFIINPKQSSNFAKALGHRSKSDKIDALMLSRAITVARKDEIKVPVVNAAAETIKELMSYYMFTLKQRVAINNHHEALKAKDGNSYALKDLIKRHEEMKIKEAEILNKIKNIIEEDENTSQAYSNIKTIPGLGEIAGIVLIHLFIRYPKANQRQIVSLTGLDPVIKDSGTSVKSKPRISKSGSRLYRGVLFMATMVSINYNEQMKVFYNRLKDNGKHSTVAQIAVMRKLIIIAHSLYKNNTTYQAEVYKKACGEKQEISTNKELVA

SEQ ID NO: 323788 - protein, 371 aa, unidentified
MRFYQGQHRFYCGIDLHARSMHVCVVDHAGDIVFDRNLATRPEALLRALEPFRDGLVIGVECMFAWYWVADLCVAHDITFVLGHALYLKAIHGGKAKNDRIDATKLARLLRGGNFPTAYAYPKGMRETRDLLRRRTYLVHKRAELFTHLQILNAQYNLTPFPKKLCYAANREEMKIAERFGDGSVQKNAAANLAVIDRLDEVISDLELYLTRAAKIDSVQTYQRLQSIPGVGKLLGLILLYEMHEAQRFDSAGQFLSYARLVRCVHESAGKKLGTGGKKIGNGHLRWAFAEAACLFLQRSERAKKWKERQAAQRGSGKTMAILAARLARAVYHMLRKGEAFDEERFWAGDTRRTTTGSSSLFRKEAQHASA

SEQ ID NO: 323789 - protein, 341 aa, unidentified
MKNKSFIGIDISKNVIDASIFCEGTPIKDFPHDVFNNSRKGFGEMCTWLKKNHVVLSNCLFGMEFTGSYSMELEKFLNARNYQFCMLSTHVVKHYPMGPKDKSDKIDSAKIADFLYRYNGTECVKPYNMPDKTMQRLKALMNERKFLVEQRTCFMNRRQLCITKEDAQLYDGYIKKFSRDIENIELEEQKLLATDDSLLSTYKNLLTIPGIGFVNAINVIVITRNFTAFETARQYASYVGVAPHFRTSGTSVKWRPRPSARCDGQAKADLSMAATVAVQYDAELQSFYNRKLGGKQDSDTKRKALNAVKFKLVLRMFAIGKQNRKWEPLDSKSSNEKLAIS

SEQ ID NO: 323790 - protein, 344 aa, unidentified
MSGAYEGKQIVGMDLHRRRSVVVRMTDTGERLETVRISNDPDYLRAVMARAGDAPEVVLEATYGWYWAADTLAELGANVHLAHPLGVKMFGLRRVKNDERDAADLADLLRMGRLPESWIAPPATRELRGWVRHRAKLVGLRSSVKNQIYAVLAAAGVAVSMSDLFGVAGRQLLATTLLAVESRSRVDSLLRIIEALDFEIDLYARLIAGRLRTDPGYHAIQTIPGVGPLLGAVFVAEIGDISRFQRPEQLASWAGLTPKHHESDTTVHRGRITKQGSRLVRWAAVEAVQRVPAHTRFGQRRDRIAQRRGRNIGVVAAARDLITLVFYGLRDHHIRCLPSGTGAA

SEQ ID NO: 323791 - protein, 389 aa, unidentified
MKIYVGIHIAKLNHFAAAISSDGEIILEPFKFTNDADGFQLLVSKLESFDKNSIIIGLESTAHYGDNLVRYLVAEFYQVCVLNPIKTCQMLKNNIRKTKTDKVDTFVIAKTLMMQDDLRLVSFYDLDMMDLKALGRFRQKTIKQRTRLKIQLTTYVDQVFPEMQYFFKSGLHQHAVYAWLKEAPSPKEIASMHMTHLANLLKVNSHGHFTKEQAKELRVLAQKSVGANDSSISIQITQTIQQIELLDSQLEKIEAEMTDIMRFNDSVIMTIPGIGYINGGMILGEIGDIHRFSNPNKLLAFAGLDPSVYQSGNFQAKTTRMSKRGSRVLRYALVNAAWNVVRNNATFKAYYDAKRAEGRSHYNALGHCAGKLVRVIWKMLTDEVEFNLE

SEQ ID NO: 323792 - protein, 413 aa, unidentified
MFRQMKQEIRGSQEYLLVGVDIAKDRHDAFFGSAGGKTFLKKLVFDTTREGFEKLRLHADSIRVQHGLKKIAFGMEPTADYHKPLGEYLIQQGHRVVLVAGSAVKKNRELLDGRWDKHDAKDAANVADLVGQGKCLFYEFPSSDLRELRSLLSLKRKLKKTEQGYRVRIRNHLIAQYFPELDSYFTCGEGPAVVKWCLDPKKLATLSFEEFARMVSSRNGGEKQQRRLREIYEKAASSIGCEVHPAVAFEAQTLLETMGRLHATIIETDKKIAEVCTRFPEYAFLLTIPGFGQDISAKVLGAIGNTHRFQNHRQVLKTAGLDLSADRSGKRSDVTPVISKRGKADLRYGLYQAALVAPVKNPCFMRYFSHKLEGRQKEKGIGTKMRVKLAAKMLVIAWTLMKKKEVFDPGCVK

SEQ ID NO: 323793 - protein, 340 aa, unidentified
MQIATIGLDIAKNVFQVHGTGEEGQVLLRRKVRRDQLLTLFSGLEPCLIGMEACATAHHWARELKALGHQVKLMAPAYVKAYVKRNKNDAADAEAICEAVRRPTMRFVAVKSANAQSILILHRSRHLLVRQRTAQVNAMRAHLAEYGVVAPKGREHVRELVDVLNRGKDLLPELARQTLILLATMIEGLSMQIRKIEVALMAWHRADPTCRRLETIPGIGFITATALAATVSDAKVFRSGRQFAAWLGLVPKQHSSGGKQRMGGISKMGDRYLRHLLVIGATAVVRFTGRKKTTISIWADQLLERKPARLVTVAVANKMARIAWAVMVREENYRSVSAGA

SEQ ID NO: 323794 - protein, 416 aa, unidentified
MAPTAYAFYVGIDWGSERHQVCVLDHERRVHGERRVEHSSPGLAALADWLSALAPGQPERVAVALEVPRGAIVDTLLSRGLHVFAINPKQLDRFRDRHSVSGAKDDRRDAWVAAEALGTDRWAFRRLEAEHAVIVQLREVTRFDEDLQQELTRLANRLRDQLLRYYPAVLRLAPAADEPWLWALLELAPTPAAGAQLPRARVTRLLERHHLRRHTPDDVLAALRAPALLLTPGTVEAAGRHVALLLPRLRLVHAQRAECAGHMDRLLAALQAETPPGPHRKHHDREILRSLPGVGRLVAARVLAEAAPLLAARAYHALRALAGCAPVTRQSGKCRGVRMRYGCNHHLQQAVYHWARVSPQCDLHSRAHYTALRQHGHPHPRALRGVADRLLAIFVAMLKTDTLYDAARPRRRELAA

SEQ ID NO: 323795 - protein, 331 aa, unidentified
MSHIIGIDVSKATLDCAYLRDPDQVKAKRKSCQNEMDRFESLITWAQALTGLPCQSLAFVIEPTHVYHEQLVQFLHSKGTTVYLVNPGRVRKFAEGIGILSKNDVIDADLLARYGLMAKKLIVFEPAPQEISDLRSLLNRLDVLERNLRRELNRLEKAGKSLTFHRLEQQSITRSIKRHEAEIVCFKNAARDCVNASPWLQRDVELLGTVPGIGERTAWLMTVILSSRQFLSAAEVASFLGLNPIEKRSGKSEYRKPRLSKSGSSHYRQALYFPAMVASRKNPDVRALYERLVDDGKPKMCALGAAMRKLVHICYGVYKNQQPYQPQASLS

SEQ ID NO: 323796 - protein, 363 aa, unidentified
MYQSNNTELSSPEETRLEFNPGKAAIKLGIDVHQEFYVVAMQVGGTQPKPAQRFRKEAFLRWAAKLARTHRGPLHAVYEACGFGFGLQRQLSALGIECYVVCPQKLDEHNKRVKTDSLDAKALCLKLDHFTQGNRDALALVRVPSEEEEQLRAVHRQREQLVKARKQLEAQGRSLMVNHGIEPIKSWWKERAFAALLVPEWMKELLSNSQPILLALEEKIRALTVQLQGAAAPNQARGLGLMTSVVIDREIGNWTRFKNRRQVGSYTGLCPGEHSSGKTRLQSCVTKHGNPRLRAALVELAWRLVRFQPNYKPVVKWRQILAKGALATGAARKKAVVAVARQLAVDLWRIRTGRVSAAALGLI

SEQ ID NO: 323797 - protein, 409 aa, unidentified
MRLFVGLDVSSFDMKVCILNGEGKKLNAFTVTNDLPGATLLKERLLDCIGDQEIDVLKIGLESTSVYSFHPSMFLHHDEDLKVFGAKVFVMNPKQIANFKKSYSDMNKTDEIDAFIIADYLRFGRNQMSVVKESQYVALQQLTRSRYQLIRMMTKEKQHFLQHLSYKCNTFSQEVDSSVFGNAMMELFLEKYSLEELAHLPLEELAAFLQEKGKNRFGDPKCVATSIQKAVRSSYRLDKVVEDSMDVILGTSIEVIRTFQKQIKEIDKAIKKLMAGLTHTLESIPGIGPVFAAGIIAEIGQIDRFDDESKVAKYAGLYWRKHQSGRFTAEDTSLSRNGNHYLRYYLVEAANSVRKQVPDYRDYYVKKYSEVPKHQHKRALVLTARKLVRLVDALLRSHQLFTPERGVKI

SEQ ID NO: 323798 - protein, 337 aa, unidentified
MDRQYVGIDLHRRRSVVVRVSATGEKLSCVRIANDPMAIAAAVAEAGPEPEVVIEATYGWYWVVDLLQANGAQVHLANPQGLNWGQRRVKNDERDAMDLADMLRLGRLPEAWIAPPATRELRELVRYRAKLVALRSGLKAQVHAVMAKEGVLPAQGRMFGPAGNAQLDAMAMAHSYITRVASLRDLIEVYDREVGTLEGQIHRQLRGHRGYQAIHAINGIGPTIAAILVAEIGDVTRFRSAEALCSWAGLTPKHRESDTTVRRGRITKQGSKLVRWAVIEAVSRYHGGPKLAGDFRRIAERRGTNKARVAVARKMLTLVYYGLRDGEIRCLARVEAA

SEQ ID NO: 323799 - protein, 340 aa, unidentified
MKLYGAIDLHSTNNVTVVIDEQDRVVYQKRLPNELALIRKELSVYQSELQGIVVESTYNWYWLVDGLMEQGYRVHLANTAAIQQYEGLKYTDDHSDARWLAHLLRLGVLPEGYIYPRAERPVRDLLRKRSQLVRQRTTHLLSIQNLLTRNTGRSLSANRVKGLDAQQVDELLPDRDLALAVKANLAVLSSADQQAQLLEQTVMQRVKLRPQFCFLKSVLGIGEILALTIMLETGDIRRFASVGNFASYCRCVGSQKISNGKKKGKGNTKNGNKYLAWAFIEAAHFAIRYNAKIKSFYERKKAKTKIVVALKAVAHKLCRACYYIMRDQVAFDVTKAFGPK

SEQ ID NO: 323800 - protein, 342 aa, unidentified
MEYYVGLDVSLKQTSICVVDQTGSVMREGVVDSDPEAISVYVRSKAPGAVRIGLETGPTSTWLWTELKQLGLPVICIDARHAKAVLKMQINKSDRNDAIGIARIMQTGWFKEVHVKDIDSHTVRALLASRALLVKIKRDLENHVRGLLKNFGLVIGRAKFNVFAVRAEELIEGRPELIAAIRPLLEARNAVEQQVSELDRKVMKLARHDAQVRRFMTVPGVGPITALAFKATIDDPARFARSRSVGAYIGLTSRRHASGEVDWSGRISKCGDAMLRSYLFEAAGVLLTRVPTWSAVKAWGMKLAKRNGLRKAKVAVARKLAVILHRMWIDGTEFNWSKEIAA

SEQ ID NO: 323801 - protein, 341 aa, unidentified
MSEVSTIGLDLAKNVFQVHGADASGAVLVRKKLRRDQVLKFLAAQPACTVAMEACASSHYWGREIAKLGHEVRLIAPDYVKPFVRRQKNDAADAEAICEAAQRPTMRFVAVKSEEQQAAAVVFRARDLVVRQRTQTINAVRGHLAEFGIVAAKGPFHVAKLVAAIEDDRSGIPKMARPILRLLVEQLRSLDERVALLDRELARRAKEDAEAKRLMTIPGIGPITATALAALAPTAQAFKRGRDFAAWLGLTPLQRSTGGKQKLGETSRMGERTLRRLLIIGASATVRWAIRKGSTADPWLARMLNRKPPMLVIVALANKTARIVWALIARGGTYRAPAAAK

SEQ ID NO: 323802 - protein, 316 aa, unidentified
MICGVDVSSERLDAQLGRQGVCKSFSNDQAGISALADFCREHKVHLLAMEASGGYEQLAFGLLWSMGIEVAIVNARSVRRFAQAMHLFEKTDRIDAGVIAWYAETKKVVATPPGSVQQQQLKALVTRLRQLTEMRAMERNHRALVTDSTVLASLHQVLLLLNRQIKDLQKRIADLISSDPVWGKLDSTFRSIKGVANRTVACLMAELPEIGTLSNKKIAKLAGVAPLADDSGKHKGKRRIYGGRQEVRSILYIIVTCVSHHNKDFSDFKQRLTAAGKPKKVIRIALAHKLLVRLNAKARDMRQTLAQPAAPITGNA

SEQ ID NO: 323803 - protein, 349 aa, unidentified
MSETKLVAVDLAKRVYQVAAFDEHGKVLYNRKYSAAKFALQVHQLEPTIVAMEACATSHHWGRRLQALGHEVRLVPAQHAKAFRRVHKSDGHDVISIAEAARRPNIHFVPVKTIMQQDLQVLGRVREQLMSTRTGVINQIRGLAGEYGVSFGKQRSTLMAELPVALEDADNGLTPVARAALGEQLEQIRYLDERLKGLARQQHELAKQDPAYERLLSIPGIGPTIAPALLASMGHAQHLQSARGCAAWAGLVPKQHGTGGRVRLGHITKNGQRSLRVLMIHGARSVVRWAHRHEHGQSQWIQQVIARAGKNKAVVALANKMMRIVWAVLRHGESFQMSKAFRPQPVPAG

SEQ ID NO: 323804 - protein, 448 aa, unidentified
MSKGKTKNEKVKKISQLTVINPTAAGIDVSDTEMMVAYPTNSEQLEIRAFGCFTNDLHSIANCLKENGVTTIAMESTGVYWVPLFLLLQEYGFEVYLVNAKHVKNVTGRKDDESDAEWIQKLHSCGLLSASFQPDNMERTLRSIVRHRKNLVQTSSTYLNRIQKALELMNIKLHTVISDIDGKTGLLIIEAILNGERNPELLADLRDRRIKASREEIIKSLEGHWTTEHLFELKQCYHLYCTHRQMIEECESEIEKQLVEQIASKNEGLIPDLPKVKRKVSSKHKAPFNLTAYLKELLCVDVTEVFGISELSALTIYSEVGTDMSKWKTEHHFTSWLNLVPNTKISGGKIISSRIRKKKHHAGQAFRIAANSLYNSKSPLGDYYRRIRARAGAAKAVVATARKLAIIYYKMVSNKEAFNPKALEVYQKKYKEHKINQLKKKIALLEAA

SEQ ID NO: 323805 - protein, 402 aa, unidentified
MNAVGIDVSKGKSMVAIMRPFGEIVSAPFEIKHTASDINSLVELINSVEGESRIVMEHTGRYYEVLAHQLSEANLFVSAINPKLIKDFDNDSLRKVKSDKADAVKIARYALDKWQNLKQYNVMDELRNQLKTMNRQFGFYMKHKTAMKNNLIGILDQTYPGVNTYFDSPARSDGSQKWVDFASTYWHVDCVRKMSLNAFIDHYQNWCKRKKYNFSQSKAEEIYGKAKELVPVLPKDAITKLIIKQAVDQLNSASTTVESLRTLMNETASKLPEYPVVMAMKGVGTSLGPQLMAEIGNVSRFTHKSAITAFAGVDPGVNESGTYEQKSVPTSKRGSADLRKTLFQVMDVLIKTHPQDDPVYQFLDKKRAQGKPYYVYMTAGANKFLRIYYGRVKEYLASLPES

SEQ ID NO: 323806 - protein, 443 aa, unidentified
MSFDRLKRTRRRKRLPGHKLKPSRATLFVQNSKPHLSMKPTYFLGIDAAKHKIRAALSDRSEHVLFEKDLSVRATGLRQLLAAIKRQVNAPEQLLVLIEATGLLHLNWSAALTKAGYAVAVINPLIARRLYTLQNSIRDNKSDPIDARGLCTIGLLHGEKLLIHYRFSLRPEQFTLQRAQSVRKALRSALTNLKKTYQSLMDLSFPELGGLLQLDGVGIRQLLIQAPTPAAIAGKRLCTLEKNWMVRPKAAALKALAADSMADPDLAAASAPALVALLRSIATLEARLRLLDQQIQQLARTNMDPQTKALIETIPGFGPVNAAKTLAWLPTEILHSGSNRKVAARLQAFMGNDPRLRQSGQWKGHTKMSKRGVEMLRTAFFQSAFSAAHNDPELRTYYQCKRAQGKTHEVALSHLMRILTRRLVAVLRSGKPYQSHYNLKNAA

SEQ ID NO: 323807 - protein, 350 aa, unidentified
MKRILKQSVGIDVAQKELVVQLGRLYEDLSTEVYAHKCFPNTAKGINTLEQWVLRLTEPTVSIRYVMEATGVYHESLACYLTDHGYSVSIILPNKISNYFRTLSVKTITDKSASEAITLFGLERNLEDWKRPKPVFKYLRQLTRERDQLVQERTMIKNQLHAEKAESDPNPSTLRRIKQRIDLLNKQEGIIKEEIETLLKTEKGLKEELALICSIPGIGTLTAATILAETNGFELVRNKRQLASYAGFDVQEKQSGTSVKGKTRISKKGNKNLRKAMHLPALTAIRHDQRFKAIFARIVSKHGIKMKAAVAVQRKLLEMSYTIFKTRTLYNKNYLVKEKVSEKEYQIQQV

SEQ ID NO: 323808 - protein, 414 aa, unidentified
MILKETICNDPQVCRIVDLPVYYELETNNGNRDYRIQIGGHYMNYNTVYVGMDVHKESFTLCSCKYEDEKASHYQRTPASYKNVLRYLAFLRTIYGEDTRFVCGYEAGCLGYSLYHQLENFNVECVILAPTTMLEQRSKRRIKTDKRDAEIIARSLAQHNYSPVHIPTETDNQTKEFIRMRDDHKAELKKIKQQILSFCLRQGYQYDGSGNWTAKHVKWLRSLKPAGLYKEILDEYLLTYTILTDKLNRLDQRIEELASTEEYKESVSKLTCFLGIKTHTALSVIVEVGDFQRFVSARKFAGYLGLVPGQHSSGDDRNGLGITKAGNTHVRRLLVESAQSYTRGKIGYKSRVLRSRQAGNSPQVINYADRANERLRRRYYKMVLKDGKKYNIAKTAIARELACFIWGMMTDNIY

SEQ ID NO: 323809 - protein, 415 aa, unidentified
MNRRVEKPAGLPIIHDRAAGIDVGARFHVVAIGPDLSDEPVQTFQAFTGDIERMADWLISAGVKTVAMESTGVYWVPVYEVLEDRGIEVIVANAREARTVPGRKSDVNDAQWLQRLHACGLLRPSFRPGRDIAALRTYLRLRERHLEYGAAHIQHMQKALTFMNLQLQHVVSNVTGVTGLNIIRAIVNGERDPQVLATLRDVRCKASSETVRQALVGNYQPEHVFALSQALALYDFYQARIGECDVEIERALAVLNAIQAIPATPLPEPRHKTKQSNAVSFDTRVPLYQLTGVDLTQIHGIGPYLALSLVGECGTDLSRWPTPKHFTSWLTLAGMQDQRGQGAVCAHPKDNQPTGRPFATRCGIGRPNEHGTRRVLPAPGWAHRQGQGSNRNRTQDCGALLQRYEIWLGVPRPWR

SEQ ID NO: 323810 - protein, 450 aa, unidentified
MSKGSGVSRGDKRRNARLAELRRLVPRENAIAGIDLAEDNQAVVVTDHDSKVLARRSPRCKAWQLGEVLDWAVAKAQARGFASVTVACEPTGSRWMHVQQACAERGLNFVCVQTLVTHNAREAEDCTRDKSGQKDAVLIARLTAELRCYRPEVIEEDWAVLRYLGQRRDALVTEAIRCRQQITDRLALAWPAALGTAAAPLDSVTFLACLQVVAGRCDGDPGKLRGYGLAEFTQLVRGVLPRWGGQRACHRIVAAFHAALGDSHGAVPARRRGALKLAGHALADLRRARELQARVGAEMIAQLHVLGIADVLATIDGLSLEVAACILAETGDPARFGSSRALVKHAGVAPCDNSSGNSAGQARISRRGRPVLRKAAWRATWAMIHGANPVLAARYAHLTSRPAGQLAKGQAHIACMATLLRWIYSVVTSRASWDQRVAAGTISHTAAMAA

SEQ ID NO: 323811 - protein, 339 aa, unidentified
MSQVLRSFLPFPDSCKGTSPHQQGRGTKMVERFGGIDVSMDRLDVMVMPDRSGFSVKNNAAGWAELIERLRCSSLTAIGIEPSGGYERGIVRALLAAGLSVRRINPNKLRQFARARGVLAKNDRLDARLIAEYVAIMPTRIVQSDPAAQRLAEVVIMRRQLCDEHVMVENQATHVEDAMLRRLNKRRLARLEADIRLLDKRLAEIVAADPALAHRYQLLISMPGVGPVLAFTLIALLPELGQMSRKQIAALVGLAPYDFDSGKLRGHRSIYGGRMPVRNVLYMAALSACRYNPALRTFHNRLAAADKRSKIIIVAVMRKMITMLNAMVRDRTPWQARLA

SEQ ID NO: 323812 - protein, 381 aa, unidentified
MRNVCGLDVHKDNVFVCIDKENGEKIQFKTGILTKELDALRDTLVANDVTEIAMESTSVYWMPIWRILENDFKLYLVNPYAIKQLPGRKSDIKDAEWIATCLRKELIRGSYVPSSEIQQLRQYNRRIFDINKQSVYIQNKIDAALQRCNIRIGNYISNVRAKSYCEIVDMLSEGKTSPELLIVKVHKRTINKWGRDTILAALEGVVNKTDCRILKQLKEELDMLHRHKVECLVMLRDICMENYKEQILDIQTIPGIGEQGAMQIIAETGVDMKAFMTAAMLVGWAGLKPRNDESNGKFKSRSTTHGNKYLRKILIECAWGASRTQGCFFNKFSYHQTMVRKKNRQKVQVAIARKILVVIWNILEKGVVYSDVLEKDKTKDK

SEQ ID NO: 323813 - protein, 313 aa, unidentified
MTKGRMVVGIDVSKAWLDVAVLDTDEVFRVGNDEAGWTELIERLKGREVKAIGLEPSGGYERGLARGLRKAGLPVRMVNPYRVRQFARAMGRMAKNDKIDAAMIARFTAQLPAREVRRDPLTEQMAELVVARRQLTQDRVRLGNQLEQVRDPILRRMTGQRLRRIEAEILIIGKRLALIVASNASLAAKDRLIQSFRGAGPVLSHTLLALVPEIDDADRREIAALVGVAPFDDDSGKRAGKRAIWGGRAEVRHVLYMAAMAAARSNPTMKAFRQRLIADGKPPKVAIIAIARRMLGILIAMLRKGEEWNPAHA

SEQ ID NO: 323814 - protein, 355 aa, unidentified
MERYIGMDVHAASCTLAVISEKGRKLKDFPVETNGQALVEAIRMIPGHKHLVFEEGLQSAWLYETLNPHVDDIVVAGITTSRGQKSDKGDAYGLAESLRVGSLDKHVFKAPRQFTRLRELSRIHMTLVSDTVRVQSRIKSLYRSRGILVAGMNVYAARHRKEWQKQLPSSNQTRGMRLYTYLDFLLEQKKQAEVDLLREAKKHPIAKILETAPGFGPIRAARLVPIVVTPHRFRTKRQFWSYCGLAIVTRSSSDWIQTAEGQWIKTRVPQTRGLSRQHNHFLKDIFKGASTTVITQRDKDPIYHRYERLLDGGTKPTLAKLSLARMIAATVLRMWKDEKEYDPGRASPPAKTRES

SEQ ID NO: 323815 - protein, 344 aa, unidentified
MGEVITIGLDIAKSVFQAHGVDEAGAVVIRKRVSRAKLLEFFASLQPCLVGLEACPAAHHWGRELQALGHTVKLMPPSYVKAYLKRSKNDANDAAAICEAVTRPSMRFVPIKTKEQQAALMLHRARQLLVRQRTMLSNAIRGHLSELGIVSAKGRKGTGALLEIIGDAKDGRVPPVARGILDVLARQYSAIGAEIGSIDRSIVAWHRSCEASRRLEEIPGIGPIVATALVAEIGDWRAFGSGRNLAAWIGLVPKQQSTGGKDKLGSITKQGNRYLRWLLVAGAMAVIRYAQKHGTLKRPWLGRLMERRPTKLAAVALANKMARIAWAIIVHGDRYRETKPLLAA

SEQ ID NO: 323816 - protein, 331 aa, unidentified
MFPVGIDVSKNTLDLCILYDGIKGRIKTRNIQNNRHSVENILRWLRLQHCGPEDVHVVMEATGVYHERLATELHDAGFRVSLANPHRSREFARGMGIMTKTDKVDAYMLACYAFLKKPHYWEPPAPEIRYLGALLRRRDVLLGDALREEKRLEKYLSTDTPADIISSCRRMAQLLREEVSNIERQIKAHIKASPALRRDYTLLNSIKSVGPQLGMHMLVVLRSHNFASAEQAAAFLGVVPIEKRSGTSVRRRPRMSKIGPPQLRAKLYMSALCGKIYNKRMRNIYDEMCLRGKPKMVAIGALMRKLVHWCYGVLKTGTVFNDEDLKPVLST

SEQ ID NO: 323817 - protein, 333 aa, unidentified
MNSVRYIGMDVHRDTISVAVLDESGRLTMQSVLATRAGAVLDFIHGMRGTLHVTFEEGTHSAWLYDVLVRRVEKLVVCNPRKNALLKSGSKSDAIDARKLAELLRAGMLSAVYHGETSALEVQQIARSYSQLTEDTTRVMARLKAVSRGQAVSCAGKKLYGKRHRDQYLAQVSGGLRRELLVECRKHAAAQWLQSVPFLGPIRAALLIGRVQTPHRFRTKRQFWTYCGLGLETRDSGEYRMVNGQVQRRRKPALIRGLNWNHNHEMKNLFKSTATTASVREGVWREFYLGLLDKGMRPEMARLTLARKIAAITLKIWKKGERFDAEHLKLQAA

SEQ ID NO: 323818 - protein, 394 aa, unidentified
MKLIGIDIGKNKHFFYVMDQQTGEIISQPVSFSNDKEGFDFLVQKIKSYPKDSILIGMEDTGHYHFALLKYLLDLQYTVALINPKTTDFNRKMQGGITKNDKLDTINICDVLDTPERKKQYRITKVNSFDPYEQKQLTRHHHNLKEEKNFYKNRLQKCIDIVFPEFNKLFNSKYGIVYMNILKMFGSAENIANTDIRTIRKCFEIEGRGNRTSLTPERLKERARSSIGISSIAEVIQIKHLSAQIELIEEQLSEIDKKIEEFSIQNNSPILSIPGISHFSGTSILAELGDISNYSKPSQIIKFAGVAPLHYESSQFNAQHTAITKKGSKYLRKTLYQIILPVIRHNPVFNKYYQLKISQGKGHRCAQGHCVRKLLRIIYHLLKTTQQFDSHLLR

SEQ ID NO: 323819 - protein, 330 aa, unidentified
MEIDQYIGIDLHKAFFQACAMTCSGERMWEGKYPRTSEGIAAWRARCSRTCAVAVEATTPTWSFVDQIISDVGSVCIVDTRKTKLKAGYAAKTDRLDARRLADALRRESVVSIYFPPPPIRELRELCRHRLMLTQLRTRVLQRVRALLLRQGLGDPPVRTLRSPAGQRWLDEVVLPPRAHEALRTLRLVERGISEPLAQVETDVRREADADPIVARLQTIRGVGPIVGLMLRAEIGDLARFPTPGHLASYAGLVPRVDRSASHSRNGRITKDGSPWLRWALGQIGLHALRRPDSVGRWGRKLALRKGRMVAQVALARLACADVMETWRQG

SEQ ID NO: 323820 - protein, 412 aa, unidentified
MEVMYRRCCGLDVHKSSISACILVAQSGRPQKQIRRFGCTTRELRELVAWLQEFGVEHVAMESTGVYWKPVWNILERHFQILLANAQHIKAVPGRKTDTKDCQWIAELLQHGLLRGSFIPPVVIRDLRDLTRARTSLSQEHSRIASRIQKVLEDANIKLASVASNTLGKSGRAILAAIISGEESSERLADLALGHLRLKIPQLQAALEGKVREHHRFLLQSLLRQLGFIETEIELLDSRLDQLGQEHPDLAEALNRWTTVPGVDRVAAWSFIAEIGTDCSSFPTAAHLASWAGVCPGNNESAGKRISSKIRKGSPWLRRMACQSAWAAARTKNTYLSAQFKKLAARRGRKCAIIAVAHSILVIGYHLQRKRCVYSDLGGNYFDRLHADGLKRYLVKRLESLGHSVTLQPRTA

SEQ ID NO: 323821 - protein, 369 aa, unidentified
MKNVITYVGIDAHKKDLFIAMLVGDQKTPPVTWTVPNEPNAVRRLVRKLEREAPGPVRAFYEAGPCGYALQRQLTTPRMSCDVVAPALIPRKPGERVKTNLRDSRKLVELGRGGLLTVVRPPTPAEEAVRDLARARDDAREDLQRCRHRLGKLLLRRGLHYPGRNWTQGHRHWLNRLIWTHAAEQAVVDDYLLAIDHTEARLIELDARLAAIADTEPYRTLVGWLRCFRGIDTLTAIVLLAELHDFRRFPSPRALMAFLGLVPGEDSSGEQHRRGRITRTGNTLVRRLLVETAWHYQHRPSVGVALTRRRQGQPSRVIAIADKAQQRLCRRFRRLAERHLPAPKIAVAIARELAGFLWAALHPVPVPVQ

SEQ ID NO: 323822 - protein, 411 aa, unidentified
MNTNPVFLRYLAIDAHKHYVVIGGVNAACELVLSPRRLEWAELEDWLRTHLQPTDKVVIEATTNTWTLYDQVARYAGAVVVAHPPHIKLIGAALVKTDKRDVQVLAKLLALNLIPEVWVPPQPVRELRELTAHRLRLTHARTQTTNRLHSMLQRHNLAAPAGDPFAAQHRAWWEALDLSPTEKLHVRQDLATLDLLNTQLAEVEQELARLSTVAPWAAQVPFLIQLPGIGLITAMIILAAVGDIARFARAKNLVGYAGLGTYVHDSGKTHRHGGITKHGRADLRSALVEAAWVAVRTHPRWQAEFARLSKRMPANQAIVAIARKLLVVVWHVLHDHEPDRHAQPDKVAAKFFVWSRRLGQTYRGRFTPRQFVRWQLMQLGLGDDLTHIRFGGDLRSLPTAEELAALIPTVT

SEQ ID NO: 323823 - protein, 315 aa, unidentified
MSNLSEEIWVGIDVAKARLDVGVGETGETWSAGNDQAGIARTVERLGQLNPRLVVVESTGGLESHLVRELYLAKVPVALVNPSRVREFAKSAGLLAKTDKLDAHLLARFGQAVKPAPTCLPSEAEQLLSAMITRRRQLIDIRTAETNRMSGVHPSMHSSIEHMLTYLQEQIDQLDHLIDQFIQDRPEFKTKNDILQSIPGIGPVTSAILIADLPELGLLDRKKIASLVGVAPYNDDSGYHRGKRRIKGGRPQVRTVLYMATISASRFNPLIKAFYERLLKLGKLKKVALVACMRKLLVIMNSMLRDLKAWHPASF

SEQ ID NO: 323824 - protein, 481 aa, unidentified
MRKTKEKAGVGKGARVAENGLPVVHRRAAGIDVGATFHVVAVHAESDPEPVRSFQSFTGDLHRLADWLVALGVTTVAMESTGVYWIPVFEILEARGLEVLLVNASHVKNVPGRKSDFTDAQWIQRLHEHGLLRGSFRPSDEVAVLRAYVRHRARLVELAASSVQHMQKALMQMNVQLHHVVSDITGATGMKIVRAIVAGERDPAVLAASRNERCKSSEEEICAALTGNYRPEHVFALQQALELYDVYLAKTRACDAKIEEALQPLRRPIHLPAGDPEAKQAPEKPVVRSEARGGRRKHQAPRKNKHDPAFDIARVVAALLGVDLTQIHGFGPNVVLLLIAECGTDMSRWATVKHFTSWLTLAPGCKISGGKVLSAKTRRSANRAAHALRMAAVSVGKTSTALGAFYRRLGARVGKAKAVVATARKLAVLFYNTLRYGISYVDPGASAYEERYRQRSVDNLRRRARGLGFELVTAPSPERVS

SEQ ID NO: 323825 - protein, 420 aa, unidentified
MNTDTNNHNSYSDYAAFIAIDWADQQHVFSLKAADQTKKETGTLEQKPEIIGLWVAKLQERFGGRPVAVALEQSRGALIHALLAYDFIVLYPIHPTTVAKFREAFRFSGAKSDPLDTDQILEILTKHLDLLKPINPDTPETRLLGRLVQDRRKAVDLRTSHIQACLAGLKEYFPQAIELVNGNLSSRLACDFLMKWPTFEAFQQAKPSTLKRFYYGHNIRSPEVIQKVLNLATTAKALTTDPAIVESGSRLSQMYAQLIQTLNPVIEDYDQRIKKVFHDHPEAPLFSKLPGAGPALAPRLLAAFGTDRSRYETAGNVQTFSGISPVTRSSGKTRFVYFRHACPKFLRQTFHEFARLSLPKCQWARNYVEYYTGKGKKYHTIIRALAFKWIRILFGCWKHRKPYDDDQYMQILKKRGSRFC

SEQ ID NO: 323826 - protein, 428 aa, unidentified
MLKINPLSTFYVGIDVSSKSNYVCALDFYKNKYINSSFANNQPGAEELAKKILECLKEHPDLNTIVAALESTSVYSIHIANFLSSCEELMHFKPYVFVLNPKCTANYKKSYIGLGKSDPIDAFVIADYARAGNIETEPWRGSQFLALKRLTRHRLQLVECMTREKTYLVSNLYLKFSELQMLEGDDQPFCDIYGATSSSVLTEYLSPEEIIDSSEEDLISFLAQKSRNRIKDISKTAELLRKAARDSYRLDKALYEPLNVSIASSFNCIETFKKEIKLIDIAIEREIRGLNPNAFIILQSIDGIGPVFAGGIVAEIGDISAFHSSDALAKYAGLMWKSNQSGDFDGEDTPMSKAGNRYLRYYLGEAANSMRKHNVEYGAYYRKKYNEVPKHQHKRALALTSRKFVRLVYGLLARNQLYSGVSLDTSNE

SEQ ID NO: 323827 - protein, 384 aa, unidentified
MKKDNILFIGLDTHKVETQVSYTLDHRTAEINDLDRIPTTKSAITKLARQLQSKYPHATLHFVYEAGPCGYWIYRLLTSLGHFCYLVAPSLIPKKPGDRVKTDKRDAQNLARLLKNNDLDPIYVPEPEDEAIRDLSRAREVAMRDLNDAKHQLKSMFLRNNIRYKGSDNWSLKHLRWLTEIVLPHPCQQIVLQEMIQTISERITRLKRLDNELTHQVKQWRYYPVVKAIQAMRGVRLLIATGMIAELGDLSRFDTPRKLMKYVGLTPSEHSSGEKRRLGAITKCGNGRARRLLIEGAHSYRHAAKVSKEMQLRQEGLPKTIIDKAWEAQLRLCRRYQRLIMRGKPRNVVITAIAREMIAFIWSISREVVLPRIDPRTRLSRVPA

SEQ ID NO: 323828 - protein, 336 aa, unidentified
MSNVTTVGIDLAKNVFSVHGVDSSGHVLVRRTIGRGKLLSLVAQLPPCVIGLEACSGAHEWARQFRQLGHDARLMAPKFVTPYRKSGKNDGNDAEAICEAVSRPSMRFVPVKSIDQQAVLTLHRVRQGFIEERTTTINRIRGLLAEFGVVLPQRAIEVRRGAAACLDRLPVLVSNAIRDLLDHVQALESRVVQYERSLESHTRADPRAQRIQSLSGIGAVSASAIVATVSDAREFKNARQFAAWLGLVPRQYSTGGKSRLGHITKRGDAYLRTLLILGARSALRTAAKRADRLARWALSVKQRRGYHRACVAIAAKNARIIWALLARNEPLRLATA

SEQ ID NO: 323829 - protein, 451 aa, unidentified
MSRGSIKPAGLPVIHDRAAGIDIGARFHVVGVAPELCDEAVQTFQAFTGDIERMADWLMSLGIETVAMESTGVYWVPVFEVLQGRGIEVIVANAREARAVPGRKSDVNDAQWLQRLHACGLLRASFRPDRAIAALRAYLRLRERHLDYSAAHIQHMQKALTLMNLQLHHVVSDVTGVTGMKIIRAIVGGQRDPDVLATMRDVRCKASTETVRAALVGNYQPEHLFELTQALALYDVYQERLRECDAEIERTLAELNADRPCPAEPLPKPRHRTVQPNAVNFDTRPPLYQLTGVDLTQIHGIGPYLALRMIAECGTDLSKWPTAKHFTSWLTLAPGCKISGGKVLSAHTRKTTNRVSAHLRLAAVTVGRTNTALGAFYRRLAARVGKAKAVTATARKIAVLFYNAMRFGINYQDPGADHYERHYRDRVIKQLHRRAAALGFTLQESASPSVS

SEQ ID NO: 323830 - protein, 414 aa, unidentified
MHIIIWEVRVMYNAVGIDVSKGKSTVSVLQPGGVILRKPFDVRHSHEQLNELAEYVLSLDGDTRVVMECTGRYHQPVLNALSGKDIFVSAVNPHLIKNFGINTLRKVKSDPADSKKIARYALDNWADLRQYSAMDTIRTQLKTLNSQMDFFMVQRTSAMNNLISLLDLTYPGINDLFTSPVRNDGHLKWVDFISVFWHVECVSKLNLKAFAQRYQAFCKKYGYRDRVGKADQIYAYSLDIAPSVPKDNTYKNVILIAAQQFNQLSASVEHIRNEMDKLASTLPEYETVMSMAGVGKTLGPQIIAEIGDISRFTHREALTAFAGVDPGVSSSGKRNTRSNRSSKVGSSRLRKALFLVMSALLQTKPENDPVYKFIDKKRSEGKPYLVYMTAGANKFLRIYYGRVKACIAAQSESE

SEQ ID NO: 323831 - protein, 414 aa, unidentified
MVICRAKYHNNTGGRCGRPSLWAGIDAGKLDHHCVAIDASGRRLLSQRVRNDEAALVALIEDVIALADGSSVQWAIDLNAGGAALAIALLLVRDQDLLYIPGRIVHHAAAAYRGDGKTDAKDAAIIADQARMRTDLPEFRHRDETTVELRTLCARRADVSADRNRALNRLRAQLLEYFPALERAFDYSHRKAALILLTGYQTPEALRRIGRTRLENWLRDRHAYNPGAIVSRAMEAANAQHIVVTGQHLAAVMVARIAQQILDIDAELADLDDMIEERFSRHHQASVIRSMPGFGPLLGAELVAATNGALDSFPSADRLAAVAGLAPVPKDSGRITGNLKRPRRYDRRLLRVFYLAATNSIKTCPESRAYYDRKRAEGKHHRQAVLSLARRRVNVLWAMHRDNTTYKSTAKTAA

SEQ ID NO: 323832 - protein, 345 aa, unidentified
MAMTIVESRAVTGGVDTHLDVHVAAALDSIGGLLGVEAFPTTTAGYEALLEWLSSLGSVAKVGVEGTGSYGAGLTRYLQDAGIAVVEVNRADRQDRRRQGKSDPLDAISAARSAQSGRAAALPKGRDGEVEAIRTLLVAKRSARRDRISAVNQLRGLLSSGPDDLREHFAHRNAAALVSQAAALRPRAGDAVDQATRFTLRELGRRARSLDQEIARLDQLIEPLVAKRAAGLLSLFGVGPDSAATLLVAAGDHPERLRSEAAFAQLCGVAPIPASSGKVVRHRLNRAGDRHANQALWRIVFVRMGSDPRTRAYVERRTAEGKSKLEIVRCLKRYVAREVYPYIRG

SEQ ID NO: 323833 - protein, 470 aa, unidentified
MAERQVSALEPKPNRRQKRNRQHPIWTNNPGLDKVHTDAAGIDVGNSEHYVAIAPEKASEPVQRFGCFTGDLRRLACFLKVHGIRSVAMQSTGVYWIPLYDVLEQEGFEVYLVNARDTRNLPGRKSDVQESQWLLKLHTYGLLRNSFRPTSEIRTLRTYWRQRAEHVQGAAESVNRMQKCLTQMNLQLANVLTDIMGQTGQKILRAILAGERDAEKLADMRDYRVKASREELVASLTGNWRVELLFTLKQEMDRYDFCQRQIAECDAQIQPHLDTLPSRLKSNNGDAVPVAAPIRKKKAQGNSPRFALDKELVRIAGVDLTRIDGVNVMTAQTVISEVGLDMTRWKTEGHFASWLGLCPSNAVSGGRVLRRDTRKIVNRAATAFRIAASTLRLSNSYLGAQFRRFRTKLGAPKAITAMAHKLAVLFYRMLRFGQEYVDRGQKVYDERYRQHQLSLLNKRAAQLGFAVVPT

SEQ ID NO: 323834 - protein, 359 aa, unidentified
MSRDVKYIGMDVHKEAIVIAVRNAGGKLVMESIVETKASSILQFIHGLRGELHVTWEEGTWAAWLYDLLKPHVHEVLVCNSRRNALMKEGSKNDKVDARKLSELLRSGMLRPVYHGENGLRTLRELARTYQTISKDLTRVMSRVKAIYRGWGIPCAGTQVYAPRYREEWLQKIEQGGVRRRAELFYEQLDGLQALRRKVRPELLAESRKHKATKLLRQIPCIGPIRAARLIALMQTPHRFRSKRQLWTYSGLGIETHDSAQYRYVDGQLQRSKKPQQIRGLNQNHNHEMKDIFKGAATRASCGVSPFREFYVGLLDKGMKPEMARLTLARKIAAITLTLWPGFMPWWWPIGSCDARVRG

SEQ ID NO: 323835 - protein, 385 aa, unidentified
MNSAAFIPMEYDIFAGLDVDKRRIAATFTDHHGGMRSVGMPYKVDHLVNYVRKHFPDKRVAFAYEAGPTGYGLHDGLAAHAYRCVIASPAMIPQAPGQRVKTNRLDSRKLAESLRGGQLKPIHVPSGPYRELRHLTQLRDTFVSELVGMKQRIKSLLLLEGIEFPPAPAGSQWSRIVKQQLRRLSCAPTVRFKLDQLLDSVEFTEQQAVKTTREMRRFCQTEPELARCLTYLRSISGIGWIVGTQVLARIGDWRELKNVRQLAGFLGLVPTEHSTGEKTVRGSITHSGDPRLRSKLIQAAWSAIRHDGELREFYRAVCLSHPRHLAARIAIVAVARKLSVRIAVVLMQQRPYEVRKKVRSTPLSQEETAPQGTTRRQAETGEPDS

SEQ ID NO: 323836 - protein, 378 aa, unidentified
MACDLVSKGTADRNPLGLERPRASEGRRAQVIKEPEQLPGPVEPVSRKEGPDRRRRRPMGTEKVYVGIDVSKETLDMAVHASAQRWRFANSDEGITETLSCLEELCPTLVVLEATGGFQDPLAAALAVAGVPMVVVNPRQVRDFARATGRLAKTDTIDARVLAHFAAAVHPPFRLLPDTQGQELKAILTRRRQLIEMLTAERNRLHSARSRFAKAHIQAHISWLEEEMAHIDHDLRHSIRQSPVWQEKDDLLKSVPGVGPVLSTTLLADLPELGLLNRREIAALVGVAPFNRDSGHFRGQRTIWGGRAVVRSALYMATLVATRYNPIIRDFYRHLLSAGKPKKLALTACMRKLLTILNAMLKHKTSWHYPISGISQTS

SEQ ID NO: 323837 - protein, 368 aa, unidentified
MGNCILVGCDLHDENMLLKVAVGSGAVERRLWRNTSGGRRVMIRDLQRRAQRAGAERVVLAYEASSLGFGLHDELTASGVECHVLAPTKIARSAQDRREKTDERDAERLLDLVRAHVLAGNRLPSVWIPDQQTRDDRELVRARLDVSHKLTGVKTQVRTLLKRNGVTTPQSAGKSWTVGYRTWVARLAGGAGALAWGARLALGSLLRQLDFLEKEGEGLNAQIGELAGNARYAEPAQALQAMPGVGLLTAMVFLTEMGDLRRFANRRQVGAYLGLVPSSHESGESNDRKGHITHQGPSRVRKVLCQAAWARIRWDQAEGTVYERIAEKNPRHRKVAVVALMRRLAVQMWHVGQAAQERSGAVSSKVAG

SEQ ID NO: 323838 - protein, 336 aa, unidentified
MGLDQHRAQLAAEWIDTVTGEVSRARIVPGDRTAVRVFFETFRGSGLEVALEATTGWRFVVEELERVGAEVHLAEAAEASALKGKKRRAKTDFADARHLRELLLIGRIPESWIPPTHILDLRARVRTRHLLSHQRTEWQQRMHAVLYHHGVPQRRDLLNRKSREWLAGVELPDAAREQLEIALHVICAIEQRLVPFDRELNQIARAQPGCRTLMHEIYGIGALTSVTILAELGDVRRFQNSRDVVRYGGMDITVYQSDDHRAPGHLSRQGPPALRWALYEAAQRARFPASPDRAYYEQLAARIGGNRACLALARKLLKRCYHLLKNLGDQAIAPVA

SEQ ID NO: 323839 - protein, 354 aa, unidentified
MTSTQYIGMDVHKESISIAVRNAAGKVVMECVIETKASMILQFIDGLHGDVHVTFEEGTWAAWLHDLLKPHVTKLVVCDPRRNALLQEGNQNDRVDARKLAELLHNNQLRSVYHGDHGLRTLKELVRSYLTITQDLSRVMSRVKAIYRSWAIPCTGKQVYAPRHRGEWLAKINEPGVHRRAEFYYQQLDALRCLRQEVRRDLLAESKKHPAWKRLCGIPSIGPIRAAVLLGILQTPHRFRTKRQLWTYSGVGIETSSSADHHVVKGQLERKKQVEVRGLNRNHNHDLKNLFKGAAIVAATKPGPFAEFYAELVAKGMRPEMARLTLARKIATIVLIVWKRGVCFDAQHLKPQTA

SEQ ID NO: 323840 - protein, 359 aa, unidentified
MQAKVKTISFQGQNIYIGIDAHLKNWTVTAMTENSLTKMVSQDPDAGTLYTYLQRTFPGGNYFSAYEAGFCGFSVHRKLQKYGIQNIVVNPADIPTTDKERKQKEDRRDSRKIARSLKNGELNGIHVPELETEELRSLVRYRKTLVKEISRNKSRIRSHLYCFGIDIPVTLAQASLHWSGRFTQWLETVQLSTCYGDIVLQSTLQTVRHLRSELLKINRQLRNLEKESKYSFKIKLLKSIPGVALIVAVTLLSELETIIRFKNLDKLCSFVGLVPTTNSSGDDERVGRITHRSNKPLRSLIIEAAWIASRNDPTLAQCYIELCKRMKPNEAIVKIAKKLLNRIRYVMKNEKEYVHSVVQ

SEQ ID NO: 323841 - protein, 373 aa, unidentified
MNYTTVYVGMDVHKESFSLCCYTNEKEQAEYCQKVKAHYSKVLNYLDAMRFHYGNDAVFICGYEAGCLGFTLYHQLTQHHVKCVILAPTSMAKPTGKKKVKTDKLDAALIARCLAHHDYSPVHIPTDKDEQVKEYIRMRSDHKAALKKIKQQISAFCLRHNYRYEATKSHWTQAHLNWLRALKPEGLYEEILSEYLSTYDQLTDKLERIDKRIEELASDPDYQEKVSKLTCFLGIKTHTALTTMVEVGDFNRFPSAQKFAGYLGLVPGEDSSGDSRNGLSITKAGNSHVRMLLTEAAQSYTRGRSGCKSQALKARQYGNTAQVITYADKANERLRGKYYRMVLTQNKKPNVAKTAIARELSCFIWGMMTENMQ

SEQ ID NO: 323842 - protein, 419 aa, unidentified
MEVMYERVAGIDVGKKEIAVTVRVPGDGPGAARVEVTRKFKTFYPVLALMATWLAEQGVTHVVMESTGVFWRPVFHALCEADADFEVLLVNAGHVKNVPGRKTDVKDSQWLAQLLEVGLLRGSFIPPAEIAAIREVTRYRKKLIQSRTSELQRLGKVCEDAGLKIDSVASSLTTKSARDMIEALIAGQRDPRVLAELARGVMRKKIPDLSMALAGRFAAHHAVLARAHLDHLDHLETMIARLDAQVEEMVAPFGGQVAGLCTIPGIGERLAQVIISEIGVDMGRFPTADHLASWAGLCPSNNESAGKHGNTRTRKGNREIRTALVEAAWATARTNTYLGARFRRLHRRFGKKNGGKAAVAIAHNLLIIIWHVLRDGVEFEDLGADYFTRPGNPTTIRRKDHLVHELRALGYTVEVTPAA

SEQ ID NO: 323843 - protein, 343 aa, unidentified
MQAVTTIGLDIAKSVFQVHGVDAAGQVLIRRQLKRRAVLAFFQKLPVCLVGIEACASSHYWSRELQALGHSVRLMPPAYVKPYVKRQKNDMADAEAICEAVARANMRFVPTKTPEQQSCLMLHRTRHLFIRQQTAVINSIRAHLAEFGIVAPVGRKGVTELLHIVADPSDKRVPEVARVCLAALGNQLLSLKEQIVEFDRMIMVWHRSNETSKRLHYIPGVGPMLATALVASVADPRTFRSGRNFSAWIGLVPKQHSSGGKDRLGSISKQGDRYLRSLFVAGALAVIRYAKIHGTKHRPWLTALLARRPTKVAAIALANKLARMAWAMMAKGERYRQPVALAA

SEQ ID NO: 323844 - protein, 350 aa, unidentified
MENIAFDSHKNYTFCSVEDEKGNLLTEHKIQHERGAIKTYLSQFTPNSPVAVETIGNWYWIVDEIEEAGMIPRLVHAGKAKLMFGCVNKTDRLDARGLNRLQRIGSLPTVWIPPHEIRDKRDISRSRLFLVSQRTRLKNRIHAVMERYALKLKDVKDPYCKKGRLELKKLITGLPDCTRFSTEMQLTLIDALDPVIGQFEEKMKAFLKQTEEIRLLQTLPGIGNILSNSIQFEIGDISRFSSSERLAAYSGTTPRVHSSGGKTRLGKLRQDVNHYLKWAYIEAANLVCINMYKHPDRYVSKLFKYVKQRKGHASAVGAVARHLAEATYWVLTKHEPYREPGLKVKSSTTA

SEQ ID NO: 323845 - protein, 326 aa, unidentified
MTYKLGIDISKAKLDVALLNADGKYRSKVFPNDATGFKSLLQWLRTHVPSGKAEVHVCMEATGSYHEALALFLSDQGVAVSVVNPLLVKRFIEVDRVRNKTDDGDAKCLARFCQMTQPELWEAPSVAVRTLQALVLRLDTLQEMRQGELNRLEVAHASVQQSMRDVIAGLERSIEAVREQIRQTIDDDPDLKQRQGLLASIPGLGDKTIPQLLAYIGRPERFKSVKALIAYAALAPLIRQSGTSLNHHKGTHPQGHRELKSALYYPAMVAGKYNPLIAAFWQRLKAQNKPGKVIVVACMHKLLAIAYGVLKSRKPFNADHLKPIVT

SEQ ID NO: 323846 - protein, 402 aa, unidentified
MTYDYVIGMDVGKYFHHACVLDIDGTQVLSKRINQNEQSLRALFSAFSAYDHKVLVVVDQPNNIGRLTVAVAQDIGIDVRYLPGLAMRQLSRIHAGNAKTDIRDAYIIAHAAKNLPESLRNVDRVEEAFLQLKVLNGIDEDLARSYTRLINQIRSALVGCYPQFEQALRGQIIHRKWVLHLLARYGGPTKIKRLGKAKAAAFARRYKARNPEPVLDAIFAAISEQTVTIAGAHYAEMGVAMSAKDALLKLEHRQQIEKEVIELINDIPHTQFLLSMPGIGPKTAAQILMTAGDMSDFPSAGHLASYAGLSPRTNQSGTSIMSNSLNRAGNKKLKNALWQSSFASIRFHERSRQFYERKRREGKRHNAAVVALARRRLNVLYAMMRNHEHYHDPAPSQEDLAA

SEQ ID NO: 323847 - protein, 369 aa, unidentified
MADRITYVGLDVHKESIVVAVASGGLRGEVREYGRIANTATALDRLLRKLGGDGMKLRFCYEAGPCGYGIHRRLTACGHECVVVAPSLIPKRAGDRVKTDRRDAASLAKLHRAGELTAVWVPDVGHEAMRDLVRARLDAVHSLRRARQQLCGFLLRQGCHYGRPAWTKLHRRWLAGLKFDQPIHHLVLEDYIAAVEAAEARRDRLTAQIAAMLPDWTLAPVVAALQTMRGMALVNAATLIAELGDLSRFANPRQLMAYLGLVPSEHSSGASVRRGGITKAGNGAARRLLIEAAWCYRFPARLSRELLLRQENQPKPIRDIAWKGQVRLCARYRRLARTGKPANIVTTAIARELSGFVWAVARQVMEAAG

SEQ ID NO: 323848 - protein, 413 aa, unidentified
MALKIVYPICCGIDVHKTFVVACIASTIKGVTTYKRHRFSTYTKGLIELSQWLCENKCKDVCMESTGKYWIPVFNVLEDSCNITLAHPKYVKAIRGKKTDKKDAKWIADLFKHDLVAGSFMPPLKIRQLRDLMRYRFKITNFMSSEKNRLQNSLTVSNIQLGNIVSDTFGKSSMNIIEKLLENPLDTSFDLKPLIHGSMKHKLPELELAIDGYITPEQAEKLKVIKQHYEDLGSRKEDLEKIILSLAAPYTEEINLILTVPSFKNIFSAIAVVSEIGVNMDVFPTAKHLCSWAGLTPTNNESAGKKKSVRISRAGCYIKPLLVQCATAVIKSEKHPEIRNRYLKLKKRRGHKRAIIAIARMLLTAIYNILKKKEAYNAELYKKSDVLPVTREITIEQAILLAKHHGYRVLEAS

SEQ ID NO: 323849 - protein, 350 aa, unidentified
MINIAFDSHKRYSLCSVEDGHGDLIVEERINHQPGAIRAYLQAFPEGCEVAVETIGNWYWIVDEIEAARMKPLLVHARKAKLMMGCVNKTDRLDVRGLNRLQRSGTLPTVWIPPGELRDKRDLGRTRLFLVNMRTRLKNRIHATLAKYALKVEEVKDPFCKKGRLVLSDLIDRLPHHTRFAVRSQLAQLDTLEREIERLELRMKALFEMTPMIQRLRTMPGVGYLLAEIMALEIGNISRFASAQHLASYSGTTPRVRSSGGKTSYGSLRKDVNHYLKWAYVEAAHSICINRDKYPQRHTSQLYNRLRQRKGHQKAIGAVARHLAEATWWIMTREQKYQDRVQAQQSQTPA

SEQ ID NO: 323850 - protein, 452 aa, unidentified
MEKSRRHRAEREFSCTHPDAGAIDIGSRIHVAAVPPDRDPSEPVRTFGTCTGDLQRLADWFERCGVRTIAMESTGVYWIPAFEILEQRGFEVMLVNARDAKHVPGRKTDVSDAQWLQRLHEYGLLRASFRPKGELAALRAYLRQRERLLDYAASHIQHMQKALMQMNVQLHHVVTDMTGATGMRIVRAIVEGERDPTKLANHRDPRCHASMEEIAAALTGNWREEHVFALCQSVELYNTYQAKIAQCDAQVEAVLERLRSAAATGTQPLPPARHRQATANAPSFDARSALHAVLGVDLTQIHGLGPSLALKLVGECGTDLSAWPDAKHFTSWLCLAPSNKISGGKILSTRTRRSGSRAAALLRLAAVTVGRTQTALGAFYRRLSARIGKAKAITATARKIAVLFYNTLRHGRAYADPGASYYEQRYHARVLTNLQRRAKSLGYVLQKELSPT

SEQ ID NO: 323851 - protein, 408 aa, unidentified
MEVLYPRCAGLDVHARTVVACVRVASGGTVTYQHRTVATDTRGLLELADWLANYAVTHVALEATGVYWKPVWHLLEGAFTLVLANARHVRHSPGRKSDKTDATWIADLLALGLIRSSFVPPAPIQELRDLTRTRKQLVRELSRHIQRIQKTLEDANLKLTEVISDVVGKSGRAILTALVAGETDPERLVDLTQGRLTASREDLVQALHGRVTAHHRFMIQLHLTQITALETAVADLDARIGEALAPFRAAVSLLTTMPGLKTTAAAVIIAEIGTDMSVFPSAGHLVSWAGLCPRLDESAGKRRSTRTRQSAPWLKATLVQIAWPATRKKNSYFHAQFLRLKSRRGPKKAILAVAASMLTDVYYMLRDGVEFHDLGDQYFAQRDKTRITKRLLQRLRDLGVDVEVKNAA

SEQ ID NO: 323852 - protein, 307 aa, unidentified
MENYVGIDVSKHSFDVHHSADRRDEHFDNTDIHIKTFSKQMSETGPALVVMEATGGYERPLVAQLHQAGVPLAVANPKRIRDFAKSVGQLAKTDTLDARIIARYAATIKPEAQNALDEISSEIKDLSARRKQLNAIRTAEICRTEHADVEIVAQSIRTVIDTLEQEIRIIDKRICALTEQSDDLRRKAEILRSAPGIGPKTVGMLIGELPELGSLNRRKIAALVGLAPINRDSGTLRGKRMTGFGRVDVRKQLYMPVLSATQHNPVIRAYYQRLLKNGKAKMVAIVACMRKLLTILNAMVIKNETWK

SEQ ID NO: 323853 - protein, 429 aa, unidentified
MNYTQNEKLLQVGEGNLIVVIDVGSSKHYARAFDWRGIEYSKKAYAFSNDAEGFAGFLEWVSLILKKSEKETVIPGMEPTGHYWFDFAKFLQDNGMKPVLVNPLHVKRSKELDDHMPSKNDRKDPKTIAKLVIEGRYAYPYMPDGLYAEIRNASNMRFQVEAELTRCKNRIQRWFALYFPEYSEVYGKFDAISSMMILKQVALPCDIINLGAEKINQLWRDAKLKAVGKKRAQTLVEAAQRSIGYTEGLGTARIEILMLLDDYEKLKSRLELIMEMIEKLVTKVPYAEKLLQIKGIGMKTVSGFIAEVGDISRFKNAKQLQKLAGLAIVENSSGKHNGKSRISKRGRKRLRYLLFEAVLSLTASNQEFKEIHRYYTSRKDNPLKKMQSLMVLSNKLIRVFYTMLRSGADYDPEKLISDIRHPEEVLTAA

SEQ ID NO: 323854 - protein, 386 aa, unidentified
MQSFDANKSLVVLDQDSTLVAVIELSLSGWLVAGLVPGLKRQPRKKLDPDPDALLALLQRWRSEAIKAGRTIARIALAYEAGRDGFWLARWLKGRAVEAYVIHPSSIPVPREHRRRKTDRLDTELLMRAFLGWLRGEVKHCTMAAIATLEEEDAKRPNREHQTLTGERTRLINRLKSCLIRLGIRNFKPTLGKAAERLAELRTPEGVPLPDNTLAELYRDMARLDLVKEQIKAIERQRLQRIAKAPNHRPNVMVRLIAQVIGIGIETADMLVSELLSRNLRDRRAVARYGGLTGSPDESGSRRREKGLPRAGNARVRRGMIEFAWRFLKFQKDSPLAAWYRNQTASGRKDVRKRTIAALARKLLIALWRLATQGVVPAGIALRKAG

SEQ ID NO: 323855 - protein, 346 aa, unidentified
MGIDAHKRTHTAVAIDEAGRKLGEKTTRMTTTEANLELLRWADGFGPDRRFGVEDCRHLSRRLEVDLLAAGEQIVRVPPKLMAHARDAARTYGKSDPIDALAVARAVLREPNLPLAHLDARTRDLRLLVDHREDLVRDRVGLIDRLRWHLHELDPSWDPDPRVLVRFKHLDRIAARLEGLTSTLAWVATDLVGRIRELTVAANELERRIVATTSGLAPTLLSVPGVGALTAAKIVAEVADVRRFRSKDRFARHNGTAPLPVWSGNRVRHRLSRTGNRQLNTAIHRIAITQMRIHEPAKTYLERRMVNGNTKTEALRALKRKLSDVVYRALLVDADTTETAALEQAA

SEQ ID NO: 323856 - protein, 377 aa, unidentified
MRKVRFIGLDVHADTIAVAVAEPNGEVRSMGVIPNRPESIRKLVKKLGPLEQQRVCYEAGPTGYVIYWQLTSLGVHCEVVAPTLVPVKAGDRVKTDRRDATKLARSYRAGDLTAVWVPDAAHEALRDLVRAREAAKKDQLRARHRLGKFLLRHGRRPPTGMTPWTQRHLTWVRQVQFEQPAQEATRLDYLHEVDHVVDRIERLERAIDEAVKTAPPCIRAVVEALQALRGIALISAVTIVTEVGELSRFTRAPQLMGYGGMGAREDSSGTRTRRGGITKTGNAHLRRIVIEAAWAYRHRPAVGSTLRKRQATLSEEVKAIGWKAQLRLHARYRKLIGRGKCPQHVVTAVGRELLGFIWAIGVTVEREQRKTSSSIAA

SEQ ID NO: 323857 - protein, 423 aa, unidentified
MKPLYTQTFTAYVGIDWADTKHDVCLQAVGSEQREFACIPHQMHRIDEWAKLLHQRFGGTIAVALELAKGPIVYALQKYDFIVLFPINPLTLAKYRQAFKPSRAKDDPTDAELALDLLLRHPERFAPIQPQSVAMRSLISLTEHRRELVGDKTRLTNRLTNTLKQYYPQALDWFEQRDTVLFIDFLTRWPTLAQAKRARIDSLKAFFNAHNSRRAKVIDARLESIKSALPLTEDLGVITPCRLHALMLVKQLRVTLQAIEQFDHEIAELAPTLPDYSLFQRLPGAGEHFAPRLLAAFGEDRQRFQHADELQKYSGVAPVTERSGKKSWVHWRWQCPTFLRQTFIEWAGQTINKSFWAGAYYRQQRVKGSSYQAAVRALAFKWIRILHRCWKTRTPYNETTYLNALRKRGSPLLKNLMPDATNT

SEQ ID NO: 323858 - protein, 438 aa, unidentified
MSNKVIFNLDELFISVGIDVGADFSWMSIALPNQQFVGKPYKILHNSIDSLTTAVSKIKEAEELYSLESRIFLESTGIYHYPLFCYLRDKGFNCSVINPIITKNSTNINIRKVHNDRFDSKKAALVGLKPDLKVSLMPSDLALNCRNLCREYYDLMDNRSAYVNKLQGELRMAFPQYLGIFSKVTINTSLTLLETYTSPSAFLKADKQEIIDIIKSTARFGLTYAQNKYNAIIQAATDANQFGYIIDSNIKRIRLYISFIRKYDEEINNILESLHELVDANEDADFVKQIHLIETFKGAGFLSAVSIMGEIGDFTAFSKPKQLFAYFGLDPAVKQSGKFEGTKVQMSKRGSAIARRVIHTLTLQSISISRNREAKNPVLREYYLKKCDSKPKLVAMGAVSHKVCNMIFAILRDNKPFKIIAPQEHIKQYNSAKCDIAA

SEQ ID NO: 323859 - protein, 314 aa, unidentified
MKQVQEINIGIDTSKTQLDIYIRPIGEFFSVENNAKGIKAALKRIKSYQPTRIIIEATGRLELPFACAASKANLPIVIANALKVHNFAASSGQLAKTDKLDAKMIAHYGEALKPRLTEIKADNIQRISDLLVRRSQLVEMRTMEKNRASMMNKEVKRSNQRLIKHLQKEIDWVEKTLDKLIEDTPDWSRTLEILLSVKGVGKVLAYTLLSDLPELGQLNRKEVAALVGVAPMNRESGAYRGKRRIRGGRARIRTVLFMAMMSTIQSNPKFKREYHALVAKGKPKKVAIVACMRKMITILNTMVKNGEVWDEKLA

SEQ ID NO: 323860 - protein, 285 aa, unidentified
MPTTELPHALATRFVALDVHRQYLVVGAVDIQQHVVLTPRRFGFAAFAEWASIHLTHADAVVLEATANAWLLYDQLPPLVSEVVVAHPQAVKLIAAARVKTDSRDTIKLASLLAAHLIPAVWVPPQAVRELRALVTHRNRLGKPRTQAAHRLHSVLQRHTIDPPPGIPFALHQREWWLAKAMPLAEKLRVQQDLSLYQTLEGLIRESEAELGRLSTCDPWVKQVPFLVQLPGLGVLSALRILAAIGEITRFPSAKHLVGYAGEGGQRSPVGGNQSRGAYHQGGAQ

SEQ ID NO: 323861 - protein, 313 aa, unidentified
MSQNNPNILYVGLDVAKLSLQLHLAGRFHLLANDAKGHAQLLKRLRGHPHAHVVCEATGGYEQAVVRALQSAGVPVSIVEAGRVRYFARAQGQRAKTDPIDAAVLSAYGTTFQPAATAPASPQQQQLADLAQRRRQLIQLLVSERNHAEHYTDSFRVRQSRQLVKALEKQITQCDEAITTLIAQDTELARKAERLKAIPGVGPVVAATMLAEMPELGKLTTQTAAALAGVAPYNRDSGGQNGVRRINGGRAAVRCALYMATLSAVRHDRILKEFYLRLRAAGKKPLVAMTACMRKLVILMNRLLKNNDFQLAS

SEQ ID NO: 323862 - protein, 392 aa, unidentified
MVISVGIDVSKDKHDCFIVSSEGEVLADVFTIPNNMDGFHRLLQRIQDCTNSQDKIKVGLEATGHYSYNLLGFLLDNGLTTYVLNPLRTNLYRKSLSLRKTKTDRVDARTIASMLLSDAGLKPYTSTAYHNEELKSLTRYRFDKVKERAKLKSSIARLVCILFPELEKLVPSLHIASVYALLEEFPGAKQIAAAHLTRLKALLETASKGRYKRDMALEIRDAARNSIGSWMPAKSLELQHTIRLIRELDVEIAEIEEQIQSIMDELHSPITTIPGLGFRMAAMIFAEVGDFTRFDSPDKLLAYAGMSPSTYQSGQLKNCYPHMEKRGSRYLRYALYNATKHVCHWDPTFAAYLAKKRAEGKHYNVALSHAAKKLVRLIFAMEKSQRPYCAAA

SEQ ID NO: 323863 - protein, 341 aa, unidentified
MKHEINVLGIDIAKHVFHAVGMDDRGNIVYRKRLSRHDLMPCIAKLPPVRIGIEACGGAHYWARRFRAYGHEVKLMAPQFVKPYVKSNKNDSRDAEAIAEAVTRPTMRFVPIKDVDQQDLQALHRVRERLMGERTALVNEVHGLLHEYGIVIPKGVSKFRQAVVGKLEAEKDKLTPLSQEMFWKLVEEFAALEAQLAYYQEKLDTLAQTHPECQRLMTIPGIGPLTATALVAAVSDASAFKNGRQFAAWLGLVPRQHTTGGKERLLGISKRGDTYLRKLLVHGARATIRWVGRKTDRRSQWIRQLVDRRGKNRTAVAVANKNARIVWALLTSHQDYQPATS

SEQ ID NO: 323864 - protein, 443 aa, unidentified
MPRFIGLDIHKTVVAGCVVDPHGTVCTRLRFPLTRTTLAAWARQLTAEDAVAVEATTNTWAVIALLQETPARLVVSNPLRTRAIATAKIKTDRVDAEVLAQLLRCDYLPPVWIPDAATLAARRLTTRRSRLVAERTRLKNRLHSVLHQLLLPCPVADLFSRAGLAWLTTVELPAAERAAVDADGRLLAAVEQELTALEQSQVVDAAADPRVRLLLTLPGIDVAVATALLAAIGEISRFPTPARLAAYLGLVPSVRQSAQHCYTGHITKQGASHVRWLLVQAAQHLDRHPGPLGAFVRKLQRRKNRNIAIVAAARKLVTLAWHVLRSGEPYRYAVPRATQEKLARLRRRATGQRRQSGPPPGTPRAAAYGTGQRTRGIPALATVYQQEGLPAPGPMPSAESRVLATDPAVHQFVTSLQVSHHRPRARQPALHTAKTDTHGAQPG

SEQ ID NO: 323865 - protein, 433 aa, unidentified
MGLIVPTVMPPERADQPPSYDGFVGIDWGSQQQQVSVLDRDRRRMGERVVDHDGASLAQFVAWLWGLSAGQPQRVAVAIEVPRGALVEGLVERGFHVFAMNPKQLDRFRDRHSVAGAKDDRRDAFVLADSLRTDQPSFRRLRLDDPQLLVLRELSRAEETLLEAFRRSANQLRDQLHRFYPQMLQLCSAADAPWLWDLIDLAPTPAHAARLREEQVQGGLKAHRRRRLKAHEVLACLQTPARPVAPGAVQAAQAHCRFLLPCLRGLAEHLQACGQQVGALLHTLAEMPGAGAGPSDVAIVQSLPGVGRKMTAWLFAEAAQPLAERDYQVLRTHGGVAPVTKQSGKRRVVVMRRGGNPRLRHALYHMARVARQRDAHFNSVYAALRAKGQRHGQALRSIGNRLLRILMAMLRHRTCYDASRIHREPIVQMGEKI

SEQ ID NO: 323866 - protein, 339 aa, unidentified
MNSQVAGLDLHKDQTYITVMEKDGQVLGEKVLKSKAEPILNYLRNFDKPEVVFEATRNWYWLYDALQRENVEVTMAHPKKTKAIGAARIKTDRIDSRTLAHLKRADLIPEAYLAPLETRELRELLRHRIFLVRERAKLKSKLRTLLSKLNLNCPYSDVLGKEAIIWLRETQKKMPEVFSDKMDDFLAVGDKLTEVIERATAVIEREAEADEIARLLETIPGIGWFSAMVLKAEIGTITRFPDANRLASYCGLVPSTHSSGNHTHRGVITKEGNPWLRWILTEAAGKVKGKSKHFRAFYYRIRDKKTKHVARVATARKLAVAIYYMWKRREPFKEPNFTG

SEQ ID NO: 323867 - protein, 348 aa, unidentified
MERMLERCAGLDVHKKTVTACVRVPGTHGDRTQHVRTFDTTTAGLLVLRDWLAAHAVTHVAMESTGVYWRPVYYVLEDAFACILANAAQIAQVPGRKTDVKDCVWIAQLLEHGLIRASFVPPAPIRELRDLTRYRKVLIQERTRHANRLHKVLEDAGIKLTSVASRLLGVSGRAMLDALVAGTTDPEVLADLARGRLRQKLPALRQALVGRFRSHHAFLVSQLLAHVDYLDEAIQTVGGHIDEVMVPFTDELARLDTIRGINKRTAEVIIAEIGVDMTVFPTATHLASWAGLCPGNNESAGKHRSGKTRPANRWLRAALIEAALAASTRAAPGAFAARYRRIMPHRGH

SEQ ID NO: 323868 - protein, 343 aa, unidentified
MGEISMIGLDLAKNVFQVHGVDASGAVVVRRQLRRGQVEKFFAQLPACTVGLEACGSAHHWARVIGRYGHQVRLMPPAYVKPYVKRNKNDGRDAEAICEAVNRPTMRFVPVKSVEQQATLAVHTARALLVRQRTMLANSLRAALSELGIVAAQGIKGLRELMVKLEAPNQEIPEMMRGALLMLAQHWQALDVDERALEQQIAKAARSDREARRLMEVPCVGPIIASTVLVKVPDATVFRSGRDFAAWIGLTGRDHGTGGRHRPGRISKQGDRTLRALLINGASAYLRHQRVRGVSNPWLRGLLARRPYKVVMVALAARTARILWAMLVKGEPYRDRASAPAAA

SEQ ID NO: 323869 - protein, 339 aa, unidentified
MQLYAGLDLHSRSTFVGILDQDFNRVFKKRMPNDLQRILADLELFKKQLKGLVVESTYNWYWLVDGLMDAGFQNVCLANPSAIKQYEGIKHTDDQHDAFFLAQLLILGILPQGYIYPKKDRAVRDLARKRMFLTQQKTSNLVSLQSLVERNCALRLSANRIRSLTVEELEKLLSDKHLFFNARANLETVQFLTGQIRRIEKAIVQQIKPQPGFELLRTVPGIGPILAMTIMLEAGDIRRFAKVGNFASYCRCVSSQRFSAGKLKGSGNRKNGNRYLSWAFVEAAHMARRFCDRFRRYYDRKASQTNTCVATKALSNKLARICYYILRDQVPFREELIHG

SEQ ID NO: 323870 - protein, 340 aa, unidentified
MNGSSKPGDAIVGIDVAKQKVDIFAVVNGKGKAKVFDNTAAGHRELQDWLKERGFVPDDTHVCLEATGPYSETLATALVAGRWKVSVVNPARIKGFAQGELARNKTDRADAALLARFCAAMKPSLWEPPSPAFRQLRGWVDRLQALKDMRQQEMNRIEALEASEQPDVLAHVKLHVTWLDQEIAKLECDIDDHIDRHPELKADAELILSIPGIGKTTVAKVLAYAGDVRRFDSAKALAAFIGLTPRQRLSGTSVRGRTMMSRAGHQALRHALYMPGLVARRHNMALKLFGDRLSRAGLAPKAVIGAVMRKLAHFIYGVIKSGQPFDMKKAMPTLDFQDGN

SEQ ID NO: 323871 - protein, 453 aa, unidentified
MLYCRKVLEFIIKAALPSKISKLVKVTLKTSEGTALKKRSRKHQLTEQTLLVTADIGKFKNWGYFRFPDGTDMPTFEFANTGQGFKKFWSKISAVLHAHGLSDVVFGFESTGAYAEPLLHFLRARGVKLVQVNPAHSKRVKELADNSPNKTDEKDPRVIANIVELGCALSVVIPEGVAAELRRLSHARERSVERRTALYNQLQDLVFVLFPEFLQVMKDVTTKSARYLIAHHGTPAQLLALSLAELTQLLRRISRGKLGQARAEALYHAAQESGGIAEGQHALRLEIQELLRLIGGSDEFITQLEAQMLVHVVQIPYSRCLLSIPGLGAITAASLIGEVADFGQFQSLEELLKYAGLNLYEISSGLRKGQRRISKRGRPLIRKLLYFAALRVVQKGRIFHQQYQNHLVHGMIKNKALVAICRKLLALMFAVVRDRRDYVAEYSVSLPPLTLAA

SEQ ID NO: 323872 - protein, 393 aa, unidentified
MPRKRILVKSIDTSISYQVIGIDLAKHLVSACLITDAGEIFGIDRLTYDDLLKSAERMSPTLFCMEPCPEVHYLAEKLQGYGHHTKVIDGAAVKEYIKTHFGGQKTDLNDAQAIAFLSLDTNLPEITPKNTSNSVLSSIQAVREQFRKEYIQSFVSLKGICQRWGLPISKGVMNKNKVEELVSESKKIPQEVKDWLLELLQSCRELQKRLNKISKYLKEYADNDEICQKIMSVPGIGPITATRLKATIGDIQRFEKPKSIVAYYGLVPKSKATGHNEKKGGITRRGDRVARSLLIEGAGVVLNLAAKGFLRSKPLNKWIEKKRKLKMPWGKLCCALAAKMLRIVRAILIQGTSFNAKIAGVARCSLPKESRNNVMGNNKLSEIPSPNGSVYIH

SEQ ID NO: 323873 - protein, 343 aa, unidentified
MTIIRVGVDIAKSVFHVHGADRQGKTCWQGKYSRNKWLDAISKKVPDGAEIGMEACASAHHWARELQKRGYRVRLIAAQFVKPYVKSNKNDRVDAEAICEAMSRPNMRFVTPKSVEQQDIQAMHRIREELVAQRTAKVNQIRGLVGEYGIVAPVGIHQLRRALPCWLEDAENGLTYPFRQLLNDLAEDLRYLDDRIQKLDEQIRESVQRDPVAKRLMTLRGVGPLIASALAGALGDGKAFKKGRDFAASLGLTPKQHSTGGKDRLLGISKRGDSYLRKLLVHGARAVLRHAAGKEDGLSRWLKGLASRKHTNVAVVALANKTARIAWALIYKNVDYDEALAAA

SEQ ID NO: 323874 - protein, 367 aa, unidentified
MIVNEVAKNVEKIISIDTAKNFFQVLVVNQKTGKKKNTKVKRSKFVEYILKHGPCLIFMESCSASQHWARLFEGHGFTVKLIAAQHVKAFLRNKRVKNDERDAEAIYTCGIQPDTKFVRIKTVEEQTVALLHTLRKAAVSQRVELSNRIRGILAEFGIVVARGKGSFNSEIEALFNECEKIHDVYLRSAISSLFEDYHRLEQREKELSEKIESLNKDNELVKIALTCPGVGSLTASAIVAEVGDASQFRNGREMAAWNGVVPSQHSTGGRSTLGGITKTGNRYLRALLAQCACTIIQNASRHIEQGKATHLDRFALRLKLNGKPAKKIMIAVANKIIRILWAMLTQRKTFKNKADETSDISAELQLA

SEQ ID NO: 323875 - protein, 342 aa, unidentified
MGLMDKQFWIGVDLGQSSFWAAVAAPASEPKRWADLPAKEFPFTKGGLHAFCGWAKKLCGDAGAAGICAEALAPLAWKWMEQLNGRVAPVALVNPRYPKDFARSLGIQDKTDRIDACILAFFGRERNPEARPLPAKVWRQLHELSRLYSAKQQDLTACSNRLRGLDLPDAVLEEAQCEIKRMENFLKLIEKEMLELVGEDEQMEADFKRLQTIPGVAQRTALRVLAEMGDLRQYTRNELTALAGLYPRQYSSGTSVYRKPRLPKTGNQHLRTALYFPAMTAIRCCPTMADFVARLRKKGLTKKAVICAVMRKLLLLMRAIIIEQEDYNPKFPHKNNTEPKTA

SEQ ID NO: 323876 - protein, 328 aa, unidentified
MSSTRMGSSSSKGKAASEPDDLVRWLAATGLTIARVGLEAGPLSPWLHAGMREAGLPAICIETRRMKGATAAMAVKTDRNDARAIAHAMRVGWFTAVHVKMVESQELRLLLNNRRTLLEKRVAIDNEIRGTLKAFGLKLGAVTVAAFEARVLELLAKRSRLLAMVRPMLTARAALRQQGEVLHRMVLKAVRASAVCRRLLSVPGVGPIVALTYATGVDDPSRFIHSRDLGPHFGLTPRKYASGEIDRSGSITKAGDGAVREVLVQAALTLLTRVHRWCALKAWGVAVAKRRGLRRAIIAVARKLAIIMHRMWADTTTFNWTRETVTLA

SEQ ID NO: 323877 - protein, 331 aa, unidentified
MDHCAIDLGGRKSQVCVRSPDGRLLFEGPYDTRSLPEFLRLLPRSRVIVETAAEAFRVADAAKEAGHEVRVVPGTLVRSLGVGARKTKTDRRDARALSEVSCRIDLPSVHIPSARSREWKAICGMHDALVTARTKLINNLRGWLRGQGLQIGKGNADSFAVRMAKLEPLPEYVRSQVQALAALTEKIGGSDKRIKALAKDELCQRLMTVPGIGPSSAVRFVAAIDEIARFESAHKVESYLGLVPGESSSSERQQRLSITKAGPSSVRWVLDQAAWSLQVRCRDPAARPLQLWAAEIARRRGGRIATIALARKLAGILYALWRDGTKYEQRP

SEQ ID NO: 323878 - protein, 345 aa, unidentified
MTMVETRAVTGGVDTHADKHVAAALDPVGGLLGVEEFPVSPAGYARLLGWLGGFGTVALVGIEGTGSYGASLARYITAAGIRVVEVDRSDRQDRRRQGKSDPLDAVSAARAAQSGRARGAPKGRDGAVEAIRALMVAKRSARSERVQTINQARALVLTGPDDLRTRFAGHTAAGLVSGLASLRPRPGDVVGYATRIALRELGRRAEFLDGQLERLDELIAPLVAARAPGLLALHGVGPDTAALLLVAAGDHPERLRSEAAWAHLCAAAPIPASSGKVIRHRLNPGGDRQANHALWRIVLTRMSAHPPTLTYVERRTKEGLSKKEIIRCLKRYVAREVYRHLRAAG

SEQ ID NO: 323879 - protein, 346 aa, unidentified
MRILALDLGKYKSVACDYEAETGRHCFTTIATKPQALHDLIVDREPDCVVIEICSIAGWVSDLVRALGIELQVANPNDERWQWRKVKTKNDRADALKLAQLSALNQLRLVHVPQSEIRQWRALITYRQHLVQRRTKIKNHIRDLLLREGQLLPRYRSAWTQEGIAKLEAMSKPFSEVSLDELWRGELGVELAQFKAVQRQLAEVVAKLDELGAANHSVQLLRTIGGVGPRLAEAVVTMFDDPHRFRTAGQVSSYIGMVPKQFDSGETQRAGRITRHGNRLVRSLLVEVAWCALRHNPWARETYQRISGGKKSRKKIAVVAVGRKLLVRCWAMLRKQTEWRTDLSVA

SEQ ID NO: 323880 - protein, 339 aa, unidentified
MQITTIGLDIAKNVFQVHGIDSSEKVVVRKQLRRSQILAFFKALSPCLVGIEACATAHYWARELTKLGHRVRLMPAKDVKAYIKRNKNDAADAEAICEAVVRPTMRFVPAKTAEQQAALLLHRGRERLVRQRTGLVNALRGHLAEFGVIAPQGLRNVGKLIAVVRDPSDARLPDLARQVLEVLAAQIEQLEGAVAAVEKQLMAWHKSNPVSQRLATIPGIGPIIASAIAASVAEPGGFRSGREFAAWLGLVPRQNSTGGKHRLGGISKRGNQYLRRLLINGASANLLRSKATKADPWVIGLRRRRPSLVVAVALANKTARIAWAVMQRNENYQRMAAAA

SEQ ID NO: 323881 - protein, 434 aa, unidentified
MSQELPMLDPLAAFVDVGSEHMHVSVGGNTPEVFGTVTSQLHALRDWLIAQGVHSVAMEATGVYWLPLYGVLESAGLQVRMVNGRQTRNLPGRKTDMADSQWGATLHMHGLLHAGFVPPADIRRLQDYLRLRAEHVTAAAACVQLMQKALDRMNIKLHDVISSLAGVSGMAVVRAIVAGERSPEALVALCDVQIRRKKEQAVIESLRGTWADEHIFALDQALQSWDHYQKLVADCDRRITAVLPPHDETRPPLPRSTKQTGVNAPEISRLREILAQMCGGRDLTKLPAVSQYGVLQLIGEVGTDLSVWPTEKHFTSWAGLAPGSDDSGKRKKRVRRGRNRTGQLFCMMAQSLVRSKDIALGGFYRRLAARRGGLVATKALARKLAGWFWRVMVKGDDYVEKGLARYEEQVRKTKEQALKRLAKTRTPTRSAPNR

SEQ ID NO: 323882 - protein, 355 aa, unidentified
MNSEKYIGLDVHQATISVAVLDSTGKLVMESILETKAATILEFFAGLCGTLSVTFEEGTWAAWLYDLLKPHVGKLVVCNPRKNALLKDGNKSDRIDAHKLAELLYLNKLSSVYHGETGVRMLRELARSYLTIVKDLTRVMCRLKAVYRSWAIPCAGRDVYYTRHRAEWLGKIKEAGVRRRAERLYQQLDMLQYLRQQARRELLAESRKHAITVKLRQIPSLGPIRSALAVALIQTPHRFRTKRQLWAYSGLALETRTSAEYCYVKGGLRRSKKQISIRGLNQDHNHDLKGLFKGAATRASVMPGPFQDFYQRSLAKGIKPTMARLTLARKIAAITLTLWKKGENFDADKLKSQAA

SEQ ID NO: 323883 - protein, 332 aa, unidentified
MRPIRTAEQKEESMGKISQATIIGIDVSRDWLDIHCLPEGKRVRLANNLEGHEQVAQLALELGALVCFEATGGQEWRLWSTLDAAGIATRQLPPAQIKAFAASRGTRAKTDRIDAELIARFMAFRPDAGRVLPHEKLRLLRALTSKRGQVVETRKRLLAQIKAHGKLGSAELFDAMDAELKGLLDRQIAELEVRIEQTMASDDNLAATAGILRSVPGIGPVASTMLIAEMPELGQLSGEQAAALAGLAPVAHDSGAMRGKRAIGGGRRQLRHVIFQAALVASHHNPILKTFADRLRAAGKPHKVVITAVARKLVTIANALCKSRLKWTNQAA

SEQ ID NO: 323884 - protein, 350 aa, unidentified
MKILSFDWATKKALTFYDSRTGKVKQIQNTIGAFEKFLATLKEPAIMLFELGGGDTFKIMAFRSGHSVLQVPGKKIKDYRDLKGIEKSDPSDAKLIYDFYIENKGEIAISILRNSAVQVRLPSKKNKRESAMAIVRNSNLELPSPFYLFKESNAKIAEIKILFRSHEDIKKSVVREKNKLFAFDLQFRIARISDDRIDKIRVQKKASIAAKEKELKTLKEILKKKLEAFEIWTHYKKLKGIGPIIMAGLIGELAGREFENNGNLKHYAGMISKADHKNYNRYVKAVLFQFAESIIIHRTPKWKNLYDSMKIYYAKKHSDWRSAKVDAYAKKFIETKFLIDFWHTWRRGKC

SEQ ID NO: 323885 - protein, 332 aa, unidentified
MHYVGIDLHKRDLVVCVMDDDGATSKPVRMSCRDVPLVREFFENVGPFRAVIEASSSYRWLYDLLSPMGEVILAHPLKLRAIVSARAKTDKLDSAMLAKLLRVELIPAAYVPPAHYQVLRDLTRARARLSCQATATKNELHAQLRRANVHPPFKNVFCKTGRAWLAKLDLPFGGDIVRDELIRRLAHYECEMERLDGRLKPLARSFPEISALVNLHGIAMYSALLIVAEIGEPERFSNPRQVGAYASLTARVRQSGMQDRHGHISKQGSSWLRWILVQAAMKLVRRDVKLRNFYTRIRKRSGAKVARVATARKLAEICWIRLKRWHKEGAAA

SEQ ID NO: 323886 - protein, 403 aa, unidentified
MNAVGIDVSKGKSMVTILRPFGEIVSSPFEIKHTSSDILSLIKLIHSIEGESRIVMEHTGHYYEVLAQQFSAAGLFVSAVNPKLVKDFNNDSLRKVKSDKADSIKIARYALDKWQNLKPYSIVDELRTQLKAMNRQFHFYVKQKTAMKNNLINLIDQTYPNANTYFNSPPRSDGSQKWVDFVYTYWHVDCVRKMSLNSFVKHYQNWCKQKKYIFNKSKAEEIYTKATELVPVFPKNEITKRIIRQAIAQLNSTSATVETIRILMNETASKLPEYPIVMQFKGIGPSFGPQLMAESGDITRFTHKGALTAFAGVDPGVNESGSYAQKSVPTSKRGSSNLRKTLFQVMDVLIKTMPQDDPVYQFMDRKRAQGKPYYVYMTAGANKFLRIYYGRVKEYLCILSESS

SEQ ID NO: 323887 - protein, 401 aa, unidentified
MVKIRERIWVGIDVGKASHHACAVDETGKVVFSQQTANGQAAIEALIARAGKAGGEVSWALDMTSGTAGLLLALLWQTGQPVRYVPGRLVNRMAGAFAGEGKTDAKDAKTIAETARLRTDLVTVTAADPIVADLQVLTAQREDLMGDWVRGVNRLRALLASIFPSLERAFDYSTRSALVLLTGFQTPTSLRDAGRDGVQAYLTEHGAWPRGIPVMADKALDAAGEQTVVLPTEKVTAPLIARLAADLLDLDRRIKDLDKQLTDRFEEHGHAKAITSIPGFGPILGAQFLADTGGDLQRVFGTPGRLAAYAGLAPVPRDSGRVKNNLHRPKRYHRGLRRVFYLAAFSSIRADGPSKTFYQRKRSEGKVHTQALIALARRLVDVIWALIRDDREFQPTVAAAA

SEQ ID NO: 323888 - protein, 375 aa, unidentified
MATIARLGIDTSKSLFQLHGVDEREEAVLRKQVRRGQFLGFVAKLAPTKIGVEACGASHYWARQLQALGHEVVLLPPQHVKPYVGRNKNDKIDAAAICEAMSRPRVRERFVAVKSAEQSAAQMLLGTRDGLLHRRTQLSNTIRGHAAEFGLVTPKGLAHIKPLLERIAADDTVPALAKELFATLDEEFAELGPRIARLDKKLKAFQRSDELCRRLVEVPTIGPVIASSMVVKIGNPAAFRSGRRCAAWLGLTPKDHSTAGKMRHGGITRAGDEGLRAALVSGATAYIQQVKRGRTRPSPWLAQLLKRKPEKLAAVALANKTARIAWKLMVSGERYDRARAEAREGLGATQHRGSTPSPSLHPHTADQGASTMTVA

SEQ ID NO: 323889 - protein, 354 aa, unidentified
MQQPERAAEVIIGLDTHKDTHTAVALNALGARLGTTTIPVSREGYRQIEAWACSFGSVRAFGIECTGSYGAGLSRALQASGHRVLDINRADRSARRRHGKDDPLDAEAAARAVLSGQATTLAKSGTSSVEMIRHLKLARDSAVKARAQAMQMLKGLIVSAPAELREQLEGIRGKVTLVRHLAALRPGPMTSTTASAKVGLRALARRWLSLSKEIEGHDRDLDALAAAHTPELITAPGIATGTAAEMLILVGDNPERIRSEAAFAKMCGACPVPASSGKTSRHRLNRGGNRQANAALHQVIVTRMRCHQPTIDYVRRRTAEGKTKAEIMRCLKRYVAREVFTHLCKPRQPASETA

SEQ ID NO: 323890 - protein, 356 aa, unidentified
MMYCGLDAGKKSSHFCIVNEERAVQREGKVRNRVEDLDKVFGVLKPMRIVIEASRKSFWLADQLRRLGHRPVVVDPGKTKAIGASRIKHDKLDARVLAELCQANLLAEVDPPNEQQRLARMPLVARSSMVRARSLLIATAKSLLDSEGIEVPGASSANFPKAVSLASRPLPEAMAAAIHPMLEAIQALTEKIAECEKAIAADARDNPVAQLLRTCPGVGPICSAGYIHAIRDPRRFSSGRAVGTYLGLVPTLYASGGTYRRGRIKKCGNRQARWLLTMAANSLLRSRQDSAIKRWGLKLAAKSGRKKAVTAVSRKLAAVLWAMWRKGRPFEHRIADAPRDGAVLQAGGKSRAAAEA

SEQ ID NO: 323891 - protein, 360 aa, unidentified
MRIIGCDLHARQQTLAMLDTETGEVVNRTLLHEGEEVREFYTELPHPVLVGIEAIGPMQWFLDLLAQLGIECRVGDAAKIRAAEPRKQKHDRRDAELILKLLVENRFPAIWMPSQELLDLRALLLHRHQWVRLRTQVQNALQAIALANGLRRGPGLWSYDGQAKIAFLPLPPHASYRRSMLQALYRKMEEEIEQLSEQVAEQAEQRSGARLLMTHPGVGPITALATDVFLGDPRRFADGKALASYVGLIPREYSSGAHQRLGALTKQGSPLLRFLWNEAGAHAVRRDPELQRFYRRKLVQKGLGKARVAAARKLGIRLWIMLRDQIDYEEFCRRGQKQSGAACAGMLETAFGANRHRPVG

SEQ ID NO: 323892 - protein, 356 aa, unidentified
MERYIGLDAHAASCTIAVVSQAGKRFKDFPVETNGQALVEAIRMIPGHKHLVFEEGLQSAWLYETLRPHVDEIVVAGVTKSRGQKSDKRDAYGLAEKLRTGSLDKKIFKAPQQFTLLRELSRTHITVTRDLVRVQARLKSLYRSRGIQTPGGSVYSLRQRDGWEKQLPASARGRAARLHEQLEFFKEQKKRVEADLLRESRKHAIARILETAPGIGPIRAARLVPIVVTPHRFRTKRQFWSYCGLGIVTRSSSDWVQMADGGWIRARVPQTRGLSRQFNHVLKDIFKGAATLVITQRNKGPLYDRYERMLAGGTKPSLAKITLARIIAATVLRMWKDEEGYKPERYRRVSESDRNA

SEQ ID NO: 323893 - protein, 377 aa, unidentified
MSKVRFVGLDVHADTIAVAVAEVGGEVRSLGIIPNRLESIRKMIGKLTPIETLKCCYEAGPTGYVLYWQLTQLGVACEVMAPSLIPTKAGDRVKTDRRDAEKLARCYRAGELTAVWVPDANHEALRDLVRAREAAKKDQLRHRHRLGKFLLRHGKRPSDAGKAWTQKYLNWIRIHVHFEQAALEATLQHYREEVDHIAERIVKLEQAIDEAVKQAPPEIRAVIEALQALRGVAQTTAATVVAELGSLSRFASPSQLMGYSGLVSSERSSGNRVQRGAITKSGNAHLRRVLIESAWTYRHRPNVQGRVLRRQKSLALSEEAKRIAWKAQQRLYKRFTALTTRGKENNVAAIAVARELLGFMWAVAVHTESQSKPAKAA

SEQ ID NO: 323894 - protein, 355 aa, unidentified
MNTIKYIGMDVHLATISIAVLDAKGKLIMEVTIATQAGALLDFIRGLRGTVQVTFEEGTSAHWLYTLLEPQVAKVLVCDPRQNPRRLGEKKSDRLDARKLAEWLRLGTLKPVYHGNALGPALKELARSYRTLVSDTTRVMSRLKALYRARGIRCAGTRVYSSRYRDQWLEQLREPGARGRADLLYKQLDLLLPLRQEARAAMLTESRKHPAHKILLSIPSLGPVRVALLLALLQTPHRFRGKRQLWTYAGLGLVTRTSADYQMVDGQVTRSHKPALVLGLNANHNHTLKGIFKDAAASALAHPGPFKDFYTTRVAEGMKPELARLTLARKIAAIALTLWKKGEGFNAEHVKAQAA

SEQ ID NO: 323895 - protein, 355 aa, unidentified
MNSEKYIGLDVHQATIVVAVTDSTGKLVMESILETEAATILQFFAGLRGNLSVTFEEGTWSAWLYDLLNPHVEKLVVCNPRKNALLKDGNKSDRIDARKLAELLRGNQLKPVYHGENGVRMLRELSRSYLAIVKDLTRVMNRLKAVYRSWAIPCAGRDVYYRRHRAQWLDKIREAGVRRRAERLYEQLDMLQHLRQEARRELLAESRKHAVTARLRQIPYLGPIRSALAVALMQTPHRFRTKRQLWAYSGLALETRISAEYRMVEGQVRRSKKLLSIRGLNKDHNHDLKGLFKGAATMASVRPGPFQDFYQAALAKGIKPTMARLTLARKIAAITLTLWKKGESFDAKKLKSQAA

SEQ ID NO: 323896 - protein, 344 aa, unidentified
MQHYVGLDVSVKETSVCIVDKAGKVIREVKVASEPVAILAVLTEEALAIERIGLEAGPLSQWLYSALAEAGLPVICVETRHMKAALSAQINKSDRNDARGIAQMMRVGLYRPVHVKTLASQKLRMLLSSRQLLQAKALDIENDLRGTLRNFGLKVGMVGTIKFEARIRELVADHPDLAAIVEPLLIARKVLREQLGVLHRQLLEIVRHDEVCRRLMTTPGVGPVVALTFRATVDVPSRFTSSKAVGAAFGLTPRRQQSGEIDRMGGISKCGDAMMREMLFEAALVLMTHSRKWSWLKAWGMKVARHRGMKRAIVAVARRLAVIMHRMWVDGSEFRWTRQEAAAA

SEQ ID NO: 323897 - protein, 534 aa, unidentified
MEITTIGLDLAKQVFQVHGVNEAGVVVVKRRLRRAQVVTYFASLPACLIGMEACATAHFWARELRSLGHEVRLMPPQYVKAYLKRGKNDAADAAAICEAVTRPSMRFVPVKTAEQQSALTMHRVRELLVRQRTQLINAVRGHLAEFGLVVAQGTWNVPQLLARMQEDQRVLELARQVIELLAAQLDEVGQGIAEVDARIRAWHKAHPVSQRLATIPGIGPLIASAIAATMPDPNAFRSGREFAAWLGLVPRQKSTGGKQRLGRISRLGDKYVRQLLIVGGQTVLLRSKAARPAQPIGASGHVSTVSTGRTHDCKAITLCHTLTFLLQAGVHIHPHMRFLVDRQDKGVGRRRRIKADDVFKLGDEIGIVRAFEGSETVGLQLMNLPDPLNRTQRYAHGLGHGAAGPVHGLNQRLAASQRNQPLDIGIRHRRLARLSADFTKKTVDACLGKPPLPAPDGRSADAGKPGNLGDVQPVGRMQNDPSPRHMLLRTITIGDDRFQANTILDRNKGTHILGHADGIAYPDNNVNPMNASLH

SEQ ID NO: 323898 - protein, 349 aa, unidentified
MGMLADRVDYVIGVDTHRDAHAAAVVTPSGAVEAEASVSADVRGYRRLLGFARERAPGRRVWAIEGTGSFGSGLTTFLLERGEWVAEVDRPARPARRTGAKSDQLDAARAAHEALAREHLAQPRRRGQREAIRVLLATREGAILARTKAIAQLKALVVNAPERIREQLRRLPTDEQLTRCARLRTGPSQSVEHRATIIALRSAARRALALEAEAADLQSQLELLIGELAPALLAEPGVGVITAGQLLNAWSHPGRFRSEAAFASLAGAAPIPASSGQTVRHRLNRSGDRQLNRALHTIVLSRLAHHAETRAYAARRTAEGKTPREIKRCLKRHLARRLYRLLEAGAVTA

SEQ ID NO: 323899 - protein, 412 aa, unidentified
MTVTNQFAAHVGLDWADKKHDVCVQFKNGERVFDVIEHTAEALDAWLTELHQKVKGRIAIALELKKGPVVYALQKYPFITVFPVHALSLARYRQAFSPSGAKDDPQDAELALELMLRYPQKIKAIEPDNADIRLLQQLVEQRRQLIEDKRRFVNRIINTLKQYYPQPLEWFSHRGSLLLCELIIRWPSLQQLKRARRDTIRNFLNAKGGRAMALTEQRVASIDNAIPLTTDPSVIEANALMAAALATQIKVVSEIIKTYDERIETLFDTLPDAGLFKSLPGMGPCMGPRMLAALGDNRDRFNSAEEIQNYAGIAPVTERSGQKSWVHWRWQCAKFVRQTFVEWAAKTVNSSYWAKLYYQGLREKGKSHQSAIRALAFKWIRIIYRCWKARTCYDEAKYLLALEARHSPLLKP

SEQ ID NO: 323900 - protein, 343 aa, unidentified
METVYYIGFDIHKKTISYCIKLSDGKIVQQGKIDAERKVLFKWQSGLPGPWLGAMEATMFTGWIYDYLKPHALELKVAHPEMLRAITAAKKKNDRADAEKLADLLRANLLPECYMASEKIRELRRILRYRNMIVRTSVKMKNKISGLLMEVGAQYNKKRLHGEKYFTELLEKVEDVPASVNDLLKLSRSGLEMFEAVQRRLLETLHDNTLICERVRRLQTINGIGEVTALTWVLEIGDPDRFSSVRQAISYCGLCSAQNESAGKEQRGPISKKRNKHLQTVLIEAAKLAPRWDQQLANIHARELERGNRNRATLAVARKLVAYMLAVEKRRADFIQETTLEAA

SEQ ID NO: 323901 - protein, 383 aa, unidentified
MQPNDTVNPTILLAIELSASTWLVAARVPGAEKPHLHRIDGGDTAALFALISSLRARVARRLDAPQIGVVCCFEAGRDGFWLHRLLTAHGVASHVLEPTSILVNRRARRAKTDRLDAEGMLRVLAAYLRGDHQACSMVRVPTLDEEDAKRTHRERENLVHERLRIENRIEALLFTQGIRKRPSLRSWERDLDVLRTGDGREIPRHLRAELDRLRRRLVITLELIREVEAERDQAAETKPQDQACRKIAALCRIRGIGANFAAVLTREVFYRSFDNRRQIASYVGITPMPYQSGGMDRDRRISRAGNPRARTTMIQLAWLWLRYQPGSELAEWFRERVGTLAGRTRRIAIVAMARKLLIALWRYAETGVVPVGAEIRAETTIAA

SEQ ID NO: 323902 - protein, 376 aa, unidentified
MTRIVYIGMDVHKDTYSLCSFDSQENYMFSETTVKAETPAVLSYIKGIEKRFAADDVLPVCGYEAGPTGFSLCRDLQKKNISCVVMAPSSLPKSPDEKKRKTDKIDARNLALHLAHNTYKAVNVLSPEMETIKELTRTRGAALKSQKRAKQNLLSFLLRKGMVYPYGGRAKYWTQKFYEWLKTLAFTNAIERYSFEEYLAEVNHQMSRVTRLDKKIAEIAEDPLITEGVKKLCCFSGISTLTAVSFISEIGDFNRFEKASYFASYLGLCPGIHSSGLSSKQLGITKAGNKNLRRLLIEAAQSMSHSQKCGKKSSGLLARQKDMNPLVIAYADKATERIKRRRSSMIFRGVNTNKATTAVAREMACFIWGMMTNNIA

SEQ ID NO: 323903 - protein, 383 aa, unidentified
MRNSAYAAGREELVLAVSLELATASWKIACHDGRRDKPAVHTLTDPQAGARLQAALDLIERQKQQWSLRAGVRTVVCYEAGQDAFWICRALQAHGIECYVIDAASIPVVRHRRRAKTDRLDAIKLVLNLRAWLHGERDRMHVVHVPSVQDEALRHLTRDRAELQKEVLQHRNRIGKLLRTLGCWDDLKHGFASRLARGEVRCYDGSPLSPEMHDRLLRECERVALARQQLAALEKARHQALPTTVRERIDHLTRLKGVGQIGASRLVLELFWRQFDNRRQVGSCTGLVPQPYDSGDSHTDQGISKQGNRRVRSLLVEMAWYWLRYQPGSPLAQWFRHRTEGTGANRRARRIAIVAVARRLVILLWRYLEHGVIPQGVQMKPST

SEQ ID NO: 323904 - protein, 417 aa, unidentified
MKCFVGLDISSTKLDMCIMLSDTSTPVTASLSNDLSGATEIKNHILDLNHTYHFERIVIGMEATSLYSFHPAMFFHEDRQLKELHVEIMVEQPNKIKKYRDAFEENKNDTIDAFYIADYFRIERFSPSFLKEEKYMALQHLTRTRLQIIEQLTRTKQHFIENIYYKCNTLAYQFKKEELSTNLWSSTMMTLMTDEMTLDELANMPLQELDDWLQKLGKGHFKDSEKLAQTIQAAIRGSYRLSKLQQDSVNVILGLLAREIRNLEKMIKEIDKAIEDMVETIPEYQCLTSIPGVGKVYAAGIIAEIGQIERFKDHPQVAKFAGLNWREKQSGNSNSQHTSLVNRGNRYLRYYLVEAANSVRRYDDEYKDFYKKKYHEVPKHQHKRAILLTARKFVRLVDVLLRNHQLYTPPRRIMEDN

SEQ ID NO: 323905 - protein, 399 aa, unidentified
MEPQVFVGIDVGKSQHHATAVNQQGRVVHDKPLPQSEPKIQELLTDLVAKHGELLVVVDQPKTIGALVVAVAQQMDTQVAYLPGLTMRRVADLHPGQAKTDARDAYIIAETARTMPHTLRGITVAEEQIAELSMLCGFDDDLAAQLTQVRNRLRGLLTQIHPALERVLGPRLAHPAVVDLLGRYPTPAGLKRAGRGHVRARLKKLAPRMAARLTDEIFRALAEQTTIVTGTHAAEHIIGRLAAQLQQLTQQRSDVEAEILLVVDAHPLTEVLTSMPGVGVRTAARILTEVVGKDFQSAAHLASYAGIAPVTRQSGTSIRGESPSRRGNKVLKRVLFLSAFASIKGDPASRAYYDKKRAEGKRHNQAVIALARRRSDVLFAMLRDGTFYESRPAQLVPAA

SEQ ID NO: 323906 - protein, 364 aa, unidentified
MKRKVYVGMDVHKETIQIAYLTSNTKEMVKEQQIKHNEVHIKKFINKLKTEWNEIHCCYEAGVTGYPLYRYLKSLGVNCILVAPGKIPRQSSDKIKTDKRDAIKLARLLRSGDLESIHVPSEEDEAVRDYLRSRDSLRLDLGRNRQRLMKFLLRKGNVYSTTKYWTVSHYKWLNNLHFENEILHETFNDYYSRVRVQEENLKAMDQKIQEIAKSEAFRERVGILRCFRGVDYLTAMFLLSEVNDFRRFKTAGSFMSFLGLVPGEYSSGSKRKQTGITKTGSPRLRRILTEAAWQHRFPGTGSKIVAARRTGQPALVVALAEKASLRLHKKFRNLQLRGKTPQVMITAVSRELSGFLWAATNLVA

SEQ ID NO: 323907 - protein, 430 aa, unidentified
MHNKNYISVGIDVGSAFSFMTILAPDETVILKPFKITHNNKDSLERAVSEIKKAEELYSLESRTFLESTGIYHFPLFCYLVDCGFNASIINPIITHSTKNGNIRKLKNDKIDSKGIAKLGLSKDIPVSQFPAKLVLELRSLTRKYYDLTDERSAHINKLKGDLHTVFPQYLDVFCDVTGKTSTMILRQYGTPDKILRGHKKTMIEKISKASRKGLAKASERYEKLCAAANAAKTFGCQIDSIYFNIFLTLDLVEKLDSALDSILNRIRQLITFNKNEKFIQQIKLLNTIPGVGFLTAVTIMCEIVDFSAFRNPKQLFAYFGLDPEVNESGKFVGTQLHMSKRGSRIARRAIFAVALASIRTKRNGEGINPYLRKYYELKSGQKPKMVAIGAVMHKVCNIVFAVLRDEKAFELRSPEEHCKQYQRPALAAA

SEQ ID NO: 323908 - protein, 411 aa, unidentified
MHNRQNYLYVGVDLHKEQHTAVIINCWQEKLGEIQFDNKPSAFSKFLLEVETYVSDGLSVVFGLEDVGGYGRALAKYLVDHKQVVKEVNPALSFLERKSHVTTQKSDSWDAECVARILVNKFNQLPDAKPNDLFWSIQQLVSRRNALVKAQSALKNQLHIQLNHHYPSYKKFFSELDGKTALAFWQQYPLSSCLEEANIKQLTAFLLDVSNNTCSVKKASEILKLVKEDGQTMKEYQETRDFLVRSIVRDIEFKKKEMKYIERELKRLVNLLDYQLETMPGIELVTASALIAEIGDVRQFPNANKLARFAGIAPVYFGSGGKGKTHKSKQGNRALHALFYNLAVQQVQVAKGSKLARSPVFYAYYQKKLKEGKTKGQALVCIMRRLVNIIYGMMKHKTAYELPVVQEKEVV

SEQ ID NO: 323909 - protein, 355 aa, unidentified
MLADRVDYIIGVDTHKATHTAAVVTPTGAALAHRTVPADADGYLHVYRFAVEQAPGRRVWAIEGTGSYGAGLTTHLLEQGEWVVEVDRPARPARRNGTKTDDLDAVRAAREALGREHLAQPRQRGDREAIRVLVTTRQSAMQARTCAINHLKALVVNAPERLRQQLRALATDQLLARCARLRSHPTQPIEYRATIAALRRTAQRSLALAAEADDLHAELDTLIRQRARWLLAEPGIGVICAAQLLNAWSHAGRLRSEAAFAMLGGAAPIEASSGKVVRHRLNRSGDRQLNRALHTIVLSRMAYHAETRAYVARRIAEGKTAREIQRCLKRYLARRLFKLLEAPPAHAQKEKIATT

SEQ ID NO: 323910 - protein, 419 aa, unidentified
MDVMIERCAGLDVHQATVVACVRIRDGGKRARREVRTFGTMTHELEELRDWLGEHGVTHVGMESTSVYWRPVHAVLEGHVTLIVGNARHIRNVPGRKTDVKDAEWIADLVAHGLIRPSYVPPRPLRELRELTRYRRKLTELQAAERNRLQMQLESANIKLASVATDVLGVSGRAMLRALIKGEDGPDAMAELARGRLRTKRAELAQALRGRMDETQRVLLAMQLRRVEQTEQQIEELDQRIDERLKPYRAEMALLMQIPGISRVNAAVVVAEIGTDMTVFLSVHHLAAWAGVCPASHESAGKRRNIGVRHGNKHLRTALFEAAMAGSRTKGSYFRDKYYRLKARRGAKRAGLAIAHKILIAVWHMLTRRVDYRDLGEAWLDQLDQQRTARSLRRRLERLGYEVTMVPRQPTSGIAEADA

SEQ ID NO: 323911 - protein, 347 aa, unidentified
MKRIAVDLAKSVYQVAESVRSGQVVQRKRLNREAFRRYIQEQTEPVEWVMEACGTAHYWGRVAQSLGHRVKLIHARYVRPYRRRNKTDRNDCDAMLEAARCKDIYPVPVKPHEQQLLQQLHGLRETWKKSRTQRINLLRGILREAGIEAPASTAAFIRAAHALVDRPELAPLRHQLHIVLAEINLYEQCMAECEQQLKRWHADDEVVRKLDEVSGIGLLTASALTAAVGKPERFASGRQLSAWLGMTPNEYSSGERRRLGRISCKGNIYVRTLFIHGSRAALLAAQRCQARTPEKLTELQRWAVETAARIGHNKAAVALANKLVRICWAVWCHERRFNGNWQSTKPA

SEQ ID NO: 323912 - protein, 428 aa, unidentified
MARVVEYLTSMIIYKEVEDSPIWLIFHTGGVSMHYLGIDIGKKEHEAGLIDNIGKPIGKSLRFANSKRGSEKLLTFINNHQLTIENCVIGLEATGHYWLSIFTYLNQLGFKVTAFNPLRSDALRNFFIRKTKTDARDAFLIAQVIRIDMPDATPFLEEDLLQLKQLERLRYSLVDQSSDIKRKIIALLDQVFPEYEDMFSEVFGTSSSELLKHYPMPEDIQAIDTETLAKFLNNASKNSYGERRAHEKATKIKESAEDTFGINMATDAFRMQIHLLLEQISLLDKQIDELDKKLMKLVDNQNTHLTTINGIGYPTAAVILGEIGSIKRFERPEQLVAFVGLDPAVKQSGNFEASYVKISKRGSPYLRRAIWYAAFSASQCDPALSQHYKRLKSRGKSHQVAVGAVARKLTHIIFAILRDQKPYEPHVK

SEQ ID NO: 323913 - protein, 486 aa, unidentified
MSVRKTKPKPRQNRPKDPAARVVAQARREAQECAELGSLPVQHSHAAGIDVGDASHWVCVDTTPDGSDTVREFPAHTPGLRELVAWLRHCGVTTVALEASGVYGHVLFLTLIEAGFTTVMTSPSFTRQIKGRPKTDRRDCQWIQRLHKHGLLPSVFQPDEATQTLRSYVRQRANHVRLSGQHIQRMQKALQLMNLKLTKVLGDITGVTGLKIIRAILKGERDPQALAKLRDRRCKKAEPEIAQALDGRYRPEHLSELHGCLTMWEAYQDVIAELDKVIAGQLRTMRRSTSLPPLLPKPRVRGKKPHDPKFDVRTALYYVTGVDLTAIEGIDALHALTLVGELGWDFTKWPTVKHFASWLGLCPNWKKTGGKVKSSQTRKGKNRAAGALRLAAWSLMRSKSYLGAYLRRQRSRLGAPKAITATAHKLARILYNLMRYGEAYVKQEEAAYAEQVRQRTEKQLHRRAKEMGYELKKIAPPTKAEPPEPC

SEQ ID NO: 323914 - protein, 367 aa, unidentified
MLYLGIDQHARQLTISLRDDSGDVLQARQVSTQPEKVQAFFQQLTRERLRDGESFVAVLEVCGFHDWLIRMLQDYRCHKVILIQPDDRKKCKTDRRDAAGLSELLWVNRERLLLGKPVRGLRQVDIACSTDQENRRLTTLRKEAGQGRTRLVNQVRHLLRRHNLQWQMPTKRLPTKAAIAWLKQLALPEIDRLEMNHLLADLEQVQQRLKELEQVLAQRCGVSAEAQLLASIPGVSYFTATALACRVGRVERFPRAASLANYWGLTPGCRNSGETSQRLGSITKAGSAMARWLLAQVTHKVLRRDARLREWFKRIKRRRGSTIARVAVMRKLANIIWHMLSKRLTYAECRARAATGAKETEAQTCGS

SEQ ID NO: 323915 - protein, 351 aa, unidentified
MMIIGVDYHPSFQTIAFLMEETGECGEQELHHSDGQAEKFYRDLKQQGICVRVGMEATGYSRWFERLLAELGFELWIGDPAEIKAKRVKKQKYDRNDARLLRRLMLENNFPQIWVPSPENRDLRQLLWHRHRLVQMRTRIMNQLQALAMNEGYRWKKKLFREQGRAQLEKLTLAPWASRRRRELLELLDRMNPTIEELTAAVEREARKRPEVLRLMTHPGVGPLTALAFVLIIGTWERFPRGKQIGTYVGMIPSEDSSAGKQRLGHISKQGNSLLRFLLVEAAQAAARIHPGWRRRYIHLAMRRHKSIAKVAMGRRLAIRLYWMWRNGCEYSPSLEFGSYAGQLGIVHGVR

SEQ ID NO: 323916 - protein, 442 aa, unidentified
MTAHPYDLVIGLDRSDKKADLCLLDPRNGQRRSAVIDTSPEALWEWLLELRQQHPGACVGLCLEQPAVHLIPFLEAYDWITLHPINPITLQKYREAFVTSRAKDDTKDAEYLADLLLTHPAQLPAWAPEDSATRAVQHLVFHRRALVDERTGLSNRLIALLKQYYPQALTLCGQDLWRPLATAFLLKWPSLQAVQKAKPATLKQFYHLHGSRSATLHKQRLALVEHAVPVTDESAVIESFVLRVQLVCRQLQLVQRSVTEFDRQIAAAYAAHPDRTVFASLPGAGPVLGTRLLASLGAQRERFDSAASLQRYTGVAPVTKKSGGSCRIHRRYLCPKFHRQSFHEYAKESILWSRWAAAYYLQQRTKGCAHHTAVRALAFKWQRVIWRCWQDRKPYDERIYEAALRKSGSPIVALFDKVELGKSPWKNPAKKTKKTIDGLPQR

SEQ ID NO: 323917 - protein, 342 aa, unidentified
MDVKTLGIDLGKSVFHVVGLDERGAIALKRRVTRTQLGVLVGNLPRCVVAMEACPGSHHMARRLAEHGHTVRLLPPQYVRPYVKTNKNDFRDAEAIAEAVGRGTMRFVPPKTVAQLDLQALHRVRDRLVGQRTALVNQIRAFLLEQGRPMRPGRLALRGELRRLLAAAAPGISPNLARLLAQLSQEWQQLEERIDCVTGELVAVATTDPACQRLMAIPGVGPISATALVAAVGNGRAFSKGRDFAAWLGLVPRQHSTGGKPRLLGASKRGNTYLRRLVVLGAQSVLRSKVRDRQRFGPWLRRLELRVHRNVAVVALANKLARIAWSVLANATPYRPLMDEAA

SEQ ID NO: 323918 - protein, 347 aa, unidentified
MNHYAGLDVSLEETAICVVDSTGQIVKEARAASEPETLIAALREIDLPLERVGLEACSLTAWLHDELHSAGLPAVCIETRHANAAMKTMPNKTDRNDARALAQIMRTGWYRQVHVKSRQCRLWRSLLVARRSVLNEMRSIENVVRAVLREGGLKLGTPSRAAFAERVRDLMAEDASVKPLVDPLLTILVTMLDQFARLTKQVLDIVRREKVCRRLMSVPGVGPITALAFRATIDRPDRFRRSRDVGAHLGLTPARYQSGETDVSGRISRCGDELARTALYEAAHTLLVRSRKWSSLRAWGMKVAKTRGMARARVAVARKLAVILHRMWSDETEFRFGRNPAAALAAA

SEQ ID NO: 323919 - protein, 338 aa, unidentified
MVYGAIDLHMRYSWIRIIDADGIVQREQRIPTSRERLVQAFDGLGAMRILLETGTESEWVAEVLEGAGHEVIVADPNFAPMYGELRRTIKTDRRDVAALAEANRRMWYRATHRVSREQRDIRRILRSRRQLVQMRTGTLSLIRSLVRQAGFRAKANVAQGLPKYIAQLTLPSTLADTVAPLCRLIDTLNREIATIERRLRAATASDPVITRLQTVPGVGPIVAMTFRATIDDITRFDRADQVSAALGLVPRENSSADRRHRGHISKAGPSELRSLLVQAAWCSWHTRSNVALRAWAERIAARRGKRIAVVALARRLSRILYALWRDCATYRMEAVIAH

SEQ ID NO: 323920 - protein, 373 aa, unidentified
MPKYSTAFGMDVHLRSTTVCALDADTGEAVTRRFPGNPWGEIAGWMDGFPGPSLAAYESGYLGFAPQRELAGLGVECVVAAVSKIPRSAADSASKNDRNDAARMAKAILAHDISPVWVPSPEVEGIRDLAGAYDGATARLATAKQRLLAFLARRGFVYGGTTPAGNPRKYWTYDFLRWLDKVRPEDDGGVRALAALRNEVEAAAEARSDLLSEYGAAVDASPIAAEVAALQSIKGCAFALAAAFSAEVGDFTRFRSGRQVTAYFGLAPSQRSSGDSVRLGGVSGAGNALVRKLAVEGSWCYAAARHQPKLMPRDTGVPLEIRMHGRKGSERLLRRREEMLARGMPAAKANAATAAELVRWLWALGMMCREGAE

SEQ ID NO: 323921 - protein, 406 aa, unidentified
MHRDDVVATVRVPGGGRRRWDQQTRTFRATLSGLADLAAWLAEAGVTLVGMEATGVYWKTVFQALEERFECWLLNAHHLRNVPGRKTDVKDSEWICQLVQHGLVRPSFVPPPEIRRLRDLTRLRKAQTNERGRSIQRLEKVLQDAGIKLSSVASTTYSKSARAMLEALLAGVTDPEQLAELSKARMRLKIPQLREALQSRFQIEHHGIMVAQLLAHIDTLDAAIQNLSERIEVALTPHAHTVELLCTIPGVQTHAAQVLIAECGLDMTLFPTVKHFASWAGACPGHHESAGRRRSGRTRPGPRWLTDALTECARAAVRTRGTYLAAHYAQLRGRRGEPKAIGAIRHDLLVAYYHIVRDQVPFRELGPDWQRKRYSPEHRARRLQRQLEALGYAVTIEPTKQAEQAA

SEQ ID NO: 323922 - protein, 403 aa, unidentified
MNAVGIDVSKGKSMVTILRPFGEIVSSPFEIKHTSSDIHSLIKLIHSIEGESRVVMEHTGRYYEALAHQLSAADLFVSAVNPKLVKDFNNDSLRKIKSDKADSVKTARYALDKWQSLEPYSITDELRAQLKVMNRQFHFYVKQKTAMKNNLIGLIDQTYPNANTYFNSPTRSDGSQKWVDFVSTYWHVDCIRKMSLNAFVEHYQNWCKRKKYAFNKSKAEEIYTKTKELVPVFPKNEITKHIIRQAIDQLNSTSVTVETIRTLMNETASKLPEYSIVMQFKGIGPSLGPQLMAEIGDVTRFTHKGALTAFAGVDPGVNESGSYAQKSVPTSKRGSSNLRKTLFQVMDVLIKTMPQDDPVYQFMDRKRTQGKPYYVYMTAGANKFLRIYYGRVKEYLSVLPDPS

SEQ ID NO: 323923 - protein, 279 aa, unidentified
MQITTVGLDIAKRVFQLHGVDAAGKAVLRRKLQRSEVLAFFKALPPCLVGMEACGTAHYWAREIRELGHEVRLMPPSYVAPYVKRGKTDAADAAAICEAVTRPTMRFVPIKTAEQQAVLMLHRTRDLLVRQRTMLVNALRGHMAELGVIAPQGIARVADLMAVLLGEDTTNVPALARQALRGLAAELEALDRRVKEIEVAIVTWHKDNEASRRLATIPGVGPIRASAIVAIITDPFQFHSARHLAAWIGLVPRQHSSGGKQRHRVIATCADCWCWVQPR

SEQ ID NO: 323924 - protein, 433 aa, unidentified
MNNVAGIDVSKGKSMVSVLRPFGEVVAKPFSIGHTGSELKELADYLKSLDGETRVVMEHTGRYYEPVARFLHEEGVFVSAVNPKLIKDYGNNTLRKVKTDKADARKIARYGRDNWAELRQHTPMDTIRMQLKTLNRQQGLYSKTKTMMKNNLIALLDQTYPGVNALFDSPVREDGSQKWVDFATAFWHVDCVRNMSLTAFAERYRKWCKRHGYNFSQSKAVEVHTGAQDLIAMLPKDALTKTMVRQAIDALNAVSASLERLKAEMQALAAQLPEYPVVMAMHGVGDSLGPQLMAELGDVARFTHRNAITAFAGVDPGADQSGTHEAKSTRVSKSGPPELRCALFLVMDCLLKTMPQNDPVYRFMDKKRAEGKPYLVYMTAGANKFLRIYYGRVKEYLASLRKIKEVSFLVAEPYCPYAKKKHLMTERERLRCF

SEQ ID NO: 323925 - protein, 344 aa, unidentified
MGEVSTIGLDIAKSVFQVHGVDADGTVVIRKRISRAKILEFFAALPSCLVGIEACPSAHHWSRKLQALGHTVKLMPPSYVKAYLKRSKNDANDAAAICEAVTRPSMRFVPTKSDQQQSGLMLHRGRQLLVRQRTMLSNAIRGHMAELGIISAKGRNGTAELLEIIANADDDRIPAVARLSLDALARQYDNTTAEIRAFEKHIHAWHRSCEESRRLEEIPGVGPIVATALVAEVGDWKVFSSGRNLAAWIGLVPKQHSTGGKERLGGISKQGNRYLRWLLIAGAMAVIRYARQHGTKRLWLARIMERRPIKVAAVALANKIARMAWAMMVRGERFKEPRLLSEAA

SEQ ID NO: 323926 - protein, 453 aa, unidentified
MSQYRLKSKELQVSELQKQLQHVNLNAAGIDVGSDRHLVAVPEGRDDVAVREFGAFTADLHALANWLSKCGVTTVAMESTGVYWIPVFELLEGLGFEVKLVDARRVKNVSGRKSDVLDCQWLQQLHTYGLLAGAFRPADEVCVLRGFMRQREMLVQASSMHIQHMQKALQQMNLLLHNVVTDITGMTGMKIIKAIIAGERNPHVLAKHRDNRCRSSAATIAKSLVGNYRAEHLFALKQAVELYETYQAKVRECELAIADYLSTQVNRTEAEPPASERTLRARDCMRGEVDMRVQLFKLAGVDLFSISGFGADTLLTLAGEVGFDMSAWKTEKHFTSWLSLCPGTNKSGGRVLTGKTKRSANRAAAAFRIAASCVAKSKSALGAFYRRIKARAGAPKAITATARKLAVLYYTMLKNGSSYVEVGQAAYEQRYRQRRFSAMQKQALAMGYQLVPA

SEQ ID NO: 323927 - protein, 350 aa, unidentified
MVMIGTDSHKRTHTVVAVDDVGRRLGVKTVGTNSEGHLDLVRWSAQFDEITFALEDCRHLTRRLEADLLAAGRRVVRVPTKLMAGARRAAREPGKSDPIDAEAVALAALRHPDLPVAELDGPTREVKLLSDHRHDLVVQRTRIASQIRWYLHELDPDLEVPSRGLRRHCVVAELAVELDRFDGLVARLTRNLLARCDELNHQINALETELRGLVRAIAPTLLAIPGCGVLTAAVIIGETAGVHRFRGKDAYARFTGTAPVPVWSGASAGKVRLNRGGNRAVNCALHMIAVTQARGIGPGQAYLAKQQARGKDKTAALRLLRRRLSDTVFTALRADQQHQTQATPPVAIAA

SEQ ID NO: 323928 - protein, 483 aa, unidentified
MAKIIKRSKEDYTAKNKKKQIKINDLKTIKKVCENVAGIDVGGEYHYVAAPDPKYDGKIVVNRFGSFTTNLKECVDWLKQCNIVSIAMEATGVYWTILYAMLKAAKIQVILVNPRDFKKIKDKKTDVCDAEYLQLYHSYGLLEGAVIPEKRISELRTFTRLREQSVEDSATSIQRMQKALINMNLRLDNVLSDISGLTGITIIRAILNGERDPKKLAAYRDKRCKKSEEEIEDSLNGFYQEDQLFALDRALRQYEFHLQEIQKCDVMIQAKLREFDTHFNYRKTVENNNLDDRLEKPKRRKSARKPHEFSFNLKNEIARITGVDLTLLPAIGVSTALTLVSETGLDMTVWKSEKHFTSWLGISANNKVSGGRILQNRTKRKKKKAAITLRMAVSGLYREANDTAIGAFFRRKRAQIGAAKAITAAASKLARMYYKTMLTGKPFEEPGAVAYQQLQKEKYLRNVRRQVEQWGYKLTRIEPPIEV

SEQ ID NO: 323929 - protein, 359 aa, unidentified
MDGFKQLLQTIRDCTKKSDKIKVGLEATGHYSYNILGFLLDNDLAVYVMNPLHTNLYRKSLSLRKTKTDRVDARTIATMLLSDVDLKSYTDTAYHNEELKSLTRYRFDKVRERAKLKQSVSRLVTILFPELEKLVPSLHIASVYALLSEYPGAKQISEIHLTKLTNLLATASKGRYGKDKAIQIRDAARTSIGSVMPAKFLELKHTIKLIRELTSEIDEIEVSIQKIMDELNPPILSIPGVGIQSAAMILAEIGDINRFKSSSALVAFAGIDPTVRQSGEFSSTHNHMSKRGSPYLRHAIFLAATTCSFHNSPLNAYYKKKRDQGKHHLTATGAVARKLTSVIYAVLRDSKPYEPKSFC

SEQ ID NO: 323930 - protein, 422 aa, unidentified
MKEWQCITHYAGFDWARDHHAVVIANRQGQIVADFEFQHTQAGWQTFRDKTAAFPNLAISIETNQGAAVDQVLQFGYTVYPVTPVAAKAYRQRKAPSGAKTDHLDAWSLADALRLDGQGWRALQPTDPLTVQLRLLCLDEVTLICQRTQLINQLQQALVEYFPAAIEAFDDWTLPACWDFIIEFSTPELLVKAGKRRWEKFLHVHKLWRPATTDKRLEVFARADQFAGSAPITQAKSRLALSLCKLLRTLQQQLDEYRKQIEELFGRHPDHDLFGSLPGAKRVLAPRLLAAIGSDPDRYGNDAAVLQAFAGTAPICFQSGQRNQLKMRWACDTFLRHTVHLWADCFRHASSWGEVYYQNKRRDGMSHACALRCLGQRLLKIVFRMISDKKPYDADLHARNQQKHGSWILTLANKTPSAAAGE

SEQ ID NO: 323931 - protein, 358 aa, unidentified
MEVYVGMDVHRKRSQVALLDQDGGQMLNRNLPNDPAELVPILGTLAPRTPVAFEAAYGWGWLADLLDELGLEPHLVHPTRCKAIASARLKDDRVDARTLAHLLRADLLPEAWIAPPQVRDQRALLRHRTALVRTGTALKNRIHAVLADRGVRVEQRLWSQAGRAWLAQLDLPAAQRRIINDCLGLIDQLTPVITQLERDLLARARPDPRVQALRELPGIGRITAMTLVAEIGDISRFPTARKLCAWAGLTPQVRNSDRTIRHGHITKQGSAAVRFVLEEAAERAKTRPPFAGFYAQCAARRGCHIATVAVARKLLARCFHVLTEVDNHQHNHADHASEKVTSPGALEVPHVPATRPSN

SEQ ID NO: 323932 - protein, 366 aa, unidentified
MKKTSTIRVNRNMIFKGHKLTIGLDLGDRWSFYCVLDEAGQIILEQKLPTTPEAMKQTFGKIPRSLIALETGTHSPWVSRLLRELGYEVLVAHAQKVQLISKSNRKNDRHDARTLARLARIDPELLGPVRHRSAKAQIHLTVIRARAELVSARTALVNAARGLAKSYGERLRKCGTQQVSRELAAELSVELREVLEPLLQEVESLNERIKEYDARMEKIAKESYPQVELLKQVKGVGTQIALTFVLTLEDPHRFPKSREVGCFLGLRPGRRDSGESQPQMHISKEGDPYLRTMLVQGAHYILGPFGQDSDLRRWGLKLAARGGKNAKKRAVIAVARKLAVLLHRLWVGGEVYEPLRNSQKAMRAVA

SEQ ID NO: 323933 - protein, 350 aa, unidentified
MNTNKTTNFLTLGVDTHLDNHVAVLVNSIGQVIDTNDFKVNSSGYEKLYNWCKSFGSVKQAGLEGTGTYGAGLCKFLQERQIEVFEVNRPNRAIRRLRGKSDPTDAENAARSVLSKESTAIPKSHDGIVEAMRYLVVARKSSVKAKTQAINQIRALLVTAPEQIREKCYLPSSYQCVSACKELEAEPDNLLEDTLISMLNLLSLRWEALAEELKTIDKQLKKLTSSAASSLLEQYGVGSYVAATLLVAAGDNPERLRKESSFAALCGVSPLDASSGKKQRHRLNRGGARDANNALWTVALIRMRSDFRTRKYVEKRSSEGKSNKEIQRCLKRYIARELYPIIVSDLSKLS

SEQ ID NO: 323934 - protein, 391 aa, unidentified
MIFVGIDVAKDKHDCFILNSEGTVLADVFTIANNRIGFETLLSRIQSCSQGESKIKVGLEATGHYSYNLLGFLLDSGLATYVINPLHTNLYRKSLSLRKTKTDRIDARTIAMMLMSDVDLKSYSNTAYHNEELKSLTRYRFDKVKERAKLKSSVARLVNILFPELEKLVSSLHIAVVYALLSNYPGASYIANANTEELAETLCTASKGRYTKSKTAEIQVAAGVSIGSKMPAKSIELKHTIALIRELDKEISEVESAIDKITSQMDSPIFTIPGIGRHMGAMILAEVGDFSNFASADKLLAYAGLSPSTYQSGQLQNCYAHMEKRGSRYLRYALFNAAKYVCLWCPTFSAYLEKKRSEGKHYNVAISHAAKKLVRLIFAMQRSGKAFFADY

SEQ ID NO: 323935 - protein, 333 aa, unidentified
MNVVVSGLDVHKDYTYATILGPDGEKLVQRKMPNEEVPDFLKPYGVERVAMEATTSIAPLYRKLTEEGYDVLVSHPKKTRYIAEARIKTDKVDSMALAELLRLNSLPLSYMPPPDIAALREKVRRRSFLVGQQTKLKIKIRSTLTYEGVKPPVEYGLFTRKGREWLTGLGLGPVDSYLRMMEPLRTEIRLLSLEMRHIAAGDEDVRLLTSIPGVGYYIALLVKAEIGDINRFHSGDQLASYAGLAPSTHSSGGITHHGRITKEGSRWLRWAMVEAAMVHFRFDSPVTRAYHRIAERRGKGKAKVAAARMLLLVCRSVLKNRRPYYNPVHGQAY

SEQ ID NO: 323936 - protein, 365 aa, unidentified
MKKITIATGRGTGKVQNQRLTIGLDVGDRSSFYCVLDREGEVILQAKVATRPEALREAFGGMPRSRVALETGTHSLWISRLLSELGHEAIVAHARDVRLIGESRRKDDKIDAQTLARLARIDPQLLPPVQHRSAEAQADLSVIRARYALVRARTGLICAARGLTKSFGERIRGRNPKAFRPEMGETLSPQLRVALTPLLDALETITERIREYDDQIETLAEHKYPEVALLKQVKGVGTLIALTYILTLDDPRRFRKSRDAACYVGLQPGRRNSGQSEPQLHITREGDSYLRMVLVQGAQHILGPFGEHSDLRRWGLQLAERGGKNAKKRAIVAVARKLAVLLHHLWISCEEYEPLHNTRKHMAAA

SEQ ID NO: 323937 - protein, 350 aa, unidentified
MIIIGCDYHPGFQQIAFVDTETGDYGEQRLAHSEGAEKFYRDLAAQGKKVGVGMEASGHARWFERLLAELNFELWIGDATEIARKRERKQKTDRQDAQHILQLLMENRFPKIWIPSGENRDLRQLVWHRHRMVQARTRIMNQLQAVALNEGLRCKKELWREKGRQQLEAFRLAPWASRRREDLLQLLDRLNPTISDLTQAIEQEVEKCPEARRLRTHPGVGALTALAFVLIIGRAERFQCGKQIAAYLGLVPLEDSSGNRRRLGHITKQGSSILRFLLVEAAQVTARSIPEWRNKYVHLTMRRGRKIAKVAMARRLAIALYWMWRKGWDYEQLRKFGSHAGQPENRDGVK

SEQ ID NO: 323938 - protein, 352 aa, unidentified
MRIIGCDLHARQQTLAVLDTTTGEVMEKTLTHSGTNVEEFYSTLPGPVRVGIEATGTMQWFLSLMEELGIECQVGHPAKIRAAEPRKQKHDRRDADLILKLLVENRFPSIWRPSKDLVDLRALLLHRHQWVRMRTRIQNALQAIALANGLRRGPSLWSQAGQCAIASLPLAPHTAHRRNELQAMYAKFEVEIEKLNQRVAEQAGERPGARLLMSHPGVGPITALATDVFLGDPTRFADGKALASYVGIIPSEYSSGGRQRLGGLSKQGNPLLRFLWCEAAAHAVRRDPELQRFYRRKLIQKGLGKARVAAARKLGIRLWILLRDQIDYHEFCRRGQMQQNSGDARAGMPGTR

SEQ ID NO: 323939 - protein, 403 aa, unidentified
MKYFAGLDWGGTRHAICVVNQAGQALLQTEVGHDAHGLESLQKQLKRIAPASAIPIAIERPSGLIVDALVAFGHTVVPIHPNAVKACRPCYSAAGRKNDQGDAYLLADVLRTDGHRFRPLVPPSDAIKAVRALVRTRDDLMKQRLMLGNQLQALLASFWPGPAALFHQIDSAITLAFLQRFPTPSSAAHLGEKRLAAFLKGKGYSGRHSAAEILARLRAAPVGLTGKLEEQAGGELVIALTRVIAPLQEQIAILAARIETEIEQLDDGVLLMSLPYAGHLTAAKILAEVGNVRERFATAEQLAAEAGVAPVTKQSGKSRSVKFRWACNHRLRIAITLLADNSRRGSPWAARIYAAARARGCRHPHAIRVLARAWVRVLWKVWTTRIPYDIRLHTSAQALVDAA

SEQ ID NO: 323940 - protein, 411 aa, unidentified
MSASEYQFFVGVDWGSETHVVCVLDCDRRPIAERSVPHTGMGLNDLTDELMSLAPSEPGRVAVAIEVPRGAIVDTLLARGIHVFSINPKQLDRFRDRHTVAGAKDDRRDAFVLADSLRTDRPAFRRVQPDHPRVVELRELSRIDDDLGQELRRLSNRLREQLHRFFPQALTLCPAADEPWFWALLDRVPTPAHAQRLPVKTVAAVLKVYRVRRVTAETIRDTLQTSALHVAPGTVEAASAHIALLLPRLRLLQEQRTAVAGRIEALLEELGKEEVPGEHRDVTILRSLPGVGRVVAATVLAEAARPLAERDYQTLRAHGGIAPVTRQSGKRVSISMRYGCNPRLRNAFYHWARTSVQNDPHCRAHYDRLRQHGHGHARALRGVADRSLGVLVAMLTSRTLYDSERRREIAS

SEQ ID NO: 323941 - protein, 429 aa, unidentified
MNSTQNKKIEQVKETTMIVGIDVGSEKHYFRAFNWRGIELTRKPVAFSNSMEGFNSFYNSVVELMQKNELKEALVGIEPTGHYWFDLGQFMGEKNIKFVMVNPHHVHKTKELDDNSPSKNDRKDPRVIAGLVRDGRYFYSYMPTGVYAELRNASNRRFVLVEEQTRAKNRLQKWVAVYFPEYKGIYTHIDAKGGLLVLKQAPTLEEIVRLGVEGIIKIWKDAKLRGNGHKKAMLILNAAMKSIGLKAGLTEARMEIQDLIEDYELQTKRLERVNDLIKELCQQIRYADKLLEIKGIGITTVAGFIAEVGDITRFDSTKELQKLAGLELVADSSGKHDGKTKISKRGRKRLRYLLFEAAISVVGKNEEFKEIHRYYTTREKNPLKKMQSLIAVACKLIRVFHVILTKGISYDASKMLKDIRRPGEQLKAA

SEQ ID NO: 323942 - protein, 389 aa, unidentified
MPHPMSARPSMESAATKEGVATVFVSLELSQSTWLVTSLAPGSATMSKHSVTAGDSAELLARLARLATKARSASKVPIKICVIQEAGLDGFWVHRLLEANGIESHIVDAASIAVPRRRRRAKTDTIDGETLLRTLLAWKRGEPRVCAMVSPPTPEEEDQRRTSREHAILLRERVRHVNRLKGLLIGQGITDYQPLRKDRRERLDALRTGDGRPLPPRLKAEVIREIEVIELLLRQIAEVEAERDAVAKCNTAQHHSAVALLKRLKAIGPQIAAVLYFEGLYRHFGNRREVAAYAGLVPTPWRSGTIAREQGISKAGNPRLRHIMVELAWLWVRHQPDSALSRIFRERAGAGSGRSRRIAIIALARKLLIALWRYVNLGEIPEGAVLKAA

SEQ ID NO: 323943 - protein, 359 aa, unidentified
MEAQRKALSFKGQNIYIGIDVHLKSWSVTLMSEATQLKRFSQSPDPDALYAHLVRNYPEAEYHSVYEAGFCGFWIHYRLVGLGIHNIVVNPADVPTTTSEKLRKTDAVGSAKLARSLRAGELKGIYVPGSESLETRSLIRLRDSITKDQTRLKNRIKSHLRYLGIEIPEEFSGPGRCWNRRFVVWLKGAETGTAYGRQTLDFLVRQYEALRGQRLEMLRAVMALSRTERFEKPLENLMTVPGIGQLTGMSLLSEIDDIRRFKSADQLAAFIGMIPMCHSSGEREGVGDITVRRSARLRSVLVEASWVAVRQDPALSMAYGNYCKRMAPGKAIIKIARKLVNRIYFVMKRNQPYVKCVVA

SEQ ID NO: 323944 - protein, 342 aa, unidentified
MREKRSIGIDLHRRNFTCCVRLENGRNYLSEWSLEQLPRFLQKLRRTDEVAVEVTGNTRLFYEAVAPYVARVVVVDANQFRVISHSVKKTDPNDARNLALYLAKGLLPEVRIKEKQQAEVASLTQTRDRLVKLRTALKNKVNNLLSARGIELNKESLSSEKGLTWVLEQKVEELAHLELDVMVEQIRSLNRSIARLERAIEEAGQKLEGYRNLTSIKGIGSLGAGILLSVIGDVNDFAQEGKLAAYFGIVPRVQDSNETEHRGRITKRGSKLGRTALVQCALIAKRYSPYLHRYYERIRARRGTGKAIIALARKFLSIIYYTLKNNWIFEDFPNFVVAEAKT

SEQ ID NO: 323945 - protein, 429 aa, unidentified
MNFRPIAGIDVGKFFSEMAILSPTNEVVARMKIHHDSNTDVERAVELLNKTEKDFASRPFIVMESTGHYHKILFHSLCKAGFEVSVTNPIQTDSIKNIGIRKVKNDKVDARKIALLYRFQELKSTNIPNEDIECLRSLCRQYYKLSDELTAYKNRLTGIVDQLMLNFKDVFSNIFSKAAMAVLEEYPTPAHILKADRNKLISLIQKKSRKSLKWSTAKYELLVSKARDFAPLSIHNASNVIMLGVYISMIKTLEESLEKVLKSIRLLIAEDMAKDMPMLALTLELLQSLPGIGLLSAATILAEIGDFSAFKKPGKLVAYFGVDPSVMQSGEFTGTRNKMSKRGSRLLRRVLFTTALANIRTKRNKEACNPVLLEFYKQKCQSKPKKVALGAVMRKIIIYIFAVLRDRKPYQLRSPQEHAQMLAAKHIAA

SEQ ID NO: 323946 - protein, 463 aa, unidentified
MSKNHRITKTGRGARQRAVIEGSLQLLRQHAAGIDVGSEEHYVSVPPDRDPEPVRHFGCYTSDLRRMAEWLKSCRIETVAMEATGVYWVPVFEILEEYGFEVYLVDARQTKNVSGRKTDVVDCQWIRQLHSYGLLTAAFRPEQEIAAMRAYWRHRQGLVESCSRQIHLMQKALEQMNVQLHKAVSDVAGMTGMSIIRRIVAGERDPVALAKLRQKGVKRSEAEIAEALNGNYRGEHVFALGQALESYDFFQGQMERCDREIQQCMAGIASKTSPTESEQVLRRRWKNQPHFDLRAELHRICGVDLTRIESIDAVTAQTVISECGTDMARFPNDKHFASWLCVCPNNKKTGGRIRSTRTRGHRRNRAADALRRAAQSLHHSKSALGAEYRRKRARLGAPKAITAMAHKLARLIYRLLKYGEAYVSEGLEQYEARHRERALRGLRHQAQNLGYLLVVQTTGEVVS

SEQ ID NO: 323947 - protein, 371 aa, unidentified
MAEYREAFVGIDVAKLKNAIAIADSGRDGEIRYFGEVEASDASMRRIIQRIAAKFDCVHFCYEAGPTGYGLHRLITSMGHDCMVVAPSLIPRKPGDRVKTNRRDALALARLLRAGELTPVWVPDESHEAMRDLVRARASAVETLRVHRQQVSAFMLKHGRIYPRKKGWSMRYLRWLQEQQFNHPAHQIALQEMVQAVRISKERVERLEKVIEEFVPIWSLAPVVRALQTLRGVDLIVAVTFATEVGDVTRFESPRQLMGYLGLVPGERSTGETVRRGGITKAGNGRVRHMLVESAWTYRHPPKVGARKLYLMEHAPSQIREIAWKAQSRLTARYRKLAGRGKRTTVVCTAIARELAGFMWAVAREAQLIQA

SEQ ID NO: 323948 - protein, 461 aa, unidentified
MTFSPCRSHGLGGGVTGSGGIDRPLIRGMTTGFFGGREALRNVDVAIGAAGRPGEYDRRLHVIDTSDIGAFLGLDVGKGEHHATAVTPTGKKAFDKRLPNSEPKLREVFGKLKAKHGTVLVIVDQPASIGALPIAVARDMGCEVAYLPGLTMRRIADLYPGEAKTDARDAFVIADAARSMPHTLRSIELEDETVAELEMIVGFDDDLAGEATRISNRLRGLLTQIHPHLERVVGPRIQHPAVLKLLDQFGSPAQIRKAGRRRLINLIRPKAPRMAERLIDDIFTALDEQTVVVPGTDAAALIVPSLANSLQAVLDQRKLLAARIEELLENHPLSQVLTSMPGIGVRTGARILIDVGDGTAFPSAAHLAAYAGLAPATRSSGSSIRGEQPSRRGNKQLKRAFFLSAFAALADPVSRAYYDKKIAQGKHHTQALLCLARRRADVLFAMLRDGTFYDPQPSPTG

SEQ ID NO: 323949 - protein, 377 aa, unidentified
MTAKTRSAMTSVSEPTVYVAFELGAKHWKLGLTSGFGEAVWVKTVGAGDWGAVRRMLARAKVRFGLPATAAVVGCYEAGRDGFWIHRALEAQGVSNRVVDSASIEVNRRARRAKTDRLDARKLAQMLVRACLGEQDLWREVRVPPPAVEAARHVSRERTQLTQDRTRLVNQMRSWLTTWGARLPARRGPQWWTTVRDWAGTPLPAEVQVRLARAQERLTVIEAQIDVITAGQRQAVAAAAAESALGRLVRLKGIAATGASVLLEEGLVWRAFRNRREVGGMLGFAPLPYQSGEQARDQGIDRAGNSRWRAMSIQLAWNWVQWQPTSALTQWYQQKFGRGGARARRIGIVALARKLLIALWRYATTGERPAGAVVKVA

SEQ ID NO: 323950 - protein, 331 aa, unidentified
MYVGIDYHKRYAVATSMDDKGQVVETVRLKNEPNDLIGFVDRLPEDSKIAIEATGNWYYFYELLEGKSPEIHLAHPLKTRAIAEARIKTDKIDSTILAHLLRTDLLPESYIPPREIRDIREVLRYRASLVSLRTALKNRIHAILSKNGIIVEYTDILGKRAKAQLKALEVRSCYRLGIDGYIKLTETLQQLIDEVTKAIEGIVENNPQAKLLTTIHGIGYYSGLLIVSEIGDITRFPNAKKLCSYAGLVPSVYSSGGKTRHGSITKLGSKWLRWIMIEQSQHFSKSCDRLERMYARIAYKHGKNTARVAVAREMLKIIYSMLVNNRPFVKE

SEQ ID NO: 323951 - protein, 359 aa, unidentified
MDKNTQVPAVRVGVDLSKRVIQVHAVDAGGRTLCNRALARDKFLAWCATLPAGCMVVMEVSSSAHHWARQLLLMGLDARIVSAHLAAPYRSEGHVGKNDANDAAAICEAASRPHMRFVPLKSVEQQSLLCVHRLREGIKADRTACINRIRGLLLEFGVAVPAGVRALRLVLDDVLEDAANEMNGLARMTLRRAQQQWRELDEHLAWCDDRLAAHERDNADVRRASALMGIGPVGASAAIATVGDFKQFKSGAQFGAWIGLTPKQHSSGGKSNLGTITKRGDAYLRTLLIQGAKSVVNSAHTRSDPISRWALALKERSGWQKAVVALANKNARILWAVMTRGERFDPHHISVKPGCAAPA

SEQ ID NO: 323952 - protein, 338 aa, unidentified
MNYVGIDHHRQYSHMTMMDQEGQVLRSGRVPNLRSEIERFLEGGEAMEAILETGRSSYTMVDVLEEMGVAVKIAHPHEVKAIARAKIKTDKRDSEVLAHLLRMNMVPEVYRRSKENRQAQRVLRQRSYYVSAMTALKNRVYAFLAQQREELREAVARESNLFSAKGQKALLELDLASGEKRLLEALLKTYRHLETRIGESTELVEKLYEKSREAQLVQTIPGFGKFLSVLVTVEIADLTRFADAAHLHAYAGVIPSTHSSGDRTHHGKIIKAGNRWLRWAAVEAVWPAIRADFDLRLFYQRLARGKGANKAKVATARRLLTIIYKVLKEGRNYIAYQR

SEQ ID NO: 323953 - protein, 302 aa, unidentified
MGQYVGLDVSLKETKVHVLDEQGQRVWRGRCASTPEAIEAVIRKHAPQAVRIGLETGPLTTWLWQALTDVGLPMTCLDARKAKAALNMRTNKTDANDAEGLAHLVRSGWYCEVRVKGREAMLVRSLLGARTQLLGIVTELSNQIRGVMKTFGLIVPKGGGRIFEANVRRLLEGEAAVAGVIVPLLEAWRAVRERTAVLDRQLLAAARASATCRRLMTAPGIGAIVAAAFVAAVEKPENFRNSRAVGVWIGLTPRRYQSGEVDYDGHISRRGDARLRALLYEAAVSILTRVQSESTLRRWVWP

SEQ ID NO: 323954 - protein, 397 aa, unidentified
MAGKSAGIDWAAEAHEVCITEEGRVNERFSVTHDERGIAQLIARLARAGVCRVAIERPDGILVERLLAAGVEVLAIHPNQVKAARPRFAVAHGKSDRFDAYVLAELARTDAHRFRALVPDGEETKALRALTRAREDLVGVRVELANQLRAQLQAFWPGALIFSALDSPISLAFLERYPSPADARGLGEQRMGGFLERNSYSGGAAPAELVARMKGAPQGTAVEAERSARREIVLGLVKALGPIVEEIAKLTSQIRGALAAHPDAAIFAPLFRDRKTAICPATLIAELGDARGRYPTEAAMAADAGMSPVALESGKLRVATFRRACDKRLRVAVANLADSTRHWHPWAREVYLRARARGQDHPHAIRTLGRAWIRVLWRCWQDRVPYDPGRHRNLNRL

SEQ ID NO: 323955 - protein, 447 aa, unidentified
MRCLGLDVHKDFAELAEASPGGPVRQLGRIRTTAADLRAFAESLGPDDQVAMEATINTFAIARLLEEHAGRVVVSNPMRTRAIADAKIKTDKVDAGVLAQLLAADYLPGVWQPDESTRVIRRLVARRTHIVRQRTRLKNQVHAILLRNLVTGCPATDLFGNRGRTWLQQVPLPADEREALDSNLRLFDLFGEELVVADSACARAAIGRDDVRRLMTVPGIDFAVALALVAAIGDIQRFPSSQRLVSYFGLDPRVRQSGSQPARTGLHITKVGRAHARGMLVEAAWAVARTPGPLRAFFDRVRARRGPQIAAVALARKLAVLAWHLLTRQQDYLWARPALVAAKYRKLDLRAGATPRRGQRGAAANYWESADARERDRAQPAAAEVEYRKLTGNWKERLRPLDASDGRNGRGRPKGEATLGPEAGRAAEVTSPSSALLRGGRPRPDGG

SEQ ID NO: 323956 - protein, 430 aa, unidentified
MEEVDEQALQVERVAALDLGKAALEACVRVPHESKPGRRLQEVRGYATTTGALLALADWLRCWGVTRVVMESTSAYWKGVFWLLEAEGFECWLVNAREVKNVPGRPKTDKADAVWLAKVAERGMCRPSLVHPRPVRQLRDLTRYRRSLIHDRTREMQRVEKLLEDAQIKLSSVASDIFGVSGRAMLEALVAGQRDPKVLAQMAKARMRGRIAALEEALRGFFTDHHAAVLRMMLDNIDRHSEQIAALDSTIAEAVAPFAVQVAQLDEIIGIGVTAAQELLAEVGVDMGRFPSAAHLVSWAKFCPQVHESAGKRKPKGRGRGNPWLAGTLGNIVATAARTDSFLGARYRRIAKRRGKQKAIVATGNSVLVIVYHLLGDPDARFGDLGADHYDTRINKHRRARNLAAQLQAVTGQRIMIRDGKAVIIEPEAA

SEQ ID NO: 323957 - protein, 400 aa, unidentified
MLGLKGSFDGFVGIDVSKDKFDACGITGDETKLFQFSATMDRKGFEKLKGHLAAVSISSVLIGMESTASYHVNLFSYLVSEGYKVLLINPLLISNYVKMQLRKTKTDKKDAVVIAQFILTNGDTLIQRATPSLISDLRDLSRQRESLVDEMTSLKIEIKQLLNITFPELEHMVGIFTKSILKLLQQYPSAFALRDADLGQLSQMLIADSYGHKREAFAAGLIKAAHSSIGTNSPAKDMILKQKISLLLHLEDALQEITGMLIEMSRKLMEEDINIMTSIKGIGDKTAANFLIEMGGDINQYERSGKIIAMAGLDPAVYQSGKHEGKGRITKRGNRHLRRIIWMMTTRVIQYTDIFNVYYLKRRKEGLPYKMAVLATAHKLIRVIYAMLTHRTTFCPQVNS

SEQ ID NO: 323958 - protein, 354 aa, unidentified
MIVIGCDFHTRYQQIAMAREETGEVLVERRLDHESGEAHAFYRSLQSSQELVRVGIEATGPIHWFERLLAELGHELRIGDSAKIRASEVRKQKTDERDARLILDLMLAKRFPEIWVPTPAERDLRQLPWHRHKLVCLRAMLGNQLHFLAMSQGLCRKKKLFTKKGRAELAGLALGPWTRRRREELLQLLDQLEPAISELDRAVLEQAQRRGDAVLLMTHPGIGPVTSLAFVLAIGPVTRFPRSRKLVRYLGLNPSEDSSGQRRRLGAISKQGNTMVRWLLIEAVHHAVRQGPALRQDYQRLKFRRGHAVAKVAIARKLAVRMYWMLRSGAAYAQLVRRQGSPGATLVNASSSLG

SEQ ID NO: 323959 - protein, 374 aa, unidentified
MNNTITYVAMDTHKKQHKIALNYPCQKEVVEFTINNTVRDIKKMVNKIQKHAPGKVEFCYEAGVCGFTLKRRIEQLGCRCGVIAPSLVPRKPGERVKTDRRDAKKLLVMLKAGLLTEVHAPDEHQEAARELTRLRETARDNLKRIRHQLIKFLTRHGYVYREGRHWTQKHISWLRTIEFAESTLTNVFESYFNEMIYCIGRLENLDKEVGHLAGSREYKEIVGLLCCYHGIDTLTAITIITEIFEFGRFESPRHLMSYLGLTPSEDSSGEKQKKGSITKAGNKRIRRLLNEASWHYRHIYVPSAALKKRRKGQPQWAIEIADAAGRRLSKRHRYLVNKGKMPCKANIAVARELAGFIWFTITQYQARNNIKNVA

SEQ ID NO: 323960 - protein, 448 aa, unidentified
MGKSTKKSNVVKKISQLQIINPAAAGIDVSDSEMMVAFPINSEQIEVRAYECFTRDLHTLAQTLKSFGITSVAMESTGVYWIPLFLMLQDYGFEVYLVNAKHVKNVTGRKDDESDAEWIQKLHRCGLLSASFQPDNMIRTLRSIVRHRKNLVRMSAGYINRMQKALELMNIKLHTIISDIDGKTGRLIIEAILNGERNPEVLADLRDKRIKASREDIIKSLEGNWTSEHLFELKQCYQLYCYHHQMIDECDKEIEKQLIEQLASKNEGLIPDLPKVKRKTVKKNRVDFELTSYLKEIIGVDVTEVVGLSEITVLSIMSEVGSDMSKWKTENHFTSWLGLAPNTKISGGKIISSRIQKKKHHAGQAFRMAANGLHNSRSPLGDFYRRIRSKAGAAKAVVATARKIAIIYYKMVSKKEAYNPKAMEDHQQKYKEKKISQLKRKIEQLEAA

SEQ ID NO: 323961 - protein, 353 aa, unidentified
MVIGDQARKEASMEKVSIIGLDLAKNSIQLHAADGNGAVLVRKKLPRNKVLPYLTALDPCIVAMEACAGAHYWGREIEKLGHQVRLIAPIYVKPFVKRQKNDAADAEAICEAALRPTMRFVAVKSEAKQASAMIFKVRDLLIRQKTQMINALRGHMMEFGILAATGPAYVQGLIERLEDPTSDLPDVARLTCRPLTGILKALKEQIKLIDLEIARRAKTDDVAKRLMTIPGIGPVIATAIEALAPPHDSFDKGRDFSAWLGLTPRQNSTGGKTRLGGTSKMGQRDLRRLLIIGAASVVRWAARYGAPAGSWLSRMLGKKHPMLITVALANRIARIAWALITKGGVYVPAGAPV

SEQ ID NO: 323962 - protein, 345 aa, unidentified
MNYTQNEKIEQVKESTLVLGVDIGSSEHYVRAFDYRGRELTRKVFRFSTDINGFNSFYDWVTQICIKHGKNEAMIGCEPTGHYWYTFYQFVKDHGMKLAFVNPASVKKAKELDDNSPKKTDLKDPKTIAKLVIDGRYSFPYVPEGIYAEIREVTSSRDRIMKELNVASNRIQRWLKIYFPEYLTVYKKFDTTTGMMILEEAPLPAMVPALGVDNIVKIWREHKVRGKGASLNRAKTLVDAAHDSVGKSGGQGAVMEIQMLLEDYKVKKQQLEMVTSVMEELTMQIPNADKMLSVNGIGLVTVAGFISEVGDISRFKNPKQIQKYAGFELVENSSGKHKGRTTISK

SEQ ID NO: 323963 - protein, 460 aa, unidentified
MDQVPVIGIDLAVTAASELAVATGATIEASRKVASTPKGLTEGIAKAAKGRAVAIVVESTAMAWLIAAVAALRSGVDHTLYRVSGRKSAALRAFYRSHTKTDHIDARVLARMPAVDDSLLSFSLPTPAELALKRLVVARHKLTTESTKVQNRVRSMLHWAAPGILKAGGGTVSAGVVAVLSRWPDLASLAKARAATIALQGDWSTERAEEVRAAAAESVAFYEGFVDFSAVGLELEISLAQLGFLHSQVERLEERIAALHAQLHPKDRLLSVPGVGPVVAGVVRAVVGDLSRFASLASFRAYTGLVPREDSSGEVRRRGRISKAGPSVLRWGLYLAADAARQCDPALADLYRRLMVERGRTHTQAVCAVASHLAGRIYAVARAGRDYVWRDLEGNEITKEQARAIAQSLRVDPETRARLRARAEGGPRTPYARQPEVPQDATQPSGDKLIEAALELASKR

SEQ ID NO: 323964 - protein, 356 aa, unidentified
MDLLKYGIGIDMAMDSFDVCLSVIDRQQHVIIQARSSFSNDKTGFDRFDAWCTKHKKLPLPTVYLMEATGVYYEQLAWYLHTKAYDLSVVLPNKARKYKESLGLKSKTDRIDAKGLAQMACEQQCSRWQPLSANIYRLRLVTRQIQNLTEQAIALSNQLHALQHGMFRDKDLEKMLQKQLVVLKKNKASLKTKVQALIDADPALKQKFEKIGSIKGLGCQSLAVIVAETNGFAAFESAGQLVSYAGYDVVANDSGKRVGKTKISKKGNSRIRRCLHFPAFNMIKYEVGVFKNLYQRVYERSKLKMKAYTAVQKKLLMIIYALWKNNEAFIDKIPGPALGDTAAAPSVALVGQGTKN

SEQ ID NO: 323965 - protein, 341 aa, unidentified
MNTSKTVVGIDLAKRVFQLHWLDVETGKTVSVQLKREQFLEHFANRAPCRIGMEACGGAHHWARQLVALGYEVKLLSAKAVRPFVGGNKSDAHDARAIWTAVQQPDVKAVAVKTEDQQAILALHRMRQQLVKFRTAQINGLRGLLTEYGEVMPGGKPGIQQGIAEVLRRLAERLPAMVIDTLRDQWDRIGQLDAQIGEIERRLKDWQKANQDCQRLMAIPGVGLLIATAAVAMMGDPRVFQSGREFAAWLGLVPRQTGSGGRVRLLGISKRGDTYLRTLLIHGSRAALTHAKETEPWIMALRQRRPLNVAVVAVANKMARTIWALLAHDRTYRKDFIKQPA

SEQ ID NO: 323966 - protein, 384 aa, unidentified
MGGIILDVLMTRCAGLDVHAETIVACVMIGEQDDELFIETETFPTLTKDLFRLLKWLENHGITHIAMESTGVYWKPVYNILEDYFDITLANAQRIKNVPGRKTDVSDAEWIAKLLRYGLIEKSFVPPEDIRNLRDLTRLRKKWIGHLTSEKNRILKVLECSNVKLNSVISDVFGVSGRKLLSKLIQNGYVDSIDVENSIHGRMKHKKQMITDSLFGTLNDHQVFLIKQSWQHIVYLESLISEIEERIDEILKNYKEEVELLLTIPGINKDSAAIIIAEIGVNMEQFPTSQHLASWAGVAPGNHESAGKRKSTKTTKGNPHIKTVLCEVAWAISKSRNRWLAAKYWSIAARRGKKKALVAISHRMLRIIYSMLINKEPYKEPLIN

SEQ ID NO: 323967 - protein, 339 aa, unidentified
MNKSDFAGIEVSQEELLVALRRGEQTLPLKSFPNTGEGHRALARYLARKSRVVRACLESTGVYGLDLALLLQKRPGVEVMVANPRAVRHFAQALMQRSKTDPLDARVLLEFAARMPFQPWQPPSPTVRHLCALARRIEAVTDLCAAERNRLHAASAAAALPAAIRQEIRRSIAFQERALQRLTQQAIHLIAANTALQERFEQLDSVPGIGVTSAIALLAELSLLSPDLDVRQWVAAAGIDPREYSSGSSVHKKARISKAGNRHLRRALYMPALVAVRYDPHLGAFYQHLLGNGKAKMQALVAVMRKLLHAIFGMWKHHQAYDGAQLFPLASEVCTAEVA

SEQ ID NO: 323968 - protein, 344 aa, unidentified
MATYYIGADVHCNNTELAIEQRGEIMARYSVPTSIPAISTILDSLQGKKIFAMEEGPMAGRLYRNLNEKVEKFIVSEPRRNKLITCEGDKDDRIDSGKLAALLRGNFLKAVHHTSDSHRAHLKHWVNLYNDRVRDGVRNICKIRACCRMHGIAIPRKVVRNNVHRHDWLSGLDNPVLKVQLQMLWIGYDATKELVGLAKKQLSSYARKYKIIKYWRKLPGVGLIRAATIFAYLDTPWRFKNRSKLHKYCGVGLVRATSGKDKKGRPKPARLKLPWAVNRRLKNAVIGAATSAIRHRDNVFKDYYERMLSNGITPANAKHSVARKMVSTMSAMWKTDSKFDEKLF

SEQ ID NO: 323969 - protein, 385 aa, unidentified
MRKPNDLSRSLTVLEGDRTLIAVIEMSQSSWLVAGLVPGVERQPLKKLEIDESALLKLLNRWRAEAAKAGRNIERIAVAFEAGRDGFWLARWLRARNIEAHVIHASSVAVSREHRRAKTDRLDTELLKRAFLGWLRGERDHCKMVAIPTMKDEDAKRPNRERENLVGEQNRIVNRMKATLVRLGIRGFNPKLKKAADRLEGLRTPEGEPIPPNTLAELRRDMERRRLTSEQVGQIEKMRLECLERSTGDGPHAMVRLLARVIGVGIETADMLVQEALSRNLRDRRAVARYAGLTGSPDESGKKRREKGLARSGNARVRRGMIQLAWRFLMFQKDSALAQWFRARTENARGTRKTMIVALARKLLIALWRLVREGVVPEGVVLRPA

SEQ ID NO: 323970 - protein, 348 aa, unidentified
MNDLHYIGFDVHKKTISFCVKTAAGEIVEEGALRAQRGALRQWASARPQPWQGALEATLFSAWIYDTLQPYAEQLEMAHPAKMKAISAGKKKSDTLDARTIADLVRCNLLPACYVAAPRIRELRRLLRYRSLVVSEAVRMKNKMAGLLMETGALYVKEKLHRKKYFATLLEELEEVPESVIDLLRLSRGALEMFESTQKRLVRDLLADPELTQRVERLMTIPAVGEITALTWALEVGDPRRFHCNSDAMSYCGLTAALKSSAGKQQRGPISKQRNRWLQTTLIEAAKLAPRWNPQLAALHARELERGHRNRATLAVARKLVAYLLAVDKSGQAFQVRAAAELPTQKAA

SEQ ID NO: 323971 - protein, 412 aa, unidentified
MLFIGDDWAEGHHDVVLQDEAGKTLARRRLPEGADGIARFHELVASCWGEHGEPDPAQVVVVIETDRGPWVKALAAAGYRVYAVNPKQAARHKETITVSGKKDDFFDAACLADMGRTRRHQIRELAADTDIAEAVKIAARAHQKLVWERTRHLLRTRSALREYFPAALEAYAGLTLTGADTLELLGKAPDPDSAARLTVTQITAALKRAGRRGDLADRARDIQAALRTPHLAQPALIAGAYAASVQAAAAVITVLNEQIKAMEAKVSELFHRHPDAGIYLSQPGIGDITGARILGEFGDAPGRYATAKARKNYAGTSPLTIKSGKKQTVHARYIRNRHLIDPLHAQALSALTASAGARACYDELRAAGTGHHDALRRVAGRLAGILHGCLKHGSEYDEPTAWSHRTSPAQAA

SEQ ID NO: 323972 - protein, 459 aa, unidentified
MGRKQSQVKAWEGLKVIHPNAAGLDIGSEEIWAAVAPDRAPIAVRKFGTYTPDLQALADWLAACGVDTVAMESTGVYWIPVYEILEARGFEPYVVNARHVKNVPGRKSDIQDCQWLQGLHSVGLLRGSFRPAEELAALRAYLRHRAGLIEHRAAHIQHMQKALAQMNVQLTQAVKDITGVTGLAILRAIVAGERDPQRLATLRQPGVKKTEAEIAKALTGNYRPEHLFALQQALALYDFYTAQLAACDAEIERQFANLKPLSDDMPPLPPSEKHDSHSKNAPSYDARGYLYRLTGVDLVAIAGLNESTVQTIISEVGTDLCAFPTEKHFCSWLGLAPHNDISGGKRLRSRTLKTNNRAGQAFRLAAQSVAKSPASAFGAFYRRMKARLGGKQAIVATAHKIARAFYHMLKHRTPFHDLGGEEYERRAREREIKNLQKRAAKLGLAVVETPANPALAGSF

SEQ ID NO: 323973 - protein, 335 aa, unidentified
MQTLKQAVGIDVSKDELVACFGSLNTELRHNISSAASFKNNPAGFKALLTWVNKHADSNLSVWFVMEATGVYYENLAHFLADKDFDLTVLLPNKIKSYMRTLDNKSKTDNLDAYAITLFGLEKTLRKWRKPDNLFKKLKELTREYTNIKSQAAQAKNRVHAKEHSYKPAPETLKRIKEQIKLYNKQLKEIQNQIKELIKQDADLYTKINNIQKIEGVGLMTIVTILAETNGFELIESGKQLTSYAGIDIVHNQSGYKTGKTRISKKGNNFLRKALYMPALSAAKHNEKLKEIYIRLVIRKNIKKIAVIAIMRKLLLLIYTLWKHDAEYIPNYKTI

SEQ ID NO: 323974 - protein, 395 aa, unidentified
MYSLLVGIDVSKDFFATAGIDSEGEESFSRSCSMDSNGFGDFLKTITSHCEDLSRVIVAMESTGCYHINLFSFLTSQGIRTMVVNPLLIANFAKLSLRKTKTDKKDAMTIARFLLDHHEEVSHLSLSQDHQDLRDLSRERESLCHLMAATKVEIKRVLRATFPELESIGNLYTGAMLRFLQQSPSARLVRGAKRRAIAKALKGPYVGDNLTYSSEDILRAAKTSIGTVSPAKEIILQGKIATLLHLQERLDEMTKLLKDLCKATRIDDLKILRSIKGVGLKTAAPFLAEMGQVENFTSHKKRIAFARWDPSVRQSGNFVGMSKISKRGNRHLRRAIYLMSASVVSQNAFFKAYFLKRKKEGLPPQKALFATAHKLIRVIFAMLTQRTYFKPKEVI

SEQ ID NO: 323975 - protein, 342 aa, unidentified
MLYVGIDVAKNKHDVTALNVPGKTVLKPLTFSNNKAGFELLDLSFRQLNQDCLIALEDTGHYAFNLLNFLHEQGYKVYTYTPLLIKEFAKSLSLRKTKTDKKDAHGIALKLLSDPNREQFQHDNRQVELKILARHIHRLKKKQSDWKVQYTRCLDIIFPELDKIVGKHSEYTYQLLTCYPNPQKRLEAGFDKLIEIKRLTASKIQDILSVAPRSIGTTSPAREFEIIEIIKHYKRLIDKAETCVNDLMAEFNSVITTVTEIGGRLGAVILAEIRNIHAFDNPAQLQAFAGLDSSIYQSGQIDLAGRMIKRGSPHLRWALIQAAKACARFSPAFKAYLKTKLE

SEQ ID NO: 323976 - protein, 363 aa, unidentified
MDKYIGFDIDDKKTVACVVQKGKKDKYATLRTDIEQMKKFLRTESKAGEKLHLTFEISGQAGYRYDRLCGYAEDITVSNPSKMTWIYRTATKTDRIDARKQAVLLSIGEVPKVHIPINRVRQWRVTILHRRNTVNKITSVKNRIRALLKANGFVKASERGSWWKVANRAWMRGLAEEVQIEDECLWRMNLLDMLEELCLLDGQLKRTTGYLDGYLGKQAGGRLLMSIPGIGPRTAEAVLAYTDDIRRFGRSKQYCAYFGLTPRLDESGSRRRLGHISKQGPSVVRWLLVEAAWRTIKKSSAFRSFYERVMCGQKGRKKIAIVAVARKLLSIMRAMQFTGELFNERLVCNECGVRRIAKVKNSA

SEQ ID NO: 323977 - protein, 389 aa, unidentified
MNDHRGVLEEALMAESIVFHVGIDLHKESVSLAVFKGAEQEAEREVTLPTDWTRLRRIFERLLERGAVKACYEAGGCGFGLCRKLREMGVDCVVIAPSHIPVRPGDRRKTDQGDARKLARNLRNGELVAVHVPGPAEEQVRDLVRSRMVLVREVHRSRQYVLKMLLRLGLVFEGGKKHWTKVHRQWLRTLRLEGEQQKVLERYLSLLQSKELMLEEIEADVKRIAEQEPYVRPVGRLRCLRGLDTVAAMVLVTEVVDVLRFATARDFMGWVGLSVSENSSGGPDKQRMGGITKTGNARCRFVLGQAAWSYAHPPRLSAALLKRQEGQPQEVVDYARRAQRRLCRRFDALRMRKNSTVAATAVARELAGFVWALLRDEKDKLLPRRRLSA

SEQ ID NO: 323978 - protein, 414 aa, unidentified
MDVLHERCAGVDISKKDAKACVRSPSTKRRGSFTNETTAWGSTTNAVLALRDHLVAAEVTLVVIEATSDYWKPFYHLLAEDLNVILVNARQAKNLPGRKTDVSDAAWLAQLGAHGLVRPSFVPPAPVRELRDLTRARTQMTRERGQIVQRLEKLLEDTGIKLAAVASDIMGVSGRAMLEALIRGERDPQTLADLAKRKLRNKIPELTEALTGRFRDHHAFLTRLHLDHYDQLTDAIGQLDERIEEAMAPFRGALDLLDTVPGINQAVAEVIIAETGGDMARFASAGHLASWAGVCPGHHESAGRTKNTKVRPGNPYLKGALGLAAFGAVRTKDTYLQARYKRLTSRRGPLRALVAVEHSIITAIWHMLTDNVPYHELGGTYFTQRDPERATRRAINQLNQLGYTVTLNPREQPA

SEQ ID NO: 323979 - protein, 420 aa, unidentified
MSGRRLLHITAQKGDRFMIGVGIDVSKLKSTICITNEYGEVLKAPYEISHTETDLKELTRQIKGYGGKNDVRVVMEATGAYSRPVLYYLLNEDIFVAEINPLAMKKYRADINFRGVKNDTIDALAIAQYTIEKWNKLKEYQRADKEYAAMKALSRQYLSYMKPHVALTQNLDHLIDLVMPGIKKEFDGYDPVTGKDKLADFLEDFHHYDYITSLGPKKFEERFNKWTQKKGYHPRQSKSGKIYLLAKEGIPTLAYDSTSRLLVEQAVAALKSMNQVLYTILAQIRELAEKRPEYPVVRSMSGVGEVLAPLLVAEVGDPRRYHSGDALIACVGIDVPPYESGQFKASERKITRKGSKQLRKLGFLLVKNLRKIKPTQDTAVYNYYLKKKSEGKKDKQAIVAAMNKFFRIYYARSMEAYRSE

SEQ ID NO: 323980 - protein, 387 aa, unidentified
MMLIGIDPHKSTHTAAAVEPETNREVGSIRVDATLREYRRMLAWASQWPQRRWAIENAEGLGRHLASWLLARGEQVVDVSSTATARVRQLSRGGGRKNDRIDAAAAACVAALQGDARPLMTEGSADALALLDERRTNLAQARVRAVNQLHALFRALLAGGASRDLSAAKAAALLRTIRPAGQIERIRKQLAADLTTEIRSLDAKLKANADAMSELVQQSGSTLTETIGIGAITAACLIGRTGKPSRFPSSAAYANYAGTAPVEIASADRTRHRLSRSGDRQLNSALHTIAITQIRMLDSLGHTYYKRKIAEGKTPREAQRCLKRRLADHVWRTMIADEQRTRKGGPGRTPGATLTSSAAGSTPTASSSEKSLPRPADTDPTTPNPAG

SEQ ID NO: 323981 - protein, 355 aa, unidentified
MSNEKYIGMDVHQATISVAVTDSQGKVVMESILETKASTLLEFFAGLRGSLFVTFEEGTWAAWLYDLLKPHVTEVLVCNPRKIPLLKQGNKSDKIDARKLAERLRLHDLKPVHHGESGIRRLRELARSYLTIVKDLSRVMNRLKALYRSWAIPCAGRDVYYRRHRSEWLEKIPEAGTRRRAEQLYQQLDLLQHLRQQARRELLAESRKHAITAKLRQIPSLGPIRCALAVALIQTPHRFRSKRQLWTYSGLGLETRDSGEYQFVQGQPRRRKKQATIRGLNKDYNHDLKALFKGAATRASVKPGPFQEFYQRSLAKGIKPTMVRLTLARKIAAITLTLWKKGEDFDINKLNSQAA

SEQ ID NO: 323982 - protein, 354 aa, unidentified
MNNGIRYVGLDVHRDSISIAVRDGRGKVIQERVLPTSEAAIVGWVREQRGILHVTWEEGTWAAWLYELLVGRVTRVVVCDPRKNSRAGNKNDRIDARELSDLLRCDRLSPVFHGETKLRSLRELARTYVVLTKEQTRTMNRIKALYRSYAIACAGQACYGPKQRDTWLAKLPHTSIRERANTYYQLLDSLRQLRQGVRQQLLTEGKKHSAYRKLKGIPQMGPVGTVLLIAFTQIPERFRGKRQFWAYCGFALETQSSGDHRWVNGKRERSKKAALVRGLNSNHHHVLKWIFKSAATRACANPGPLQDFYCGLLEQGTRAEMARLTVARKMAAIALALWKKGESFDAQKLNPQAA

SEQ ID NO: 323983 - protein, 466 aa, unidentified
MKYTQQRKRTGKSEQRVSLFERIQPDAAGVDCGQKSHFVAVPPERGPEPVREFRTFTADLQRLAQWLAQCGVKTVAMESTGVYWIPLYEILEQRGFEVVLVNARDVHNVRGRKSDVSDCEWLQQLHSVGLLRASFRPAAAMVPLRSYLRQRAILVEELTARIQRMQKALTEMNLMLHTVVSDITGVTGLKIIHAILAGARDPERLAVHRDGRCHASHQELVAALTGNYRGEHLFSLRQNFTAYQFHLQQIAECDAAIEALLNTLAAQQPPPSAALPAPRAKTTKKHAPAFDIRTPLHVLTGGVDLSQIHSIGPQAALQLVAEIGTDMSRWPTEHHFASWTTLAPNNKISGGRLLSSRTPPSANRAAAILRRCAMSLGRTSTALGAFYRRLAVRIGKAKAITATARKLALLVYRALSGKLAYRDPGATAYLKLHRARELKSLRKRAKLLGFELVDRSSGEVLLDPVS

SEQ ID NO: 323984 - protein, 385 aa, unidentified
MQKHHDDSKACLTAFVQDNTVIAVIEMSLANWLVAGMIPGVKREPLKRITPDPEVLLRLLYRWRDEAIKAGREITRIAVAYETGRDGFWLARWLRDRGINAYVMHATSVAISREHRRAKTDRIDTAMLRRGFLGWLRGERGHCSMALIPTIAEEDAKRPHRERESLIKQRTRAINQMKAILTQFGVRNFKPVLRKAAEKIGDVRTPEGGPLPANAAAALRRHIEHFRLINEQIKAIEKTRLQRLRQHPTDKFNTMVFLLVRIIGLGVETAEQLVHEILFRKLRDRKAVARYSGLTGAPDESGARRREKGLLRSGNGRVRKILIQLSWRMLRFQPNSGLVRWFKDRTANSRRSRKPMIVALARKLIIALWRYVNTGVVPEGFQLAK

SEQ ID NO: 323985 - protein, 421 aa, unidentified
MREYGADVKAGTARAPVREDGLHDSDGVGVFLGLDVGKTAHHGHGLTPAGKKVFDKPLPNSEPKLRAVFDKLAAKFGTVLVVVDQPASIGALPLTVARDAGCKVAYLPGLAMRRIADLYPGEAKTDAKDAAVIADAARTMPHTLRSLELTDEITAELTVLAGFDQDLASEATRTSNRIRGLLTQFHPSLERVLGPRLDHQAVTWLLERHGSPAALRKAGRRRLVELVRPKAPRMAQRLIDEVFDALDEQTVVVPGTGTLDIVIPSLARSLAAVHEQRRALEAQIQTLLEAHPLAKVLTSMPGVAVRTAAVLLVTVGDGTSFPTAAHLASYAGLAPATKSSGTSIHGEHAPRGGNRQLKRAMFLSAFAALHDPASRTYYDKCRARGKTHTQALLRLARHRISVLFAMLRDGTFYEPRAPRLT

SEQ ID NO: 323986 - protein, 402 aa, unidentified
MNSVGIDVSKGKSMIAVMRPFGEVVCSPFEVPHTSSELSALARRLKSLDGETRAVMEATGNYHLPIAVALHEAGIYVSVVNAMLVHDYGNNSLRRAKTDKQDAIKLASYGLDRWLTLPEFSPEAEIRMQLKTCYRQYQQYSKIQTMLNNNLISLLDTVFPEVNRLFSSPARADGSEKWVDFVETFWHCECVSGLSQKAFEKKYQKWCHKLGYHFSEAKALEIYTAACGAVGVMPKTETTHLLITQAVSQLRATSTALAELKKEMLRLAESLPEYPVVQKMYGTGPTLGPQLMAEIGDVRRFHSKKALVAFAGIDAPPNDSGQISGNHKAMSKIGSSALRRTLFLIMGVYLQNAPVDEPVYQFMDRKRAEGKPYRVYMMASANKFLRIYYASVKAYLDALETA

SEQ ID NO: 323987 - protein, 351 aa, unidentified
MAGSKRSIIGGVDTHTATHHAVVIDRNGRLLADAEFPATPAGYASMLKWMRGKGTLGQVGVEGTGAYGAGLARYLHAQGIDVLEVPRPDRRLRRQRGKSDPIDAEAAARTVLAGNASGAPKLADGPIEAIRMLRVARIGAVKARTAAVNTLRSMVITAPESLRTQLRGLSSAQLVAACARLRPDSTNLAEPAQAAKHALRSIALRVQHLDTEIRSLRKQLDELTRTAAPATSAVFGLGPDTVSALLVTVGDNPDRLRSEAAFAHLCGVAPIPASSGKTNRHRLHRGGDRTGNSALHIATVVRLRYDPRSRAYADRRTTEGLSMPEIIRCQKRYLAREVFQTLRADYANIST

SEQ ID NO: 323988 - protein, 421 aa, unidentified
MEVIHRRCAGFDVHKKSVAVCVRLLDTETKLQKQVRTFGTMTRDLVALGEWLAGLGVTHVAMESTGVFWKPVYNLLEGRFQILLCNAQHIKQVPGRKTDVKDCEWLAQLLQHGLLHGSFVPPRPQRDLRDLTRHRAQVIAEKTAVANRIHKILEDANIKLGSIASDVMGASGRSMLHAIVTGEDDPEKLADLAQRKLRAKIPQLELSLEGRISDHHRFMLKMLLEHVNFLEKTIQEITQRIEGAMRRHDAEASGGQIVPFVEAVRILSTIPGIEVRTAQNVMAEIGQNMVQFPKDANLASWAGICPGNNESAGRRKNGTTTKGNRWLRSALVQAAWAASHTKRTYLSAQFRRIAARRGKKRALIAVAHTMLIIAYHILKERRPYFDLGPEHFDRLTPERLTRHLVKRLEKLGHKVTIQPAA

SEQ ID NO: 323989 - protein, 323 aa, unidentified
MSAKTTKKRRSFIGIDVSKKLLEVGVHQSDYHFRCPNDPKNFPALITELISLRPARILLEATGGLERALLQALHAAGLPVVVVNPRQVRDFAKALGLLAKTDRLDARVLAHFAAATQPAIRPVKAQQETELDALMGRRTQLSDMLAQEKNRRGSAATKDTRDDIEEHIEWLEERIQELDEKLKEQLKGSAVWQQKDQILQSVKGIGFVTSMALLADCPELGQLNRHQIAKLVGVAPLNRDSGQQRGARHIWGGRAQVRGKLYMATMAAIRFNPVLKSFYERLIAKHKPKKVAMIACMRKLLTIINVMIRENKLWNVKAQPVSA

SEQ ID NO: 323990 - protein, 396 aa, unidentified
MHTQLHVAIDVGSQQHRVAIGWDEGNPIEEFDCPHTSAGLSDFFNRIRKHEEIHHAEVCVAMEGFGGYARPLDSQILAQGWRLYAINNLKFARFKEIFPAPAKTDAIDAKRMLQLLQLRERIPMASAVLQEVAPVDPLHQQLKALTRRRKQLVSERMKTSQRMQAELQGAAPGLLTITGQADNLWFLNFLTCRNDLRKLKTVRQTTLLKLDGVGVGYAAKIASWQKTALFAASAEWAGSMIRADAMRILSLREAIAQLEIQIAELTAQSRIAQRLLTLPGVGSACASELAGEIGNIERFKDEASLAVYLGVAPLDRSSGKRVSAKLPRQINPRARDALIIAMVHHMQSVPTSRAFYDRKRVEGKTHMQALRALARHMVRILFRMLTNNRDYRLPNV

SEQ ID NO: 323991 - protein, 453 aa, unidentified
MPEEKQIKMEVVNPYAAGIDIGSKSHFVAIGQKETDVKEFGVFNEDLFAIAKWLKDSRIKTVAMESTGTYWQALYAVLIAEDFQVILCNGKFTKNIKGKKTDVQDCQWIQKLHSIGLLTGSFLPDLQTEELRTYCRHRAGLIDTAASTSKKMQKYLRLLNLRLDVIVKDICGLTGLKIIEAICNGEKDPLKLAALRNGNCKTSEEEMAKALQTNGRKDYLFTLHQEYKIYHNLQDQIKLCDVEIENLLNNQINNNDHKKQHYVEPKVHKRINKNTPKNIDLNLIGYQYFEGVDLLEIEGFSHQTLLTLMSEVGLEGIKKFETAKQFASWLRLTPNNKISGGKVLSSKVPKGSNRLKIALRNAANAIGNLKESTPLRDFFHRINFRKGRVSAISATARKLGVIIWNMVVKNIPYKNPEDYLFVDQKRKLAVLQRVQKTINKFDLKTDIQGFVNA

SEQ ID NO: 323992 - protein, 457 aa, unidentified
MAKKSKCKAKGSVRMLPVMHPDAAGVDIGAEEIFVAVPADRDVESVRSFDTFTRNLHQLADWLQKCRVRTVAMESTGVYWIPLYQILETRGFQVFLVNAQHVKNVPGRKSDVSDCQWIQYLHSVGLLKASFRPPDEICAIRSLWRHRESLVQMAAKHTMHMQKAISQMNLQLHHVLSEITGVSGLAILDAILAGERNPAKLASLCNWRVRSSRETVAKSLEGDYRPEHLFALRQSLIGYRFYQKLLFEVDQELERSMRKLPRADGAPEQMPPRTKTCIYQRAGNEPAFDLKAELFRIAGVDLTDVPGISTITAHTILMEVGPNISRFRNASTFASWLGLCPEKRVSGGKVLSTRSRKVKNRAAIALRLGTHCLYHAKNYLGEFHRKMKWRLGAPEAVTATAHKLARIVYHLLSTTEPYSESVLVQCDRYASTRAELRLRRQAANLGFQLTPVPELDS

SEQ ID NO: 323993 - protein, 387 aa, unidentified
MAQVNDLSRSLTAFDPISTLVVVVEMSKASWLVSSVVPGVERQPLKKLEPDATALLRLIERWRNEAVRAGRSISRIALAYEAGRDGFWLARWLIARGIEAHVIHSASVAVSRERKRAKTDRLDAAMLMRVLLGWLRGERGHCGMVAIPTMEEEDARRPSRERESLVDERSRITNRMKSALARLGIRGFKPHLRKAPERLAGLRTAEGTGLPANIIEEFRRDMARLALVREQISSIEKTRAERLKRAPDTGPHAMVRLLARVIGIGIETADMLVREILSRKLRDRRAVARYAGLTGSPDESGLKRREKGLAKAGNARVRRGLIQLAWRFLMFQKDSALAQWYRTRTEGTSGARKTTMIVALARKLLIALWRLVTTGEVPDGVELRPAV

SEQ ID NO: 323994 - protein, 425 aa, unidentified
MLAVGIDWSEEFHLVALGKPSEGVFEVRRVEHSPKAVDALCARIAALEPDPAQVRVVLEARHGLLVERLIDAGYVVVPVNPDLIARRRGPARKKDDAEDARIACLLALDRFERLRPLVPHGELAGELRAIARDDERAAKDARRLLNRLRQDLLSTFPGALEIAGSDLGAPTFLRALERWPSAEALRAASREQLVAFARGCKHGWPERFADKVEAALASEHFQARPYLVRAKADTIRLTASQLLAIGKQRRAWERRMGELLLGAPRRGRSKTPRPDELGEGFPGGEIYLSFPGLGDRLAARVAGEIGDHPCQFESPNALQCYGGKAPVTRRSGKSELVVSCRLAYNRHLGDAVQQWAFCSLRRSTWARAFYDGKRAQGKGHHAALRALGNRWLEVLWHCLRRGVLYDEAVHVANRERARSSQLLAA

SEQ ID NO: 323995 - protein, 340 aa, unidentified
MGEVSTVGIDLAKSVFQVHGADTSGAVVFRKKLRRDQVLTFFSTLPRCVVAMEACASAHYWAREIALAGHETRLIPPAYVKPFVKRQKNDMADAEAICEAAQRPTMRFVQGKSAQAQASAVVFRTRDLLVRQRTQLINALRGHLTEFGYVVRQGVGHVGQLVAIVRDPTSDVPAEARPVLAIIAGSLEALQAQIALLDREIAQRAKDDAVAKRLMTIPGVGPVIATALVALAPAASTFRRGRDFAAWLGLVPRQHSSGGKERLGRTTKMGERSLRRLLILGASSATKVAARDPDKAGVWLAGMLSRKPRMLITVALANKMARIVWALMAHGGSYRAPATA

SEQ ID NO: 323996 - protein, 409 aa, unidentified
MELTPIYKRVIGLDVHQAQVTACALIEQADGTLIVERREFGGFKKDRKALAEWARGLAPDLVVMESTGIYWKSPFAALESVGIVAWVVNARHVKAVPGRKTDVADAQWLATLARSGLLRASFIAKADMRNLRHIARQRQKLGGMLASEKNRLHKLLTDAGIRLGVVVSDLHGQSARAMVKAMIAGKSISAVLDLASTRLRANREEIFEALQAEELTPAHRFCLDEIMKHIEEIEARMTRFDQELLRCLIEAGHEWSLQLLQTLPGVDVIGAAMLLVEIGDDMNVFCSAQRLASWVGLCQGNNESAGKRKSGRIRKGNAWVRRLLCEFAQAASRSRCALRGKFQALTVRKGHKRSIVALGHKMLRTIYAMLSKKTHYVDKTVDYEALMVARNAPRWLQMLVKHGFITATA

SEQ ID NO: 323997 - protein, 350 aa, unidentified
MSIVGGLDIHRKQLTFDYLDTASGEVRRGQICPADRAHLAAWLEGRFAGETADFAVEGCTGWRYVAEELAAAGITPHVGEPADTAALRGRKRHAKTDKTDSRHLRVLLADGRLPECWIPPSHVLECRALLETYHDLRTEHTAWVQRIHAVLFHQGARQLGEQRLRAGEGLATLRSVAAAELSPAGQLQITVALDMLQVLEGHLDALRRRLIEAARQLTGARELHARLYGVGPATALALCCWLGGAGRFSSARKAVRFTGLDITVWSSDRKGPPGRLSRQGPEVLRWCVYEAGKAHARRCAPDHAYYAQVKERIDGKRAAISEARKIIRQAVHILAALGDDALTMDPRPSR

SEQ ID NO: 323998 - protein, 348 aa, unidentified
MKNKSFVGIDISKKVIDVSIFREDTNIKMFPHEVFNNTRKGFGDMCSWLKKSRVVLSQALFGMEFTGCYSLDLEKFLTSKNYSFCMLSTRIVKHHPMGTIDKSDKNDAAKIADFLYRYDGTECAKPYKLPSKAMQQLKQLVNERKFLVEQRTNFMNRMQMFETKEDSAMYESYIKKLNHDIENIDQEECELMSKEEDVLDTFQNLLTIPGIGFVNATNIIAITRNFTAFDTARQYARYVGVAPCSHTSGTSVKWRARPSAHCNGQVKADLSMAALRAVEYDVEMQIFYNRKLGGRKDSDTKRKALNAVKFKLIRRMFAIGKQKRKWEVLNTSDDRKNLHIEKSKASEL

SEQ ID NO: 323999 - protein, 427 aa, unidentified
MKKRIKIDHLSTLCVGLDIGSRNNYITAMDFDSNRLINMKPVPNAVSGVEQMEAMILAVLEANSQFKYLLIAMESTSFYGVHVANYLSTSDRLKPYAVKVFCLNPKEVANYKKSFTGLGKNDGLDSFIVADYVRVGRIAIDPWRGAQYLALQRLTRQRRHVTEAITREKNYVLNNIFLKFSELALLGGEDSPLSSKFSATAEAILTEFMTVEDIANTPIEELVEFVTKASRGRFNDPNLVAELLQKAARNSYRLDKTLYEPITTSIACSFNCIHAFEHEKKSLDKAIEKTVNGLNPMEYQILRSIPGIGPVYAAGILAEIGSVKCFPSNDSLAKYSGIVWRDNQSGEFDADDTPMMKAGNRYLRYYLIQAAGSVATYCPEYTAFYEKKYAEVKKHPHKRALALTARKLIRLIFGLLDKNQLYSAAKG

SEQ ID NO: 324000 - protein, 350 aa, unidentified
MEYIALDAHKRYSFASIESADGGKRREARIEHGPEAIRQFLEKFERGSPVAVETVGNWYWIVKEIEEAGMVPKLVHARRAKMMIASVNKTDRLDARGMNRLQRSGTLPTVWIPSAGLRDQRELFRTRMVFTQQRTRLKNRIHATLAKYALRIEESSDAFNKKGRKELALCLEKLPPHTRYAAECVLEQLDSVADQIVALEARMKEVFAANSDIKHLMSLPGVGFILAVVILSEVGDIQRFVSASHFASYAGTTHRVHASGGKVHIGQLRSDVNRYLKWAFIEAASVVSLNRRRWHRHHVTRLYEQVRSRRGHQTAVGAVARHLAESTYWMLKRQEEYRQPEKGAISSTKR

SEQ ID NO: 324001 - protein, 427 aa, unidentified
MEQISEQVLCRDFVKQEVKMVNVGVDLHKTQFTVCARKDGENRFGVFPTTNEGYEDFLKKVSEWQAAGEEVRVAVESTGNTRYFKNRMEEAGIGVTVINTLKMKVINESVKKTDKHDAATIAEFSEKDMLPESILCSRASEQIRRLLKARTSLVKTEVVLKNQIHALLTAEGFEDVKGSLQSKKGRQQVLDALNQCKNGLAAQPLFDTIEQLEKSVKSIEKECRILVKGDRMVELLLTIPGCGEICAWTIRAYTDDINRFTSAKKYVSFAGLAPWVQNSNETIHHGRITKRGPKELRTALVQVVMGLRRMKAKTLAWRLMQRYEIMKSAKGSGKSIIATARKMATIIWHILTAEEGFNVEKMVDKKLEKKAESMRQGTERANQTTCRAEEEESPVEKQKTKKLEIIQIERKDKKKPGVAGKKIKKSA

SEQ ID NO: 324002 - protein, 407 aa, unidentified
MQVVHARCAGLDVHKETVVACIRIAGGAVRQEVRTFESTVEGLLALSAWLSESSVTHVVLESTGVYWKPVWHVLEGDFELVLANASDVRNRPGRKTDVNDAVWLAELLAHGLIRASFVPPTPIQELRDLTRTRKQFVREISQHTLRIQKTLEDANVKITGLVSDVLGVSGRAILEAIIGGETDPARLHERTQGRLKADPGALKRALRGRIRDHHRFLLKLHLRQIQALESAVRDVEARMGQALEPFRVDIELLMTIPGIGLIAASVILAEIGFDMSKFPTPAHLISWTGLCPRSDESAGNRRSTRIRPGAPWLKATLIQAAWAAVRVKNSYLRAQFLRLRSRRGPMKAIVAVAASMLTAAYHILARQQPYADLGPQHFDQRDRAKIAKRLIRRLEDLGLQVDVRPAA

SEQ ID NO: 324003 - protein, 417 aa, unidentified
MKSARDTLPEEPANGVTCGIDWARDDHAVSVVDARGREILRLTVEHSGAGLRQLRDTLARHRVEEVAIERPDGPMVDTLLDAEITVVVISPNQLKNLRSRYGSAGNKDDRFDAFVLADTLRTDRARLRPLTPDSPATLALKATCRARKDLIAHRVAVANQLREHLKRVFPAAVGLFAELDSPISLKFLRRFDSQDRADWLSTNRLAAWLASVGYCGRVDPAVLHARLAAAPRGATGDEATAAAHITRALLATLDTLVEQIKALTEQITEQLHTHTDAHIFTSLPRSGTVRAARLLAEIGDCRARFPTPESLACLAGVAPSTRQSGKMRAVGFRWACDKQLRDAVTDFAGDSRHANVWAADLYNRAIARGHDHPHAVRILARAWLYIIWRCWHDRAAYDPTKHRALQALLQTHQHPAA

SEQ ID NO: 324004 - protein, 339 aa, unidentified
MKVTTVGLDLAKNVFQVHGITHEGHVVFNKPLRRAQLLAFFERLDPCLIGMEACSASHHWARELSKFGHEVRLIPPIYVKPYVKRGKSDAVDAEAICEAVTRPTMRFVQVKSVEQQAMLSLHRMRELVVRQRTQLGNMLRGLLAEFGITLPQGLEKATGFARDVLGGSAPDIPEIGQDVIRVLCRQLLSTDYLVRWHDLRLQAVARADHRMKLLQTIPGVGPVTASAIVATIGSGRQFRNGREFAAWLGLTPRNNSSGGKERLGRITKMGDQYLRKLLVVGMTSRAIQVKVRPDKGDPWLRQLLERKPFRLATIAMANKTARIIWAVLTREEAWSPRPA

SEQ ID NO: 324005 - protein, 366 aa, unidentified
MSKISKPARPMKATNNKPEMTMGIDVGDRYSHLCLLDDEGEVVERDRVRSTEAAFRRYFEDAPRLRIALECGTHSPWMSRLLKQLGHQVIVANARKIPTITESESKNDWRDAEQLALMAAFNPRLLSPLQHRSLARQQDLNLIQARAILVKARTMIVNALRGLVKSAGGRLPACSTESLPHRAPAAVPPALAAVAPPLIEQIARLNTQIDAMDGQIEKLAAKYPEIGTLRSAPGVGALVAAAYVLTLDRPNAVPSSRSAGAFLGLRPGQSQSGDSNPQRRITRTGNTYLRCLLVQSAQYILGRFGPDSALRNWGLKLAASGGKRAKKRAIVAVARKLAVILHSMWRSGQRFEPFPQPAQEPAQTQA

SEQ ID NO: 324006 - protein, 292 aa, unidentified
MRDGAFEQFPNTKAGFRNLRRWIGPDLPARVVFEPTGAYHAAFEAALADHLPLVKVNPKHARRFAQSKGQLAKTDRADARILAQMGAAHGLEPDAPVAKDRHVLRELQAARAALIKDKVRLKNQLDRQQQRLTQKLTRRRLRQVVADIAELDHAIRAQLETCPNRKRALHLIQSIKGIGAVAAMTILIEMPEIGNLRKKAVASLAGVAPITRQSGRWRGQAFIQGGRKPLRDALYLPALVAIRYNPDLKAQYQRMKAAGKPSKVAITAIMRKLLILANTLVKENREWTEIRA

SEQ ID NO: 324007 - protein, 407 aa, unidentified
MFCGIDWASERHAVCVLDDAGHQATAFEITHSADGFDQLVARLRRYGDPAGMPVAIERPDGRLVDRLLEAGHPVVPVAPNAIKAWRDAEVLSGAKTDAGDAALIAEYLRLRSHRLRVLAPFSAETRALRAVVRTRDDLVDQRVAATNQLTACLDGFWPGAKQVFADLASPIALDFLARYPTPESAARLGEARMAAFLIKHGYSGRRPAAELVARLRTAPAGLCGTVEVEARRDAVLAMVRVLRALLAAIKDLDRAVVAHLGEHPDAEIFTSLPRSGRINAAQVLAEWGDCRPAYDSPDAVACLAGAAPVTKQSGKHTTVSFRWACNKRFRNAITTFADNSRHASPWAAKVYATALARGCDHPHAIRILARAWIRVIWRCWVDQVPYDPAKHGAARKLTETAASAPQG

SEQ ID NO: 324008 - protein, 360 aa, unidentified
MTKQLMAGIDLHSNNLMIGIVDQSGKRLKHQKVACDLREVIAVLAPYKARLKSIAVESTYNWYWLVDGLRASSYPVVLANPAGIEQYSGIKCADDKNDAFFLADLQRLNILPTGYIYDAKLRPVRDLLRRRMNLVRYRSALMISFKSLYTRTTGGEMKLGELKTLESAKAAELYEHPANQLIAKTQKEHIEQFDQSIGRIEKAVLKCARELPYYDKLNTLPGIGKILGMTITMEVGEIERFKSAGNFASYCRAVESKRTSNEKGKGQNNRKCGNKYLGWAFVEAANFARRYDESCRRWYDRKAARTNTIVATKALACKLAKAAWHVMAHKTDYDRKRMLPEEFGRAAVSQGNGLVKNLRD

SEQ ID NO: 324009 - protein, 324 aa, unidentified
MTDAVLGIDVSKNTFDTNLGAGIKARSQSFANSPDGWHHLIAWLGEHKIGQVHACLEATGRHGLGIALALHEAGHVVSIVNPAQIRDFARTKLGRNKTDQVDAVHIREYAELFKPRPWTPPSPAMRRLCELQTIRAGTVAGLTEWKNRRGSGMADDLALSLAETTIQHFTSQLKVVDQAIAETIDNDLELSAKRDLLVSINGVGEALAGIVLAELPGPDILGSSAAVAAYAGLNPQQHQSGISVNRPVRISKIGNAVLRTALYMPALSAMRYNPAVVALVDRLKAQGRLKGKQIVIAAMRKLLVLCFGVLKTGKEFDPAMAMGK

SEQ ID NO: 324010 - protein, 419 aa, unidentified
MTQTSHTTFAAFVGIDWADAKHDICLQAAGTAKRECFQLEHTPEAIDAWVTTLRTRFHSQPVALCLELNKGPLVFALRKYDFLVLFPINPLTLARYREAFTPSRAKDDPTDAELLLELLLTHRDRLSPLNPQSPTMRALEQLVAHRRRVVGDKVRLTNRLTSTLKNYFPHVLQWFQDKDTTLFCDFLSRWPTLKAAQLTRRTTLETFFRAHHVRSADVIAQRLQAIKSATPLTTDEGVIAPHTLWVQALVAQLRVTLQAITDFDTAIAQRAQSHPDFPLFQALPGAGPVFAPRLLVAFGEQRERYATAAELQKYAGIAPVTERSGKKSWVHWRLQCPKFLRQTFVEWAAESIRHSFWAQLYYQQQRDQGKAHQAAVRALAFKWIRILYRCWQDRTLYDESTYLHALTQRGSSLMHNLAK

SEQ ID NO: 324011 - protein, 407 aa, unidentified
MRLFAGDDWAEDHHDIEVMNEAGRVLAKARLPEGVAGVARLHELIGRHVGEDAEGAQVVIGIETDRGPWVAALVAAGYLVFPVNPLQASRYRERHGVSGAKSDGADAHMLADMVRTDAHQLRPAAGDSAQAEAIKVLARAHKTLIWDRTRHTQRLRHQLREYFPAALEAFEDLAAPDALELLGLAPDPARAAGLTRAQISAALKRARRRDITGKTSAILAALRSEQLGQPPALTAAYAATARSLIALITALNEQVKALQGQVEAHFGRHPDAEIYRSQPGMGAILGARVLGEFGDDPHRYADGKARRNYAATSPITRASGKKKIVAARFIHNDRLIDALMAQAFAALNASPGARAYYDALRARGIDHNDALRRLANRLVGILHGCLKTRSLYDEMTAWSHRSSELAA

SEQ ID NO: 324012 - protein, 322 aa, unidentified
MESERFVGIDVAKGWLDVVARPDGATWRVANDPDGWAELCARFAAAPPTLIVVEASGGYELGLVTALDLVGLTPVVANPLSVRRFAQSIGKRAKTDRLDAAVLAEYGERLRPTPRPVPEATARQLQELLSRHRQLTKMLVEEKNRHHQATPLVRPSVEAHIGWLERQRDEVDRLLASVVASDPAWQARVAVLDSVPGIGPLTATIVAVGMPELGACSGTAAAALLGTAPYAVESGLMRGQRHISGGRRLVRHALFEAVLSTIRWDPAIGAHYRQLRAAGKPHKVAMIACTRRLVGILNAMLRDGLTWQQTEVGQGHFLHPVT

SEQ ID NO: 324013 - protein, 401 aa, unidentified
MMRSIGMDVHRSFAQVAIFDDGTIVENFRVDMEHDAVVAFGRRLKADDEVVLEATGNTETIVRLLTPFVARVVIANPLQVKAISHARVKTDKVDAKILAQLHAAGFLPEVWAADDETLALRRLVSERAAVVRSIRRSKSRVQAVLHANLIPKYAGHLFGKGGRRWLAKAPLPKTERDLLERHLDELDWLAGRLETLERDLIHISLDDPQMRKLMTVAGISSVIATAVIASIGDISRFATPEKLASYFGLTPRVRQSGDRGAIHGRISKQGNATARTMLVEAAWGAASVPGPLRAFFLRIKDRKGPNVAAVATARKIATLIWHLLTKDAPYQWARPAFVAMKMRKLELRAGAPKAHGKAGPGRDYWIKELRHREIELVANAENAYARMVEAWREKPPKPKTG

SEQ ID NO: 324014 - protein, 425 aa, unidentified
MNYKQNEKINQVKESTLVVGIDIGSTTQYARAFDWRGIELGKVFPFSNSREGFESFKAWMQHLQDKYKKLDAIVGIEPTGHYWFDLGAYLEDEGILLVMVNPYAVKQTKELDDNSQGKNDRKDPKVIAKLVTEGRYSAPYTPDGVYADLRIMVANRKRLIREMTQIKNRFARWFAIYFPEYTDVFGDYEAQSSMLLLKKVCTPEAIVELGAEKINQIWRDAKLRAVGMKRATTLCETAKRSIGLKKGSSAAQYEMKLLLEDYEYKKAQLDAVMEEIEKLCRKIPESEQMLAIKGIGVITVAGFLAEVGDVRRFESPRQIQKLAGLSLRENSSGKHKGQTTISKRGRSKLRAVLFNAAIPLIAKNPEFKSLHEYYTTRANNPLKKKQSVIAISCKLIRVFYAILAKGVTYDAQKLISDIHRQPQVA

SEQ ID NO: 324015 - protein, 452 aa, unidentified
MAKFTESSSSMPVTHPNAAGIDIGSQFHVVSVPPDRTDKSVQTFKSFTGELHAMAKWLKECRVDTIAMESTSVYWIPAFEILESYGFEVFLVNAREAKTVPGRKTDVNDAQWLQKLHQFGLLRASFQPSKEIAGLRAYIRQREKLIEYRAAHVQHLQKAFMQMNIQLQHVVTDITGKTGIAIIRAIVNGQHNPDELVKLRDSRCKNSVEVMKAALTGNYKAEHLFALTQALELIDIYTEKIEACDQVIESTLEGLHQEADSLHTTLPKPRSKENSKNAPSFDVRQSLFKMIGTDLTQIHGIGSSIALKLVAECGTDMTKWPTAKHFASWLCLAPGNKISGGKVLSSKTRRSASKSATDLRLAAMVVGKTNTALGATYRRYAARIGKAKAITAIARKLATLFYNALRYGMEYVDQGADYYEEQYQKKVFKNLKRTAESFGYTLMKNEQTISAA

SEQ ID NO: 324016 - protein, 427 aa, unidentified
MPEPEPEPRTVAIDLHKDYALIEGVDTRLEVVLHPCRVPTVKLDGWAQKHLQKADTVVLEATTNAWHVCDLLQPLVARVVVANTHRLKALTADAVRTDQRAVQILARLQVAGLIPEVWVPPPPVRELRALIHHRQRLVSQRTAAQNRLHSWLQRYHLVPPQGAPLAVSNRPWWDHLPLAASEKLCAQQDWALLDYLGDHLAQVETELTRLSASERWRGPVAFLIQLPGVGLLTAMTLLGAIGDITRFPSARHLVGYAGLGTRVHVSGQTHHSGGITKEGRCELRTGVVEATWTAVQTHPFWQEQFATLEARLGKQKAIVALARKLLVVIWHVLTAQVADHHADTEAVARSLLTWASRHRLATSLGLSRPAFVRQELDRLGLGAELTQFLANGRPCRLPPSTLLLDLPQEVLATLAAWPEEPTTEAEC

SEQ ID NO: 324017 - protein, 355 aa, unidentified
MTGEKYIGLDVHQATICVAVMDAKGKVVMESILETKATTILEFLAGLRGTLSVTFEECTWAAWLYDLLKPHVANLVVCNPRKNALLKHGNKSDKIDARKLANLLRLNDLEPVYHGETGVRMLRELARSYLTIVKDVSRVMSRLKAIYRSWAIPCAGRDVYYTRHRGEWLGKIPEAGSRRRAEQLYQQLDMLQPLRQQARRELLAESRKHTITAKLRQIPSLGPIRSALAVALIQTPHRFRTKRQLWTYSGLGLETRDSGEYHYVDGQVRRRKKQVFIRGLNKDHNHDLKGLFKAAATRASVKPGPFQDFYQRSLAKGIQPTMARLTLARKIAAITLTLWKKGENFDAEKLKVQAA

SEQ ID NO: 324018 - protein, 406 aa, unidentified
MRVYIGIDWSENKHDIVFMNEAGVAIARLTITHTVEGFLELETACAALDVAPADCLVVLETAHNLLIDFLWSRQYSQVYVIPPSVVKANRGRQGQSGARTDADDAFLLADILRTDRGRLQPWHPDSLLTRQIRAQVSLIAHLTRDVVRTSNRLRAVLLRYYPAALHVFSSVQTQIALAFIQAYPTPQAAAALTFAGFQRFSAEQGYSRPARVRANFARLQGSYPQAAPDTVTVFQREALQLSRLLLHLVRDKSEAQRYLTTLFLQHPDAPIFDSLPGAGELLAPALLAKFGDDRQRFPSPASVQALAGTCPVTAASGKSRSVRFRRACDRAFRDMAQKWARASLSESVWANAYWQQVRPRCASNSHAYRCLANRWLSIAWTLWQKHELYDETYHLQQRALHSKNRG

SEQ ID NO: 324019 - protein, 363 aa, unidentified
MVADSFDVVIGVDTHRDSHALALVRCRDGALLQEQVLAANRSGYRSALDLGRSLGERRLWALEGTGSYGAGLARYLQGKGERVVEVERPAREGSQSRLKSDALDALRAARSALVAPVLASPRRAGRREALRVLLAVREGAVSTRRNGLNQLRALVVSAPEDLRERLHGLPAPALLRACLSLRLPRGAEPERHGTVLGLRLCARRVERASREAAELKRELGRLALELAPKLLELDGVGPISAAQVLVSWSHRGRFRHEAAFARLAGAPPIPASSGRTVRYRLDRGGDRRLNRALHTIVLTRRRRDPATIGYIARRVSEGKSERTPFAVSSATSPAGSSDYWRGCRRPLDSHRSIPLLKLVAEPG

SEQ ID NO: 324020 - protein, 419 aa, unidentified
MRIIKTKKHEIVNGRTLLVAVDLGKSKHMGYYRCPDGTDIKPFEFSNNRLGHQKFYDRICQAKAAHHLQEVVVGFESTGVYGEPLIHFLNDKGIKLVQVNPMHTKRMKELEGNSPGKTDRKDPKVIADIMELGHFLTVVIPEGVSAELRRLTQARERSVERRTAFYNQLQDLVFIIFPEFLEVMKDIKTRSAQYLLRHYPTPQAILQLSVDELSLVLRRASCGKLGRQRAEALYEATARSVGIKEGQRSIVLEIEEILLGIERCESFIAKLEREMHCLLEQIPYSRSILSVKGIKAVTAAGLIGEVGDFRKFRTISELLKLAGLDLYEISSGNQRGNCHITKRGRSLLRKLLFFASLNMIRKGGVMHEPYQRYIGRGMPTHKALVAISRKLLRILFALVRDHTEYVVNYSERENLKLAA

SEQ ID NO: 324021 - protein, 394 aa, unidentified
MRFVGIDIASEGHVVAVVDEGGNVVAGPTPFREDAAGYRTLLEAVGTAADTFVTLEATGHYWKNVFAFLAGQGYAVALVNPLRTRRFAEEELERTKTDSIDALGIARFAAQKRPPATRLAEEVTLELREMVQLRDRLQQDLGDRVRQLHRVVDLGFPEFTRYVTDLSSELATSILKDRQTAKSFLGLRPRALSNLKYDGRHFVGLELATQLIEAAKVSVGAHHGEAYRVQVRYFCEDIEVLRERIHDIDRDIESKLDAHEVGKLLTTIPGIGPTTAARLIAVLGNPADFQDAAALAAYAGVVPGLRQSGKKAPSSARLTPIGNSSLRAKLYMPTLTAVRLNPWLKAFYERLRARGKPAKVALLAAMRKLLAAVYSVAKHRQPFVPRLLPAEVQP

SEQ ID NO: 324022 - protein, 397 aa, unidentified
MAAAVQVVGGVDPHAETIHVAALTAVGKVVGDAEFTTTAAGYVQAVQFLTAKGVVERVGVEGAACYGAGITRALTAAGIPVVEVERPTRSARRRAGKSDRLDAYHAARSVLAERTSPVKDSALEGLRALHLARRSAIKAQTAAANQMKAILVMAPDPVRARFAILAGDRLADALLRCRGFFADPVAADTVTALRVLADRYRGLGQQIETLTARIDPLVTAANPGLRAAFGVGPTVAAQLLITAGHNLDRLTSEPSFAALCGVAPVPASSGKTRHMRLSRGGDRQANHALHRIALVRMSHHAPTRAFVARQRAKGRATKAILRLLKRAIAREIYRYLTRHVEVPDYADLRPARQAKNITLTTVADHFGVWPAVISCLERGQRRDDQLAQHYRTWLAAA

SEQ ID NO: 324023 - protein, 380 aa, unidentified
MNAPCARIGECRVQANHKSRGEVELAIYVGIDVHKRFCQAAMMDEAGRIQRELRFDNTLEGTSCLVNLARSIDPHVKAVVEPSANYWIKVYDRLEDEGVEVTLSNPLRTKAIAEAKVKMDKLDAKMLAYLLRGDLVAESYVPTRKNRERRTLIRHRAGLLKMRVEVKNRIHAILDKHDLPYDYSDLFGKEGLEWLRNLNLPSIDQQILRSNLQILQTLNSEIQNTDIQIAKDAVNEEQAKLLMTMPGVDYYAAMILLSEIGDIKRFASPEKLASWVGLAPQVHQSGETSWTGHITRRGSKRARWILTQCAQSARQHDPRMREFYERIEERHGSSKAVVAVARKMLSIMHVMLTRNEPYQGENRQLTEQKHKRLERIANST

SEQ ID NO: 324024 - protein, 408 aa, unidentified
MERYYLGVDWADEFHQVWVSDPEGKKVSEKKVEQSVGGLTEFGRFLDESRRKGVELWAAIEKPQGRIVDFLLDHGVVVYAVNPKALDRARDRFRMSQSKSDSFDAYVLAEFVRTDHGHLRALKPNSDVAQELKLLTRDQQRLVRQKTRLLNQLTTTLKEYYSRPLEVFSDLESNLALDFLKQYPTPQALSRLTRRQWNRFSKREHSLGEQRSKELWDKLQQPQLEVPEHVVRAKARLLEVLVAQLITLRDAVESYNERVRSFFASMAAAELVRLLPGAKTGTIVATLWAELGDAKDRWQSFRHLQAEAGVVPVTQASGKSRVVKFRFCCNKILRHAAYWLAFVSLNRSEWANHYYRDQRAKGHSHHRSLRALGAKWLKIIFVMWRDHKPYDENYHLANITRQKMCQAA

SEQ ID NO: 324025 - protein, 404 aa, unidentified
MWYVGLDWADTHHDVEVQDEAGKRIGARRFAHSHAGLHELQAFLLGIAASPEELACIVETNHGLLITFLLEAGIPVYPVNPKSANRLRKAAGAKTDRIDAHLLAKLGRSDLAELRRLEPDSPSVAELKTLTRDQDALIQTQTRLVNQLTACLKEYYPAALHLFAKVQQRSTLVFLQAYPTPQAALAASIEEITATLRTGKHTNPRRVAPKIVEELHRPQLVASSVIVRAKSRLMLALVKQLLVVIEEIASYDKAIRPLFLSHPDQELWSSLPRAGKRLAPRLLAEWGDDRSRYADGNSVQTLAGTAPVPYESGNYAKAHKRFACSKPLRNALHQFAWQSTQHEAWARDYYQRKRAQGKTHSMAVRALANVWVRIIYRMWMSETCYQTATFEAAQLAHAPRQHVA

SEQ ID NO: 324026 - protein, 400 aa, unidentified
MRAVFGIDVSKASSEVAILVNGEKVHGYTISNDALGFARLLGDLKTVHKPEIIFEATGVYSRRLQSFLDEHGYAYTRLNPLEAKKQLDSLRVRKTDQIDAEKLAQSQFVLNRKTTYVQEEIYQNLRDLSRFYQNLTEDIVRAKNRLHKALQVTFPELENILSTPSGEQYWNLVIAFPCKDFVLDLSKDELSESIRQSTSKRISDKRVAYLAEKLIALANQSYCAVKKTSPMLEEVRYYAQELLRLSEQRQAILDEMVELAQPLPEYDILLSIPGIAETTATSIIGELGDIRRFQSANQINAFIGIDLRHYESGNFLAKEHITKRGNPYARKILFKCIHNIASASHTNPCHIADFYEKRKRQSQTTSTKPHTIASIHRLIRTMYYLIMHNKLYDYASTQNR

SEQ ID NO: 324027 - protein, 343 aa, unidentified
MEHTTIAVDLAKSVFHVAVSRRPGHVDEERRLSRARFLTYLAQQTPATVVLEACGSAHYWGRQLQPLGHAVRLLPAHDVHRYVRRNKTDRTDTKALLEANRNEEIRPVPVKSVEQQAIASLHRLRSTWHATRTARINTVRGLLREFGVIIPVGAAHVVPQVRACLAQPATPIPRLLHVTLTDACEEIRELETRLREVDRHLAVLASEMPDVTLLQTVPGVGLITATALVASVGDIRRFRSGRHFASYLGLTPKEDSTALHRRLGAISKQGDVYLRMLLIHGARSVLCHAKACAQPSAFQHWALQTQQRRGHNTAAVAVANKLARIVWAVWHEQRPFATRAHGA

SEQ ID NO: 324028 - protein, 483 aa, unidentified
MKSKPEEKNKRATNHPTQPHWDEMNRRQRREMTRKIQSEGLRLEVMHPDAAGIDIGNESHYASVPPSRDSQPVREFGCTTAELKAMADWLKQCRIRTVAMQSTGVYWIAVYDILEQAGLEVYLVNARDTKNLPGHKSDVQESQWLMKLHTYGLLRNSFRPTQEIRVMRTYWRQRNDLVQSASRHILRMQKALTQMNLQLANVLTDISGATGQAIIKAILAGERNPHKLAEFRDYRVKASEGQIAQSLEGNWQEDLLFVLKQEHEGYEFCHKQMAECDRQLQQYLQQREDRSHGAPLPEEKRKGRLQKKRANKPQFNLREGLFRMTGTDLTRIDSIDVMTATTVISEAGYDMSKWKTENHFVSWLRLCPDNRISGNKVIGKGRLPTNNPISIALKMAATTLRESKTYLGAQFRRLRTRLGAPIAIKAMAAKLARLVYRMLRYGMKYLDQGAAVYEIRHRELQIKRLKAKAEKLGYRVTSIPAAA

SEQ ID NO: 324029 - protein, 596 aa, unidentified
MTLSRLIAQFVRDHWRAYAVSALMLASVAALTASIPRQVGALVDELATGRLADGALLQRLGLLLLCGALIYFLRVGWRLQLFAASYQLGVQLRTQLYQRLCQQGPSFFQTQRTGDLMALATNDVDAVEMAAGEAMLAGFDGTLTLVMVIAMMTLGVDWRLALAALLPFPFMALAFWHISEQIHRASKDSLQAFRHHVLTCPTSSDADYAWGFSTQGAEPKLRRQVMEEFIKYVGMDVHKETIAVSVAPSHAVEVRFIGEIANTAQAIEKLVKQLRKDGSDLKFCYEAGPCGYGIHRQLMELGWECQVVAPSLIPKKAGDRVKTDRRDSLLLARLHRAGELTAVWVPDGAQEALRDLTRAREDMKHLQRQAKQRLLAFLLRHGRSYDGKSNWTQAHYRWLEDAKFEQPVQQIVFQEYVDTVKALSKRVDALDLQLESAASDSVFWAVIQGLMALRGVSLLTATTIVAEIGDLKRFASAPQLMAYLGVVPSEHSSGGKKSRGGITKTGNGHVRRVLVEAAWTYRHPARKTATLQRRAEKAPEAIQEIAWKAQKRMCGRYKLLEGRGKLKVQVCTAIARELTGFIWAIGQAMPQPPVKA

SEQ ID NO: 324030 - protein, 400 aa, unidentified
MDDIDDVGVFLGLDVGKSAHHGHGLTPAGKKVFDKQLPNSEPKLRAVFDKLAAKFGTVLVIVDQPASIGALPLTVARDVGCKVAYLPGLSMRRIADLYPGEAKTDAKDAAVIADAARTMPHTLRSLELTDEITAELTVLVGFDQDLAAEATRTSNRIRGLLTQFHPSLERVLGPRLDHPAVTWLLERYGSPASLRKAGRRRLVEVIRPKAPRMAARLIDEVFDALDEQTVVVPGTGTLDVVIPSLARSLTAVHEQRRALETQIGQLLEAHPLSKVLTSLPGVGIRTAAALLVTVGDGTSFPTAAHLASYAGLAPTTKSSGTSIHGEHAPRGGNRQLKRAMFLSAFAALHDPVSRSYYDRCRSRGKTHTQALLRLARQRINVLFAMLRDGTFYEPRTPRLA

SEQ ID NO: 324031 - protein, 374 aa, unidentified
MEWSGRAPAPPAREAGKGTKDEEHAMSAKFNSEIAVIGIDIGKNSFHVVGLDQRGAIVLRQKWSRGQVEVRFSNLPPCLIGMEACVGAHHLSRKLTSLGHDARLMPAKYVRPYSRGQKNDFRDAEAIAEAVQRPTMKFVATKSAEQLDLQALHRVRERLVSQRTGIINQIRAFLLERGVAVRQGLRFLRAELPRILARPCDALSPRMLRVIEDLAGDWRRLDERIEGLSSEIEVLARQDAGCERLMSVPGIGPIISSAIVAAIGGGDAFSKGRDFAAWLGLVPKQISTGDRTILGKISKRGNRYLRVLFVQAAWAVLIKPKSWARHGLKPWLEAAKKRLHHNVLAVALANKLARIAWSVLAHGRVFEATKIQAA

SEQ ID NO: 324032 - protein, 410 aa, unidentified
METLIKRCCGLDVHQATVVACLRIARPGKKVSREIRSFATTTAGLLELRDWLTAAGCTHVGMESTGVYWRPVHAILEDAFTVIVGNAQRIKNVPGRKTDVKDAEWLAELLALGLIPPSFVPDRGLRALRDLVRFRRSLVEARTDCRNRILGVLEGAGIKLASVATDVFGVSGTAMLQAIVAGHLTPAEIADLAKGRLRKKRAALELALHGSVTDDHRLMLDLLLGSLNDTEGRIAAIETHINVRLEPYRQDHLNLTTIPGVDWAGAASIVAELGTDMAVFGTAGRAAAWSGVAPGNNESGGRRRRAGARKGNVHHKTTLHTAAVAAGRTKHTYLADKYHRIRARGGPGIAGGAVAHKILIAAFHILARKVTYRELGADYLDRRAKQRVQRTIVRRLERLGYDVTLRPKAA

SEQ ID NO: 324033 - protein, 347 aa, unidentified
MRKHNTIGVDLAKNVIQVCVVSSSNKELQNKELTRQKFSEFLVKQSAALVAFEACATAHYWARVALRHGHQIKIIPAKAIVPFRQGHKTDRNDALAVAEAAKRPNIKMAPHKGIEQQGMQSIQRSRELLVQERTALSNHLRGLLLEFGVVIPRGFAALTQRIPDILEDGENELPDIYRPTLARLYERFCLLREDIQFLDKQIACLVKQNETCSRLTDLEGIGPISSILLFATLGTGEAFKNGREFSAYIGLTPKQYSSGGKINIIGISRHVANRRLRAVLIQGARAYVHKMKEPKSPKDKWLWALIQRAGYGRAAVALANKNVRTAWALLTQGTVYNKQQGSELLPA

SEQ ID NO: 324034 - protein, 346 aa, unidentified
MLHAGLDLSRRKVDVCLLSTQGEIVDEWASPPDADGLRGLAARAAMWGPAVRGVIESMNGARFVHDRLEEHGWEVLIADAQKVKGLAPLACKTDKIDARVLATLSARDLVPEIWLPDPSIRRERELARFRLHLVRHRTTLKNRIHATLVTFGHPCPVSDLFGHAGRDLLDRLEIPDPWRRNVDVSLGLIDDLELQIAQLTVQLKRQGADHRYIPLLVTAPGLGWINAFTVASEIGDIARFASPAKLCGYTGLCPRVKQSGASDARGPISKHGPKYLRWALFEAALNACKHPHYAERYQHTKRRLGRQRGPKVAQIELSRKLTEAIWHMLTNNQPFAPAGAPFRLAA

SEQ ID NO: 324035 - protein, 320 aa, unidentified
MYVGIDVAKAELVVAMGATGPVTTFPNDDVGLTALVGAMREAKPTLIVLEATGGYEIPCTAALAAAPLPVAVINPRSVRSFAKATGTLAKTDRIDARLLAQFGERVQPEPRPLPTAAQHELEALVTRRRQLLEMRTAEQHRLGQALGGHRQRVKQSLRKHLAYLDRELRITETDLRDRMQASPVWRARDDLLQSVPGIGPTVSQTLVAELPELGRLNRREIAKLVGVAPLNRDSGKRRGRRMTLGGRASVRAILYMACLSAIRHNPVLRAFYQRLTRAGKVKKLALVACMRKLLTIVNQMVRTGQHWSPSPSIACQLQPT

SEQ ID NO: 324036 - protein, 319 aa, unidentified
MQSKLTFGMDIGKNEVVVACHEGAFAILKMANAVAGLRRWLGSVPAGSRLGLEATGGYHEPVAELAYSLGFTVYILNPKDVHFYARALGARGKTDRLDAQIIAAYVAEHSVRLHPFVPLSADEKLLRELARRRATLVNAKSMLQQSLRVLPGFEREGRELLRAMGSFADRLERKLAQIAARSSERATLVKRLQTIDGVGTLTSIRCATLFTRVPFHSSDAVVAFFGLDPRPNDSGQHRGRRRLSKRGPSEDRRLLYNAAMSAIRTPAWRPLYLHLRNRGLASTEAIIIIARRIVRIAFAMYQNHSTFNPRLVPRPYCPA

SEQ ID NO: 324037 - protein, 346 aa, unidentified
MTIIVETRPITGGVDTHLDTHVAAALDANGGVLGVESFATTTAGFAELHAWLSSFGNLDRVGVEGTGAYGAGLARFLRGVGVTVVEVDRPNRQARRAHGKSDSIDAVEAARAALSGRAHGVAKTADGNVEAIRVLLVGYRSGRDVRIKCLNQLRHLGFCAPDELRERFRRVTVAGLAETAAALRPNPGGDPVVHATKLAMQTLGRRVLDIDADCARLRGELAELVKATAPTLLGLHGVGVLTAALLLVAAGDNTQRITSEAAFAHLCGVAPIHASSGKTVRHRLNRGGNRQANHALWRIVFTRMSSDPRTRAYVERRSLEGRSKPEIMRVLKRYVAREVYRHLPSA

SEQ ID NO: 324038 - protein, 347 aa, unidentified
MLIIGCDFHPGFQQVAIFDNITGEIEEKRLQHRAEAEDFYGSLAGQQVRVGMEACGHYPWFERLLEELGFELWFGDAARVRASVVRKQKTDRRDAEHLLDLLRRDHFPRIWVPSLEVRDVRQLLVHRHKQVQARTRTKNQLQSMALSCGVQKKYKLWTKAGRAELEQLALLPYAGERRKRLLEALDGLEAEIVELDRRVLEEARQRPEAVLLMTHPGVGSVTALAMVLTLGPAERFGSAKQVGSYFGLIPSEESSGGKQRLGKISKQGSSFLRFLLVEAGQTAARYDPQLKRFYRRLAVRKSRGVAKVAVARKLATRLYLMLREDWTYAQLCQAVMQVSPSHSVAGE

SEQ ID NO: 324039 - protein, 362 aa, unidentified
MDDATTPICEGKVTVGLDLGDKYTQVCVLDSDGGVIEEARLRTTPVALRRRFAHVPTARLVLEAGTHSPWVSRLLEDCGHEVYVANPRKLRLIYQNDSKNDRVDAEYLARIGRLDPALLAPFRHRQADTQVDLALVRSRDVLVRARARLINHVRGAVKSGGGRLAKCSSVTFALKALPDLPPELEPALAPLLEVIATLDDQIHTYDRRIEELAKERYPETALLRQVSGVGALTALTYVLTLEDPARFTDPRAVGSYLGLRPRQADSGDLAPQLHITKAGDEMLRRLLVSSAHYILGPFGPDTDLRRWGLGLAERGGSRGKRLALVAVARKLAVLLLRLWSTGEVYEPLRNSARREDSLASPA

SEQ ID NO: 324040 - protein, 585 aa, unidentified
MKKLYVGIDLAVTGRHRGSVYDPQENRYLDNSFAFDINFDGFEYMLRRVESHAQEGEEVQLNFVMEPTALAWMPLSCYLISKGHLVFRVTPQQSADFRKLRSKHVKSDRVDCQALAKLPVVCEDGVYQLYLPSSDLGELGRLARHMAKITQQAASRKLRIWSLFVMINPKILAVFGEEKFSRTARTMYRHFVDPFKIVNLGKEQFAEAFRSECSWDVADEVLEKIYEVSLSTTKIYGPMVDQGLLPFNYGRVEEEVRIELDLMEAEEKKISEIQHKIEPLYKRIDPQGYLMSVQGIGIVIAAAILGIIGDVSRFPTIGAFRAFFGFTPKKNQSSNRDQQGLSIHKAAQSLLKMYMFLAAETARRYDPEFAAFYNRLTKRGLHHYQAACALANKMSGRVYALLKRMQRAEDSCYRSTVESAQPIELLRSAEVVYKLRDLEGNIIDKKTARELIVEKFPSISQKRREEKARKNNEKLAAKQDAETKSRNKKQTNKSRESAGSQQSLPDQPRQFPALMPENSSMRSGRTLPAGTILDDMLSKLAVQVQLNSSGQADEDLSELANVQAGMDTAVDNLLIGGGKINRKKT

SEQ ID NO: 324041 - protein, 423 aa, unidentified
MRYIGLDLHKKLLVVCALDQRGKVLFRETVACRREALVAFAKSKLCKTDQLAVEATTNTWAVADILRPFVAAVTVGNPLQIKAIAQTKVKTDKIDAQVLANLIRCEYLPTVWTPDAATQKLRQLTTLRGGGITDRSRLKSRVQSLLAQLLVVPPVKVVFCQKGLQWLRTVELPAEVRSAIDLYLRLYEAVDQELRKIDDQLKALAYEDGRAKLLMTLPGVAHGVAMSLLAAFGDIGRFKDGDHAASYLGLTPSLRQSAAKRYHGRITKAGCPQTRAMLVQAVQAASDHPGPIGAFFRRLRKRKKYNVAVIATARKLVTIAYLMLKNNEPYRYAKSDVVKNKLTECRRKSQQPTSKRARVSRLSPEASPLNDLYRQHGLPSCQSPGEWSAGERRALERAEVTAFAEEAHKATLKTKPRTRKDSQ

SEQ ID NO: 324042 - protein, 359 aa, unidentified
MGSIASDPADVIVGVDTHKDQHVAVALDGLGRRLGERFVAAAPAGYADLLAWAAGLGRVAAFGVEGTGSYGLGLARFLRRHAVMVLEVARPPRKGQRRLQGKSDPVDAEHAAREVLAGASVVTPKTGEGAVEAIRLLKVARDTAVVAHSQAMITLKATLVTASDTLRAELEPRTDFALVTACAALEVSGDLADPEVAMRHALWALACRWLALHEEIKAHSRHLKRLTSRTAPALVATFGIGFDCAAELLCAAGDNAGRIRSEAAYAKLCGACPIPASSGKTSRHRLNRGGNRQANAALFRIVVVRMRWHPATIAYMERRTAEGLSKREIIRCLKRYVAREVYRLLPVPATASAEPLQAA

SEQ ID NO: 324043 - protein, 389 aa, unidentified
MLCVGIDVAKRKHDCCIIDSDALKTVESFTFPNSREGFDMLLSKISELGIPKDKIRVGLEATGHYSSNLAHFISEHDLPLNIFNPLLTNRYKQGFSLCKTKTDKVDACAIAQMIVSGKASQTYSPLLYHNEELKSLSRYRSQTIQKCSKLKISVSRLVTILFPELEGLTSSIHLASIYALLKAYPGHEQIAHCSMKQLTRLLSDASQGRFDKSKALEIHQAACRSIGTVSLSASMELVHAITDIEVLKQHVAEIDEKIKEMADQEESSIIDIPGIGYTLCASILGETGDFKRFPDVDKLFAYAGMSPSKYESGGFHSNHNKMEKRGSPYLRKTLFVAVRLVAQNVPKFKEYLEKKLSEHKPYKVALSHVAKKLIRLIYRLGVSRCPYLA

SEQ ID NO: 324044 - protein, 343 aa, unidentified
MKLNRVGVDLAKNVFQLHGVDRHGKAVWKRRLRRDQWLKALLDQAEPGCEIGMEACGGAHHWARELEARGYVVKLIPPQFVKPYVKSNKNDANDAEAICEAMSRPNMRFVTVKSVAQQDIQATHRIRTELKDQRNAKANQIRGLVAEYGLVAPLTLCALRAAIPAWLEDADNGLTDHFRSLLHGVWLDLVALDERMTELDQTIKQLANSNEVTRRLQQLRGVGPMVATALVATVGDAAQYHNSRQMAASIGLTPRQYSSGDKHRLLGITKRGDVYLRTLLIHGARAVVSQAKHRDDRLSRWVTGIAQRRHPNVAAVALANKTARMAWAMLRNETDYDPDFAMR

SEQ ID NO: 324045 - protein, 486 aa, unidentified
MCDFYGKVLVNPTPVEHRSSDLKAMVLLIKQTMDAHGVKDLICCVEMTGIYHQIVSRTLRSAGFETRLVHPFASNHYRMAESGDIKTDDKDLVAIHRASVNGFGLIEHEWNEHYQSLKLLTRHRRDLVKKRAKLQSQIRVRLESCLPGYAGLFPGTDLWEHEIGQMVLQFIADHGGTSRALLDAGIPGLTKWLKEQQCSFQAKSVERIVAWASNAATGNRLHPLITRLWQQLLIDWRQKSQQILEVERETAGLLAQTPWILLLSHPGINVVSAAEVAGETGPIEHYASAKAVTGRAGLFPSRYQSDGVDRGGKLSRFRNGKMRGAWMLIADNLIKCNEYWRGKYQFWKEQGHDPRDIRCRVANRVTRTVFQIVAGQKLFQHPSRLDRGYVLSKLLDFHRKHQTPMDVVLADLKAATGQLPKSAYADEAKPLNDICSKQVRSRKKEPQQLGSLLVQVLAKLGVTNQPPEVNSTSLEAPVAESGESDR

SEQ ID NO: 324046 - protein, 354 aa, unidentified
MFFAGIDAHTRYVVVVIIDRMGERVLSPTRVKVSQPERLLELLADYRPIDAVMETSSSWPWLHELLTGADVRFVLAHARRLRAIAEANYKRDEIDAELLARMRLAGLIPEVYATPAAQREWATLIRHRTTFIKQRTALVNRIHAQLHMHGLHLERGELLTRAGRQWVRTVANPALSDEQRALVRSHLRVIARLRPLLRAIDRHIAEVAATIPQAQLLTSIPGIGPQRALVVCAEALPITRFPTPGHLASFAGLVPRSKQSGQAPVRHGAIPAGANRWLRGALVQAVVTHVQRAPESWLTEYYQTQKARVGWPTARVAAARKLARAIHAMLRTNTRWTNDPSRGELVETHATVMA

SEQ ID NO: 324047 - protein, 413 aa, unidentified
MEWVACAGIDWGDKKHAYMVQTADGKKQDGWFGSSPEEVHEWARGLGVRFPGGTIIVAVEQGRGSLLYALMAYEYLVLVPINPRASKAYRESLRLSGASNDPSDAALIGDFAMKHLTELRVWRPDEERTRKIRLLCEHRRSLVDQRTAFTHTLSATLKEYFPQVLQWFGDEASPYLREFLTHWETLEQASQASVDDITNVLKSRGRRKASAVAQVLIEKIRIAVALTRDTAILDACSMYARSLMALLDPIDEEIAKYDQAIAAEWADHPDRQIFDSLPGAGAVMAPRLAVAFGLERSRYDAAAELQQYSGIAPVTEQSGRHWSVRARWGYPTFLHQTFHEFAQSSLPHSAWARAFYHQQRDRGAGHHAAIRALAFRWIRILFRLWKTGEEYDEQRYIEVLKRKRSPIITRLAA

SEQ ID NO: 324048 - protein, 418 aa, unidentified
MPQVAEDRLYRVMEKGGITMHYCGIDIAKRKHEALVIGEFGKALSKSFSLDNSSDGAAKLFQFFGDNGIKKEDVIIGMEATGHYWLSLYSFLTEEGYNVKVINPIQSDAFRKMYIRQTKNDSRDSFIIAQIMRFGEYHTTELAEESIIALRQLSRYRLCLVESAGNCKRRVIALLDQVFPEYASLFSDIFGATSLELLETYPSPDDIMNVPTQQLADFLSKASKGRFKEQKAYELKAIANGSFGVGFAKDAFCFQIKQLVAQLQFLEEQISDLEHEIDILMQSADSPITTITGIGSILGAAILSEIGDIHRFDSPAKLVAFAGLDVKVVQSGEFTGTQGKLTKRGSPFLRRAIWLAANVASFKDPTMSEYYQSLRQRGKHHYVAISAVARKMCNIIFAILSTNKPYDPYYTKHMQIIT

SEQ ID NO: 324049 - protein, 424 aa, unidentified
MIDTGDVDVFLGLDVGKGEHHGTAVTRAGKRVFDKRLPNSEPRLRAVLDKLTARHGTVLVVVDQPAFIGALPLAVARDVGCRVAYLPGLTMRRIADLYPGEAKTDARDAAVLADAARTMPHTLRGIELADETIAELEMIVGFDDDLAGEATRIANRLRGLLTQIHPHLERVLGPRLDHPAVLALLERFGSPTALRKAGRRHLLGVARPVAPRMFERLVEDILTALDEQTVVVAGTEAAALIVPSLAGSLRAVLDQRNLLEKRIQELLDEHPLSQILTSMPGIGTRTGARVLIDVGDAAAFPTAAHLASYAGLAPATRSSGSSIRSEQPSRRGNKQLKRALFLSAFASLGDPASRTYYDRKISQGKRHTQALLCLARRRVDVLFAMLRDGTLYQSRPAQRGQLSRGFASSTTRSAAGTNPSTGFA

SEQ ID NO: 324050 - protein, 373 aa, unidentified
MPKYSTAFGMDVHLRSTTVCALDADTGEAVTRRFPGNPWGEIAGWMDGFPGPSLAAYESGYLGFAPQRELAGLGVECVVAAVSKIPRSAADSASKNDRNDAARMAKAILAHDISPVWVPSPEVEGIRDLAGAYDGATARLATAKQRLLAFLARRGFVYGGTTPAGNPRKYWTYDFLRWLDKVRPEGDGGVRTLAALRNEVEAAAEARADLLSEYRAAVDAGPIAAEVAALQSIKGCAFALAAAFSAEVGDFTRFRSGRQVTAYFGLAPSQRSSGDSVRLGGISGAGNALVRKLAVEGSWCYAAARHQPKLMPRDTGVPLEIRMHGRKGSERLLRRREEMLARGMPAAKANAATAAELVRWLWALGMMCREGAE

SEQ ID NO: 324051 - protein, 407 aa, unidentified
MNENGKRYIGLDVHKHYLIALGVDERLEVVLTARRVELSNLESWMKKNLTQQDEVVLEMTTNTWQLYDELSAYAGSVTVVHPPHVALITRAQVMTDKIAASILARLLAKGLLVGVWVPPQEVRELRGLVAQRQKMTRLATQAKNRLHAVIQRHHLLPPEGNPFAKTNNGWWASLSLGRLEKMNLQSDLETLQFSEKQESRLQEEMTGIATEDEEIGRLLHIAGFGVITAVTVYAAIGDIHRFEDAKHLVGYAGMGTRVHDSGMTTRTGKITKAGRRDLRVALVEAAHVAANSHPHWKAELARLEPRLGRNKAIVAIARELLVTVWHVLARKVADRFAEPEKVSKKMLHFAYDVGKANRAGKSAAQFARERMDVLGLGSELTSIPWGSKKPIPLPPSKLKGRSDVPNR

SEQ ID NO: 324052 - protein, 421 aa, unidentified
MNALTEFAATVGWDWADQKHDLWLRPADGSKAQHFRLEQSPEALHEWVAKMRERFGGHPLAIGIETSRGPAISALLGYDFLVIFPLNPKAMKDYRGAFAVSGATNDLSAAQLHEEFVRLHRDKVQALKPDTELTRRLGGLVEGRRRLVDERTRLVNQLHSILKTYYSLAQALLGKAMNQPLAAEFLARWPDLESLQKAKPEVVRAFFFKHNSRRTKKIQEHLEAIRTAKALTTDTAIILPAREMVLALASLLRPLHKAIARLDRQIQEAFDQHPDAFIFRSFPGAGPALAPRLLVAFGTERERFADAGEVAQFYGLAPVVMQSGNTQTVHMRHRCPKFGRQTFHENAACARKVEPWAALYYEDHRGRNDDKHHEACRALAFKLIRIQFACWKTRTPYDPQRYLQALKKHGSPLHPKLENPN

SEQ ID NO: 324053 - protein, 379 aa, unidentified
MSRVRFLGLDVHADTITVAVAEPNGEVRSVGMIPNRLESVRKLVAKLGPAKQLKACYEAGPCGYVLYWQLTALGVACEVVAPSLVPVKAGDRVKTDRRDAAKLARSYRAGDLTPVWVPDADHEALRDLVRAREDARQDQHRARHRLSKFLLRHGRRPPDGVKKSWTLKYMTWIQEQVHFDQPALEATLLDYVHEVEHMAGRIQRLEKAITEAIQQAPPQMRAVIEALQALRGVAQITAVTVVAELGTLSRFTSPRQLMGYSGLVSSEFSSGNRIRRGAITKTGNAHLRRVIIESAWAYQYRPWLGGFLLKRQRDLKLEPDIKEIAWKAQWRLHTRYKKLAAAGKKKPQIVTAVGRELLGFIWAIAVQTEARFQPHPKAA

SEQ ID NO: 324054 - protein, 430 aa, unidentified
MTKLPPTPAGAVLVAIDMSKNRQEVLIERPEGGRRRRLSVMATKKDYDDFAEQLAAIGRPIVVGFEATGNYHRTLAHRLLTAGFELRLISSVALARTREALHNGWDKNDSKDAQVILHMLRIGATQRYVDPLAAGINDLQELSKTHETISKAKTQTWHRILTHYLPLYFPEIARFAGNSRSDWFFALIERFPTPASITALDAETFSAVAWPLIGRKVSKARLINDIYETACASVALPVPEDSAAITMFRMVIAQGRSLIQQRDEIERLAHARLAEHVDYQLLRKIPGIGPINALTILAEAGDLRRFNHHRQFLKFCGLDLATCQSGTFRGRTKLSKYGNARLRRTFWMAAQVAARQRDNSFRDKLGRYVAGHADDADRRRKAMTALTAKMARVAHAVIKTGTEYRPFLERSDARWKDPSLMCREGARATL

SEQ ID NO: 324055 - protein, 343 aa, unidentified
MQAITTIGLDIAKSVFQVHGVDAKGNVVLRRQIKRRYVLAFFQKLPPCLVGIEACASAHHWSRQLQALSHTVRLMPPAYVTPYVKRHKNDAIDAEAICEAVTRPNMRFVATKTREQQSCLTLHRTRHLLIRQQTSVINAIRAHLAEFGIVAPVGRNGVDQLLGIVADASDKRLPELARACVAALGTQLGTLKAQILQFDRLIMAWHRSSEASRRLDDIPGVGPALATALVATVADPRAFRSGRNFSAWIGLVPKQHSSGGKDRLGSISKRGDRYLRGLFVAGALAVIRYAKIHGTKRRPWLTALLARRPTKVAAIALANKIARMAWAMMAKGERYKEPVALAA

SEQ ID NO: 324056 - protein, 360 aa, unidentified
MVVQRTSVGLDVHARLVVACGLDRQTGEIFEQRLTPSHGEIADWIRSLPGPAAAVYEAGPTGFGLARSLRAAGIDCEVAAPSKLMRPSGDRVKTDTRDARHLARLLMLGDVTAVAVPSREQEAARDLVRAREDCRGDLMSTRHRLSKLLLRQGIVYSGGRAWTGKHELWLRRQRFDDAALQLAYDTSFEAMLATIDRRHRLDRAIEQMAADSEFTPVVSRLCCVRGIATLTAFGLAVEIGDWHRLTGRSIGAYLGLVPTEYSSGASRVLGAITRTGNGHARRLLIEAAWHHRARYRPGATLRRRWDAASAPARARGQLANQRLHARWQAFDARKKRAVVANTAIARELAGWCWSLAVLDE

SEQ ID NO: 324057 - protein, 343 aa, unidentified
MQVFIGVDPHKASHTAVAIDTSEAQLGHKKVRATRTQVEQLLGWAEPYPARVWAIEGANGMGYLLAQQLVAAGEHVVNVPVTLASRTRLLGTGRTNKNDPNDALSIAISALRSDALHPVRPVGHSEVLRLLAKRNRDLGAHRTRQVCRMHALLLELDPGGMSKEMYASDVDRFLAELTPTGPVEQIRYDLAVELLADIRRLDEQLKASHKRIKTAVRASGTTLTDVFGIGPIVAAMLIGFSGDITRFANRDRYAAYNGTAPVEFSSGGRTVHRLSTRGNRNVNNALHIAAICQLRQPHSEGRSYFDRRVAEGKTKKEALRALKRQISNTAYRHLVADAARARG

SEQ ID NO: 324058 - protein, 341 aa, unidentified
MLVGVDTHLRGYQAARKIDSGVIGVVENFRSEEELELYVAKQTTSAEQVVVVYEAGPLGYTLYRKLTSAGVLCYVCAPDSGEQRKKRRKNNKIDARSLTSKLFNYLNGDQNALQLARVPTEAQEQLRMASRQHDQLVEERKRLGAKGNAMLLSQGFGSWSNWWRPKAWADLSSKLPPWLLERLKVWVDVLKVLDEKISQAKAAFARSCNGPRPKGVGALSQMQLQSEVLDWSLYSNRRKIACLAGMVPSEWSTGDKERRGSITKVGVPALRRIIVEMVWRIIFFQPQYKPVQKWLEVLRGPNPAMKKKAVIAIGRQLMVDLWRLQTGRVTAQELNLIMVTD

SEQ ID NO: 324059 - protein, 464 aa, unidentified
MSAAPTHRKRQLDEFACVHPHAAGLDIGSEEIVVAVPADRDPQPVRVFQTFTADLHALVAGLVACGIDTLAMESTGIFWIPIYELLEQAAITPDLVNARHVKTGPGRKSDWNDAQWLQKLHAFGLLQGSFRPDAEIGTLRRLARYRSELIERRAPHINHMIQAMGHMNIQLNLVLTDLTGVSGLTMLGAISAGERDPHRLAVFRQPGCKHSEAEIVKALTGTWDDTQIFMLQQSVDLVDYYTMKLIDCDRQLEQQYQAMQSGWEKDARLPDLPAAKGDSKSKNAMTFTARAHIARVIGVDLVAVMGLSAITVQTIISEVGTDMERFPTVKHFCSWLGLAPRNHISGGKVLRSGTMKVHSRANQAFGQAAYSVTRAHSSIGAYYRAMRARLGRKQAIVATAHKIARIVYDLLKTGEPDREESEAEYERKRQEREIKHLARRAQKLGYALTAVPATTPESPSRPGG

SEQ ID NO: 324060 - protein, 347 aa, unidentified
MKFYNRQHKYYCGVDLHARKMYVCILDHKGKIVVHLNIKTDPELFFELVFPFIEDVVVGVECVFCWYWLADLCADHKIDFVLGHALYMKAIHGGKTKNDKIDSYKLAMLLKGGNFPTAYPYPAKWRATRDLLRRRMYLSRRCSELVAHINNTNTQYNLPAFRKKLSRKYNHGGVAERFEDPAVRKSIEVDLAMIDAMNQILKKLEWHIEKTARQHDYHTLYLLRSIPGVGQILALVILYEVHDVRRFPRVQDFSSYARLIRPVKESDGKWAGHSNKKIGNHHLKWAIKEAAILMLRDSSQAKYFVSKLEHKYNKGKALGIFTHKLGRAIYFMLKNKEAFNMKRFFDQ

SEQ ID NO: 324061 - protein, 335 aa, unidentified
MQIYGIDLAKEKFDVSFFDLTSKKVSNQPSHKVVTNNLKGIGKFFKGLPSDAVLVAEHTGVYGDTLLKCCMDSNVKIAFVGGYVIHRYRTTPDRAKTDVLDCALLRDFGERYPDKLKYKTFPEEALYELRQLARHREMLVEQRKQLITADKSEDCRPIRSLAVKRSMDRIKEMLDTEIAETEKEMLKVINGHESIHHNYELVKSVDGVGLITAVELLVKTENFTKITTARQYAAYAGTAPYEKSSGKMDKGAHISKIGNRRSKTLLYICAESARLHNKEIKLYYERRTLIDKKPRHYVLNAIANKLLRIIFTLVEKGEYYDANFIRQDPRVVKYN

SEQ ID NO: 324062 - protein, 414 aa, unidentified
MKVVYEVCCGIDVHAKMLVACLMGADGTKQIRTFSTMTDDLLKLHDWLVAAGCTHVAIESTGVYWKPVFNVLEDALTVILVNPEHARALRGRKTDVKDAEWLADLLRHDLLQPSFIPPPEIRELRELTRYRESLVGEQAAVANRIQKLIESANIKLGQVATDVMGASGRAMLRALVEGETEPSKLADLARGQLKEKRALLIRALRGRLTTAQRFVLRELLARWSELEAAEARVIKEIDQQLQSPAHPRLARAREILDTIPGLGPRVVEVAIAEAGVQMREVFPTDAHLASWAGLCPGNKASGGKRLSGRTRKGNTYLRAALVQAAWGVTRKKNCYLSAQYYRLVKRLGKKKALIAVAHSLLVIIYHVLERDQSYTELGGDYFDRRNTEQQRAYHIRRLQMLGLKVNIEELPTAA

SEQ ID NO: 324063 - protein, 415 aa, unidentified
MKVVFPTCCGVDVHKTFLVATIITTPADSLQPNYQKKRFSTFNSDLNRFADWLLEHNCLDVCMESTGKYWVPVFNVLEKRGIRVVIANPKWVKAVKGNKDDTKDSKWIGDLFRIGLVKSSFIPDLNIRILREFTRYRYKLVSMKSSEKNRFQNAFTVCNVALDSVVSDMFGKSATAITDYLTSDESFDPEHCVSLLQRSLKKKAGQVLESIEGFSIADEQKARIKIIREHYDFIEKMIAKVDTCVNEMVEKYEGEINLLCTIPGIDRRSAITIISEIGTDMSQFGSSKRLCCWAGLTPGNNESAGKKKSVRISRAGVYLKPALVQVAHAAVKDNDHPYYKLKYERIAKRRGKKRAIIAIARMILTAVYSLFCTGEVWNPVDLYKVDMPEHLKEQQLAKAIKQATRFLEKQGLSVA

SEQ ID NO: 324064 - protein, 359 aa, unidentified
MIVIGADTHKHNHALAAVDAAIGAIVGERAVGAGERGHLEALRWARALDEDRVWAIEDCRHVSRRLEQALVAAGERVVRVAPRLMGASRRGERQPGKSDRIDALAVARAVLREGIERFPVAVLDGQAMEIRLLADHRDDLVAERTRAQNRLRWHLVELAPELEASLPKRSLDRPGQLDRVVRALRRMPTGARVRVARELVTRIRQLTREANALEAELRALVRAQRPRLLAETGCGALTAATLIGRSAGAERFATDARFARQAGTAPIPASSGTRQRHRLHRGGDRQLNRALHTIAITRARRDPDTRAYLQRKIAEGKTRKEAIRCLKRHLARRFHRLLTEPATHQPIPVGAPSPMICLT

SEQ ID NO: 324065 - protein, 416 aa, unidentified
MSLSVPGAVFYTGIDWAAETHAVCVLDAAGKVTARFTIAHSAEGLGKLIRKLAGLGDPADMPVAIERPSGVLVDALLEAGHPVVPVSPNAIKAWRESEVLSGAKSDPGDAEVIAEYLRLRQHRLRAAAPYGDETRALRTVVRARDDVVDLRVAVVNQLAALLDAHWPGGKAIFADLESRIAVEFLTRYPTAASAARLDEAGIAAFCAEMGYSGKRPACVLLGRLRSAPAGTCGDALTAAVREAVLALVAVIKAVTAATRDLDRAVTACLGEHPDGEIFTSLPRSGQINAAQVLAEWGDCRQAYDGPDSVAALAGVTPVTKASGKHRGVSFRWACNKRFRKAITTFADNSRHASPWAANIYAQARASGKDHPHAIRILARAWIRVIWPCWLNGIPYDPDKHGAAAALNQHASNKLAA

SEQ ID NO: 324066 - protein, 371 aa, unidentified
MYNTTYVGLDTHMKTITIATAESGRQDVQTVGIINNDSMAVTKMVKKLAAKGKELIFCYESGQLGYGLYRHIKAMGHECIVVAPSLIPEKKGDKVKTDRKDAQKLARCLRNGDLTPVWVPDEEHEALRDLVRARESAVEDLHRNRQRIIKYLLKLGVQKPEGARNWGIKYKEWLKTLKLQHSAQQMVLSEHIHTMEESENRLTRFEKEIAAQYENSTQQELVSALQGFRGIALITAATIAAEVGDLSRFGKPSQLMSYAGLVPSENSSGDTTKRGSITKAGNSHLRRIIVEAAWHYRHRPAVGLNLKKRQEGLPEEIKLISWKAQHRLNLKYRRMAAKGKVGQKAIVAVARELLGFIWSVGKALANEKAVA

SEQ ID NO: 324067 - protein, 354 aa, unidentified
MKDTMIGVDLAKNVFQLHGASMTGEVKFRKKLTRPQFMAFMAEHPASVVVMEACGSASYWARELSKAGHEVKLIAPQYVKPFVKRQKNDAADAEAIVVAAQRPEMRFVPPKTEEQQARAVLFRARERLVHQRTELSNALRAVLYEYGHAVPQGSVHLKRIVEIIEAETCDLPELAREEARDLLEQIAEKTGRFEAKTRKIAAQAALTPTARRLQTMPPLAHARMRCRAAGVGPMTALAVEAFAPAMETFKCGRDFAAWLGLVPRQMSSGGKERLGRISKAGQSDIRRLLIIGAMSRLNWMGARSIREGSWLDRLRARKPKMLVAIALANKMARMIWAMLTKQQDYKDPVPAGAA

SEQ ID NO: 324068 - protein, 348 aa, unidentified
MEYYIGLDAHTSTCTAVVVDERGEQKMRHTFPTTEANLIDFVSRITGVKHLTFEECTLSQWLYMALIEHVDHLLVCNPVYVAKKQGAKTDYRDALRLAQELRTGHLKSVYHDESHWIELRVLTNNYLALVDDIVRTKNRLKAVFRAEVITTDTKNFYEDKDRAKELKNPNSRFVAESLYDQIFSLERLKAEYRDRFKQNLKKYRPIRNLTTVPGIDLIRASIITAVVCTPHRFKNKHQFWGYSMLVRHIQISAGKIYGNKRVHGRKELRDVFLGAAESALRTETALRDYYESLRARGVAHKEAKIALARKIASTCLCLLKNNDTFKNDFDQQQIEREKLRKELNQETV

SEQ ID NO: 324069 - protein, 344 aa, unidentified
MNIATIGIDLAKNVFQLHGVNCHGKVVLRRQIHRGQIRGLFVNLPPCLIGMEACASAHYWARTLQSYGHTVRLIAPHFVKPYVKTHKTDATDAEAICEAVNRPNMRFVPIKSIEQQSALSLHRVRQGFVWARTAQACQIRGLLAEFGLVMPQGIANIKQVPKLLQVAGKELPAPFCRLIERLLAHLKELDRQTRELEEQIVDWHERSEPSRRLAKIPGIGPITASALVASISDVRSFKSGRELAAWLGLVPRQHSSGGKPTLLGISKRGDRYLRTLLVHGARSVIVRARKREDEKDGWLKKLLDRRHVNVATVALAHKTVRTVWAMLAHDREYRPNYKSLPMAA

SEQ ID NO: 324070 - protein, 343 aa, unidentified
MKIHALGIDLGKTVFHLVGLDASGQVVVRKRCSRTQLLAFTANVQVGLIGMEACSGAHFLGRALRAQGHEVRLMPAQYVKPYVKTNKSDYIDAEAIAEAVQRPRMRFVPIKTEEQLDLQALHRVRERWVMRRTAVVNQIRSLLLERGLTLPKGRRYLEEQLPRILEDAELNLSGSFRVLLSQLQLELEQLAGRIEQIDTVIQKTAKENEACQRLTEIPGVGPVTATALIGAIGNASAFGKGRALSAWMGIVPGEYSTGGKQKLLGISKRGNKYLRRLFVQGARSVMQQRHKQAPGLRDWLARLLARTHQNVVVVALANKLVRMAWAVLCKNERYRAPILATTN

SEQ ID NO: 324071 - protein, 425 aa, unidentified
MQEKILRVTPTTIIVGVDVAKETHWARITDYRGVDLMKPVKVNNSIDGFENLLAKVAKMKTDKGCDNVMIGMEPSGAYWKALGWYLFLHRSNPMLVGVNPYHTKQAKELDDNSQTKSDKKDAQTIAHLVRDGRYFDIYLPEGAYAELRVLCVERGRLLKQISRGNNTIVAVMDEFFPEYGTVWKKVTCPTSREILKQIPFPCDILEISQNDLVALIRKASGGTEGKKLADELIQAATHSVGVPEGKDSTRLKLCNLIEEMELYERQVAIVEAAMEEIMDMLELGEIFQSMKGIGPIISAVFLGEIGEVTRFENWKQVRKLAGLNLVEQSSGQHKGKTSVSKRGRPRLRHILFLAGQSCVLHNAEMRELYRYLHERGKNPLTGYQAYVAVGLKVMRILLHMAKHKVKYDPAKALGEVRKQQIASLA

SEQ ID NO: 324072 - protein, 346 aa, unidentified
MMIIGCDFHPSWQQVSWLDTETGETGERKLVQAAGDAERFYRQLPAPALIGMEATGNCHWLVDLLAELGHELWVGDAAQIRASCVRQQKTDRRDAEHIRILLQEGRFPRIWMPSSEVRDLRQLLLHRYKLVTIRARVKNELQHLCLNQGVQRKRKLWSQAGQRVLRELPLKPWAARRREDLLALLAMLDQQIDPLDQAVKEEAQRDKMALLLQTQPGVGAVTALAYVLTMGDVSRFPRGKQVASYLGLIPREHSSGGRQKLGAISKQGNRMLRMLLVEAAQIAVRFDPGLRKEYLHRCHQKPKAVAKVAAARKLAVRLYWMLRTHTPYPEVVRIESSPRVPLVGAS

SEQ ID NO: 324073 - protein, 343 aa, unidentified
MYYCGLDVSMKSTHIYIEDARGRRVHRSAVATTPAGLIGALAPFRRALRVAVEAGGQTMWIVEVLRELGAAVHVVHPLKVKWIAESKKKTDRVDAELLAGLLRIGGLPAPVHVPSRRSRELRGLLLARRQLVQMRTKLINVVRGLARQQQVTLPARALQRAAGWERLRTRPLSAAVRHVVEAYWATMEAMTAALKALEQELDSKATADPRIARLQSVPGVGRVSAQTLVATVDTIRRFPGARQLVAYSGLVPSVRASGERIEYGPITKQGRSEIRAVWVQAAHAVLAVKDPIARPLQRWWAQVAKRRGKKTALVALARKLVTIAFHLLREGTTYDPRRLHCPA

SEQ ID NO: 324074 - protein, 344 aa, unidentified
MKTAAIGFDLAKNVFQVHGVDEHGQTSVRKKLQRAQVAVFFAKLTPCLVGIEACGSAHFWARKPQSLGHTVRFIAPQFVRPHVKTNKTDAADAEAICEAVNRPGMRFVPTKSVESQALLPLHRARQGFIKARVAQTNQIRGLLAEFGIVVAQGARTIEHRLPSVLEDAENGLPGNLRQLLSRLFEHARYLRQQAEAIEEEIERWHEQNEASCSLAEIPGIGPLTASALVASIGDARAFASGRQLAAWLGLVPRQHSSGGKPHLLGISKRGDGYLRTLMIHGARSVILRAQKKAGYAESWLGRLLARRHKNIVACALANHTARVAWALLAHDRRYESTYSAVQAA

SEQ ID NO: 324075 - protein, 411 aa, unidentified
MGKVFCGIDWAERHHDVALVDEHGKLVAKRRIHETREGWQQLLDLLAAAGDSADAPIPVAIETPRGLLVAAMRATGRPVYAINPMSVARYRDRHTVARSKSDHADAVVLANILRTDAHVHRTLPADSDLARAIAVLARAHQDATWRRTKASNELRSLLREYYPAFLDAFASRKDFLVSANARAVLAIAATPATAAKLTKTRIAAVLRRGGRKRGVDDLAGELHAALRVSHLRQQPLVEQAMGTAALALLAALDTACTNVDQLGEACAEAFAQHPDYEIITSFPGLGDLTGARVLAELGADRSRFADARAVKAYAGSAPITRASGRSISITHRRIKNDRLAAAGFVWAFIATNNSPGARAHYDRRRQDHGDRHAAALRNLFNRFLGCLHQCLTTGQTYNEAKAFPNPIEATA

SEQ ID NO: 324076 - protein, 424 aa, unidentified
MKFKMQEKQNQLIERISDKHLVVGVDIAQQTHVARAVNYRGIVVGDPLPFENDDDGFARLLDWIKQLKNTKGLDTEIVGMEPTGHYWLNLSGWLYEQNIDVVTVNPHLVKKNKENRDNTQSKSDKKDALVIADMVKNGYYSFIRPTGEAFEKLRVLMSNRDTVVKRFVSAANQINRWVDIIFPEFRQVFKDVKGKGALATLRLFPTPKELRSMEAIDIVNEWRTVMKRQPGIKKAQALIQLAKNSVGNDKAHDAYKLHLKQLLEEFDLATTQLEIIEKEVSEALESITFTDKLLGIKGLTEITLGGILAETGDLSHFAHGNSLLRHAGLHLVEASSGKWKGQIVLSKRGRSRLRRFLYLGTMCLVMNNPEFKEIHAYNVKVKKMKKMKSIMKLVGKFARMIVGIARRNEPYCAEKVHPLTPLAA

SEQ ID NO: 324077 - protein, 408 aa, unidentified
MRVYIGIDWSEDKHDVVFMNQAGVDVARLTIPHSPDGFVQLEAARQKLGLAPDECVLGLETAHNLIIEYWWSQAYQQVDVIPPSVVKSNRNRFRQSGARDDQSDGYLLADILRTDRGRLQPWHPDSLLTRQMRAKVSWIHHLTRASTRLSNRLRAVWLRYDPAALQAFPDLSTQIALEFIRAYPTPQAAARLTLAQLVDFAQQQAYSHPQKLPSCFTRLKDDYPQASPETVLVYQDEAIQLASLLLQMTHTKVDALCELQTLFRQHPDYQVFSSLPGAGELLGPALLAKFGDDRQRFPTPASVQALAGTCPVTDKSGKRKVIKFHKACDREWRSLSQAWAVALVNRAKSPLAIAYFEQIRPRCHNRHHAYRCVANRWLAIAWKLWQSRQPYNEALHFQHRAARSKPHI

SEQ ID NO: 324078 - protein, 355 aa, unidentified
MTASYDYHIGVDYHKSYSHLVVQDSAGKTLRSGRVKNDRQSLGGFLERYRENSHAVVEATRNWMVIYDWLDDICDDVVLAHPLKVKAIADAKIKTDKIDATVLAHLLRADLVPEAWAPSEKSRDLRVALRERMFYVRLRTMTKNRIVTVFDRYPEQTAQLKKLGDLFGKAGRVQLAQVNVSEIDRIQIDRGLAFIGDIDGRIKQSEATIRTMTKANGNVRLLKTIPGIGEFFARLIDAEIDDISRFRNAKKLAAYAGLVPSTYSSGGKTFHGKIIKQGNKWLRWAFVEAVTPAIVTDPQLRAQYEHLKIRGVNKARVAIARKLLTIAFQILRDQRAYEPRGASPTEGASTISRLS

SEQ ID NO: 324079 - protein, 356 aa, unidentified
MLKKLNSEIAVIGIDIGKNSFHIVGQDRRGAIVLRQKWSRGQVESRLANLLPCLIGMEACVGAHHLSRKLTALGHDARLMPAKYVRPYSKGQKNDYRDAEAIAEAVQRPTMKFVATKTAEQLDLQAMHRVRERLVGQRTGVINQIRAFLLERGIAVRQGLRFLRAELPGILATRTDVLSPRISRIVEDLVGDWRRLDERIKGLSGEIETLARQDQGCARLMSVPGIGPIISSAMVAAIGSGDAFSKGRDFGAWLGLVPKQMSTGDRTILGSISKRGNRYLRALFVQAAWVVLVKLGPKQWDRYGLKSWIEAAKKRLHHNVLAIALANKLARIAWAVLHNGRAFECVRVNETASQSA

SEQ ID NO: 324080 - protein, 345 aa, unidentified
MTTMNYIGLDVHKKTISYCVKDASGRIQQEGKVGSTRRELDYWMKTLPQPWTVAMEATIFSGWIYDHLLPHAAQIKVAHPLMLRAIAAAKKKNDKIDASKLADCLRCDFLPECHMMPRAIRDRRRTLRYRHLLVRQMVQMKNRVSGLLMETGVEYNKQRLHKVSYFRELLSANGEVPPSIRPLLKLSRETIERCQKTEYALVSSLQRDLVLTDRIKRLRTVPGVGPITALTWALEIGDVSRFGSIKKAISYCGLCGDERSSADKAMRMPLSKQRNKHIQRALVEAAKLAPRQNHEMAVIYDQERQKGNSNRATLAVARKMVAYLLAVDRQQRDFVPAEERRTTAA

SEQ ID NO: 324081 - protein, 356 aa, unidentified
MTFKAWILNIKEKHGKDKVVPGMEPTGHYWFNLGKFLQDNEMKPVLVNPHHVKKSKELDDNNPTKNDRKDPKVIAGLVREGRYMIPYLPDGVYADLRTASNMRFQLQAELTRIQNRISRWFNIYFPEYKTVYGQPDAKSGMMILKIAPLPEDILTLGIDGVNQIWRDAKLRAVGKARAKTLIEAAEHSVGSKEGAVSARMEIRMLLEDYESRNTRLQEVMVLIEELVRKIPMAEKLLEIKGVGIRTVSGFLAEVGDISRFNNPKELQKLAGLALVENSSGKHKGETTISRRGRKRLRLSALRGCNVTCSEESGVQRTSCVLHDQKTKPFKEDAVTHGCCNKTDPSLLCNADERCGL

SEQ ID NO: 324082 - protein, 486 aa, unidentified
MAERGLIEDYFSVRDVGLASDNQYIDVSQVNHNAMAKVAKKSKVCKRTELKIVNPNAAGIDISTREMQVCVPGDRSEEPNRVFGTFTKDLHAIASWLKDCQINTVAMESTGIYWLPLFGVLKDAGFEVLLVDPCQAKNYSGRKTDESDAEWLMLLHSYGLLRSCHQPENMVRKLRNLTRHRDNLIKSASREVLHMQKEMEQMNLKLNNVFSDILGKSGQAIIESILAGERDAEKLASLADKSCKASHEDIVASLQATWDDDHLFIMKQSHELYIYYREMTKKCENEIEILMQKFTAEVDDKKLKELRSHKQKAYRGDVSFDIERYAIGMWGVNVMRIPGINRNAVLRLASELGGDFVAKFETVDRFLSWANLVPNNKISGGKILSSKVPKRKNPVGIIFRQCANALWKASNTMGDYFRHSKARSGHLQAMVATGKKLATIFFTIIQRQQEYDEEVCTKNRKAQLERKIEYTKRKLARLELQVDTCI

SEQ ID NO: 324083 - protein, 349 aa, unidentified
MKFYTKQHRFYCGVDLHADAMYVCILDATGEVVVHKNIPTRPKTFLRLIKPYRDGLVVGCECMFTWYWLADLCIDESIDFVLGHALYMKAIHGGKAKNDRIDSHKIAVLLRGGSFPLAYTYPKKMRATRDLLRRRNHLARKRGELFAHIQNTATQYNLPNPLGRIAKPSERGDLPGKFPDPIVRRMVEVDLSMIEHYEQLLDKLERELEKIATGHDPVSLALLKSIPGVGKILGMVMLYEIEDIARFPREQDFSSYCRLVKPAKQSNGKNYGHSGKKIGNAHLRWAFGEAVVLMLKGNKPLQALLQRMASKHGKGKALAILSHRLGRTVYYMLKNQVPFDQERFLRKAA

SEQ ID NO: 324084 - protein, 368 aa, unidentified
MDEPTTYVGIDAHQRELRLAMLIGANEQPIQWTCPNEPRALERLCRKLKRETHGAVECCYEAGPTGYALQRVLTREAIPCRVIAPSMVPRKPGDRVKTDRRDAVKLAHYLRAGLLTEVYPPTVADEAVRDLCRARDHARSDLMRCRHRLGKLLMRRGLLFHGRNWTAAHREWLRRLEWPEPADRYVVSDYQVAIEQIHARLREIDRFLEDLAQTPRYARSVGALRCFRGIETVSAMTIVSELHAFDRFPHPRALMSYVGLVPSESSSGDRRRPGAITKTGNVLLRRVLVEIAWHYRHTPWLSPAVRRRRAGQPAAVVAIATQAEQRLCRRYRRLSSRGKPKPMIAIAVARELVGFLWAAQQVNAVTTS

SEQ ID NO: 324085 - protein, 417 aa, unidentified
MAESNDTPEPISAFVGIDWADAKHDIYLHPADGSTASHEVIDAKPEALHDWILKMREHFSAAGKIYVCLEQSKGALIHQLMQYDFFVLYPINPKTLARFREAFRPSGAKDDRSDADLLCELVRLHTHRLRPWKPDDEQTRKLNAFCQNRRQAVGSAVRLLQQVREQLKLYYPLALELELNTVLACDFLQRWPTLEELRQAKPQTIRKFFYAHNYRRGDKIEQFVQKLQKQTPVTSDRAIIEPAAMQVRLLAAQLRVILNSIPEFDQTIAEIFHSHPDAAIFESFPGAGPQLAPRLLTAFGTDRDRLESAEQMSVISGVAPIKIASGKSFATHKRWACPKFIRQSFHEFAGCSIKFCAWAKAFYQAQRDKNKGHHTAVRALAFKWMRILFACWKNRKPYDDALYTGALKKRGSAFASP

SEQ ID NO: 324086 - protein, 405 aa, unidentified
MSNDVFVGLDWAVHTHAVCLIDATGSVLERFEVSHDRDGLAELMRRLARHGQQLRIAIERPSGLIVDALVDAGHQLFPIHPNAVKASRPRYRSHGAKSDASDAYLLADLLRTDGHRWRALAPQSDHIRALRALVRSRDDLVAARVAAANQLTSTLQAFWPGAAVIFADVASPIALAFLRRYPSPSSAKRLSEAQLQRFCKAQHYSGRRSAAELLGRLRSAAAGHAGKLTEQALAEVVHAQLEVLAPIVTQIAGLTRRIEQFMKGLPDGLLMMSFPRAGEVCAAQILAELGDVRERFPSADQLAAEAGTVPVTYQSGKTRSVAFRWACNHRLRQAITCLADNSRHANAWANSVYQAARARGCDHTHAIRILARAWLRVIWRAWTDRKPYDPCLHRNAVALASATGG

SEQ ID NO: 324087 - protein, 330 aa, unidentified
MERNYIGVDLHKAFFQACAIDGTGGRLWEGRFPRTADGIAAFASRGIRGARVAVEAMGPTWAFVDALQALEVDVCVVDPRRTKLKAGFAAKTDTLDARRLADAVRRDSVAAIYIPSPAIRDLRERCRGRHHLVRVRAKLVQVIRALLLRQDAADPPVTCLYSPRGQQWLRTVGLPGAAGESLQRLAAALAAIDALARAAQAQVVAHATADPIADALTRLVGIGPVLALTLRAEIGILTRFATWPQLASYAGLVPRVEASAGRAWHGRITREGSPWLRWALVEAAIHAMRRQDATGRWARQLAVRKSVGRARVALARVLCRDVWRTWQTIG

SEQ ID NO: 324088 - protein, 402 aa, unidentified
MAYDFVIGVDVGKYFHHACVLDPQGSQVLSKRINQHEGSLRKLFGQFLADNASVLVIVDQPNNIGRLTVAVAQTMGAEVRYLPGLAMRQLSRIHVGNSKTDVRDAYVIAHAGLNLPDALRSVDRVEEVFIQLKVLNGIDEDLARAYTRLINQMRSALVGTHPAFEHVLRGQMIHRKWILHLLAKYGGPTKIRRVGKARLAAFARSHRARNPEPVIDAMLAAIHAQTVTIAGAEYAELGVAMSAKDALAKLEHRKEIEAQVLELIQDIPQTEILLSMPGIGPRSAAQILMTVGDMSDFPDAAHLASYAGLSPRTNQSGTSIMSNSPNRAGNKKLKNALWQSSFASIRFHERSRQFYERKRKEGKRHNAAVVALARRRLNVLFAMMRSGECYRDISTVQETAAA

SEQ ID NO: 324089 - protein, 331 aa, unidentified
MCRRFKVVFKILRRNCCGLDVHKTWIYACIGITDANGRIEYKQARFSSFSNGLRDLADWLAKYSCSDVCMESTGKYWVPVFNILEKRGIRVVIANPKWVKAVKGNKDDTKDSKWIGDLFRIGLVKSSFIPELKIRILREFLRYRYKLVSMKSSEKNRFQNAFTVCNVALDSVVSDMFGKSATAITDYLTSDESFDPEHCVSLLQRSLKKKAEKVLESIEGYSISDEQKARIKIIREHYDFIEKLIAKVDTCVNEMVEKYEGEINLLCTIPGIDRNSAITIISEIGTDMSQFGSSKRLCCWAGLTPGNNESAGKKKSVRISRAGVYLKPALV

SEQ ID NO: 324090 - protein, 348 aa, unidentified
MPKTWLFKSLKTTKMEFRNFIGIDISKNTFDFALVKDNNVSLPISDEVSNDPSGIVKLEEFLKKQDLNMEETLFCMEHTGIYCRLLSHYLSERKYHVWLEMPVQILRSLGIQRGKNDCLDAKRIAEYAYLKKDKAVLWQPPREVVIQINDLLTLRDRLIESRKSLKQPIKEFKDAGFKDTAKLIESRCIHTLKAIDKEIQQIEKDLDDLINKDSNLKKLYKLATSVPGIGKITALTMLYFTNEFKLYSNAKQLACYCGVVPFEHTSGTSIKGKSRVSHFANKRLKKLLHLVAMSTLSSNRELSQYYARKVGEGKNKMLVINAIRNKILQRLCAVIKRGTPYQLEYHFA

SEQ ID NO: 324091 - protein, 385 aa, unidentified
MGTQTFIPRDYDVFAGLDVDKKSISVTFSDHQGLLKSMRMPYNVEYLVNHVRKHYGDKKVAFGYEDGPTGYGLYDGLEAHAYKCLIASPSMIPKAPGQRVKTNRLDSVGISENLRGGQLKGIHVPTPLYRELRHLTQLRDAMVSEMVGMKQRIKSLLLLEGLEFPPAPAGSQWSFLVKAKLRKLACSSVVRFKLDQLLDSLEFDEKQVLKASREIRRFCQNDPELSQCINYLTTLPGIGWIVASQLMARIGDWRQIKNIRQLPAFLGLVPTESSTGERTERGSITHTGDGRLRSKLIQASWSAIRQDDELREFFRAVAKRHPRHCASRVAIVAVAHKLCVRAAVVLMEQRPYEMRQKVQSAPLTQEETVPQGTTRREPVPGETNS

SEQ ID NO: 324092 - protein, 421 aa, unidentified
MQPQVPEAFAAFVGLDWADAKHDICLQVAGSTRREFLRLEHRPEVIDAWGCTLRTRFNGQPIAVCLELNKGPIVSALQNYDFLVLFPVNPLTVAKYREAFTPSRAKDDPTDAELQVELLLKHRDKLTPLVPQSPTIRALAQLVEHRRRLVGDKVRLTNRLTSALKNYFPHVLQWFQDKDTAIFCDFLSRWPTLKAAQLARRATLESFFRAHHVRSPDVITTRIEAIKNAVALTTDAGVIVPHTLLVQALVAQLRVTLQAIADFDTAIAQRAQAHPDFPLFDALPGAGAVFAPRLLVAFGEQRERFTSAEDLQKYAGIAPVTERSGKKSWVHWRLQCPTFLRQTFVEWAAESTRHSFWAQVYYQQQREKGKAHQAAVRALAFKWIRILYRCWQDRTLYEESVYLQALKRRSAPLLHNLAKGA

SEQ ID NO: 324093 - protein, 344 aa, unidentified
MAYHTALDVSLRSVSICIVDDDGAIQFEGKAASDVADIVGCLKRFDPAIESVGFEAGALTQYLTYGLQAAGYEVICLEARQVSAALSAMRNKTDKNDARGIAQILRTGWYSRVHVKSMESHLIRALLSSRKTVLKKCVDLENEIRGLVRLLGIRLPSPLGHGAFDAAVRQSIEVHVTLAHALIPLLDARLMLYRTFLQLDNQAKALVREDPVCQRLMTVPGVGAITALTFKAGVDDPKRFKRSRTVAAHFGLTPRRFQSGEIDNPGRISKAGDPDVRCALYVAAHSLVVRSAEWSSLKVWGMRLAKTKGHRRAVVAVARKLAVILHKMWLDGSDFRHGSTQATP

SEQ ID NO: 324094 - protein, 341 aa, unidentified
MEKKLNVLGIDIAKQVFHLVGRNEQGTILLRKRLYRAQVMAFIAQLPPTLIGMEACGGAHYWARRFREHGHAVRLMAPQFVTPYRKANKNAMRDAEAIAEAMTRPTMRFVPVKSVAQQDLQALHRVRERLMKARTALINETRGLLHDYGIIVPQGAATFRKHVLEKLTTEAAKLTPHSLELFRQLLEELAALESRVAPYDAQLAQVAQMHPVCQRLMTIPGLGELTATALVAAVNDATQFQNGRQFAAWLGLVPRQHSTGGKARLLGISKHGDSYLRKLLVHGARSCLRWVGRKRDRRSQWGQSLMERRGWNKAAVALANKHARVAWALMGTEQVYRVAEA

SEQ ID NO: 324095 - protein, 352 aa, unidentified
MIVLGADTHKRSHTIAAVGATSGELLGEQTVPVGRRGFGALLVWARSLDGERVWALEDCRHVSGSLERFLIERGERVLRIPTHLTAKARRSARQRGKSDAIDALNVARAALQEGLDTFPAAHLHGPELDLRLLVDHRERLVRHRVELNCTLLWHLHDLWPELRLPGGALFSKKWATRIGRRLARAEQTMRVRIARDELRRLRELTRAINQLEREITGLVAQIAPQLLSEPGFGPLTAAKLVGEIAGAQRFATSAKLARAAGVAPIPASSGNTQRQRLDQGGNRQINAALHRVIVTRARCHQQTRDYLERRRREGKSTREAIRCLKTYLARRVWRLLQPPHPAEQNPLSPSIS

SEQ ID NO: 324096 - protein, 337 aa, unidentified
MKVTLIGIDLAKSIFQVCGVNQVGKRIFNRQVRRARLMELLIQHPDATIAMEACSGSNYWGRALQQRGFQVMLIPPQHVKPFVKGNKNDRNDAFAITEAARRPDLKCVEPRTLAQTDLIQVHRVLDRMVRQRTALINQIRGFLNEYGIVIAQGKERLLAAMPDLLEDAENGLTPSSRALYQELYEQWRQANEGIDRIEKGLKNQANTNEAAQRLMKVKGVAVKISTATIAHAGNGHGYKSGRHFSANLGLVPKEHSSGGKQKLGGITKRGNHYLRRLLIQGAWSVVRNADKNDDRMSRWAVQLVERRGKHKAVVAVANKMARIMWSMLYHQTEYQAN

SEQ ID NO: 324097 - protein, 405 aa, unidentified
MIFVGDDWSEEHHDVCVLDEAGKQLARRRLAEGVAGVGELHELAGGFAESPSDVVVGIETDRGLWVAALVGAGYQVYAINPKSVARYRERYKLSGAKSDPADAKVLADLVRTDRHNYRTVAGDSPAAQGIKVMARAHQRLVWLRRRQLNALRATLRESYPAALVAFGEELEGADALAVLAKAPTPEGGRALSLSAIQAALRRGGRQRNLERRAEQIRQALRSQQLALPEGAGTAYGAVVLSAVAVAGEMNRQLARLEAELASHLDAHPDAEIIRSQPGLGTVLGARVLGEFGDDPDRYVDAKARKNYAGTSPITDSSGKHRFVKARWVGNDHLKDACYLWAFAALSGSPGARRYYDALRERGKGHDAALRALANRLVGILDGCLRHRCTYDERIAWAQRQAKRAA

SEQ ID NO: 324098 - protein, 493 aa, unidentified
MKQEYRRCCGIDVHKKSVSVCVLPPEGQQGVVKREKFRTFLRDLKRLRAWLKSCKVTEVAMESTGQYWRPLWNILEGAIPRLVLLNPAHVKGLAGRKTDKRDAEWLARLQEREQLRGSFIPPLEIRELRELTRTRVHWLEDSNRIKNRIAQVCEAGNIKISSVASDLFGRSGRRMLAALVEGKRDAGWMADYARGKLRSRRDQLQMALEGTLSQHQRDLLDRLLGQLNRLETEIAQLTRDIEERVAQYGEAIARLIGIPGIDRISAWTILAEIGTDMSVFPDARRLASWAALCPGNRESGGKQMSGKTRKGNVYLRRILCQAAWAATNQHGSYLGTLYRRIRGRRGHQKAIMAVAHQLLTIIFHMLRDGRPYQELGSGYYDQQRKPEITRRLVERLEKLGYQVTLEVPLTLDEAPQQAPAPSEIGTAPLLKRKRGRPCKCADRGIACLHKQRSSAEDSGDGEAPGNSEINPEAPTQAASQEIELLRFDPGCFS

SEQ ID NO: 324099 - protein, 451 aa, unidentified
MASSRKKGTKKTAPLVPLNRRAAGVDIGSTFHVVAVAPDLDAEPVRSFRSFTADLNALADWLVRLGVETVAMESTGIYWVPLFEILEARGLEVVLVNARDAKNVPGRKTDINDAQWIQQLHSYGLLRASFRPGAAIVALRSYLRHRETLLEYAASHVQHMQKALMQMNLQLHHVVADITGVTGMKILRAIVAGETDPQVLAIHRDVRCKASVETIRDALTGHYRPEHVFALRQALELHDVYQTKLSDCDVEIERTLRALPRGTSASTPSPPRQRGKNEPRFEIRSVLTALLGVDLAEIHGLGPYSVLRIFAECGSDMTRWPTAKHFTSWLTLAPGNKISGGKVLSSKTRRSANRATVLLRLAAVSVSRTATALGAFFRRLAARVGKAKAVTATARKIATVLYNTIRHGRAYVDPGASYYEERYRERTDTNLRRRAGAMGFALVECTVDGAS

SEQ ID NO: 324100 - protein, 345 aa, unidentified
MQVTTIGLDLAKNVFQVHGIDDAGTVIVRRSLRRRQVMPFFSNLAPCLVGMEACGTSHFWARELRTMGHEVKLMPPIYVKPYVKRGKTDAADAAAICEAVGRPTMRFVPIKSAEQQSVLALHRTRDLLIGQRTQLVNMIRAQLAEFGIVLAKGIEHALRLVDQLVEGVVPDIPSLACTVLIALAEQVGALQIRIARLEDEIKARFQDDEAARRLATIPGVGTITASALAASVTDPKRFASARQFAASLGLTPRADCSGGRERMGRISKMGDRYLRRLLINGMTSQLQAARRKPEVYPWVAGLLANGKPNKLVAVAMANKAARIAWVVMARGEIYRPNRPAAEGTA

SEQ ID NO: 324101 - protein, 377 aa, unidentified
MVDHSEAFVGIDTSKLRNAVAIAEAGRGGEVRFLGEIENTPAATARLVRKLGAKYKRLTFCYEAGPTGYGLQRQIKGLGFECMVAAPSLIPKRRGDKVKTNRRDSVGLAKLLRADELTAVWVPDGPHEAMRDLTRARETAMLDLRTKRQHVSAFLLRLGRPYPQSKKTWTKAHVSWIAGQKLEHPQQRLVLEEMMLAMRQAQERLVRLEQAIAAAVPDWSLAPLVTALMAMRGLDLISAATLLAEIGDLSRFQTPTQLMAYLGLVPSEDSTGDTIKRGPITKAGNRRARRMLVECSWSYQHPPRVGQAKQPKVDAAPPAVREIAWKAQCRLYRRYRTLVRRGKLKTVAIVAIAREFAGFIWAVARAVTTPRAGATSA

SEQ ID NO: 324102 - protein, 392 aa, unidentified
MEKHSTEFIGLDVHKESTAIGRASAGRAAGRFVGTVGPTLAELLKSLKSLGRPEELSIVYEAGPCGYGLVRELRSRGYACEVIAPSKIPRRSGDRVKTDRRDAVRLAELARAGELVSVVVPDEQDEAIRDLSRARVDAVRARLAARHQLKALLLRHGHRYGRSSWTQAHERYLAKITFAHAAQDATFAEYRQAVSEANERVQRLVEILRDQCTTWRMQPVLEALMTLRGIDFVAAATLVAELGDFKRFAHPRELMSFLGLVPSEYTSGDARHLGKITKAGNGHVRRILIEAAWNYRFAARMSVVLQKRQEGQPKVVRDIAWRAQLRLAQRYRRLSARHLHHNKVCVAIARELAGFIWDIGRHVSIRDIPMKAPKTGGGNPKGCRAIAAPATL

SEQ ID NO: 324103 - protein, 464 aa, unidentified
MRVKKANPQRRRRSPTLLERINPNAAGIDCGSAEHYVAVPQDRDPSPVRSFKTFTADLHQLAEWLVGCGIKTVAMEATGVYWIPVFEILEARGFEVLLVNARHVKNVPGRKSDVSDAEWLQELHSVGLLRGSFRPAADIAALRCYLRHRETLIQSAGTCVQRMQKALVQMNLQLHLVISDISGVTGLRILRDIVAGVTDPALLVRHRDFRCSASEDEIQAALTGHYRPEHLFGLKQNLELHDVYQVQLAACDRAIEEQLTAMARRCESPEKPLAPPRTRRSPRDNEPRFEVRALLHQLSGADLSQIDGIRPYSALRILAEIGTDMSRWPTERHFTSWLTLAPKNRISGGRLLSSRTQPSANRAALVLRLAAQSLGRTQTALGAFFRRLAFRIGKAKAITATARKLAILVYRTLKGEIAYVDQGAAAYDQQRRDTTVRRLRHRAQALGFELVNRESGELLEGGVS

SEQ ID NO: 324104 - protein, 391 aa, unidentified
MTYFIGIDIAKYKHDCFVMDHNSEVIFNSFTFSNDKSGFNEFYSKIQKLDPNHEKRIGFEATGHYGMNLKVFLEDNDLSYMEINPILIKEFSKATTLRRTKTDKKDASLIALYLSEKKYITYPNQSYHISSLKSLTRARDSLVRERSLMLVKMTNVLDKVFPEFKPFFNDSLKSSTALYLLKNYKCPSKMAKMNSESYKKMSTELRRTISYAKFTKLKELAKNTIGKEDDLLVYELNIFLDLYNQLDSKIKELEVKIEDEYNLVNSHIHTIQGIGINTAACIFSEYGGITPFHTPNQMLAYAGLEPSRKESGTQNNGGHMVKHGSSYLRYVLLNAAQMLIVHNTTFYEYYHKKRTEGKHHRVALSHVAKKLVRIIFYLEKNNTDFDSDKLR

SEQ ID NO: 324105 - protein, 386 aa, unidentified
MPASTVDTPTAGHCGTIFIAIELSQKSWLVTLHSPDKDKISHHKLEGGDHAELLALIGRVRDRAARALGAVPAMVSCYEAGYDGFWLHRLLQAAGIANYVFDPASIAVDQRARRVKTDRIDGERMLRTLMAYLRGEPRVVRIVRVPSAEQEDARRASRERDRLVKEQTAHTTRIKALLRLLGMAVGNPRRRNWLSWLAAQRDWQGQAVPPRTMTELTHEHARLLLVRERLNALAKTPAQADPTPAVAQMTERSELLLRLKCLGPAFATTLTNEVFYKDFRNRREVGSYFGLTPSPWRSGGIDRDQGISKAGNPRARCAAIELAWLWLRHQPDSKLTLEYRKRTLDAGKRIKRVAIVALARKLVVALWRYLTTGLVPEGAVLKAVKV

SEQ ID NO: 324106 - protein, 347 aa, unidentified
MRFYTGQHRYYCGIDLHARTMYLCILDHETGKTLLHRNLRSEPERFLQAIEPYRDGLVVGVECIFCWYWLADLCADEDIPFILGHALYMKAIHGGKAKNDKIDAHKIATLLKGGAFPFAYVYPRGMRATRDLLRRRLLFVRRRSELFTHIRIVFHQFNLPAPAAAFHHPRNRLGVAEAIPDPIVRANVEADLAMAEQLDEIIRSLVGTIRDRAEVDAPDTLELLQTIPGVGPILSLTLLYEIHTIERFPRVGNFLSYARLVKSQKSSAGKVMGTSGSKIGNAHLKWAYSEAAVLFLQKNPPGQRLINRLRSKHGRGKALSILAARIGRASYFMLRRSTPFDMDRFLN

SEQ ID NO: 324107 - protein, 393 aa, unidentified
MICVGIDVAKDKHDCVILNSEGKILAGVFTIPNNADGFDTLLQKIRSCTSSDDKIKVGLEATGHYSYNILGFLINQGLPTYVINPLHTNLYRKSMSLRKTKTDRVDAKTIATMLMSNVDLKSYTDTAYHNEELKSLTRYRFDKVRERAQLKQSVSRLVTILFPELEKLVPTLHMSSIYALLIEFPGAKQITEAHLTHLKSLLKDASKGRYGRDMATEIRDAAKHSIGSIMPAKSLELRHTIRLIRELDSEIEDIEAAIEAIMEELQSPITTIPGMGFRMGAMILAEIGDFARFDSPDKILAYAGMSPSTYQSGQLSLAGTYSHMEKRGSRYLRYALYNATKYVCHWDPGFAAYLAKKRAEGKHYNVALSHAAKKLVRLIYAMEKSRQPYKRAA

SEQ ID NO: 324108 - protein, 389 aa, unidentified
MQTSAIRPQVPVAIRTDLGAFFISLELSRSKWLITSLSPGNGAKMSKHQLAGGDLPGLLSYFEFLIEKTRQRTGQSYPIITIQEAGLDGFWIHRGLEQVGIESHVVDAASIATSRRSRRAKTDRIDGEALVRTLLAFKRGDPRVCAMVRVPTPAEEDSRRLCRERKALVAERTEHINRIKGLLFAQGVSGYDPIRRDRRKRLEDLRTGDGRILPDHLKAQVSRELDRLELLLEQIKDVEALRDKVLTDDQVHHAIANPGINLLLDLKGIGPEFAHVLWTEGLYRRFDNRRQVSAYAGLAPTPWQSGQVDHDQGIAKSGNPRLRTTMIQLAWLWLRHQPNSALTLWFQTRVKAQGGGIRKTTIVALARKLLVALWKYVTSGVVIEGAITA

SEQ ID NO: 324109 - protein, 476 aa, unidentified
MGSSEKIRNQPAPVFDCPFESAKLGEAQSLSPHLCVIQPSQKRNVPDLIWRVSQNDQEYTSMKEKGKRYIGLDVHKHYLVALGVDGNLEVVMPARRVELSNLASWLKKHLTRQDEVVLEMTTNTWQLYDELSEYAGAVTVVHPPHVALITRSQVMNDKIAASILARLLAKGLLVGIWVPPQEIRELRGLVAQRQKMTRLATQAKNRLHAVIQRHHLKPPAGNPFAKTNNGWWQALTLGKLEKMNLQSDLETLQFAEQQEARLQAEMTGIAAEDEEIGRLLHIAGFGVISAVTVYAAIGDIRRFAEAKKLVGYAGLGARVHDSGLTTRTGKITKAGRRDLRVALVEAAHVAANSHPHWQAELARLQPRLGYNKAIVAIARKLLITVWHVLARKVADRFAEPEKVSKKMLHLAYEVGKEKRAGKTAAQFARERMDALGIGQELTSIPWGAKKPIPLPPSKLKGERCPEPVEGSAVPNQ

SEQ ID NO: 324110 - protein, 337 aa, unidentified
MFNHYVALDWAMSNMAIARMTKKSNEVKVIDVPSDIKELKLYLKALNGTIFLTFEETTTAQWLYTELKESVECILVCDPYRNRLLSEGPKTDRIDAEKLVRLLKADLLKEVFHCKNDKFIELRKVVSAYEDMIIAGVKLKNQRSAIFRATNLNHKKEETTNNKMDNFILEGIDRQIEYYELERERYKKEFNSLKKKHSEIKRVSEIPGIGDVGAVKIVSRVVEAKRFKTKNHFLSYCGLVKLEKISGGKSYGKKNSRYSRMMKNVFKTAAVVVIDGNNPFNEYYQHLIKEKKYTDFDARNAVARKVASTVYGVMKNNTKYIPYKRMENNVADKNADL

SEQ ID NO: 324111 - protein, 422 aa, unidentified
MKESVRIVGFDCGEDEHSAVLLNASGEFDKRVSIVNERGQIQEALAELLLEVGPDSRLVVVVESKRSHGRIVADVATELGCELWQVNTVALNHFRDLEGQPRKDDEWDAYLGARMVHLRMGGCRAAIETTEEERALSRLTRIHGRVTEDRKRYVARLRAVLLELAPEMLHGKWKGPRPDSKAMLYLLERWPGFNGLERAQLRSIEKILRQCRYKSEDRIPVAKLIRKAARGISIEAEERSTLTMELDLLVRQIRLCDESIAQVYVEITRRVERHPVGRKLFEMHGNGPVITGVLVSELYPVARTAPEPKSATYAGVTPLSRKSGKSLDKDRLAQGVNKRVLHALYTSSVVAIKHSAVDRAYYQKKLRDYTGHPKPHVAAFIALSRQRHKLIYKLMTTDARYDKEILVASHLERIERDRIAAA

SEQ ID NO: 324112 - protein, 412 aa, unidentified
MEVIHARCCGLDVHKNSVVACVLITELDGHVERHVRTFKTMTADLLALGDWLNGLGVTQVALESTGVYWRPVDFNVLEDDARTLLLVNPQHMRAVPGKKTDVRDSEWIADLLRHGLLRPSFIPPAPIRAIRELTRYRKTLVQQRSDEANRLQKTLEGANVKLASVASDVLGVSGRAMLAALVDGERDPDVLADLARGLLRAKLPQLRQALLGRVQPHHVALIRRILAHITFLEEFIASVQMEIDECMPSFDEPLQLLLTIPGIGPVAAAAILGEIGTDMSRFPSAGHLASWAGLCPSNKESAGKRMKGPMNRGNVWLRAIMGEVAWASVKRRATYFGAQFHRLARRRGRNKAIVAVAHSLLVVIYHVLRTRQPYSELGIDYFNQLDAARIQRHHVRRLEQLGYTVTLTPLVA

SEQ ID NO: 324113 - protein, 345 aa, unidentified
MEEITTIGLDIAKNVFQVHGVDAAGRIVARRSLRRVEVIRFFSGLRPCLVGMEACGTSHHWAREIEALGHRVRLLPAAHVKPYVKRGRKNDAADAAAICEAVGRPHMQFVPVKSVAQQSVVVLHRTRDLLVRQRTMLINAMRSQLGEFGLVVGQGKGNFAKLVARLDGEGDEALPELVLPALRLMARQIADANEKIEALEKTIVAQHRSNEASLRLASIPGIGPLTASAITAAVSDASAFKSGRQFAAWLGLVPRQNSTGGKDRLGGITKAGDRYIRRLLVIGATGLIRYRRRNVPGGLEWLNGLLTRKPARLVTVALANKMARIAWAVLSRGEIYRQAERPAAA

SEQ ID NO: 324114 - protein, 350 aa, unidentified
MVVVGADVHKRTHTFVAVDETGRKIGEKTVRAITAGHAEAVMWARELFGTQVVWAIEDCRHLSARLERDLLGLGQQVVRVPPKLMAQTRASARTRGKSDPIDALAVARGFLREPDLPVASHDELSRELKLLVDRREVLVAQRTATINRLLWRVHELDPQRAPKARSLDLAKHRRILSDWLDTVDGLVAELARDELADIIRLTEAINALAKRIGQRVKQIAPVLLAMPGCGELTAAKLVGETAGITRFKSEAAFARHAGVAPVPVWSGNTAGRVRMTRSGNRQLNAALHRIAVTQIRLDGLGRTYYRHRLTTGDSTPEALRCLKRRLARVVYGHLHTDHQNRQNTCQLAAA

SEQ ID NO: 324115 - protein, 334 aa, unidentified
MDTHADTHVAAALDPIGGLLGVQEFPATAAGYGRLLEWLAGFGAVCLVGIEGTGSYGAGLARHVTAAGIRVVEVDRSDRQDRRRQGKSDPLDAVSAARAAQSGRAAGAPKGRDGSVEAIRALMVARRSARADRTQAINQARSLIVTGPDDLRVRFAAHTPAALAAELAALRPRPGDVVGYATRIALRELGRRAQFLRDQIEQLDELIVPLVTARAPRLLSLYGVGPHTAALLLIAAGDHPGRLRSEAAWAHLCATAPIPASSGKTVRHRLNPGGDRQANHALWRIVFTRMGSHPATRAYVERRAAEGLSKKEIIRCLKRYVAREVYPHLRPPAG

SEQ ID NO: 324116 - protein, 411 aa, unidentified
MRLFAGDDWAEDHHDVEVMDEAGKVLARRRLPEGAAGMTQMHALIGRFLPEDADDAEVVIGIETDRGPWVAALVAAGYTVYPVNPLQASRYRERHGVSGAKSDGGDAHMLADMVRTDSHQLRPAAGDSPEAEGIKVVARMHKTMIWERTRAVQRLRHQLREYFPAAIAAFEDLDAPDVLELLGKAPDPDRAAKLTRAQVSAALKRARRRGIKDKTDAILAALRSAQLGQPAALTAAYAVTVRSLIALITTVNEQVKTLEEQVREHFGRHPDAEIYQSQPGLAAILGARVLGEFGDDPGRYESGKARKNYGGTSPITRASGKKKVVAARFIHNDRLIDALMTWAFASLNASPGARAFYDQQRAKGLEHNDALRRLANRLVGILHGCLKTGTRYDEATAWGHRENLPQSSVAA

SEQ ID NO: 324117 - protein, 408 aa, unidentified
MQVTFGIDVSKSTSTVCELIGESKNELTITNNRPGFIQLLHELTAFSKHPQIIFEATGVYSRRLQAFLEDYGYEYVVLNPLKAKKEMNMGLRYNKTDKTDAYHLALIQRLYRHPVNQSESQTYKQLNALSRFYDQLTSDLVIAKNRLHQALQSTFPEIENLFSIARGKNYWQIVARYPHCDLVRKDDKKQIINWLMKLKGIAFNHAQKTTDKLIELAHLAYPVVSCSDIEVQQAQYYARRLLNLSNQRQRIITKMVKLAKTLPNHDLENLESIPGFAQTTAVRVLAELGDLRRFSNPNKINAFIGIDPGRYQSGEMDSNLSITKHGNAVARKLLYRAIGQIDNAAKTNPCHIADYYESKKLSSQTKGFKKIAIASIHKLIRTIYALIINDQPYDYNVATHNQKDFSRN

SEQ ID NO: 324118 - protein, 440 aa, unidentified
MPQPILAIGVDPAKRLHRAVAVLFPDEIVLDVELPNAFDAIANLDHRLCELANQHGAGLVYGLEDHRRYGRLFCQVLTERGRDVRVVNPLWTNRQRAFYGQDKDDAIDGRSIAAVVLRRHHQLPLASDFGEIAQAIREAERSLQDLSKARTQLGNRLHLQLSDTYTAAYEEYFAKLRSPLALRFFRRFPLPQDLVGHNVEMLANLLLELAGGKVGPHKGDNRLIAMRSKAQAILGTSAAMRASPRTLALELKAELIRQLCDELLANHGRILRLERMLREQLLPATKQTITTITGISTILAATIIGETGSITRFRSPAAFAVYNGTAPARNSTGGRDRHKARRDCNHRLKRAFYLAARAAVLHDSIAKAYHQSCKSRGLSYVEALKRVARRMSDLVYALLKSGKAYDRSIIEHAIERRREQAAHAARSHAKQPCPLPTQEI

SEQ ID NO: 324119 - protein, 407 aa, unidentified
MRPIYGRCCGLDVHKKTVVACRLTPEGSQTRAFGTMTTDLIQLREWLLAGGVTHVAMESTGVYWKPVFNLLENHGMELWVVNARHVKAVPGRKTDVKDAEWLAELLQHGLLKASFIPDRESRERRELVRYRRSLVEQRAHLVQRIQKLLEGANIKLGDVASDVMGVSGRAMLQALAQGVDDPAAIAGMAKTGLRNKIPELERALTGSVGHHQRFLLRSQFRLLESIEAEIARLDEEVAERMRPFQVALERLDEIPGIGRRAAEQILVETGTDMRRFPTSAHFASWARVCPGNNESAGKRQYASIGGGNRWLRNALLEAAWTVSHSRKQTFFTARYRRIASRRGKKRAAIATAHSLLIAVYHVLRDGVVFQDLGPAHFERRNVDAIVRRSLHRLEVLGYKVTLEAMPA

SEQ ID NO: 324120 - protein, 326 aa, unidentified
MEHELHYIGIDTAKEKLDVDVLRPDGRHRTKKFANTTKGHDELVSWLKGHKIDHAHICIEATGTYMEPVAECLYDAGYIVSVINPALGKAFAQSEGLRNKTDTVDARMLAEFCRQKRPAAWEAPHPLERALRALVVRHQALTDMHTQELNRTETAREVQRPSIDAHLLWLEAELKRLEKQIKDLTDDDPDMKHRRKLLESIPGIGEKTSAVLLAYIGLKDRFAHARQFAAFAGLTPRRYESGSSVRGASRMRKAGHVSLRRALYMPAMVATSKTEWGRAFRDRLAANGKKGKVILGAMMRKLAQVAYGVLKSGVPFDASRHNPVAA

SEQ ID NO: 324121 - protein, 418 aa, unidentified
MEQARNTREGEVRFIGLDVHKHYITVGGMNIKQEIVLRPRDVEMERFKIWAEQNLEKTDDVVLEATTNTWEVYDTIAPLVRRVVVAHPAEIKQIANSRVKTDNQDVIRLVRLLIADIVPEVWVPPVEVRELRALISYRWRLVKMSTAIQNRMHSLLHRHNIQAPEGKIDTGENREWWEKLKLSPLETLRLKQEIKTLRLVREHIVEVEAELGKLSTSQRWGDQAVYLMQIPGVGVIVAMTILSAIGDHERFASPKKLVGYAGLGAGVHDSGQMHREKGITKFGRKELRWALVEASWQAIRANSGWRAQYDALCKRKHPNQAIVAIARKLLVTIWYLLNGQEAYDRSSDEELAYKMLTWAWHIEKDALNGMTRQQFAKYGLMRLQRGENLTRILRGGSPRRIASTEEVLALKPELQKPQ

SEQ ID NO: 324122 - protein, 355 aa, unidentified
MTGNDQGQAEGQAIYIGVDVHRNSWHATIRTQARVLHSETMPPQWTALQQVLDRYGAARCSVAYEAGYFGYGLNDAVIAHGAQCLVTPPSLMPQESGNRVKTDKRDSDKMARLLARGDLKAVWVPPAPLRHDRSVLRHRSQLIGARTRIQLQIKSHLYFHNMPFGPHTGKWSTRFVQSLRALEWEAPYLAATFGVMLDHYEFLNAQVLAATKALRAMSNLPRYRERFLLLRSIPGVGLLTAMEVLLEIGDMSRFSNAEKLAAYAGLTPSQHSSGDKIRLGHITGVGKNNLRGTLTEAAWTLIKKDGVMAEKYNRIKARAGGKKAIVAVAHNLLLRIRRILLDGVPYSTGVLASNV

SEQ ID NO: 324123 - protein, 374 aa, unidentified
METIYIGVDFHARQQTICYLKTETGELVTCELKHQDKQKVQAFYAQFHGQVIVGLEASGYSPWFERLLEELGCEVWLGHATEIRRRARWRQKNDRRDAELILDLMLHDEFPRLHRPAVPSREVLRMLRYRQKLIKIRTMSKNSLQALALQSGLAKGSRLFTQAGQQELSAAAMSPVMHWQREHWLQLMEPLNQQLLETMVWFKAQSKDDVCIKRLRTHPGIGLLTSLCIVHSLQPVSRFRNTRKVAAYAGFDPVERSSAERKCFLGISKAGSRVLRFLLVEAAHTAIRKDEDLKRFYKRLAERRGRPKAKVAAARKLLIRAYIMLRDEIDYAEFRRRAVAARLARQGQGPNVPEVLIGQPASADHRDELTSESQ

SEQ ID NO: 324124 - protein, 407 aa, unidentified
MDPMQERRVFAGIDWGGHEHQLCIVDVDGRKQLELRVTHDVAGLNELLGQLARHGDRVPVAIERAEGLLVEHLQAHDHLVFPVSPRISARARERYRVAPVKDDRFDAFVLADTLRHEHGHWRPLTVPSPLLAELRALTRDRDRLLEAQQATEAQLRAILESYHPAPARLFSSLDRQIALAFIADYPTPAVASRVRTTRMAGFLRRNAYTGRVPAQVLAERMRANLLSGSAGTVAGKAHSAKTFAHLLGVMNEALAEFDDAIASVVAEHPDAKVFSSFPGVGPILTAVLLAEIGEDRSRYPSAQTLLAESGLAPVTRSSGRSRSVRFRYAANTRLREAATWWAFNSLKTSPWAAAAFRQARDERGHRYHRALRGLAARWMRVAWRCWQDRVAYDPALHTGAAIAERSA

SEQ ID NO: 324125 - protein, 344 aa, unidentified
MEHVAIDLGGRESQVCIRSADGRILLERRVLTGLLGKVLATRPPSRVVLETCAEAFHVADRARELSHEVRVVPAGLVRRLGVGARGMKTDVRDARALSEVSTRIDLPTVHIPSQVARERKSLCGMRDGLVSSRTQQINTVRGWMRGQMLRVRSGKTETFTSRVCEALSKRETPSYVQRQLRSIDQLTVHILEADKELQVLAKTDPTCPRLMSVPGVGPVTAIRFVAALDQISRFSSVSQVQSYLGLTPGENSSSDRVRRTSITKAGPAALRASLVQAAWAARRSRGTHPMLTWVVEVEKRRGKHVAIVALARKLSAILFAIWRDGTFYDPTHHKTEPTEHTMSA

SEQ ID NO: 324126 - protein, 578 aa, unidentified
MSTSTLSPPVIGVGIDTARYGHHVTFLREDCQPAAEPLAMVESRAGYDQLRQRLERLLRRTPQVRFCVRIDAAGQYAANLERFLRGLPLPMDVSVGEPARNKAYRQAHFPKRKADVTDSYCNARYAVKEGPAPTPEVPPAFAALREVASQLQGQVRQSTRLTNQLHNRLARAFPELAVVVSDIAAAWVLNLLAKYPTAEKVARAKLASLKAVRYIPAGKAEAVQQAARDSVASFAGPQAEALILALVAQRQASQKAEKALGKLLVQAFRALPPGGHRQLPTILGIGEVTAAVLVAAIVDIVRFPDDAHLVSYFGIIPEENTSGVDKHGRPIPPGTMCMSRKGNDLVRKYLWMAAWSAIQCNPAVKAVYARQRAQGKQGGVAMGHAMRKIVQQVFAVWTTNRPFDPDAYPHRKAEQQAAADRQARIEKKAAGRKGDKAPRRQAVTATTSSIEPEPPASKKAAPAKRAPAKTPTVDFAALRREVTVQQILSHWGHFQQLGGRGPQRRGPCPLHPSERGKSRCFSVNLEKNVCQCFHPPCAFKGNVLDLWAAYHKLPLREAALHLAETFHIQLPRTEKRNP

SEQ ID NO: 324127 - protein, 372 aa, unidentified
MNEVTLIGIDLGKHSFHLHAQDATGRMVFRKKLSRQQLLRTLANVPSCRVVMEACAGSHWLARQLAGMGHEPRLISPQFVRPFVAGNKNDFGDARAICEAACRPSMRFVSPRNETQQTVSALHRLRERLVRERTATVNQIHGFLLEFGISLPRGAALMSRLPTVLDHETLPPRLVALVVRLRAHVHYLEEQIRQVEQDLTAALREDDKSRRLLEIPGIGPITASALAVELGDARQFANARQFSASIGLVPRQYSTGGKPTLLGISKRGDRNLRRLLVQCARAVMQHTDSRTDAMSLWVKTLSTRRHSNVVACALANKLARIAWAVLARGTHYEARALTTSARRSAVTASSCLGLRPGPRDETNGSTARRTTW

SEQ ID NO: 324128 - protein, 340 aa, unidentified
MEKRYIGIDLHRNRFTCCMRLENERTYVTEWELEDLGKFVKKLRASDEVAVEITGNTRLFFDAVAKHVARVVVVNTNQFRVIRQSVKKTDLNDARTLALYLSKNMLPEVRMKDKEHGQLASLTQTRDTLVKLRTALKNKINNILSARGINLAKEALSSEKRLVEVVNLPFDEIVQIELRVIVEQIRSLNKSIAELEKTIGEEGSKLEGHKSLSSIKGIGKITGAILLSVIGDVNDFADEGHLASYFGIVPRVSNSNETEHSGRIHKRGTKLGRTALVQSALIAANYSPYLKRFYEQVKARRGAGKSIIALAKKFLGIIYRTLKNKWVFEDFPNFVLAEES

SEQ ID NO: 324129 - protein, 337 aa, unidentified
MKFSGIDLHSNNSVVLISDEADRIVYQKRLPNDLAQIVAALEPHRDELVGVVIESTYNWYWLVDGLMDAGYRVHLANPSGIRKYEGLKYSGDVADAAYLAHLLRLGLLAEGYIYPREERGARDLARKRLQLVRYRTAQILSIESILMWQTGARLKSESVKGLTAEQVEEFGFAPDVALTVEANRAVSQTLGQQIEALEQRLQERVCLRAEFKLLKTAPGIGETLATTIMLETGTIARFAKVGNFSSYCRCVDSLHESNGKKKGEGNTKNGNKYLAWAFVEAANFAVRYCPQAKSFYEHKKRKTNRIVAIKALAHKLARACYHMLREQKPFEVNRCFA

SEQ ID NO: 324130 - protein, 343 aa, unidentified
MMNETMIGVDLAKAVFQVHGASMTGEPRFRKKLSRQSFSEFMAKQPPALVVMEACGSAHHWAREMIRLGHEVKLIAPRYVKPFVKRQKNDAADAEAIVIAARQPEMRFVEVKGAEQQSRAILFRGRERLVHQRTELINALRAALYEYGHVVPQGIRQIGRIEEILEAPHSDLPDLMRDECRDLLEQIAEQTVRINARTEKIKALAAEADTARRLQTIPGVGPMTALAVEAFAPPMESFNCGRAFAAWLGLVPRQFSSGGKERLGRTSKAGQADIRRLLIIGAMSRLNWMGRKSIPEDSWLARITSRKPRMLVAIALANKMARTMWAMLTKNEDYRVPAQAGAA

SEQ ID NO: 324131 - protein, 347 aa, unidentified
MKHSAGLDVSVKDTAICIVDEVGKVVRETKVVTEPEAIIALLTSAGLEYARVGLEAGPLSQWLVNELAEAGLPVICVETRHMKAVLTAQQVNKSDRNDARGIAQMMRVGLYKPVHVKTLASQQERMLLTTRKLLRDKLQDIENELRGTLRNFGLKVGVVSPGRFEARIRELVAGRLRLEMIVTPLLAVRRVLREQLAKLHKMVLDQVRRDPLCRRLMTVPGVGPIVALTFRATVDQAQRFARSKTVGAHFGLTPRRFQSGEMDYDGRVSKCGDAMMRTALYEAAQVLLTRTQRWSWLKAWAMQIARRRGAKKAIVALARRLAVVMHRMWIDGTEFHWRKETDAAAAA

SEQ ID NO: 324132 - protein, 425 aa, unidentified
MKPEEQKQIEFAAYVGLDWGDRTHAISLRCAAGDKVERYQLEQKPEALAAWVSGLQQRFGGQPVAVALEQSRGAVVHALMGYDFLVLYPVNPKTAAKYRQAFRLAGSKDDPDDAQLLLEILTLHRDKLRAWLPQDELTRTIALLVEHRRQVVKEQTRLSNRLTDLLKLYYPQALAWAGELATLQACDFLKRWPTLAQVQRARESQLRQFYLAHGCRKKELLERRLAEIKVAQPLTRDQAIITASVVMVQATTSQLRLIVVAIAQLDKQIEELFGKHPDHDLFSSFPGAGPALAPRLLTAMGTDRERFSAAPEVQQFSGIAPVTERSGKSCWVHKRWACPKFVRQSFHEYAGQSIRQSPWARAFYQQQRQRGNGHHAAVRSLAFRWIRIIYHCWKERVPYCEHTYCQSLVRRHSPLAQLLLVQPQR

SEQ ID NO: 324133 - protein, 397 aa, unidentified
MVNVGIDLHKTQFTICVRDRKGNRFAKYLTTPEGYQAFLNQAAEWQGKGEAVRVGVESTGNTRYFKNRMVSAGIEVTVINTLKMKVVNESVKKTDKHDAATIAEFLEKDMLPESQLCSRESEQMRRLLKVRTTLVRGEVVIKNQIHGLLTAEGLEDVKGSLQSKRGRLGVLDTLKANEQGLAAHPLFETIEQLEAQIKGIEKQLRALVKGDRMVELLLTIPGCGEICAWTIRAYTDDIKRFANPKKYASFAGLAPWVQNSNETIHHGSITKRGPKELRTAIVQVVMGLRRMKKKTMSWRYMERYEMMKKSKGSGKAIIATARKIAVVIWNMLSRDEEFDIGEMGGKKEGKKREVVKGVEGLAKEAVKEEEGTAVKNEEVKRVVKKTGVAREKRKKVG

SEQ ID NO: 324134 - protein, 342 aa, unidentified
MNHYAGIDVSLKCSSIAVVNANGEIVREAKVATDPMAVIEWFRSYGLQMERIGLEAGPLSQWLYAGMKEAGLAVELLETRHVRNAFKTMAVKTDRKDARGIAELVRVGWYRPVHCKSMDAQETRTMLAARKLVDQKLRDVEMSLRGLLRGFGLKVGKTTPTRFADRIKELVSGNAILQVIAESLLAVHQVLLREFKSFEKRVRLMARDSAEARLLMTTTGVGPIIALTYAAGVDDPGRFKKSKAVGAYFGLAQKKYQSGETDITGRISKAGDAGVRTALYQAAHIMLTRPVKSSALRTWALRLAKRVGMSKAKVALARKLAVVMHRMLVDGKPFNPAAGAAA

SEQ ID NO: 324135 - protein, 339 aa, unidentified
MRIIGCDFHASQQTIAMLDRETGDITTRTLKHEADEVRMFYAGLARPVLVGIEATGSMGWFLQLLDELAIAYQVGHPAKIREADTRRQKHDRRDAELLLQLLIEDRFPAIWLPTGEQRDVRALLLHRHQWVRLRTRVQHSLQAIALGQGVRRGASLWTRDGQASLAAWSLPFHAAYRRDALHALYRHLSDQIAGLDARVADQARDHPGSRLLMTHPGIGPVTALATDVFLGDPARFATGKAVASYVGMIPREYSSGPRQRLGALTKQGNRLLRFLWCEAALTATRRDLVLKRFYGRKLHQRGLGKARVAAARKLGIRLWIMLRDRIDYQEFCRRGSVRP

SEQ ID NO: 324136 - protein, 357 aa, unidentified
MESQEVKYVGVDCGKKSIEVVRINSENSLERRQFSTTESGINNLLQWLTLNDIVGLEAGSQSFRIAKSILNKGVQVIVLNPGNLATIYQSLKKTDKEDSLKIARLIQRHPIEELPTVPIPNDEEEDNRRLCTEQENWTKQLTQSKNRLHSLFTQAGLTHITKKHLRTKANREISVALLPSRYQKEAERILKVLDLVEQNLKLIEKEIQEALKKNKAYVQTIMSMPGIGMITSLAIMSYMGDCKRFSSAKQAAYYAGLVPRVDISGDTVRYGRIINRGCHSIRRVIVQAAWSLVRCQHGGKVKEFYQRLYLKKGAKKSIIATSRKMIEVLYAMIRTGKLFDSMPENILNRKLTQYGLM

SEQ ID NO: 324137 - protein, 415 aa, unidentified
MKVVFPTCCGVDVHKTFVVATIITTPADSLQPHYQKKRFSTFNSDLNRFADWLLEHNCLDVCMESTGKYWVPVFNILEKRGIRVVIANPKWVKAVKGNKDDTKDSKWIGDLFRIGLVKSSFIPELNIRILREFLRYRYKLVSMKSSEKNRFQNAFTVCNVALDSVVSDMFGKSATAITDYLTSDESFDPDHCVSLLQRSLKKKAEKVLESIEGYSISDEQKARIKIIREHYDFIEKLIAKVDTCVNEMVEKYEGEINLLCTIPGIDRNSAITIISEIGMDMSQFGSSKRLCCWAGLTPGNNESAGKKKSVRISRAGVYLKPALVQVAHAAVKDKANPYYALKYERIAKRRGKKRAIIAIARMILTAIYTMLCTGEVWNPVDLFKIDIPEHLKEQQLAKAIKQATRFLEKQGLTVA

SEQ ID NO: 324138 - protein, 400 aa, unidentified
MESLLVGIDVGCRRHRVAVGMPDGRLLDQFDVDHQPTAFNAFFTRIEKQAVKHGLSVSVGMEGYGGWARPLDEMVQAKGWMLLNVNNLKLARYKEIFPSPAKTDAIDARKILELMRLRPLLPQAKEILNEVIPAPQVNHDMKLLTRRRRQLVNERVMVVNRMYSDLQAIAPGLLEITGSVDNQWFLRFLTTRDTFEQLTRMHQSGLLKIKGIGQKYAGLVRAWQKTAQLSSDVLMVGDMVMEDARRVLALADQITRIEVQLRGLMPESPLATTIESITGFGLVCASELAGEIGAIERFSSESALARYIGMAPLDNSSGVYVGAKGGKQVNRRAKAAMMIAVARHYAHTPQSKAYYDKKRAEGKKHNQAVRSLGRHITRVLWSLVKNNTLYEIREIPSEIS

SEQ ID NO: 324139 - protein, 429 aa, unidentified
MNSNTQNAKIKSITEKTLIVGIDIGSETHYARAFDWRNYEYSKKPFSFNNDEDGFKAFSSWINEIAEKHGKNAVIPGMEPTGHYWLNLGAYLQEQGMKPVHVNPHHVKKSKELDDNNPNKNDRKDPKTIAGLVNEGRFSYPYIPIGIYAEIRSLSNLRIQTQEEISRIKNRIARWFSIYFPEMKDVYKKPNAKSGMMVIKKAPLPVDIKALGVDGVNQIWRDAKLKGAGLKRAKTLVEVAEHSIGNTEAPGSARIEIRMLLADYEVYSKRMDELMVEIEEKLSEIPYIDKLLEINGVGIKTVSCFVAEVGDISRFDNPKQLQKLAGYAIVSNDSGKHNGESRISHRGRKRLRYALYEAAISVIGKNPEFKSIHKYYLTRTKNPLKKMQSVIAIACKLIRIFYMILTKGNDYDGQKMLQDIVRPEIAMAA

SEQ ID NO: 324140 - protein, 471 aa, unidentified
MLIVAAGVVADIGLQPRVRRRVWREDPGGPRTVATSTNPSIRFAWSSPAASNPYMGGEAVKRIRERVAGLDVHRDTVVACCQVKQPDRSIEVTKQTFATTANGLGQLAAWLSDAGVDTVAMEATGVYWKPVYYCLEGLFDELWLCNAQHVKNVPGRKTDLSDAEWLADVAAHGMVRPSFVPPPEIRELRDVTRYRKTQVEARAKEIQRLEKTLQDAGIKLSSVASKVWSQSSREMIEAMIDGERDPAVLAQMAKSRLRAKIPQLEEAFSGRFGSHHALVCHQVIEHIDFLDRSIATLTADVTERLCPFESAVTILCSIPGVSRTTAEVMISEMGVDMTRFPTSGHLCAWAGVAPASHESAGKRHPAGTRKGSTWLQRALVEAARGASRTKGTYLSAQYSRLARRRGSNKATIAVAHSILDVSWHLLTNGALYDDPGARFFELRHDPAVEAKRLQRRIEDLGFEVSIAPAAA

SEQ ID NO: 324141 - protein, 388 aa, unidentified
MNVGADKSEPLTAIHTDLGAIFVSLELSRSSWLITSLSPGGGEKMSKHSVPGGDFAGLMERFAQLQEKARLRTGQSFRIIVVQEAGLDGFWIHRALQNEGIESHVVDAASIATSRRRRRAKTDKIDGETLVRALLAYKRGEPRVCAMVKAPTPGEEDRRHLCRERKALTAERVRHVNRIKGLLFSQGISGYQPLRRDRRQRLEELQTGDGRAFPQHLKALVNRELDRLELLLKQIKTVEAARDALLAVGQTGKPAPAAMLLDIRGIGPEFAAILWSEGLFRHFENRRQIAAYAGLAPTPWQSGAVDREQGVSKAGNPRLRTTLIQLAWLWLRNQPRSALSVWFHERVSRNGGRLRKTTIVALARKLLVALWKYVTAGVVIEGVTMKVA

SEQ ID NO: 324142 - protein, 343 aa, unidentified
MKITTIGIDLAKSVFQVHGVDARGHTVVRKQLRREQVATFFANLPACLVGMEACGSAHHWARKFQGFGHDVRLISPQFVKPYVKSNKNDAADAEAICEAVARPNMRFVPIKTVEQQAVLSVHRVRQGFVKARTAQANQIRGLLAEFGLVLPQGITNVLRRVPSMIDGAAELPASLRQLIERLLENMKVLDRQVKELEAQIKAWHQGSELSRKLEKIPGIGPLAASALVASIADARSFKNGRQVAAWLGLVPKQDSSGGKPKLLGMSKRGDTYLRTLLIHGARSAIVAAQRTGKPNVWLSGLLTRRHPNVAAVALANKNARTIWALLAHEREFRPDYVPRAVTA

SEQ ID NO: 324143 - protein, 312 aa, unidentified
MGKVIVGVDVSKAWLDIARAGDSGTIRLENTVPAIESWVEETGELNLVAFEPTGGYERVLRRVLEARGIPLVVVHPSEFSAYRRRRGRKAKTDALDAELLAAFAAEELDRRPPRIPIVADETLCALVVRRRQLIALRHAERCRLDMADAPAIRASHQTVLAALEVSLLSVEAQISRHMSEQPDLAQAATRLQTMIGIGPKTAATLLAEVPELGQLSGKQIAALVGLAPQTHNSGKRIGYAPTGYGRPGVRQSLFNAARSAIQHNPVMKRFYERLVNDNRRPGKVALTAVMRKLLVTLNAMQREQCPWNPSLA

SEQ ID NO: 324144 - protein, 361 aa, unidentified
MKKPSKHLIAEVPRSVAKVGMTIGIDLGDVWSHYCTLNEGGEVVDRGRFRTTPAGVEKWFTNVPSARVALETGTHSIWVSEQLREMGHEVIVANVREVRSISHSNRKSDTVDAEKIARYARVDPEILHPICHRTVAQQEALTLIRARNLIVRLRTAAVNSVRGLAKPCGYRLPASSTLCFAKRCMAVLPPGLAQALGPVLEQIAAMTVKIQQYDRIIKSLTETEYPETQALLQVYGVGQLTALTYVLTLGSKERFKRSRDVGCYLGLRPRRSQSGDRDPQLGITKAGNIYLRSLLVECANHVLGPRGRDSTLRQWGLHLASRGGKQSHNRAIVAVARKLAVLLHRIWITQEPYIPFYAVAA

SEQ ID NO: 324145 - protein, 352 aa, unidentified
MIVLGADMHKASHTLAAVTAPMGELLGDKTVKVGEPGFVAALNWARELGQERVWALEDCRHVSGSFERFLIVNGERVVRVATRLMAGERRGSRERGKSDLIDALAVARAALRQGVDDLPTAVLAGVELDLRLLVDHRERLVKMRTALINDVLWHLHDLWPEQALPPGALRAKKRASSVARKLARAEQTTRVRIARDELTHIRELTQTIDELQAEIAALVEQTAPQLLAEPGFGPLTAGKLIGEIAGAQRFSSDAKLARTAGIAPIPVSSGKTNRHRLDRGGNRQINAAIHRVAITRARCHPETQAYMARKREEGKTHREAIRCLKRHLTRRIWHLLQPATPGAITTLSPSNS

SEQ ID NO: 324146 - protein, 393 aa, unidentified
MYYVGIDVGKNNHVASMMDASRKTVFKAYAFTNTREGAQGLLEKIQSHAAESAQIEVGMEATGHYWLALYSFLLDAGYVLHVINPIQTDGWRKGVEIRKRKTDDIDSLLIADLIRYGEFMETKLTDEGLLSLRTLTRFRSYLVDSIADLKRKVICVLDQVFPEYESIFSQVFGATSKEVLLTYSTPAELERVSVEQLTELLTSLSRQKCGAAQAQRLSQAAAHSFGVTFCRDTFSFQLRILLEQMNFVEQQVADTEKQIKALMDTLASPITSITGIGPVLGAVILGETGGISRFDSASKLVAYAGIDASVSQSGEFESTSNRMSKRGSPYLRRALYQAATVAAFHDPELSAFYQKKRAEGKHHSVCIGAVARKLCYIIFAILKENRPYVKRLP

SEQ ID NO: 324147 - protein, 335 aa, unidentified
MKLGYFIGIDVSKSSFHYCILHGNADVISGECVNQIAGVLEFIRFVRNHVEGNLDQVVFCMEHTGIYCTLLLSELHAAGAKISIESAYQIKRSLGLQRGKSDEVDARRIAEYACRFADKLNYWKPKRKVIEQLTHLTTMRARLVKVRTQLTVPVQEAKEFLDEPELYLLTEPTEKVLMSIEETINDIEQKIKQVLNSDTQLKSILKRLTSIPGIGVVTATELIIRTNEFRDFQNAKQLACHVGVAPFEHNSGTSIRGRTRVDHKAHKKLKTLLHLGAMAAINRQGEFRKYYDRKLAEGKNKMSVLNAVRNKLIHRVFAIVKNGTIYEENYQYKFA

SEQ ID NO: 324148 - protein, 460 aa, unidentified
MSKKQVSLEVVNPYAAGIDIGSRSHWVSVGQDAEDVKEFGVYTEDYEAMAIWLHEHQVSTVAMESTGTYWQNVFSHLVSQGFEVILVNGRQTKNIKGKKTDILDCQWIQKLHTLGLLSSSFLPDSTTDVIRTYSRHRQNLIKQVGSAVLKMQKYLRLMNLRLDVVVNDIVGLTGKEIISSFLAGETQGAELAKHRHYNCRKSEAEIAKALQYNGRKDYFFALKQEWETYLHLQKQIDETDKEINRLLKSIIQNDEKKKVHKAKKKDYKRKNKNAIRGTDMNKIGIQYFEGIDLMAIEGVNDATVMSFISEIGLEGIKKFRTSKEFTAWLRLAPNNKISGGKVLSHHLPKGSNRLKIALRQSANVIGNLKEGHLNDFFRRINYKKGRATAVSATARKLAVIIWNMLSKGEQYKPPTEYLFLDQKRKLGIIKRISKQITKFDIKMEEIGFGNSLIINDEFLR

SEQ ID NO: 324149 - protein, 342 aa, unidentified
MYYIGLDVHKKTISYCVKEANGHIYAEGKVGATRYELDDWMKTLPRPWTVAMEATIFTGWIYDHLLPHAAQVKVAHPVMLRAIAAAKKKNDRIDAGKIADCLRCDFLPECHMVSTEIRDRRRTLRYRHLLVHQIVQMKNRISGLLLETGVSHNKQKLHKVGYFRELLSNKDEVHESIRPLLRLSRETIVRFEKTEYALVSSLQRDPLLAERIKRLRTVPGVGPITALTWALEIGDVTRFRSIKQAISYCGLSSDEKSSADKVMRTPLSKQRNKHIQRALVEAAKLAPRQDHQLAVVYEKEKEKGHANRATLAVARKMVAYLVAVDRAKRDFVAKEDLNQAIA

SEQ ID NO: 324150 - protein, 314 aa, unidentified
MSQSNVFIGIDVSKAHLDVFVRPTGESWQVPHTSHGIRQLLSQLEDRAPRRIVLEATGGLERPLAHALRAATLPAVVLNPRQVREFGRATGRLAKTDRLDAQVLAHFAEAVQPPLRSGRDPATEELSAVVARRRQVVDMLTAEKNRLAAAPHPLRAGIEKHVRWLDQELAELDKLLAQAVQAVPAWRERHTVLRSAPGVGRVLATVLLADLPELGQLSHKQIAALVGVAPLNRDSGTLRGRRRVWGGRGHVRAVLYMATLVAVRRNPVLHTFFARLHAAGKPAKVALTASMRKLLTILNAMVRHQTPWVAAPGK

SEQ ID NO: 324151 - protein, 365 aa, unidentified
MQKAELSCEADSENYLGGSSETMYSIGLDVHKRTISYCVKDAAGRVHMEGKIGSTRRELDSWIKTLPQPRTIAMEATIFTGWIYDHLLPHAEKVKVAHPLMLRAIAAAKRKNDKIDASKIADCLRCDFLPECYMTSTEIRDRRRTLRYRGLLVKQMVQMKNRISGLLMEKGVTHTKRRLHKVGYFAELMGGNEEIDQSIRPLLKLSREHIVRAQKLDYALVSSLERDPLLVERLKRLRTVPGVGPITALTWALEIGDVARFRSIKQAISYCGLCGAEKSSADKMLRTPISKQRNKHIQHVLVEAAKLAPRQCHELALIYEKEMQRGNRNRATLAVARKIVAYLLAVERREKDFVPTEEFGGTAAA

SEQ ID NO: 324152 - protein, 338 aa, unidentified
MKNITVLGIDLAKNVFQLHGADSKGKRVLSKRLSREKLIEFTTKLSPCTIAIEACTGAHYWARMFKALGHEVRMISPQFVKPYVKSNKNDRNDAAAIAEAATRPEMKFVPIKQVEQQDILAFHRARELVVKQRTAQANQIRVLLAEYGVIIPKGIRNLSKLRIILEDNKQKLTPVAEQLFVQLHEQFKIYNAQVEKYEQLIETLAKKNHMCQELMKIDGVGPMVASAAVATIGDANVFKNGREVSAWLGLVPKQYSSGNTIRLGKISKRGDQYMRKLLVLGARNAVRVCEKKKDALNIWVADKLQRCGLNKAAVALANKNARIIWAILATGECYRKAA

SEQ ID NO: 324153 - protein, 339 aa, unidentified
MKLYSAIDLHSNNSVLVVLDENDKVVYERRHPNDLKVILEQLAPHRKNIQAIAVESTFNWYWLVDGLMEAGYIVKLVNTVAVKTYDGLKYSSDEHDARHLAHLLRLGILPTGYIYPKEERAVRDLLRKRAQLVRGRTVHILSIQNLVIRNSGKGISGDEVRKLTDKAISKICGGDATLSLAIKSSMTMLRCFNEQIAELERVVMLQAKLKPEFKQLLTIQGIGKILGMTIMYEAGDMARFAKVGQFASYARCVESSRWSNGKKKGDGNRKNGNKYLAWAFIEAAHYAVRFNERIRGFYQRKKAKTKTVIALKAVAHKLARACYHVIKDQAPFDEARAFP

SEQ ID NO: 324154 - protein, 326 aa, unidentified
MTLSHLTDNIFVGIDVGGAGLDVAWHRGDSAHYANRPDAIAALVERLRTGPEVTRIVLEPTGGYEKALVKALRQAQLPVEVIHTTRFNAYRTLVGVKAKSDTSDAKLLASYAAAPDEVRGRKAGHVELPEDAIREALSELASRRDQLKHMIHAETCRLGTVRMAELRQAIMTHLEALRAEDKQVHRMMLELVRQRIDLRHHQRLLKTIKGIGVKSALGLLASVPELGRIDNKAAAALIGVAPFVRRSGTMVAPARIHGGRAAVRSLLYMAAVTASRHNPVLRPFYERLIANGKPPKLALIAVLRRLVVFANAVLRSGQPWRGAITS

SEQ ID NO: 324155 - protein, 313 aa, unidentified
MSQNNSIILYVGLDVAKSSLQLHLQGRFFLLTNDPKGHAKLLKLLRPHPQVHVVCEATGGYEQPIVRVLHAANILVSVLEAGRVRHFARAQGQRAKTDPIDAAVLTAFAQAMQPAPTPAPTQQQQRLAELSTRRRQLIQTRVAEGNRSEHYLDPLCRRQAKQCLRLLDRQIEACDQAILELIAADAALSHKAERLDAIAGVGSVVAATVLAEMPELGQITNEAAAALAGLAPYNRDSGDHSGARHISGGRVAVRGALYMATMCAIRHDRILKAFYLRLRAAGKKPLVALTACMRKLIVLMNRLLKNENFHLAS

SEQ ID NO: 324156 - protein, 381 aa, unidentified
MQASDACMPIAGNIATIFVAIELSQRGWLVVMQSPGRERISRYKLDAGDHDGLVALIEKMRERAARSLGSAPAVVSCYEAGYDGFWLHRRLTAAGIANFVFDPASIAVEQRGRRAKTDRIDGEVMLRTLMAYRRGEPRVVRVVRVPSAEHEDIRRGSRERQRLVTEQTAHINRIKALLKLLGLTAGDVRRRDWPSWLEAQRDWQGQPVPAHLRDELRREHARLLLVGEQLQAAVTAAQPASPTAAQMAQRKAQLLRLKSLGPVFAGTLTAELFYKDFRNRREVAAYCGLAPTPWRSGAMAREQGISKAGNRRVRHKAIELAWLWLRHQPGSALSTWFQRASANGGGRAKRIAVVALARKLIVALWRYLTTGLVPEGAIIDA

SEQ ID NO: 324157 - protein, 358 aa, unidentified
MQAKDTKISFNGQNVYSGIDAHLKSWKVTVLLENSVFKTFSQDPCAKVLGSFLRKNFPGATYYSAYEASFCGYSVHRELEKEGIKNIIVNPADIPTTDKDRKQKEDKRDSRKIAKSLRNGDLQGIYIPTIQTMEFRTMVRYRKTLVKEVNRNKNRVKSLLYFNGKKVPRELDTTSKHWSARYTKWLKELSFASKYGNKTLDMLIETTSYHRQKLLEVTRELRNIQEESGYGKKIKLLLSIPGIGIITALTLLSEIEDINRFKNLDALCSYVGLVPSTNSSGEKELIGDITNRANKTLRSVIIESAWVAVRNDPSLALKYNQLRQKMEPSKAIVRIAKKLLNRIRYVLKNEKEYVLSVN

SEQ ID NO: 324158 - protein, 337 aa, unidentified
MNITTVGLDLAKNVFHLVGVDTVGKEQVKKRLSRSQVLKYFANLPCCRIGMEACASAHYFARELTRLGHEVKLIPPQYVKAYLRGQKNDYNDARAIAEAVCVPQMRFATMKTVEQQDVQSLVRLREGTLQARTALVNRLRGLLGEYGIVIPKSVSALRRTLPEVLEDADNGLSDGFRRLLNQGRTQLQELDAHLETLTAELSALAKRDDRVQRLQTAPGYGPIVASVFAGVVGDGHQYRRGREVAAAIGLVPRQHSSGGKNVLLGISKRGDRYLRTLLIHGARAVVNAAKNKDDALSRWINRLRETRGINKATVALANKLARIGWAILRNGTRYQPA

SEQ ID NO: 324159 - protein, 414 aa, unidentified
MSNRRKNNVKVNKKVLIATVDIGKKSNHGYWRSYTGDDCKAFEFTNTREGFDKFWRTIRAARIQQKAESIIFGFESTGSYGEPLVHYMRMKPVKMVQTNPMHTKRVKELDDNSPRKTDSKDPRVIADIIQLGHYLSLVVPSGPAAELRRLSNARESSVSRRTAVLNRLQDITGVVFPEFLTIMNGVQSKSAQYILKRYTLPGDIVRLGRIRLAKKLHKVSRGQLGIKRAAELLAAARNSTGVTEGAEIICMEIRRLLAGIANENESIDVLEAKMSEYLTMIPYNHSLLSIKGVSTVIAAGIIGEVADFSAFHSAKALVKLAGLTLYEVSSGMHKGKKRTTKRGRALLRKLLYFAALNVVKKDGILHAYYQRLIDRGMLRMKAVVAVMRKLLRIMFALVRDKTVYNTEYSIKKAA

SEQ ID NO: 324160 - protein, 436 aa, unidentified
MTLLERLESQLPSRYYLGVDVGYKGHVAAVINLRTFVRSDDRWKRTWCLHFPSTQAGLRKLQRYLDRFSTDPSEFLGLCEPTGGHYGATVFQYLLDRDYGMNLVENATVRHMREKIFPGLPKTDEMDTRVMARIGYLHEAVGEEFTLRPLELPDPDDTHLLALCRDSWKLSGIITRARNQFTQLMAVTFPELKTFFTSSVSTVVPVSLIAAYPTPALLAEAPEEEVRKVLWKARGYQHALRVAELQTLARDSSGLLPDTGRAWRLEWLTSFLLSNFQYQADLDKRAKKLVEQRDGYELIVNVPYSGPGTLGVILAVTGDVCRFSNYRKYVAYSGYFAGLEKSQTIDRTKMSRRGNRDLKRALFQIAAPLVWFDKGDNSYKELFQRKKVQGQAWYEAMPYVCAALARHIYHCLKFKDPYDVEKAFQGSSSTPASGQA

SEQ ID NO: 324161 - protein, 325 aa, unidentified
MAAALDPIGGLLGVESFVAAPRGYRAMLEWLGSFGTVGKVGVEGTGAYGAGLARFLRRAGVEVVEVDRPNRQARRTRGKSDSADAVEAARAVLSGRAAGAPKSRDGEVEAIRALLVAKRSANHARSRALAQMRQLSYTGPDQLRSRFKGLSITDLVAQAAALRPRASGDPVLYATKVSLAALGRRVLALADEMTDLDELLTDLVTHCAPQMLDLYGVGVDTAATLLVTAGDNPERLRSEAAWAHLCGVAPIEASSGKVTRHRLDRGGDRDANQALWRIVMTRLAWDPRTRAYLERRTKEGLSKREVIRVLKRYVAREVFKYLPRG

SEQ ID NO: 324162 - protein, 420 aa, unidentified
MDEITEEPGALVERVAALDIGKATLTACIRVPHEDKPGARRQEVRTCATLTPALLELRDWLICQGVTLVVMEATSAYWKPPFYLFEDDIECWVVNARDVKNVPGRPKTDKLDSVWLCKLAERGMLRASFIPPRPQRQLRDLTRYRRTLTQERTREKQRAEKLLEDAQIKLSVVISDIFGKSGRAMLDALIAGQRNPHALAALAYRNMRAKTSVLQEALTGHFTDHHAFMLGMMLARIDALTTQIDTLTTRIGQAIAPFAAQVAQLDEIPGIGITAAQDLLAEIGTDMSRFPTPGHLVSWAKFAPRARQSAGRSKAASTGKGNPWLGGTLGEAATGAARTKTFLASRYKRIVRRRGKQRALVAVGNSILTITWHLLSDPAAHFTDLGPDWHDRLAPLRRKRQLIAELERLSGKKVTLQDTV

SEQ ID NO: 324163 - protein, 365 aa, unidentified
MVVGIDIGSQTCSMCTLTPDKRQVIKPTEFANAPAGFGVLQEQLEQLGVPPEQVLIGLEATSRYGENLSHFLESRGYQLCLLHPRQTHQFAQQRGLRAKTDHLDATTIARVLLSGEARRGYVPSDLIATYRELVRLHTQLSDEVARSKNEIQALLTVLFPEFSQVFADPCRATALALLKLYPSAQAIATAGGEAIAAKLHELAPRNYGHRTAEHLVQLAQHSVSRGFAVAARSTSLKILCHQLEHTQANMAQLEREIDTLLETDAGAKGLISVPEFGHKTVAVLRAELGDVTRFQRTDQVVAYAGLDIEVKESGKWKGQAKLSKRGSGRLRRILYMATVRCIRLPSSAFGAYYHRLVARGMKKCD

SEQ ID NO: 324164 - protein, 343 aa, unidentified
MAHYVGLDVSVRHTSICIVDDVGKVVREARVTSEPEAIVRILTAQHLTCRRIGLEAGPLSQWLFNGLASAGLPVICVETRHMKAALAAQINKTDRNDARGIAQMMRVGLYRSVHVKSEASMEKRTLLAARKLLQGQNRAIENDVRGLLRSFGLKVGPTSAGAFDARVRQLVEDLPGLTAIIRPLLEARAAIRSQFVVLHRLLLDLVRDDPVCRRFMTVPGVGAVVSITFQATVDLPQRFTSSKAVGAHFGLTPRAFSSGETDYTGRISRCGDALMRATLYEAAHTLLTHTQRWCRLKAWGVRLAQRRGLAKATVAVARKLAVILHRMWIEETEFRWSVKPATA

SEQ ID NO: 324165 - protein, 319 aa, unidentified
MAQNDLVVAGIDVAKDKVDVCIRSLSLKRTFGSTAEGRRGLASWLRRKKVGKAVMEASGGYEREWAKALRDAGIEVRIVDPKRVRSFAQSAGRLAKNDTIDAEMIAWFAETFDEARGQAYDATREQLHQMVHARQALKDMQSKLASQGEHAVPAAVQRVHARISKTIAAELVTIEAAISALIQATPHFTELAEIIESVPGIGRTTSAALIAAMPELGQANNKVVASLLGVAPFDDDSGRRRGERHIKGGRRRTRNVFYMACLGAATQHNPVLKAFYDRLVAKGKLKKVALTACMRKLISILNIMIERRQKWDAKRYAVS

SEQ ID NO: 324166 - protein, 358 aa, unidentified
MEPAGLTPHVTSYGMDKFKLFCGIDISKAGLDVVYGTASLSRYVKLSNDVKGIHQLLNILLQAEPEREAILVCCEHTGSLMDKLASILKGEGIFLWAVHPLLLSYYSAELNRFKTDKADARKLFTYAMTNRAVAVSYHLPSTSARQLRELFICRKNLIQTRAAYQCRISDHQQLSSCDALVMQVEKQLIMILSAFIKSIEKAIREAIASDQKLKRMYQILTSIPCIGPVTAWHLMFITDSFEKFSNAKALAAYIGCAPYPKRSGTSVKGKDKVSKKAYRPLKVDLNQGIVSVCTRPGQLFYNYYQAMIEQNKHHLYILNAIKNILLKLAFKLIRSNTLFQPEIFMENKISWKKHLVVS

SEQ ID NO: 324167 - protein, 370 aa, unidentified
MKGGLPGGSLRVVTWEATMRRPLNIMLHVGMDLSRHRLDVRVLEDGGATVAELMVAPTEPELRQLAARFKPGGPVRGVIESMNGARFVHDTLELAGWEVEIADAQKVKGLAPLACKTDRIDAWVLAELSRRDLVPAIWLPDPAVRAHRERARFRLHLVHHRVELKNRIHASLITFGHACPTSDLFGRVGRQRLTELEFPEPWASDIAAAVELIDHLNAQIATIDTDLRREGADHPYVPLLMTVPGIGWILAYTIAAELGDITRFPTPKKLCGYTGLCPRVYQSGSVDRRGRLAHNGPKYLRWALIEAAVHACRHEHYRDHHQATKVRLGRQRGAKVARVETARKLTEAIWHMLTKGEPFAPQVPRQSLAA

SEQ ID NO: 324168 - protein, 344 aa, unidentified
MGEVITIGLDIAKSVFQVHGVDDAGTVLIRKRVSRAKVLEFFAELPPCLVGIEACPSAHHWGRELQGFGHTVKLMPPSYVKAYLKRSKNDANDAAAICEAVTRPSMRFVPIKTKEQQTALMLHRARQLLVRQRTMLSNALRGHLAELGIVSAKGRNGTEELLRIIEDGADNRVPPAVRGILDVLVRQYNAIGAEIGSIDKSILALHRSCEASRRLAEIPGIGPISATALVAEIGDWKAFSSGRSLAAWIGLVPKQHTTGGKDRLGSITKQGNRYLRWLLVVGAMAVIRSARKHGTQKRPWLGRLMERRPTKVAAVALANKIARMAWAIMVHGDRYKEPKLLLAA

SEQ ID NO: 324169 - protein, 434 aa, unidentified
MIKVVYPNCAGLDVHKKFVTVCRLTVDKQGQVQKELRQYDSMTADLQAMADWLAEGGVTHVAMESTGVYWHPINNILEGRFEIFLVNAQAVKRMPGRKTDLKDAEWLATLMQHGLLQRSFIPDRQQRELRELARYRLSLVQERSRFASRLQKVLEDTNIKLAAVATDMQGVSAQAMIRALIQGEADPKVLAGMAKGRMRKKQADLERALVGQLTEHHRFMLNELLDQLDVLDQQIAKIEARIEEQLAQMPPFRAAVILLDTLPGVDRQLAIAIVAEIGVDMSRFPSDRHITAWAGVAPGNNETGGKQRAGKTRKGNKYLRRALVLAAWGAVRSKRNYLRSLYYRLAARRGKPRAAMAVGRSILQAAYHMLLRGEPYQELGADYLDQLDRERTAKRLLKRLDNLGYDISSVKDRLATLPAPEQPALPRQPLPIPA

SEQ ID NO: 324170 - protein, 313 aa, unidentified
MSQNTMTTIYTGLDIAKLNLQLHLAGRIHDLPNTAAGHRRLLKLLACQPGAHVVCEATGGYERDVVAALHEANVAVSVLNPARVRHFARATGQRAKTDDIDAAVLTAYGQALQPNPTTPRTEQEQQLAELVRRRVQVLEILVGQRQQVERLTLPALRRQAQSLIRRLERDLEQIEEQLKALRTQVATLHERAQKLEAITGVGAITALGVLAELPELGTLNRRQAAAPAGLAPHPRESGQWHGRRSIGGGRAPVRRALYMAALVAAHSNHQLKEFYQRLRAAGKPAKVALTAVMRKLIVLMNHILKNPNFALQN

SEQ ID NO: 324171 - protein, 420 aa, unidentified
MFMIIPSQFPYQATVGLDWADQKHDVFVRFANGDSYRRKIDSRPEAIQEWLLELRSTCGEGKIALALEQRRGALFFQLCTHLSWIDLYPINPHSLASFRQTFFSSRAKDDPVDSQLLEELLRTHPERLRPYQPEPTTQRKLEQYCRHRRRLLDLATKTELKLISTLKQYFPLAVHLFNDVGMKSDIALSFLSRWPTLDELQRAKAHTVRSFFYAHNSRSQSLIEKRLQQIAQAHPVTDDLALIEPLLLTTKCLVAQLRRFNQAINEFDRKIRELFKSNPDHFLFESLPGAGEQLAPRLLSLFGSDRSRWADATDIQKYSGIAPVVERSGKSLWVHRRLARPIFICQTFHEFAQQSIQYSSWAEQFYRRQRQRGKSHHSAIRALAFKWIRIIYACWKANKPYDESFYVQTLEKRNFSVSST

SEQ ID NO: 324172 - protein, 345 aa, unidentified
MEPSHYVGLDVSQELTSICVIDEQGAIIWRGKCATDPDVLTRTVGQHAPHLARAGLETGLLSNFLTRALRARGVPIVCIDARHAKAALRVQINKTDANDAHGLAQVVRTGWFREVTIKSMDAQSLRLLLVARAQLISQRQATANTLRGLLKAFGHVVRKGAGGLFARRVREVCDCNPALGAIAEPMLAVWQSLREQICILDGQLLKRAKADPAARRLMSIPAVGVIVALAYVAVIDSPGRFRHSSTVGAYVGLTPRRYQSGDVDCAGHISKCGDGLLRSYLFQAANAILTRKVTDSTLRSWGRAMAVRIGLRRATVAVARKLAIIMHAVWKSDRDFDCAGIPARV

SEQ ID NO: 324173 - protein, 349 aa, unidentified
MNILAMDLGKYKTVFCEYSAIDGEHTFATVKTTPREIHDLIVEKEPDRVVMEVCSIAGWIGDITEALGIETEIANPMHEAWRWKNVKKKTDKEDALKLAKLSAMGQLPTVHMRPKPVREKRALIKHRQRLVHYRTSLKNAIRAIFARQGIAITRGAAIWSREGLQWLKGEAREFAQISDAAELWRGQLQVELKLLRAVTDSLKVVEGKLDKMGAVDRQIKRLQTIHGVGPRLAETVVAFLDDPKRFKSGKEVGSYAGLVPRQYQSGQMERQGRTGGRGNKMLRNLLIEVCWASLASNAWARDTYKRLLRGSPSRKKIAITGLARRLVVRCWAMLRDEQNWKEPMPTSTG

SEQ ID NO: 324174 - protein, 430 aa, unidentified
MEIVYPRACGVDVHKSFIVAVICISESVKPRYIKKRFSTFNNQLIQFRQWLIDNNCQNVCMESTGKYYVPVYNALEDHISNVVVANPKWVKAIKGEKDDNKDAKWIADLFKFGIVRSSYIPEKNIRILREFTRYQFKLVNIRSSEKNRFQNALTVGNCKIDLVFSDVFGKSASSIVDTILSDEPYTSEDILSKVHGRCKSSDEDILSAVEGTDLNHYLKSRIRIVQKHMEYVDSLLDEIQHHINIMVSAYENYIQLLMTIPGVSRKSAIIIISELGIDVSQWSSHRKLAAWAGLAPGCNESAGKKKSVKISKAGVYIKPCLVQVAHAAVKDKNCDYYADKFSRISKRRGKKRAIIAIARKILVAIYHILKTGEVFNPSDMADVETTKQQRIEYIKNNLRNAFNQLSRTGLSDEEILQFIIKKSSNSPQTE

SEQ ID NO: 324175 - protein, 326 aa, unidentified
MISYLGIDVSCRTLEVSDVLGSLTGQFANTPKGVASLLDWVHRHVPEGVQVVVEPTSTYHHLLVEALNQSGKEVPYTLINPAHTAAFATMQGKRAKTDRSDARLLAAFGESQMPQPTPPPDQDQERVKSVRRHLAWLEREARSARNRLETARRSPWTLPEVLESLERAATALEEEAAQVARALESHVARHPHWQQEIALLTTVPGIGVKSAILLVSELPAQARCRSAKAWVAFCGVNPEPRESGTSRYSRLSRRGAPQVRAGLYMAAVAAMRWNPVVHALCQRLQAKGKSGRVRVMAAMNKLLHLCFGVLRSGKPFDVTLHQPMTP

SEQ ID NO: 324176 - protein, 394 aa, unidentified
MRFAGVDIASETHVVALVDEDGKVLVKATAFAEDAAGYEKLFAQLGASAELLVAMEATGHYWKNLFAALAARGFSVALLNPLRTHRFAEEDLQRTKTDAIDALGIARFAAQKRPPATRLPDPATEELRELVRLRERLLQDFGDRVRQLHRLVDLGFPEFTRYVKGLDSELASAILHDYPTAAAFQGVSAKRLAALRYDGRHQVGAELAGLLIAAAKHSVGHHHGEAYRVQVRYACEDLDILRRRLRQLDRDIAGTLGAHEVGTLLTSIEGIGPNTAARLIAELGDPAHFRSPGALAAYVGVVPALSQSGKRKNTRAATTAIGNARLRAALWMPTLTAVRKNPWLRAHYQRLLARGKLPKVALVACMHKLLFAVYSVAKHRRPFVAQLATAETTP

SEQ ID NO: 324177 - protein, 345 aa, unidentified
MTTMNYIGLDVHKKTISYCVKDVSGRIQQEGKVGATRRELDCWMKTLPQPWIVAMEATIFSGWIYDHLLPHAAQIKVAHPLMLRAIAAAKKKNDQIDASKLADCLRCDFLPECHMMPRAIRDRRRTLRYRHLLVRQMVQMKNRVSGLLMETGVEYNKQRLHKVSYFRELLSANGEVPPSLRPLLKLSRETIERCQKTEYALVSSLQRDPVLADRIKRLRTVPGVGPITALTWALEIGDVSRFGSIKKAISYCGLCGDERSSADKAMRMPLSKQRNKHIQRALVEAAKLAPRQNHEMAVIYDQERQKGNSNRATLAVARKMVAYLLAVDRQQRDFVPAEERRTTAA

SEQ ID NO: 324178 - protein, 341 aa, unidentified
MKVSTLGIDLAKNVFQLHGVDHEGHTILRKKLTRAKFVQFVIQLEPCLIGMEACSSSHYFARLFTRYGHEVKLIPPQYVKPYVKTNKTDATDAEAICEAVTRPNMRFVQIKTEEQQAVLALHTERGILIRERIACANSLRATLAEFGITIAAGQNHLTRELPAILEDGENGLSPFVRTSIYRQSKHIRELEEQVKQVEEALASWYRTQEACQRMAKIPGVGMLTATYVVAAVGNARQFSTAKQFASWLGLTPKEHSSGGKQQLGGISKRGDGYFRYLLVHGARALTAWVNRNGAVEENSWLQGLLERKHYNVAVVAMAAKTARIMWSMLSHNTEYQPRQLA

SEQ ID NO: 324179 - protein, 431 aa, unidentified
MKIIHDHAAGIDIGSRRIFISVQGQEVVSFATFTRNFREALDYLLSHGVDTVAMEATGSYWFILYDILHAGGLDVWLVDGRQTKQVPGRKTDVKDCQWIQQLHSYGLLNRCFVAEGDQKEIRSYLRLREDLLRNAAMHVNHMQKALVEMNIRLPEVLSQIHGASGMAVIGAILSGERDPGVLLSLCHTRLRRTKSQEILAALEGFYTKRGVFALRIAHEAYLFYMKQIAECDHKLEALLQKGGDGGKGTQSGPRKPIRHNRPDIRDLGAHLLDLFQGRDATILPGITDYTWMQIYSETGNDLERWATEKHFTSWLGLSPGQNSSGTSSRRVKRKGKPLTGQIFRVIAQGLLQSKKIAIGEFGRRLRARKGPMIAIKAMANKLAAQYWRLMVKGTTYVEQGVQTYETQLKKQKEKYLNRLALEFDMKLEKIH

SEQ ID NO: 324180 - protein, 311 aa, unidentified
MTDHTIGVDISKSHLDVFRLEDGAAQRFDNSAAGFRALTKWLGKAPVARIVFEPTGPYHKAFEAALGEKFPLVKVNPLQARRFAEAHGTRAKTDAVDARMLARMGAAFDLAPQVPCSKEILVLRDLHVARAGLIKDRTRLRNRGQTQDIAVLKRQTKARLSQVERQIVELDTEIAALIAAGQTTARNCDILCSMPGIGAVTAAAMLTLMPEIGTLERKQVASLAGIAPITRQSGQWQGKAFIGGGRKPLRDALYMPALVAMRFNPDLKAKYEGLRAAGKPAKVAIVAVMRKLIETANALVKADRTWTQKTA

SEQ ID NO: 324181 - protein, 350 aa, unidentified
MVTIGADLHKRTHTVVAVDDNGRRLAERSVPATPAGHLQLLDWARERFPERRWALEVCRHLSRRLERDLVVAGETVVRVPPKLMAGARRTGREPGKSDPIDALAVARAALREPDLPIARLDGPEREVRLLLDHREDLVAERTRAQNRLRWHLHELVPGEEPVSRGLDRRVVLDALTARLADMEGTVARIARDLVTRIRDLTTAIHHLERELDILVRPLAPSLLALQGCGVLGAAKLIGETAGIGRFRSSSAFARHNGSAPVPVWSANSGRHRLSRTGNRQLNAALHRIAITQIRLEGRGRDYVAKRRAAGDTRTEAIRALRRHISDEVYRRMRHDEATRATSQAPLAMAA

SEQ ID NO: 324182 - protein, 416 aa, unidentified
MKKNSKSAMKKEQRANRAKAQRPVQREPKEILAELMEKLRGKLELKSTSASQAEAGPRGELSPNLNRLTVGVDLGDQWSHFCILGFEGETLSEGQLQTRQAEVAGFFQALPPARVVMEVGTHSPWMQEIIAGEGHEVLVANPRLMEGSKRRKRKNDRIDAKKLARLGRVDPQSLHPIRHRSREVRQDLVVLRAREALVAARTELINATRGLVKSMGTRLPKCSSPSFEQKVKDAIPERVREALLPLVQLAGALSDCIRSYDQKIEELGSEKYGHTKLLRQVKGVGPITALAYVLTLENPEHFAQSRDVGPYLGLVPKQEDSGESQPQLGISKTGDTMVRKLLVGSAHYILGPFGPDTDLRRYGLRLCERGGKNAKKRAAVAVARKLAVLLHRLWVSGEVYEPLGYAASRAIVQQAA

SEQ ID NO: 324183 - protein, 317 aa, unidentified
MTEQNTPLFIGGDVAQDAAVVAAHGQTTSRSIGNTPAALKAWLKTLPPGARIGVESTGSYHERLALLAHRAGFTVYVLNPKDVRHYAHAVGKRAKTDHVDALLLARFIAHEHTGLHPWQPPTREQRHLDNLLKRRATLVKAQGMLRQTLAHLSSLKTESKTMLASLASLITTIDRRLEQAVAANPDLQAKADCVQSVPGIGLLTGTALVNLFSRLPSARADALVAFTGLDPRPCDSGKKRGTRRLSKRGPGELRRLLFNAAMSAAKTKVWRPFYERERAKGLPTTAALVCLARRLVRVAFALYRNNVHFNPEAIHCV

SEQ ID NO: 324184 - protein, 445 aa, unidentified
MVHPNAAAIDVGATMHMAAVRADRAPGPVRSFGTFTADLHRLVDWFTECGVETVVMESTSVYWIPIFELLDARGFTVFLVNARDAKHVPGRKTDVSDAQWLQRLHSFGLLRASFRPKGQIAELRAYVRQRERLLEYAASHIQHMQKALTEMNLQLHHVVADITGATGLRIIRAILAGERDPEALACLRHYSCHSSAETIAKALTGSYRAEHLFALEQALALYDSYHEKASACDVRIEAVLKELSIHRGHGHGSAPRASRRRNRTDQANALAFDVREALFALLGKDITTIDGLGPYLSLKLIAECGDDLSSWPSAKHFTSWLGLAPSNKVSGGKMLSSRTRRSGGRAAALLRLAAVTVGRTDTALGAFYRRLSARIGKAKAVTATARKIAVLFYNAVRYGMDYVDPGASSYETRYRTRVVNNLHRRAKAFGFVLQPLEPKAGAAVS

SEQ ID NO: 324185 - protein, 470 aa, unidentified
MVAARKQKQKQKRMSAQVVEDEDYQLRYEIAAGIDVAKESAVVCVRMPSAPGNKHRTSHLQTVPATVPAITELAAELKAAGVQMVSMEATSDYWRIWFAVLEEAGLAVQLVSSSQARNLPGRPKTDKEDARWIARLTEMGMLRSSFVPPPEIRALRVYTRHIWDLTADRTRYWQRLEKLLEDALCKLTAVVSKLAGHQTARAIIEKMIAGERDPRVLAALGQGKMRNDKLPALAEALSGMRFGPQHAHAAASLLRAIDLLDAELRDLQERVTAHLAAIPASWGVDADGVTGPEAGRAADAAELPAADRLDEIPGLGREAAAALIAEIGLDMSRFPTPEALVSWAGLTPTARQSGPRKGRGKKGHGNTYAKRIIVLAAYAAANTDTFLGERFRRLAARPGGGGRKKAGCAVGRSILVIVWHLLNDPAARYRDLGSDWHARHTDRSRKARNARRQLEALGYDVIITLREDAA

SEQ ID NO: 324186 - protein, 352 aa, unidentified
MDLSFKVTTGLDVGDRYSTFCGLSADGEVEEQGRVRTTDRALRSHFEGSRRRVVLEVGPHSPWISRLLDELGHEVIVANARQVALIHSNPRKRDPVDAENLARLGRVDPKLLAPIQHRSKEAQIHLGVIRTRQAVVRARTALVNRVRGAVKSLGGRIPKCSTASFPKKALEHIPDPLRPALEPMLETIDHLSKQIRFFDRELQTLCEEQYPETALLRQVKGVGPTIALAYRLVLDDPLRFSTSRAVGPYLGLTRRHDDSADSEPELPITKMGDALLRRLLVQGAHYILGAFGPDTDLKRWGLDYVRRGGGTKEAKRKAVVAVARKLAVLLHRLWITGEVYQPLRNSRRSATT

SEQ ID NO: 324187 - protein, 337 aa, unidentified
MKYCGIDLHSNNSVLIVSDEEDRIVLSKRLPNDLGQIRAALEAHREELAGVVIESTYNWYWLVDGLMDAGYRLHLAHPSAIRKYEGLKYSGDFADARYLAQLLRLGLLAEGHIYPREERGARDLARKRMQLVRFRTAQILSIENILTRQTGSTLKGEAIKKLTATQVEQFAFAPDVALAMEANRAVSQALTQQIEAIEKRLTEAVGLRPEYRLLNTVPGIGKTLATTIMLETGCIGRFAQVGNFSSYCRCVDSLRESNGKRKGEGNRRNGNKYLAWAFVEAANFAIRYCPQAKSFYERKKRKANRVLAIKALAHKLARACYYMLRDQQPFDVGRCFG

SEQ ID NO: 324188 - protein, 344 aa, unidentified
MLYIGLDVHKEFCQACVMNKSGKVISNERFLSNQDALDKFLDRFKGDAKFVLESTGIWEFIYEGIEAKGFEVLLANPSRVKAISEAKVKTDKVDAETLAHLLRADLIPRSHVPPRDIRNLRQLVRHRAYLVRQCTSIKNRIHAELLRRGIRRPDDLKKAFTFKHVEWMRSLGILTIESSLNCLEGIQAQIKEVESFLLMKYNSRKDAQLIATIPGIGFYGALLILAEIDDVRRFPDPEKLCAYAGLVPTVHQSASTMYHGGITKNGSPHLRWMLIEAVHAHTNYCPGSKLSKFHAKVALRRGKQRATVATARKLLHTIYWMLLNKEKFHCQGFNLVEKAATLIA

SEQ ID NO: 324189 - protein, 295 aa, unidentified
MSLFHLGIDVAKAKLDCALRLPNGKFRTKVIANSDDGFTQLVTWLASHQATPVHVCMEATGIYWEAIARFLATAGVTVSVVNPAQIRAYGASRLTRSKTDAVDARLIADFCAERQPAPWLPPSPEEIALRALVLRLEALQTMRTQESHRLDVARDAVQNDIQQHLDWLDNAIQQLVKTINDHIDKYPDLKQKRELLDSIPGIGERTSAIILAFYADTGRFANSRQAAAFAGLDPRQYESGSSVRGNPAYPRSAMLSCARRCICRLWSRCTRPLGASALKIAWPAPASRLSSLLAP

SEQ ID NO: 324190 - protein, 328 aa, unidentified
MATHAQARTNTFVGIDVAKETLRVALLPDDEQRTIANTSAGWSELYRWLHHRAVACLVVEATGPYHVGLWLALGDAGLPVTVVNPSGTKAFARSLGQRAKTDPVDAALLARYAQERQPAPTPLPSDTARQIKELVSCREDLVKLKVMEQHRQQMATALSQPVHEVIIITLRDQITWLERQIADLIASDPALAQRVTQLQTVPGIGRTLSATLIVALPELGALGRTEIASLAGLAPHPQDSGTRHGYRRIVGGRRDVCKALSQMATTANRCNPVIHAHYQQLRSRGKPHKVAVVACARRMLGILTAMLRDGLTWHETKVGQGAFLPTSA

SEQ ID NO: 324191 - protein, 412 aa, unidentified
MQVVYARCAGLDVHKKTVSACVSVCEAEGGKQRQMRVFGTFTSDLLALADWLKEQGVTHVAMEATGIYWRPVWAVLEGQFQQMLVNPQHIKAVPGRKTDAKDCEWIADLLQHGLLQGSFVPPMPIQDLRDLTRYRAELRQSQNRVANRLQKFLEQANIKLSSVASNALGVSGRQMLEAIIAGQEDAGQLAKLARGKLKNKIAELERALEGRIRDHHRFLLAEYLDEWEALGERIVRLEAEIDKQIRPFEQAVALWQTIPGVDHVTACNLVAEIGVDMRQFPSAQHLASWAALCPGNHESAGKRKSGRTRDGNKWLRRSLCQAAWAVTRKKNCYLSAQFKRLAGRRGVKRAVMAVAHTMLVIGYHMLKTGQTYHELGGDYLERINKDQLQRYLVKRLQRLGLKVTVEPVPQAA

SEQ ID NO: 324192 - protein, 366 aa, unidentified
MPSVTPAAGTIHLGMDTSKNTIVVGILMPGDEVPVIDRIWNEEGSVRHLVGRLGDPAALRACYEAGPCGFDLHRLLASMGVACDVVAPSLIPRRAGDRVKTDERDASRLARLHRAGELTPIRVPSDAEEAVRDLVRARAALLADRKRAQQRITAMLLRHGRVWRSGSYWTQAHEQWIAGQRFEEPALASALAHYRAALDTRRAELDAIEAELEPWATRPPLAEAVARLGSYRGIAAITGLVLAAEVAGWRRFGSARAFMGFTGLVPAEYSSGERTRRGAITKAGSEPVRTALIEAAWAYRHKPAIGVTLRRRQHDASPQTLARSWQAQRRLYARYKTMTARSKPAGVAVTAMARELAGFVWAEMTS

SEQ ID NO: 324193 - protein, 363 aa, unidentified
MATKAMTLVGLDVHARQTHAAVLDPASGELRVSRLRMPAVEVAGFLEGLGPCTLAVYEAGPTGFGLARAARARGIDMRVAAPGSIPRGSGDRVKTDRRDAIRLVRLLAAGELCFAFVPSVADEQFRDLVRAIEDVRGDLMRARHRLGKFLLRRGERYPAAGRAWTGAHRAWLRGLRFEDACSQATFADYLTAVELLMGRRASLLVALEEQIPASSHAGVIARLRCFRGIDTLSAAGLCAEIGAFARFAKPTLLSGFLGVVPSEHTSDTKRRQGSITKAGPPHARRLLVEAAHHYRHPPRIGEALAARQHGQDPRIIEIAWRAQRRLHARWQHLHHQRRKPSGVVAIACARELVAFCWEAATLD

SEQ ID NO: 324194 - protein, 408 aa, unidentified
MKVLHARCAGLDVHKDLVVACARLQDSAGVQREHRRFETTTKGLLELLAWLVELRCTHVAMEATGVYWKPVWHVLEGHVELVLANAAHIRNVPGRKSDVNDATWIADLLAHGLIRASMVPPTPIQELRDLTRTRRQLVREIGQHTQRVQRVLEDANVKLSSVISDVLGMSGRRILEAIIAGENDPEKLAALGSERLRCSQEQLREALRGRVTAHHRFLLRQHLDTIDHLQRAVDQFDQQIARQLEPFRAQFELLMTIPAVRETAAAVLIAEVGVDMSRFPTAEHLVSWAGLCPRMDESAGKRRSTRLRKGASWLKPVLVQSAWGAARTKRTYTQAQFLRLRARRGPMKAVVAVAATILTAAYYILRDGVSYRELGPDHFVERDRTRIAQRLARQIRELGYEVTIREAA

SEQ ID NO: 324195 - protein, 433 aa, unidentified
MTPQDTSYGLFVGIDWATQAHQVWVMNDHASPVAERSVAHAGVAIGEFIEWLVQLAGGRPEQVGVAIEIPRGALVDTLVERGFHVYALNPKQLDRFRDRHTVAGAKDDRRDAFVLAASLRTDRPAFRQVRLEDPVIIELREFSRLDDDLRDEIARLTNRLRDQLHRFFPQMLELVPAADEPWLWALLELVPMPREVPRLTRRRIEKLLQAHRIRRFDAETVLSTLRTAPLPVAPGTAEAASAHVALLLPRLRLVRAQRGSCEQHIEALLARLEDTHVPPGQNPGHRDVQILRSLIGVGVRVAATMFGEAAQLLAERDYDALRAHTGIAPVTRQSGKRKQVMMRHACNGRLREAVYHWARISVQHDERSAAAYAGYRGRGHTHGRALRGVADRLLRILMAMLKTQTLYDPDHPGRLRPTSADPTARLIAAEVAP

SEQ ID NO: 324196 - protein, 403 aa, unidentified
MNSVGIDISKGRSTIAVMRPFGEVVISPFEVRHTGSELSKLAKQLKSLDGETRVVMEATGNYHASVAKLLHNAGLYVSVINAKLVHGYGNNELRRVKTDRKDAVKLANYGLDRWLTLPRYIPEEDTRLLLKNCYRQYRQYSKVQTVLKNNLISLLDTVFPNANRLFSSPIRGDGSEKWVDFVAEFWHCRCVSEKSERAFTSKYLRWCRKHGYNFREAKAHTIYAEASGHIGVMPKSETTKLLVEQAVAQLRATSTALAALKHEMQSLASVLPEYPVVMDMFGVGPTLGPQLIAEIGDVRRFYSKKALVAYAGLDAPPNDSGDVTGRHKSMSKIGASSLRRTLFLVMSVYLQTAPLDEPVYQFMDRKRAEGKPYRVYMMASANKFLRIYYATVKAYLESLEHTA

SEQ ID NO: 324197 - protein, 405 aa, unidentified
MLIGIDWGRKAHKVVSLKDSGERSEIFEISNDYEGYLDLLKHLQVGEKVMFAIEKRTHRLIDFLIAHGYSGYYVEPNAMKGYRSRYKSTSVKSDELDAFILADLLRTDRRNLSAINLDTPFVRELKELIIDRERYVRDEVRLVNRLKGCLVEYYPEALEFFDNPAGKVALAFWEAYPTLSDAKGLTVEEIKKFLAQHKWYRDQDKVAERIVKIVKGNTIQVLEDVVRVKSRMFLGIVKQLKVVKELIAEYDGEIKHLMEGCENAGQYTSLPGAGLVLGTAIYTLFASGMQFNRLTDIRAYVGTAPVTSQSGQFKGIGFRYGCNRFYRNIFHQFAFCSLRRSQWAKEYYRRKRREGKKHHHALRCLADLWVKVVYAMWHNKELYDEQKHLASIARFWLHNDSHKDG

SEQ ID NO: 324198 - protein, 359 aa, unidentified
MRFYNRPHRFYCGVDLHARTLSLDILDQAGQVVLAVTLPCQPQAFLNAVAPFRDDLVVCCECLFCWYWLADLCAAEKIAFVLGHALYMKAIHGGKTKNDPLDAHKIALLLRGGMIPQAYVYPKGMRETRDLLRRRMYLVHKRAETITHLQNTNSQYNLPPFGQKLGYAANRAALQVAQRFDDPSVKKSVEIDLALLDHLDGLIGDAELYLTRTAKVDDPQAYARLRSVPGVGPVLALVLLYEIHDIRRFAGAGQFLSYARLVRCVRQSGGKKEAADGKRRKIGNAHLRWAFAEAACLLLRASPRAKAWKQRQQKKRGEGKALAILAARLGRAVYHRLRKGEVFDEERFWGSRTHEAARR

SEQ ID NO: 324199 - protein, 403 aa, unidentified
MNSVGIDISKGRSMIAVMRPFGEVVISPFEVRHTDSELSELARQLKSLDGETRVVMEATGNYHTPVAKLLHDAGLYVSVVNAKLVHGYGNNDLRRVKTDKKDSVKLANYGLDRWFTLPRYIPEEDTRLLLKNCYRQYRQYSKVQTVLKNNLISLLDMVFPNVNRLFSSPIRGDGSEKWVDFVAEFWHCRCVSEKSPKAFTNKYQRWCRKHGYNFSEAKAHTIHAEACGHIDVIPKSETTKLLVEQAVAQLRATSAALAALKHEMQALASMLPEYPVVMDMFGVGPTLGPQLMAEIGDVRRFYSKKALVAYAGLDAPPNDSGDVTGRHKSMSKVGASSLRRTLFLVMSVYLQNAPLDESVYQFMDKKRAEGKPYRVYMMASANKFLRIYYATVKAYLESLEHTA

SEQ ID NO: 324200 - protein, 387 aa, unidentified
MTQVDDLSRSVDAFDQDTSLTVVVEMSEASWLVTAMVPGVDRHPLKKLEPDPDALLRLVERWRSEAEKTGRTIERVALAYEAGRDGFWLARWLRVRGIEVHVIHSTSVAVSREHRRAKTDRLDTAMLMRVFLGWLRGERGHCGMVAIPTLEEEDAKRPSRERESLVGEHTRIVNRMKSALARLGIRGFKPKLRKAPERLAALRTPEGSAIPANMLDEFRRDMARLAVVREQIEEIEQARLERLEQAPAARPNAMVHLLARIIGVGIETADMLVREVLSRNLRDRRAVARYAGLTGSPDESGSKRREKGLARAGNARVRRGLIQLAWRLLMFQKDSALARWYRARTEGPKGARKTTMIVALARKLLIALWRMVTTGVVPEGFVLRQIA

SEQ ID NO: 324201 - protein, 328 aa, unidentified
MIYLGIDVSKLKLDCTLLLDPENDKRKSKVVPNSRDGVHDLVRWCAKHGAAADQVHAVLEATGPYHEQAATTLHDGGLTVSVANPANVHDFSRALAMRSKTDALDSVVLARYGVAMKPPAWQPPPAHVRELRALITQLEALSKDRLRTMNRQEKIEASSPSELVERSISDTLSFYGKEIARLEKAIDDHIDRHPDLKEDARLLATIPGVGPKMTRTMLRVMHTHHFKCAEDLAAYLGLVPVQRQSGTSLRGRSRMSKAGPADVRALAYMAGVVASKHNPHVRALYQRLLAAGKSKMSALGACMRKVVHLCFGVLKTRQPYRPDYAFST

SEQ ID NO: 324202 - protein, 343 aa, unidentified
MDYYAGIDVSLKESSICVVDGTGKVVREIKAASEPEALVRYFAELELPVRRIGLEAGPLSQWLHAGLVAAGCDVVLLETRHVKAALSAMTVKTDRKDARGIAQLLRMGWYRPVHAKSGTCKDTRALLVGRKLLQGKLLDVELSIRGILRGYGLKVGEVSRGRFEMRIRELRPGHGTVEMVLGAMLAASTALWNEVTRLHREMLKIARADKICRRLMSTPGVGALVALTYRSAVDDPTRFGKSSTVGAYFGLTPKKYQSGETDRDGGVSKVGDALVRTALFEAAHVMLTRATRFSSLKRWALDVARRRGMKRAKVALARKLGVVLHRMWVDETEFRWGKAATAA

SEQ ID NO: 324203 - protein, 347 aa, unidentified
MADGEIVLGVDTHKDIHVAAIVDEVGRLLCTREFPVSERGCRGMLAWARHYGALRRAGVEGTGSYGYGLARQLEAAGLEVREVNRPNRSLRRLRGKSDPVDAEVAARAVLSGEANAVPKDRDGPVGQLRALMVARRGAVKARTQTSNQIKALLVTCEEAVRSRLEGRRDSQLARCCGRLRSTDGTKTALRSLGRRWLHLDEEARALQAEITRIVCSVAPKLILRPGVGVFSAAQLLITAGDNPGRIRTEAAFAALCGATPVDASSGKTTRKRLSRGGDRSANAALWMIAHVRMVRDPRTRDYAARRVQRGNTRKEILRILKRYIARELFPIVLESLSPTGTNGRCLT

SEQ ID NO: 324204 - protein, 316 aa, unidentified
MDYFAGLDVSVMDTSVCIVDGTGKIVREVKVASEPDALLTVLTSSRYHFKRIGLEAGPLSQWLFSALAEADLPVICVETRHMRAVLKAQINKTDRNDARGIAQMMRVGFYRPVHVKTLRSQKLRMLKVGVIGTVKFEARIKELVESLPDLVALVEPLLVVRQVLREQIAILHRRVLAAVRDDEVCRRLMTVPGVGPIVALTYRATVDVPARFRRSKSVGAVFGLTPARDQSGERDRPGAISRCGDEMMRSTLYEAAQILLVRSSRWSWLKAWAMKIARHRGMKKAIVALARRLTVIMHRIWIDGTEFRWTREATAA

SEQ ID NO: 324205 - protein, 380 aa, unidentified
MERIADAARLVTGGVDTHALTHTTAVVDQVGRVLGSEEFPAGASGHRAALAWMRGHGTLLKVGVEGTGSYGAGLARLLAAEGVEVVEVIRPNRQARRRRGKSDPADAVAAAVATLNGEASGKAKAHDGAVESLRALRVARRGAVKASVQAANQLRDLIVTAPEPLRAKLAPLPTGERVALAARFRPGELSDPGEATRAAMAAIARRHRKLQAEIAQLDAALESLVPRVAPPQFLAKHGVGVQVATTLLTTVGDNPERLASEASLAALCGASPVDASSGKQRRHRLNRGGDRQANSALWRIAFVRMAHDPRTKAYVARRTAEGKTTKEIMRCLKRYIAREVYKTLVVKRELAADAAPLRNHRRAERTPAPSRQQKPHLNAL

SEQ ID NO: 324206 - protein, 354 aa, unidentified
MDKGNRVDFTGQPIYIGMDVHKRNWSISIHTEHVEHKTFSQPPEVEKLVNYLHRTFPGATYHSVYEAGFSGFWIHDRLRAEGIQCMVVNPADVPTKDKERAGKTDPVDCRKLARSLRNGDIKGIYVPSRVKVEDRNLVRTRQSMVRKQTRCKNQIKAILFFYGIVIPEDSHWSKRFINWIETIRMEKTSGDLALKAYLEELKHLRQIIATLNRAILALSRTEEYRFDVLLLKTVPGISTLTAMTLLTELCDISRFSSLDKLASYTGLTPVIRSSGETEHTVGITYRRNAILRAILVEASWVAVRKDPAMMMAFNKFALRMKKTNAIVHIARKLLNRIRYVLKNRQGYVPAVVSL

SEQ ID NO: 324207 - protein, 366 aa, unidentified
MQEISTMQASGSDNFKGPQVTIGLDLGDRTSNYCVLNATGDILLEDKLPTTSQAMKQLFGRMLRSRIAMETSTHSPWVSRLLKELGHEVIVAHAQKVGLIVKSRKKDDRIDARTLARLARIDPQLLSPVQHRSAQAQIHLTEIRARAELVRARTALVNSARGLAKSYGERLRKCGTQQVGRELAMGLSAELRAALEPLLREIESLNEHIKEYDRRIEKMAKDTYPEVKLLKQVKGVGDLIALAYVLTIEDPHRFKKSRDAGCFVGLQPGRRNSGESEPQMHITKEGDRYLRTLLVQGAHYILGPFGEDSDLRRWGKKLAERGGKKAKRRAVVAVARKLAVLLHRLWVSGEMYEPLRNSKKAMSTAA

SEQ ID NO: 324208 - protein, 367 aa, unidentified
MKKVSIAATKQSRNISQQKLTIGLDLGDRNSWYCVVDEAGQIRLEQRVRTSAKVLQEVFGAMPRSRIALEIGTHSPWISRLLSELGHEVIVANARKVRLIGESRKKDDRLDAQTLARLARIDPELLYPVKHRSAKAQADLTLIRARAGLVRARTALVNTARGLAKSYGERLRGCNVRNMNPEKAEGLSPELQRALEPLLAGIEAVSERICEYNERTEQLAQQSYPQTALLKQVKGVGTLIALTYMLTLEDPHRFQKSRDVGRYLGLQPGRRNSGQSEPQMHISKEGDPYLRTLLVQGAQHILGPFGIDCDLRRWGLRLAERGGKSGKKRAIVATARKLAVLLHHLWVSGEAYEPLHNSSRTTVAAAA

SEQ ID NO: 324209 - protein, 364 aa, unidentified
MKIIGCDFHPSFQQIAMVDTESGETTERRLLHADGEAQQFYESLSGPVLVGIETSGNTLWFERLLEKLGHQLRIGDATAIRAAAPRHQRCDPRDARNVLQLLLEKRFPTIWVPTLAERDLRQLLKHRHTLVQMRTRAKNQLQHIAMNQGLQKKRQLWSKAGLEQLKSLALEPWTKRRRDDLLKILEQMDSHIAELSKAVAAEAQHWPQAVLLMSHPGVGPIVALATVLTLGDVSRFARGKHVASYLGLIPREDSSGEHRRLGSITKQGNSFMRFLLVQAGMSAARGDAELGRVYKRLAQRKHHGVAKVAVARRLVLRLYWMLRTNRRYPEVVRMQGSSSHPVAEVKADRLSEHPASRCCTHPGL

SEQ ID NO: 324210 - protein, 482 aa, unidentified
MKKRTIYTNQSQELLRLFEQAANSAKVMCVPIDYAKKDHVVMFCNGYGDIVRKPFSVKNSPEGLEYLVDQVTRSCRHRRIRKEHVFFGGEDANSYAENFANTLRSKGWLVAHVNAHDAKKQRQNLQASTDRLDLMGIATMLLNRRANCSPAQTGIYRNLRTLVRHRKKLVVMKTEVRNRVHAVVDRLFPGFLNEKKSGITPFSNSSLYLMENSFSAQQIRRRKRSTLCNILKRYGTADPEATAAKVQTYAAQVLTIQNQYAATLQISLAHHIKLYRCLLENTEQLEKEIALPLAQSQGAFLTSIKGIGIVLAAGVTAEIGSPFEQKPLNNLTSYSGIIPRVKQSGGPNGQAHMGRVSKRSNHLLKDSVVQSAFHIGRFGPKELVVDYKRRKGAGQHADFGMGRRFLRMAMSLMRTSQIYLPPHLRNDQVRAQERAGYYLAVWPQLREKWNKADALKVAFAKHNPLGQWRHIVQEIYGIKLKL

SEQ ID NO: 324211 - protein, 345 aa, unidentified
MPIVGGLDIHRKQITFDYLDTVTGEVRRGQVGPADRAHLRAWLARFAGRGDVAFAVEGCTGWRYVAEELAAAGVAAHVGEPADTAAARGRKRHAKTDKTDSRHLRQLLAEGRLPECWVPPAQILEYRALLETYHDLRREHTAWVQRIHAVFFHQGAPRLGEGALRTGQGLAALRAAAAAGLSPAGQLQVATALDMLAAVEARMEVLRSQLRDAARHLTGAKVLAARLYGVGPVTALALTCWLAGEGRFSSSRKAVRFTGLDITVWSSDRKGPPGRLSRQGPPMLRWAVYEAGKTHARSSAPDHAYYAAVKDRKNSKRAALSEARKIVRQACHILTELGDDALTVA

SEQ ID NO: 324212 - protein, 403 aa, unidentified
MDGTDAEVFVGVDMAKAEHYAQAITTGGAELFGRPVANDEAVIDAMLDDAGEHGSVAVVIDMTASGAQLLLAVAARRGVPVAYVTGLQMRRAADLYAGSAKTDPRDAWVLADFARRNADRLTWLEVSDELLVRLRVLNGRDVDLATDSNRVINRCRDALVAVSPGLERAVGHRLGQAGVREALQKWPTPSALTEAGKTRVRNVIKKRSPRLAVKVSDEIWLALDAQSVTLPAEATWGEVIADLLDDLERVSTRRAELAKTIEEVFLSHPLGIVLVTLCGFGPRTGARTLAEIGDPNRFETGSRLASYAGLAPTDWRSGKSINGSFQHRGGNHRLKNAMFIAAFVATQFDPDAKAYYQRKRDEGKRHNAAVICVARRRCDLILAMLKNRTPYDPSRHQELPVAA

SEQ ID NO: 324213 - protein, 343 aa, unidentified
MHSTTAPLASIGIDIGKEVFHIVGLETDGKIAFRRKIKRLALVESFKKMAPCVVGMEACLSAHFVSRVLRQLGHEPRIIPAIYVKPFVKGQKNDYNDAEAIAEASLRPNLRSVREKTQDQLDLQACHRVRSRLVSRRTATINQIRAFLIEQGIAVRTGATALRNSLPAILKNRQDEISPRMRGLIAGLYEDWICLDERIETITGEIEKIGEKEANCRRLMSVPGIGPLISTAVVAAIGTGEAFERGRDFGAWLGLVPRQYSTGGRSILGRISKRGSKYLRTLFIQRPHNWERFSFGTWLSNAAPRLHRNKLATALANKLARIAWSILRNEKTFDAPRHEVMAI

SEQ ID NO: 324214 - protein, 360 aa, unidentified
MRTEITKNSFHDQSFYVGIYTHKKSWIVTIMGEQYEHKTMSQNPDPGLLSTYLQRNFPGATYHAVYEAGFSGFESCRKLNELGVNCIVIHPADVPTSQKEKLQKTDKADSRKLARSLRSNEFEAIHVPDPELEADRALVRQRFRLVKDVSRTKNRVKSLLFQFGIPIPDCFTSAQTRHWSKAYINWLKELAINRPSLKQVIDNYIYIGENQRKDLLLVSKQVRNLSLTEAYNKNYNLLLSVPGVGLMTAMTFLVQIGDIGRFERIDDLCNYIGLVPKMYGSGEKMQVGKMIKRGRKELKIMLIEASWEAIRKDPALMLKFNDLSKRMHKNKAIIRIAKKMLSRIRFVLKSQHPYELSVVN

SEQ ID NO: 324215 - protein, 460 aa, unidentified
MPDGGENSSTRRKKQIEGLPVVLHNVAGIDLGSEQHWVCAPVAGGISREVADFGATTAELIRMTKWLQACGVKSVAMESTGVYWIAPHEVLEAAGLEVLLVDTRQLARVPGRDKKTDPTDCEWIQRLHSCGLLRGSFRPREEVCMLRTLVRDKANLVAECGDWLRRMQKSLDQMNVRVHRAVSDIDGVTGMAILRAIAEGERDARKLAKLRDTRCHKSEEEIAEQLSGHWREDHLFSLRQALKMYDAIQQRLADYDREILQRLAAMQREELRQQPPPPVKNPQKAKNMKKRGEEPMREALFRMSGVDLTGIDAIGVETVQVVLSEYGPDLSRFPTEKQFASHVTLVPHKPMSGGKPVRKKRRNSASTRVAAALRMAAVTLRNSATALGAYYRKMARRLGGDVAVFATARKLATLIYRLLRWGQPYVDEGVEAFERRYQETRLKNLKAKVKELGYELVASN

SEQ ID NO: 324216 - protein, 355 aa, unidentified
MQFIGIDLHTNKFTCNYRDEETPADAKKGKRTETYDLNEYGVTKFIETLDNETYVLVEATITTFAFVRLVQPFVKEIIVANTYELKQISQARNNTDKLDACILSRLLKMQIISGERAVSPVYVPPEDIQELRALFTTYRLQKKQTTQIKNRIHSLLKEQLYGFTQEEIFDKKSREKIRNFDCGENLSFQLNLLFDQLEFIEAQIEKLREQIELQVAPHMKEIEILTSMKGVSVFTAAAVIADISSVERFKNSKHFTSYLRSAPSVSNSNTSERARGTNKKGRKLASTLITQSLTHVLNASRRLSRWYENQTQYKKKGLVRTGLRRKVFTEIYKMLVKGEYHYARDENNHRKPDAV

SEQ ID NO: 324217 - protein, 380 aa, unidentified
MEKVCGLDVHKDSVFACILDEQGKKILEKRYRTLTPDLTTLREALIEQGCGSVAMESTGIYRIPVWHVLESDFSLKLANPYFIKQLPGRKSDVKDAQWIAECLQKDLIKGSFVPEGILQQMRQVSRQLRRLSKSITRVKQQIDNQLQRCNIRFSNYVSNQGNNVSLRKIVDALIAGERDPSRLVRPVHGRTKNKHGHQVIAASMEGVINPTDIEMLKGCMEQINLFEKQQAACLNHLEELADAYFAGEISLLCTIPGIQKYSAMCILSEIGNDMSVFGKASHLVGWAGLRPRNDESAGKIQSRKTMHGNKYLRQMLVEVSWSAARSKKTFLGKKYYLLSKRMKSQKALLSITRKILVIIFNVLQTGQPFDANRNLQDVKA

SEQ ID NO: 324218 - protein, 368 aa, unidentified
MDKFSKYVGLDVHQETIAVAVADTAGDVRYVGEIGNTPEVIRKLVTQLKRDGARLSFCYEAGPGGYVLYRQLRDLKQDCQVVAPSLIPRKPGERVKTDRRDSLSLARLHRAGELTAVWVPGEAQEALRDLTRAREDMKHLQRQAKQRLLSFLSRHGHRYSGKSRWTQAHWRWLEGIKFAYPVQQIVLQEYIDTVKACSQRVARLEQEIARAVQDSPVWPVIEALMALRGVSLITAVTVVAELGDLRRFTDAPQLMAYLGLVPSEHSSGKRERRGSITKAGNSHVRRVLVEAAWTYRHPARKTATLQRRAERTTTEIQGIAWEAQKRLCHRYRHLSARGKLPVQVCTAIARELTGFIWAVGQQAEVRRP

SEQ ID NO: 324219 - protein, 410 aa, unidentified
MLFIGDDWAEDHHDVELMDSSGRRLAKARLPEGMAGMTRLHAMIGKALGDDIDVEDAATRVKIGIETDRGPWVQALVAAGYTVYPVNPLQAARYRQRLAVSGAKSDAADAHMLADMVRTDSHQLRPMAGDSAEGEAVKVVTRMHKTLIWERTRAVQRLRHALREYFPAALDAFEDLDAADTLELLAKAPDPASAARLSVNQISAALKRARRRDVAAKATAIQAVLRAEHLGQPVVVTAAYAVSVRALVAVLVTLNEQVKALQGQVEASFGRHPDAEIILSQPGLGPVLGARVLAEFGDDHARYASAKARKNYAATSPLTRASGKKRVVAARFVHNDRLVDALMAQAFSALKASPGARAYYDRQRARGASYNAALRQLANRLVGILHGCLKTGTPYDEATAWSHHLIEAAA

SEQ ID NO: 324220 - protein, 356 aa, unidentified
MIRIAKAKSTAIATLGVDIGKNTFHLVGLDKRGAIVLRERLSRSQIEIRLANMAPCLVGMEACVGANHLGRRVEALGHDVRLMAAKYVRPFCRKQKNDFNDAQAIAEAVTRPTVRCVALKTPAQLDLQALHRVRQRLISQRTGVINQIRALLLERGIAIRQGWHALRAELPRALTMTDRLTPRMLHIVEDLAGDWRRLDERLEAVSTEIAQLAHADQGAMRLMSVPGIGPIISSATVAGIGKGDVFDKGRDFAAWLGLVPKQTSTGGRPILGRISKRGNRYLRQLFVQASRVVLLRPQTWQRYGLKHWIDAAAQRLHYNKLAVALANKLARIAWGVLHSGRTFETHRENGHAPQPT

SEQ ID NO: 324221 - protein, 366 aa, unidentified
MRKVMAGMDLHGNNVMVGIVDDQGARLQHRRLACELPEIIEFLAPYKAELESIAVESTFNWYWLVDGLRAAGFTVVLANPAKIDQYSGIKHADDKNDAYFLAELQRLKILPTGYVYDPELRPVRDLFRRRMSLMRQRTTLFLSAKSLHQRTTGRGLELRRLKAMEPEEAAALYTHPANQLIAQIQKEHIDSLDQSIRQIEKAVLKVALQQPYYQRLQTMPGVGIILGLTISMEVGNIDRFAGPGQFASYCRTVDAKRISNGKTKGDNNQKCGNKYLAWAFVEAAHGARRFDATCRRWYDRKAGKKCTTVATKALACKLAKAAWYVMAKGTEYQAGKIFPGLTEPKAEEISGEQASASKGVGPNPED

SEQ ID NO: 324222 - protein, 341 aa, unidentified
MSDYSYSCGIDLAKNHFSLHAVDQNGKVILHKSVTRSKLLTTITNMPLMRIGVEACGGAHYWARTLNKLGHDARIMAVKYVVPYRTKGKNDLNDAVAICEAVQRPSTRFVPVKSPEQQAILSVHRMREHWVRERTALMNRMRTLLSEFGLIIPVGRSSLMKQIPLMLEDAENELPHLARTVIADAYHHLGELNQRIADTEQVFDSFAKVSANVQRVMKVRGIGPQTATAILASIGNGSQFDKSRDFSAWLGLVPKQYSTGGKPRLGRITKHGDKYLRTLLVHGARTVIANLGDKQDKLSQWCRGVLERRGMNRAIVALAAKNARIIWSLLHNQTEYENYAA

SEQ ID NO: 324223 - protein, 432 aa, unidentified
MHWVAVPADRDPKPVRSFRSFTTDLHQLADWLAACGIQTVAMESTGVYWIPLYEILEQRGFEGVLVNARHVRSVPGRKSDLVDCQWLQQLHQFGLLRGSFRPTAEIVALRSYLRHREQLVKEAASCIQRMQKALVLMNVQLHTVISDLTGVTGMSILREILAGETDPQKLARHRDHRCKASAEEIAASLTGHYQPEHCFALRQTVELYDVYQEKIRACDDEIEAQLRELQAHCEPPATPRPAARTTKRPARNEPRFEIRSPLYVLCGGVDLTQLPGIGPYTALRLLSEIGVDMSRWPSENHFVSWMTLSPNQKISGGKILSSRTQPSANRAAKILRLAVMSSSRSDHALAAFYRRLAARIGKAKAITAAARKLALLVYRMLQDKLPYREQTAADYDARQKRRILRGLRRRAEQFGYQLIDATTGELLGAAVS

SEQ ID NO: 324224 - protein, 423 aa, unidentified
MMKLKYSICCGLDVHKNVIVATIVITNKDGISEYKQKSFSTINSDIQKFHNWLIENHCYHVCMESTGKYWIPIFNYLETDIDVCLTHPKYVKAIKGKKTDKKDSKWIADLYKFDLVRCSFIPPKDFRQLRELARYRFKLVCMKSSEKNRIQNCMTVSNVGIASVLSDPFGRTATEIMSYLLEHTADSMDEKAVRKLIKKGAKAKSDEIIEAIRGYNIEADQAKKLELARGHLEYLDDMITQTEVELYVRIKPYYEFVEFVSTMPGMTELSSTIVLAETGVDMNIFDDAKHLCSWCGLSPANNESAGKKKSVRISKAGDYLKPMMVQCALAAVKNKKQPYFAIKYGRIKKRRGHKKAIIAIARMMMVCIYHMVSEKKPFSPTDYEELMDPRNHVERVVLNEDNVFAYLESLGYDSSKLVKRNDN

SEQ ID NO: 324225 - protein, 342 aa, unidentified
MTSIGIDTHKGTLAACAIDLVGAVLAERTVGNDPAGHRELAHWIRALDPGARIGIEGSGSYGAAVARFLLGDGLAVWEVPPQLSRRERPLTRRAGKSDPGDALAIARVTARERDLPPVRLPDRTRELGLLLEAREDAVAEATRIRNRLHADLVVLCPGYEATVPNLRRSGAWATIGRRLRRLPGVQAELARARLAELRRLGRVIAALERRLAALVAGHPLLRLRGVAGLTAARLIAETGDIRRFRSPDAFAMFAGVAPVPASSGQLQRVRLNRGGNRQLNRAFWTIAFVQGHAHPPAIAYLARQRAAGHTYREALRALKRRLVRTVFRLLRDGAPLLAGARN

SEQ ID NO: 324226 - protein, 400 aa, unidentified
MSKYSVGLDVSAKEIHCCISLIDPVQRVVVKATRMVANTVKGFKELDTWIVRHHKLKELPVAICMEATGIYYENCALFLHKAGHTVSVILPNKAKKYLQASGIKSKNDRADARGLAQMGAEKHLDIWSPMGEYFYQLRQLTRHHEDLQQMKNVTANRLHAAQRGMYTNREVVKQLKKQIRLIDKQIDECVSAMEKHIRSNDVVKEKVENICKLKGIGLLTVATVLAETNGFELFRNARQLASFAGYDIVENQSGTRVGKTRMSKKGNSHIRRALFMPALVTVTHKTKPFFDLYQRTLAKHGIKMKSYVAVQKKLLTTIYAIWKRNEPFDENHAAKASAKEQESALPLRAEPAAGEALPNKEIKVVPTTRLALHKVSIPDKKPMYASSGMTNIGQMDGSVK

SEQ ID NO: 324227 - protein, 345 aa, unidentified
MSQYKRIAIDLSKAVFTLHGIDQQDRPVLRTNLRRAQMIPFFAKLATTEIAMEACGGAHYWARELMALGHRVRLIPPQYVKPYVKRGKNDRNDAEAICEAAGRPGMQFVPVKSVAQQAQGMVLKVRETLVAQRTLLVNTLRGHAAEFGVIAGKGISKIGPLLSAIEEETAIPPEAKEMAVLLGQQIADLDNKIKAIEVKLSAAHKANEVSQRLATIPGVGPVTALTLAIEIDPAAFESGRHLAAWAGLTPKEHSTGGKQRLSGISRVGNERLRALLVTGATSVIKAATKPGSKQMTDWLRAMLLRKPRKVVAVALANKMARVAWALMTRGEVYRRPVITVRAVVA

SEQ ID NO: 324228 - protein, 399 aa, unidentified
MTALRRVVIGADTHLDTNHLAVLTDTGKPLADDEFPTSPAGYAAAMRWAQSFGVIAIAGVEGTSSYGAGLTRVLLAAGIEVAEVSRPDRAARRRRGKSDPLDAYAAARAALAGDRLAVPKDEHTTALRALLSARRSAVKAHTAATNQLHALLVTAPAELRERYRRHHITALVAALAQCRPATQGDPTSAAVLTAAKALAQRVKFLEQQRQDLTAQLDALVGQINPALRAAYGVGPHTAAQLLVTAGTNPHRLRSEASFAALCGAAPVPASSGTITRHRLSRGGDRAANNALYRIALVRMSSHSQTRDYVERQVTKGRTKKEILRLLKRAIAREVFRLLTRPGPVDDYRDLRAARQAKNLTLAAVAQHFGVPIITISRLERGHQRNDTLANHYRQWLTAA

SEQ ID NO: 324229 - protein, 339 aa, unidentified
MKEVTTIGLDLAKNVFQVHGVDHAGTVVVRRALRRSQVLAWFAKLPPCLVGMEACATAHYWGRELHRLGHQVRLIPPAYAKAYVRRNKNDAADAAAICEAVSRPAMRFVTIKTEQQQAVAGIHRVRDLLIKQRTMLRNQLRGLLAEFGVVAAQGRRGLNELLAILSDPEEQRVPSPLREGLMAIMETWRGIERKLEEIDRQMVAAGRADATYRHLITAPGYGPILSSAMAALVIDPGAFKRGCDFAASLGLVPRQDGTGGKVRLGSISKRGNGYLRRLLVNGATSLIKCQRARQDPWVAKLLVSKPRKVVAVALANKLARIGWALMTRHEDFRGRPAAA

SEQ ID NO: 324230 - protein, 355 aa, unidentified
MKRVYQHVAFDAHCSFVEAAVLGRGDQVQRARLPTTIPALTEFLESIPRPRKLTFEEGALAGWLHRNLRDLVDELVVCDPRRNQLIAKDSDKDDPIDALKLAQLYRGGYLRPVHHPETLDQEIAKQHVVLYHDRVRQRVREANRIGALFRQHGVFVRERAFADPEHRGPLLSRLPPHRLLRSDMELLWRGYDMVADQVLEMRARLRHLARSIEPVCRMEEVPGLSWIRAMTFYVFLDTPWRFRNKSALWRYLGIGLERRHSGQGPTYVKVSQQSNRVLRNVILGAAETTIRRRNNPYAIAYERWTVQEGMLPRNALRNVARALAGTLWGMWKSGSAYRAELVLAGAPGEKSRTSS

SEQ ID NO: 324231 - protein, 344 aa, unidentified
MLKSNIIGIDLAKNVFQVCVISKDGELISNKVASRQKLKEILAKSQPAVVGIEGCGSSHYWGRFAEQFDHDVRIISPKKVKAFLQGQKTDANDAIAIANAAMQIGLKYSKPKNEEQQTLQSLETSRVYLSRNITSLGNHIRAMLYEYGIVSAKGAAGLRKVVMETLDEQHPLPANLLSSLHHLWAHYQSLKEEFKKQEKTKNALVRQLEPCKSLMALEGVAEVCAGMLYSSLGNGKQFKNGREASAFVGLTPKQHSSGGKVFMMGIDKKGGIKELRAALYQGAISIVTNLPEEPKTVKQEWLIQLLQRVGIKRTCIALANKTVRTAWAMLRYDSEYEKQLLIKV

SEQ ID NO: 324232 - protein, 439 aa, unidentified
METMSKSIAPEPEWAAFVAIDWADQKHVWALAEGGSQRRERGELAQTPESVEVWAMDLYRRFGGRPIALCLERKQGALVAMLAKYPHLVLYPVHPKTAAQYRETFCPSGAKSDEGDALLLLDLLLHHRQQLRQLLPDTVETRLLQSLVETRRRLVNERTRQSNRLTACLKIYFPQVLSWFDDITSPLVGAVLERWPTLQALRRVHPGTLRKFFHQQNCRDEERIRERIEGIREAMVAVEDEAILEGQSRKGQILVAVIKTLREQIAILDKRIAEVVATHPEAKLFGSLPGVGPVLLPRLIVAFGTQRERFESAEEVARYSGIASRFPVARPKLSACVSLAPQFLRQTFHEWADHSRGKSEWARIFYDVHREQGNDHHATLRSLGFKWIRVAYRCWKNRQAYDEQIHIRSLQRRNSPLAGAFAPATPKEWKPVAGFQKLS

SEQ ID NO: 324233 - protein, 457 aa, unidentified
MPQAKRSRKSRDLAKVHPAAAAIDIGATIHVAAVGPDRDNEPVRTFRTFTDDLHRLADWFAGCGIKTVVMESTGVYWIPIFEILEQRGFEVAVVNARDAKHVPGRKTDVSDAQWLQRLHEYGLLRASFRPQAEIAGLRAYLRQRERLLDYAAAHIQHMQKALTQMNLQLHHVVSDITGVTGMSIIRAIVEGERDPAILASHRERGCHATMETMCQALVGNYREEHVFALTQALELYDVYQTKVTACDKQIQAILTRLKQTAPPPANKLLPVRQRTRQPNAPAFDARAALHAILGVDLTQIDGLGPYLALKLVGECGTNLAAWPSAKHFTSWLALAPHNKISGGKVLSSKTRRTSNRAASLLRLAAGTVGRTDTALGAFYRRLSARVGKAKAITATARKIAVLFYNTLRHGMAYVDPGATYYEDRYKQRVLTNLQRRAKSLGFVLREADQDTTQVGVS

SEQ ID NO: 324234 - protein, 452 aa, unidentified
MAKKKDKTRTMRVHHLDAAGIDIGSNEHWVAVPADRAEKSVMPFGTFTSDLKRLADWLKECGIRTVAMESTGVYWIPVYELLEERGFEVLLVNAAHARNVPGRKSDVLDCQWIQELHTFGLLRASFRPGPRIAELRAYTRHRQTLVEEGARQIQRMQKALDQMNVQLHHVIADITGKTGMTVVRHIVAGNHDPEMLAQYRDPRCRASKEVVIEALRGHYKTEHLFTLQQALSLYDIFSTYIKECDDRIETVLREIAAEFPETEAPPKRAQFPARGNQLAIDVRNPLQRILGGVDVQSLVGIGPLTALNLLSETGHDMTRWPTDKHFTSWLNFAPGTKISGGRRLSSRRRPGKNRAGLILRQAASAIGRTQTALGAFYRRLAARRGKGIAIVATARKLACAYYRLLRHGGEYVERGTDAAEREYQQRRITAMKRQAKLLGFDLTPMQPVAQVT

SEQ ID NO: 324235 - protein, 346 aa, unidentified
MDHYAGIDVSLECSSVCVVGSSGKIVREAKVASEPEALIGWFGSLGFGLARIGLEAGPLSQWLYAAMKQAGLAVELLETRHVSNAFKAMPVKSDRNDARNIAQLMRLGWFRPVHCKSMDAQEVRAMLTARKLVQSKLLDVENSLRGILRGFGLKVGKTTRTSFAHRIEELVQGHPNLQEIGKALLRARAVLLAEFNGFEKRVRTMSRLHEKARLLMSTPSVGPIVSLTFACAIDDPSRFTSSKQAGPHFGLTPKKHQSGETDYSGRISKLGDASVREALYEAAHIMLTKPIKGCSELKSWAMRIARRAGMNKAKVALARKLAVIMLRMLKDNTPFNPAAKATAATA

SEQ ID NO: 324236 - protein, 354 aa, unidentified
MIFKGHKLTIGLDLGDRWSFYCVMDEAGQIIVEQKLATTPEAMKQTFGKIPRSLIALETGTHSPWVSRLLRELGHEVLVAHAQKVQLISKSNRKDDRHDARTLARLARIDPELLGPVRHRSAKAQIHLTVIRARAELVSARTALVNAARGLAKSYGERLRKCGTQQVSRELAAELSVELREVLEPLLQEVESLNERIKEYDARMEKIAKESYPQVELLKQVKGVGTQIALTFVLTLEDPHRFPKSREVGCFLGLRPGRRDSGESQPQMHISKEGDPYLRTMLVQGAHYILGPFGQDSDLRRWGLKLAARGGKNAKKRAVIAVARKLAVLLHRLWVGGEVYEPLRNSHKAMRAVA

SEQ ID NO: 324237 - protein, 383 aa, unidentified
MKAVCGLDVHKDSVYLCILSEFGELIEKVFGVLTFQLEEMRDLMHHHHVVEVSMESTSVYWIPIWRVLSPHFKLNLANPYFIKQLPGRKSDVKDAQWIAECTMKELIRGSFVPPETIQQLRQYDRRIFDLNEEIVRKLSKLDAVLQRCNIRLSNYVSNVDSKSYKAVVRAISQGITAPEELVKLIHGRIINHHGIDVITASLKGVVSLAEIDMISQLRDELDMAEAHKEKCQARMLEICEREIPEELKRLQTIPGIKERAATSLIAEIGTDMNKFETANHLASWSGLKPRNDESNKKIKSRSITHGNVYLRKTIIECAWAASRTKDCFFSRFSYHQTQVRKKNKMKVLVAVARKMLIAVWHVLHDNTIYIDFTTDRKTSRTKG

SEQ ID NO: 324238 - protein, 363 aa, unidentified
MSVQYIGMDVDKQKIVLARLSSGWDTRTVDHVIANTPSAVKKYFASLLGAAEVHATYEAGCYGFGLYRQLSAMGVTVVLAAPGLIPRKPADRIKTHRRDARSLALALRAGQLTGIYIPTEQDESVRDYLRMYESLRGDLRICKQRVLQFLLRRGISYDGGGPWTVKHRHWLSALQFPQARDRQTLDMYLSQMQELEAKCEEVAAEVESIAAQDCYRQQTKRLTAFKGIKTLIALSFVTDIGDFRRFSTARQFMAYLGLVPSERSSGNKRRQGSITKAGNSHLRRLLVEAAWHYRSYHPSSRDLTERRRGVDPAILTYANRAGRRLNRKYLHLLLRGKRSQVAVTAISRELAGFLWGAMTDQVT

SEQ ID NO: 324239 - protein, 391 aa, unidentified
MILVGIDVAKDKHDCFIMTSEGEVLAKSFTIQNAMEGFNMLYQRILSVTDSPDEVKIGLEATGHYSYNILGYLLDKGFTPFVINPLHTNLYRKSLTLRKTKTDKVDAHNIASMLMSDVNLKPYSDTLYSNEELKSLTRYRFDKVKQRAKLKTSISRLVTILFPELEKLVPTLHIKSVYTLLREFPSAEAIANAHLRKLSNLLHASSKGRYTKETAISFRIAAKNSIGSYMPAKSLELKHTIKLIEELTTEIGEIEKEIKNIMLKINSPILSIPGIGYSLAAQIISEIGDFKNFDSPDKILAFAGLSPSTYQSGNLYSSNSKMEKRGSRYLRYALFNAAMFVCHWEPTFASYLAKKRSEGKHYYVAISHAVKKLVRIIFHLEKTGEKYTAVI

SEQ ID NO: 324240 - protein, 359 aa, unidentified
MIYTGIDYHKRYSVACTLDAQGQKLHEARIDGNVPAAFAAYFKKLGTPSEVVIEACWNWGVLYDLLEGTAGVAKVVLSHPAKNRIIADAQIKNDRIDAKALATLLRGDFVARVHVPSRDVRQPKNIVRQRLWLARVRTMIRNRIHCVIDRHPLLERPAVKDIFSNQGKAWMKRAPLPPADRTLLDDDLAIHALLQTQVDALEKIIVADNAANPLAERLQTLPGVGKILAPVLALEIDQIARFPTADKLCAYAGLVPSTHASGGKIAHGRMLPFCNRWLKWAFIEAAWVAVGCSDYFGTFYRKQRLRGKGANDAITIVARRMAIIAWKMLAHQRDYSPQAPDATPAPAMKPLSPAALTKD

SEQ ID NO: 324241 - protein, 416 aa, unidentified
MALIRWVGRAIGLDVHRDFCVVAICEEGVVRSAGRVPSTPEGLRALAASLLPSDRVALEVTGSCWEVARILEPFVQRVIVVSPDDTGISSARAKTDKLDARTLAGLLWKGELDAVWMPDERCQVLRRRLARREQLMRGRTRAKNEIQAVLARRLQAKPGFADLFGVTGRRWLADLELPLEERESVDAGLRQIAFLDAEIAAVDKLIARQALDWPEIRRLMTVSGVNLICAASFLAAIGEPSRFLTSRKLVAYLGLDPKVRQSGEAPARSGRISKRGSANARWALVEAAWSVVKQPGPLRAFYERTRARRGHGRAIVATARKLTVLFWCMLTRGEDYAHQRPALTKKKLRQLELTSGAPARSKEAAGIWSTNRAILHAERALAMQAEVSYKRMVADQQAGAPARKVGASATPERAST

SEQ ID NO: 324242 - protein, 412 aa, unidentified
MKTIMDFAVFVGLDWADKKHDVCIQQKGQKKRHFQEIVHSPESIDHWINSLHKRYKGKIAIAIELNKGPIVFALQKYHFVTIFPIHAATLAKYRETFTASGAKSDPRDAEIALDLLLNYPQKFKPLVRQGAAIRKLEVLVEKRRSLVDDKRRFVNQLISALKHYYPQPLDWFSHRNTELFCDFIIRWPTLQCFKRAREQTIRKFFQSYGGQSTVKLNYRLEQRKKVMYLTEDSAVIEPYQLLAKSLASLVNTATIAIREFDKQIASEFHEMADSDFFQSLPGAGLCLGPRLLVAFGEDRNRFGSAAQLQAYMGIAPVTVSSGQKTWIHWRWHCAKFVRQTIIEWAAKTVQSSYWASIYYDKHRAKGNSHQAAVRALAYKWLRIIFKCWKDRKPYDETKYLQALRRRKSPLLS

SEQ ID NO: 324243 - protein, 360 aa, unidentified
MTIVAHAHPFVIGVDTHARSHTIAILVSATGEPIATEQFPSTAAGMDRAIAWVARRTAGDLAALWVIEGVATYGARLAAAVDHAGYEVVEAARMDARHHRGTGKSDSLDARRVAAAVLSLEPAQLRRPRSDDGARAALRVLITAREHMTTERTASINALTALLRVTDLGIDARKPLTARQVSEVAHWRARAEALAVATARTEAVRLAKRVRELDHELSANQTQMTCLIRDRKTAVLLDKTGIGPITAAVVLAAWSHAGRVRSEAAFAALAGVNPIPASSGNTTRHRLNRGGDRRLNRALHMAVITRMTHDPRTRAYVERRRAEGRTTKEIRRCLKRYLARHLYRTLNSLHAAPEPGPKTP

SEQ ID NO: 324244 - protein, 370 aa, unidentified
MKQYSEAFVGFDTAKKKHAVAIADVGREGEIRYLGEIDSSSAAVERMIRKLAGRYEELHFCYEAGPTGYGLYRQVRGLGHPCTVVAPSLIPKKSGERIKTNRRDAVTLARLFRAGELTSVWVPDTVHEAVRDLVRAREAASQDLRRKRQQLLSFVLRHGRIFSGRQHWSRAHLRWLAQQKFDHSAQQIVFQDAVDAIDDAATRLRRLDEQVVAIVPSWSMAPVVAAYQAVRGVSFVVAVTFVAEIGDLRRFDNPRQLMAFLGLVPSERSTGERVRRAGPTLAGNKRARRVLIEGAWSYRYPTRVSQTLQARLEGLPKAVRAIAWKAQIRLCARYRRLNAAGKKLPVVIAAIAREMAAFLWAIARHVAPAP

SEQ ID NO: 324245 - protein, 449 aa, unidentified
MSRPQVIDDEEHERAHERVAAIDVAKDTGMVCTRLPHPSRPGARRSTVWTVKARIRAIRELGRQLMQDGIEIVTLESTSDYWRIWFFVLEAAGLAVQLVNASQAKNLPGRPKTDKLDAIWLARLTEMGLLRASFVPPRAIRDLRDYTRARARLVQERTRCWQRLEKLLEGALVKLSAVASKLTTLSAQDMIKAMIAGERDPHKLAGLARTRMKARHDDLVEALDGMFDDHHGELAGLLLDQIAFLDARISQLTARAAGLTAAMPAAWGVDADGSAGPDAGAGPDAQVLPAVARLAEIPGMSEGLARSVIAEIGLDMSRFATAAHLVSWAGLCPSARQSGTRTKGGKKGQGDTWLRSCLGQAAIGASRTETFLGERYHRIARRRGKAKAQVAIARSILIIIWHLLADRTARYTDLGHGYYQARTDIDRKIRNHVRQLQALGLDVTITRAA

SEQ ID NO: 324246 - protein, 345 aa, unidentified
MEIRTIGIDLGKTVFHLVGVNARGEVVVRKKCSRLQLLRFTSNLVECLIGMEACAGSHFLGRALREQGHDVRLMPAQYVKPYVKTNKNDYIDAEAIAEAVTRPSMRFVPIKTDDQLDLQSLHRVRERWVGRRTAVINQIRGLLLERGITVSRGRRHIEESLPMILEDPDSKLSGALRLLLHELRQEMQYLHGQIEQSDKLIVRIACELEACKRLLAIPGIGPVIATATVAAIGNGAAFKKGRGFAAWLGVVPGEHSTGGKQNLTETSRRGNKYLRKLFVQGAHAVLRNSTKQAPGLSTWLDRLTSRKRIQVTAVALANKMARMVWAVLYKGEAYRPPLSAQTVAA

SEQ ID NO: 324247 - protein, 418 aa, unidentified
MKKHSNSGKKSEPTTKRAKSRGPVQRDTKEVLAELVGKLKEKLDPKKAAATSAGEKHQSGERRPNLDRLTVGVDLGDQWSNYCILDLEGETLAEGQLRTTQEDFATFFQGLNAARVVIEVGTHSAWVQEVIRGCGHEVLVANPRLMEGSKRRKRKNDRIDANKLARLGRVDPESLYPIQHRSREVRQDLVMLRARDALVAARTEIINTTRGLVKSMGTRLPKCSSRSFAQKGEETVPVEMREALLPLVRLAAALSADIKEYDKKIESLGREKYGHTTLLRQVKGVGPITARAYVLTLENPQRFAKSRDVGPYLGLVPKQEDSGESQPQLGISKAGDTMVRKLLVGSAQYILGPFGPDTDLRRYGLRLCERGGKNAKKRAAVAVARKLAVLLHRLWVSGEVYEPLRPGMSVTMTPAAAA

SEQ ID NO: 324248 - protein, 339 aa, unidentified
MNRIAVGVDIAKRVFQLHWVQPATGEIVALQLKREKFLEHFANRSSCVIGMEACGGSQHWARSLQKLGHEVKLLSARMVKPFVGGNKNDAADARGIWTAMQQPGIKGVAVKSEQQQGVLALHRMRQQLVKFRTAQINGLRGLLTEYGEVMPQGRAGIKKDIPAALQRIAERLPAVLIDTLREQYARLGELDQQILQIERRLRQWHHQDVDSQRIAEIPGVGLLSATAAVAMMGDAKAFKSGREFAAWLGLVPRQSGTGGRVRLLGISKRGDTYLRTLLIHGARAVLTHSKSPPEWLTELVKRRPQNVAVVAMANKMARTIWALTAHERTYQKGYVSQRA

SEQ ID NO: 324249 - protein, 297 aa, unidentified
MTRRCFGLDVHREFAQVAIWQDGVVRQAGQIVATPEGLRLFADSLAPSDEVAIEATCNTHAIAKLLEGRVARVVVSNPQKTRAIAEAKVKTDKVDAEVLAQLSAADYLPGVWLADDHTHALRRQVARRAHIVRQRTRLKNQVHSILHRNLVPRCPAADLFGHKGRAWLAEQPLPPDEHRAVGALLRQLDFHAEELRVIDVGLGRAGLASAEVKRLMTIPGVDATVALSIVAAVGDFGRFPSPEKLVSYLGLNPRVRQSGGQPPRTGASPSRAAPTRAGCSSRPPGRRPRRRPAARVL

SEQ ID NO: 324250 - protein, 410 aa, unidentified
MEVIVERAAALDVHKAQVTACVRTPAGGQGGAQEVAEFRTTVHGLLTLRDWLHAQQVSQVAMEATGVYWKPVWAILEDDFELLLVNARHVKQVPGRKTDVCDAAWLCQLLEAGLLRASFVPPKPIRALRNLTRYRKAQIRERSREANRLHKVLEDTGIKLDCVATDILGVSGRAMLDALVAGTTDPELLADLARGRLRAKLPALREALEGRFDEQHALLVGAILAHLDFLDEQIELLCGAIGEALAPLAAAVELLCSIPGVQRRSAENLLAEIGLEMSRFPSAGHLASWAGQCPGNHESAGKRRSGRTRKGSKWLNETLKEAALAATRSNGSYLQALYKRLRPRLGHGRALGAVQHSMICACWHMLSTGEIYRDPGGDYFARRDPERQTKRLVRQLEALGHTVILEAAAA

SEQ ID NO: 324251 - protein, 367 aa, unidentified
MKKTSTAVAKQSRNISRQKLTIGLDLGDRNSWYCVVDEGGRIQLEQRVRTTAKALQEVFGAMPHSRIALEIGTHSPWISRLLSELGHEVIVANARKVRLIGESRKKDDRLDAQTLARLARIDPELLYPVKHRSAQAQADLMMIRARAGLVRARTGLVNTARGLAKSYGERLRGCNVRNMDPEKAEGLSPELQRALEPLLAMIEELSERIVEYNDRIEALAQASYPQVELLKQIKGVGTLIALTFLLTLEDPHRFHKSRDVGGYLGLQPGRRNSGESEPQLHISKEGDPYLRTLLVQGAQHILGPFGIDCDLRRWGLKLAERGGRNGKKRAIVATARKLAVLLHHLWVSGEVYEPLHNSNRMAVAAAA

SEQ ID NO: 324252 - protein, 341 aa, unidentified
MNAIMIGLDLAKNVFQVHGVDAAGQVVLRRQLRRAQVERFFATLAPCRIGMEACGGAHHWGRVLLRLGHEVRLMPASYVRPYVKRNKTDGRDAEAICEAMQRPSMRFVPVKSVEQQAVLVVHRTRALMVRQRTMAANGLRAACAEFGVVAAQGRQGLHRLMQELAANDGPLPAEARWALSLLARQWQALDAAIGTLEARIVRLARSDEAARRLMEIPGVGPLGASLITATVADARVFRSGRNFAAWLGLTPRQHASAGKQRSGSISKQGDRTIRSLLILGATARLRQERMRGVKDAWLAELLARRPAKVVAVALAAKAARIIWALLANNQHYRAPVLTQAR

SEQ ID NO: 324253 - protein, 354 aa, unidentified
MAEALKNSIAFVGIDIGKNSFHVVGLDECGAIVLRQKWSRGQVEARLANMPPCLIGMEACVGAHHLSRGLQKLGHDARLMPARYVRPYSKGQKNDFRDAEAIAEAVQRPTMKFVATKTADQLDLQAMHRVRERLVSQRTGIINQIRAFLLERGVAVRQGLRFLRSELPGILARPSDILSPRMVRIIEDLAGDWHRLDERIEGLSSEIEAIARRDSSCERLMSVPGIGPIISSAMIAAIGAGDVFSKGRDFAAWLGLVPKQISTGDRTVLGKISKRGNRYLRVLFVQAAWVVLIRPKSWERHGLKSWIEAAKKRLHRNVLAIALANKLARIAWSVLAHGRSFEASKLAEVAAKSA

SEQ ID NO: 324254 - protein, 482 aa, unidentified
MKHSHQDKSQKASPHKEQNSWQQMNRKQRREMTRKMHAEDLSLEVVHPHAAGIDIGNEVHYVAVPPDRDNKSVRRFGCTTAELKEMAAWLKQCGIRTVAMQSTGVYWIAVYDILEAAGLEVYLVNARETKNLPGRKSDVQESQWLMKLHTYGLLRNSFRPPQEIRTMRTYWRQRNDLIRSAARHVQRMQKALTQMNIQLANVLSEVSGVTGQAIIQAILAGERDPRKLAAFRDKRVKASEEEIARSLEGNWQEDLLFMLKQEQDGYEFCQKQMNECDERLQQYLRRREDRSKGAELPAENRKERLRKKKTNKPRFDLRTELFRMTGTDLTQIDAIDVRTAATVISEAGWDMSKWPTEHHFVSWLRLCPDNRISGDKVIGKGRLPINNRLSVALKIAASTLRQSNTYLGAQFRRLKTRLGPPIAIKAMAAKLARLVYRMLRYGMRFIDRGAQFYEAQHRWRQINSLKRKAANFGLKIIDAPAA

SEQ ID NO: 324255 - protein, 311 aa, unidentified
MNNTIGIDISKDTLDAHRLADGQHKQFLNGKTGHAQLVKWIGKQSDPLIIFEATGAYHRQLERVLCTHIIPFVKVNPKQARRFAQASGKLAKTDRVDCEMLAKMGAALQLMPKPFTAENLYDLRELLSARRALIKDRTAAKARKATVINALIKQQLEKRLRQIKNDIAKIDALMLDVAREDQYMSERLDILFSIPGIGVITALMILVDMPEIGALNNKQVASLAGLAPMSQSSGKWIGKARIQGGRPNLRNAIFMPALVAIRHNADLKTKYDRLVTAGKEKKVAITAVMRKLLVLANALLRDNRKWAEKAA

SEQ ID NO: 324256 - protein, 402 aa, unidentified
MEKYAGIDIAKKVHWMCVTDGEGRFLMEPRPYENDSEGLSRMVADLDLYGGDVAVGMESTGCYWRSCYKVLAEGGYPVAVINPVKTCAERKQGNLGRAKTDRVDCLVVADTLRKQGIAPTPSPDADAAQLRDLCRFRRTISESLSRAKIQIVALLDQVWPEYPRLFGSLFCGASLAVLRRFAVGDMDADGLASDLLSASRNRYGAAKAVEVLDSLRETCGVPATDALLLQLRLLLDQLDFCASQLSEVDAEADALLDAVAPTLPTVPGVGRATAAQIAAEVGDVTRFRDAKALVAYAGLDPTRRQSGGFDSDRNRISKRGSAHLRRSLYIAAQASLRTDCEFRDFYDRLRGRGYSHRYAVCAVARKMLCVVWALMRSGEEYSRDRHTARGKAPEGASPVDAG

SEQ ID NO: 324257 - protein, 482 aa, unidentified
MKHSHQDKSQKASPHKEQNSWQHMNRKQRREMARKLYVGDLSLEVVHPHAAGIDIGNQAHYVAVPPDHDNKSVRRFGCTTAELKDMAAWLKHCQIRTVAMQSTGVYWIAVYDILEAAGLEVYLVNARETKNLPGRKSDVQESQWLMKLHTYGLLRNSFRPPQEIRTMRTYWRQRNDLIRSAARHVQRMQKALTQMNIQLANVLSEVSGVTGQAIIQAILTGERDPRKLAAFRDKRVKASEEEIARSLEGNWQEDLLFMLKQEQDGYEFCQKQMSECDERLQQYLRQKEDRSKGAELPEENRKERLRKKKTNKPRFDLRTELFRMTGTDLTQIDAIDVRTAATVISEAGWDMSKWPTEHHFVSWLRLCPDNRVSGDRVIGKGRLPINNRLTVALKIAASTLRQSNTYLGAQFRRLKTRLGPPIAIKAMAAKLARLVYRMLRYGMRFIDRGAEFYEAQHRWRQINSLKRKAAAFGFKIVDAPAA

SEQ ID NO: 324258 - protein, 425 aa, unidentified
MNSNINHKINQVSEKTLVIGIDIAKQKHFACAVDDRGRVLEKSFPFYQSEDGFEQLVKKIESLQSCHQKSEVIVGFEPTGHYWMNLAAYLVEQDIRYVMVNPMHVNRTKELDDNLQTKNDKKDARVIASLIRDGRFTFSRILTGVEAELRNGASLRSKLQEDITAIKNRMIRWIDLYFPEFQHLFKSFGKNACAVLEMTPLPMDFDGKSEEELIQLYKNVEGLKCLSVSKIQKLKVLTTKSIGLKEGLEMARFEIKTLLTQFKALSKQLEILSLRLTELAQQLIDYEYILSIPGLGENTAVELLSETGSLSQYEHPRQLIKLAGLTLRENSSGKHKGQKKISKRGRRKLRAILYRVILPLIQHNIAFKSLYQYYTTRTVNPLKKKEAMVVLSGKLLKILYALCVKHVHFNASLMMTDLHCLQEAA

SEQ ID NO: 324259 - protein, 424 aa, unidentified
MKKSQQSKIDQEEMIYERCAGIDVHKKMITVCLRIGRKTQVKEFGTLTCELREMAEWLKENDVQMTAMESSGSYWKPLYNVFEQEEIPVMLVNAGHMKSVPGRKTDVKDAEWIAKLLSQGLLKASFIPDREQRELRELTRFRKSQIEERARTLNRLQKMLEGANIKLSSWVSDIDGKSATRLLKLVIGKEEFTVQEIDKLRHSNMKASSDELFKSLEGIMTPIQRELFTHIMKVIKEQTAQIEKTESLILNYMTQAYHDAADAIEAIPGIGQISAQQIIAEIGIDMSRFPDAAHLCNWAGICPGNNESAGVRKSGKTNYANKTLKSTLTQCAQSAKKNKDSFFHAQYHRLVVRRGKNRATLAVAHSLLIAIYHVLSGKAFCDLGAAYYNRFNKEKKINTYVKQLSKLGVSVPDDVIRVALEQTA

SEQ ID NO: 324260 - protein, 364 aa, unidentified
MKLVKDIANRIIRYIGMDVHKDSTTAVVLDAQGKLVMQVTLRTEGNVLVDFLRGLRGTLHLTFEEGTYSAWLYTLLAPCVEKLIVCNPRQNALLKQGNKSDRIDARKLAELLRLGSLTAVYHGSPGLRTLKELAASYATLVSDGTRVMNRLKALYRGRGIRCGGTQVYSPRHRTHWLEQLVEPGAQQRAKLLYQELDLLLQLRPQARRALLAESRKHPAQKILRTIPGLGPVRVALLLAWLQTPHRFRNKRKLWGYGGLGLLLRGSAQYRLQQGELVPSPQGVSVRGLNPAHNARLKDIFKGAALAACQRPGPLREAYERCLREGMDEHLARLTIARKIATLVLTLWKRGERFDAQRLRREQAA

SEQ ID NO: 324261 - protein, 371 aa, unidentified
MKSILFIGMDVHKNTFSLCCYCKESGEILREVKCAAEAKLIKKFIDGIKKDLNEDLEFKCGYEAGCLGFSLYKELKALNIECDILAPTTMQSSSKNKVVKTDKMDARNIAINLANNTYKAVHIPDDEDFKVKEYIRMMNNFKKELKKIKQQILAYILRLGFNYEGKSKWTLAHMKWLRNLEMEGIEKEILNEYLAQYDLLVDKIERFTNRIDEFYNTERYKENVSKLRCFKGIDTTSAITIQVETSDFNRFPNAKAYASFTGLTCGEQSSGDKRNVTCITKQGNSTLRTTFVECAQAIVKGSIYNPKSKRLKSRQKDQEVNVIAYADKATNRLMKKYNKLKERNVPHNKAIVAVARELACFVWGMETGNIN

SEQ ID NO: 324262 - protein, 412 aa, unidentified
MEVIYPCCCGLDVHKKSITACVLWAEAKGKSRKQKKRFGTFTHDLLQLADWLAECGVTHVAMESTGVYWKPVWNILAEQFEALLVNAQHIKAVPGRKTDQKDSEWIADLLQHGLLRGSFVPPQPTRELRDLTRYRVSLVQEINRIANRIQKVLEDANIKLASVATDALGASGRAILEAMLAGEQDAGRLAELSKGLLRNKIPELKLALEGRMTEHHRFLLRQLFEHLRFTESKRSDIEQEIDKRMLPFEDKVTRLCTIPGVDRVTAWGMLAEMGMNMNQFPSSGHLASWACLCPGNFESAGKRLSGKMRKGNVSLRRCLSQAAWAISMMKNNYLSALYRRIAARRGAKRAVMAVAHALLVIAYHMLKRKEDYRELGADHFDRIDVNRIRRSLVNRLERLGHKVTLEPLAQTA

SEQ ID NO: 324263 - protein, 320 aa, unidentified
MEQHSIYVGIDVAKASVDVAIRPGGDRSEVSNDQAGIAALVVQMRQLNPVALVMEASGGLELPLVAALAAASLPVVVVNPRQVRDFAKATGRLAKTDSLDAAVLAHFAEALRPPLRPLRDADTQVLNSLVARRQQVVTMLVAERNRLSNAAMTVRPSIEAHIAWLKQELDDLDQNLRQTLRQSPVWREKDDLLRSVPGIGNQISLTLLAYLPELGTLNRRQIAALVGVAPFNRDSGTLRGRRTVWGGRARVRTALYMGAMVASRFNPVIRDFYQRLLSAGKPKKLALTACMRKLLIILNSMLKYGSSWNHPDTKSLTQSH

SEQ ID NO: 324264 - protein, 414 aa, unidentified
MDTMYERCCGLDIHKKTIEACFRSGKKKTHMSFGTTSAELRKLTMWLVENDCQSVAMESTGSYWKPIFNILELSGTDMKIIVVNARHMKNVPGRKTDVNDAEWIAELLQYGLLRPSFIPDREQRELRELSRYRKSLVGERAREINRLQKMLEGGNIKLTSVVSEVTGYSSRRLLDRLLRNDEPMTEDVISGLVHTSLVGKSKELETALDGLLSELQKELLIKVLDHIDDMSRRIADLDDFCRKQMKKYEDALDKLDEIPGIARRTAETILIETGLDMSRFPTAKHFARWAGLAPGNNESAGKRSSGRTTKGNPTLKSTLIQSAKVAARKKNSFFKARYQKIAAKRGANRASVAVAHSMLIAIYHILKSGERFKDLGEDYYNQFNREKKKNYYLKKLTKLGVNLKEATLSIQTAT

SEQ ID NO: 324265 - protein, 347 aa, unidentified
MRFYTKQHRYYCGIDLHARSMYVCILDPQGEILLHRNMPCAPELFLKAVAPYREDMAVAVECIFTWYWLADLCSKENIPFVLGHALYMKAIHGGKAKNDKIDAHKIAALLRGGMLPMAYVYPALMRSTRDLLRRRMHLMHKRSELLTHIQNTNSQYCLPQFGKKIAYKKNRQGVAEHFADSSVRKSIEMDLSLIDHYDKLLTEVELYITQNAKIHDVNAFNRLRSVHGIGKILALVILYEIHEIDRFPTVQDFVSYARLVKCAKESAGKRHGSSGAKIGNVHLKWAFSEASVLFLRANPAGQRYADKLTSKHGKAKALSILAHKLGRAVYYMLKRDKAFDMNKFLNS

SEQ ID NO: 324266 - protein, 345 aa, unidentified
MKIVGCDLHTRYQQIAMLDEETGELVERRLEHASGEAKEFYTHLAGPVRVGIEATGHTRWFEQLLAELGHELWMGDAARIRAAEVRKQKTDARDAALLLDLLLSGRFPRLWRPARQERDLRHLLWHRQKLVWMRNAVGNQLHALAMGEGLCRKKQLFTKKGRCELEALKLDAWASRQRQELLRLLDQLDASLAQFDQAVNEQAAANGDAVRLMTHPGVGPVTSLAFVLIVGPAARFERSKQLVSYLGLNPCEHSSGGKQKLGAISKQGNPMLRGLLVEAGHTAARMDPELRQDYQRLRLRRGGSVAKVAIARKLAVRMYWMLRREVNYTQLVRTQGSSRATLVQQ

SEQ ID NO: 324267 - protein, 348 aa, unidentified
MALTIVEDTRAVTGGVDTHADMHVAAALDPVGGLLGVGEFPATAAGYARLLGWLGGFGTVCLVGIEGTGSYGAGLARHVTAAGIRVVEVDRSDRQDRRRQGKSDPLDAVSAARAAQSGRARGAPKGRDGAVEAIRALMVAKRSARSERTQTINQARALIVTGPDDLRARFARHTAAGLVSELAALRPRPGATVGYATRIALRELGRRAEFLDGQLGRLDELIVPLVTARAPALLALHGVGPDTAALLLIAAGDHPHRLRSEAAWAHLCAVAPIPASSGKRTRHRLNPGGNREANHALWRIVITPMSSHAPTRAYVERRTKEGLSKKEIIRCLKRYAARQVYRHLRPAG

SEQ ID NO: 324268 - protein, 352 aa, unidentified
MEMVSGLDLHRSQITFRTVDLRTGEVQRGKIHPGARDRFREWLGRVEPGTDAHFALEGTTGWRFVVEEIERRGFTAHLADPAELSERRGPKRRAKTDHADCELMVNLLLEGRLPQSWIPPAHILELRTLVRSRKTLVDQRIEWQQRLQAQLFHQGVVPGLRLCNPEDRRRLGDAEVSGSGRQMIETGLIMLDHFDTQLNPLSAQLTGLARAQPGCRALQRELYGVGWLTAVAIVAELGDCRRFTSADQAVRSSGLDITVYESNGKRPGGHLARQGPQVLRWALFEAAQCAARKSSPDHAYYLKVRDRIDHNRACLSVARKICRRACHILKDLGDAAMATPKAPSARRDTQAA

SEQ ID NO: 324269 - protein, 436 aa, unidentified
MTLINFVAANQKYYAFNLLSVFIMVFWSVQYLLQHLLVQTQVSHQLLQPLILILQLPQTPQFRHARPGKFFLPVNGMDYFLPLRLTVRNVLTRRITMNIVFLGIDLAKNVFQLCGLNQAGKPVYTKRTGRKELLQTLANIPACLIGIEASTGAFYWQREFEKLGHKVKVISPQYVRPFVRGQKNDGNDAQAIAVALMQPTMQFVPPKSPEQQDIQALHRARQRIVNHRTATVCQIRGLLLDRGIPIGSAVSRARRAIPLILEDAENGLSSRMRRTIAELYDLFNDLGCRIHFFDKEIETVFRQSEACPRIAKVKGIGPKTATAVVAAIGKGTEFKNGRHFAAWLGLVPRQHSSGDRQVLMNMTKKGDKHLRTLFIHGARAVVRVATNNNDGHMNQWVNQLKERRGFNKTTVAVANKNARIIWSMLRNDTGYQVVCN

SEQ ID NO: 324270 - protein, 340 aa, unidentified
MQIEVLGIDLGKNSCSIVGLDGMGAVVLRRRMRRESIIKQLAKLPPCMVGMEACCGAHHLGRILQAQGHQVRLMSPEYVRPYVKSQKNDDRDAEAIAEAATRPTMRFVDLKSQEQLDMQTLHRARDRLVGERTALINQLRAILLERGMTVAQGRRRLERRLTSADALDDLSARMRLLIEDMRAQWSELDRRIAQMDAELAEWARNEEAARRLMTIPGIGVLNATALIAAVGRAESFARGRDLAAWLGLVPRQVTTGGRPRLLGISKRGNKYLRKLLIHGARAALPRLLESPTPLGAWLRGLMARMHKNAAVVALANKLARMAWAVLRHDEPFRINVSVVS

SEQ ID NO: 324271 - protein, 415 aa, unidentified
MKFEKDTSGIKRYIAFDIHKEYTLVGGQNAQQDWVMQPRRIGMEKLREWAAANLRKGDAVVIETTTNVWDVYDIVKPLVSYVVVAHAGGVRQIAEARVKTDKKDVERLIRLLIADIVPEVWVPPVEVRELRGMISYRNRLVKTSTMIRNRLQSLVHRHNLILPKGMLRDKAWWDAQQMSALEKIQIRQELAMLDEMEKHKAEVDAELGRQSLGEVWGKQAMRLLQLSGFGVIVSMTVLSAIGDASRFESAKKLVGYSGLGAGVHDSGKEHIEKRITKSGRKELRWALVEAAWRAIRISSYWKEQYEKYLRRMRKPNQAIVVIARKLLVVVWHVLTKQETDERVSEEDLAYKMLVLSWDLDEDVRMGLTYKQFAKYALMKLGVEKDITRFVRKEVPRRLAPREEVLARMVELGIGQ

SEQ ID NO: 324272 - protein, 417 aa, unidentified
MKSAPSVLPEEAPAGLTCGIDWARDDHAVAVVDAGGRQVHRCVIEHSAAGLRALLGMLGKRGVCEAAIERPDGPVVDALLGAGITVVVISPNQVKNLRGRYGSAGNKDDRFDAFVLADTLRTDRARLRPLVPDQPATLALRRACRARKDLVSHRVGVANQLREHLKRVFPAAVSLFAELDSPISLAFLARFDSQDRAGWLSPRRMAAWLSSVGYCGRVDPAVLHARLTAAPRGATGEHGTAEAHITRALLAVLVTLSEQIKALSTQISEQLALHADQHVFTSLPRSGRVRAARLLAEIGDCRARFPTPESLACLAGVAPSTRQSGKIRAVGFRWACDKQLRDAVTDFAGDSRRASPWAAQLYNNAIARGHDHPHAVRILARAWLYVIWHCWQNGTAYDPARHKALQRILTEQKPAAA

SEQ ID NO: 324273 - protein, 369 aa, unidentified
MAKSITYVGLDVHKDTIAVALAAAGLRGEVREHGKIPNAPGALRALAVKLAAAGRELRFCYEAGPCGYGVQRQLTEAGHECAVVAPSLIPRKPGERIKTDRRDAINLAKLHRAGELTPVWVPDQAHEAIRDLVRARQAAVRTLRQARQQLSGFLLRHGRHYHRPAWTQLHRRWLASLKFDQAVHHIVLEDCIAAVEAAMARRDRLETHIEAVLPEWSLAPVVEALQALRGVRLVAAATLVAELGDITRFTNPRQLMAYLGLVPSEHSSGRTRHQGGITKAGNGAARRMLIEAAWSYRFPARISRELLLRQERQVKPIRDIAWKAQERLCRRYRKLARAGKQPTVITAAIARELAGFIWAIAKQVQPMAT

SEQ ID NO: 324274 - protein, 345 aa, unidentified
MDNIGIDVHKLESQICILTESGEILERRIRTERERFAAVLGVRPPAKILIESSTESEWVARCIEGLGHEVVVADPNFAAMYATRSRKVKTDRRDARTLAEACRLGAYRPAHRTSDRQRQVRAQLAVREALVRTRTKYISLVGALLRSEGYRIKSGNAECFGRRVEQLAIGGRLKSEVAPMLAVLLDVNKQVAWLDSRLEHLAKSDETVGRLCTAPSVGPVTAAAFASTIDEPERFRGAHQVEAYLGLIPSEMSSGEKQHKGRITKAGNGRLRYLLVQVALSILRLRSPRTEVLRDWAERIAARRGRMIAVVALARRMAGILYAMMRDAKSYEPARPRLAPQAVAA

SEQ ID NO: 324275 - protein, 428 aa, unidentified
MTNRDTIPPGAVLVALDIAKLRNEVLIEMPGQQRRRRLSVLNNRTEHDRLIDILKAFDAPVVCAFEATGNYHRPIAWRLMEAGFDTRLVSSMALARTREALHNGWDKNDPRDAQVILHMLRVGASQTYHDPMKAGINDVQELSKTHEAIANAKTEIQHRILTHYLPLYFPEVERFRGNTRSDWFFAFLEAFPTPGSIVALSREQFISDAWQVVGRKVSKERLLSDIYETARTSIGLPLPLNSPAVRMFRMVIAEARGLIRQRDEIEELADTLLHGSADYQALRQIPGIGPIIALTIIAEAGDLRRFRHHRQFLKFCGLDLSTQQSGQYRGQTRLSKFGNARLRRCLWIAGQVAIRQRENGFRDKFERYIARDRDSPDLRRKALTAITAKMARVVHAIIKSGSDYRPFFEGRVPGGRTPLRRAVRAPVG

SEQ ID NO: 324276 - protein, 332 aa, unidentified
MSIVILGVDLGKNACSIVGVDATGAVVLRRSMRRQTLIDYVSKLPACIVAMEACCGAHHMGRLFAGHGHEIRLMSPEYVRPYVKAQKNDDRDAEGIAEAASRSTMRFVELKSQDQLDIHTLHRVRSRLVAERRSLINQLRAIMLERGTIFPVGRRKLELGVDALLLQGEAGLSPRIRRLIGDLRTEWRHLDEKIESLNAEFVELARNDAAARRLTSIPGIGVLNATALIAAVGNAGSFAKARDLGAWLGLVPRQHTTGGKPRLLGISKRGNTYLRTLLIHGARASLPSISRSDTPLGRWLKAMLERGVHRNAAVVALANKLARIAWAALRKG

SEQ ID NO: 324277 - protein, 327 aa, unidentified
MFYLGIDVAKAKLDCCLLDMTNGKRSTKVVANSRAGLTDLLGWLGKRHTEPSHVHVALEGTGVYHEMAACGLHDAGLSVSVVNPAQVRAFATGMGVRTKNDIVDSHVLARFAMHARPMRWSPPAPEARILQALMARREALAQDLQRERNRHEKAEITAPTALVLHSILETIEFLERHLASLQREIDDHIAAHPGLKANLMLLQSIPAVGPQVGRTLLAIMHARHFDSAEQLAAYLGLVPVQRQSGSSIQGPSRLSKAGPPKVRATLYMAAVVAKRYNPHIKALCERLAARGKSTMSILGAAMRKLVHLCFGVLKTRQPYRANYVAIA

SEQ ID NO: 324278 - protein, 321 aa, unidentified
MERSAQLNFGVDVGKHELVIASSVDQRITKIANLPDAIGRWLGTLPADCRVGMEATGIYHQQLADLAHAAGHQVYVLNPRAVAVYLKSLRSRGKTDILDARGIARYVQNEADEHPLYTPPSATQRSVQTLLHRRHQVVKQRAALRMSCQSLDESVRAPFAPLLVAFDQCLREIDSQLRQRVRADEQLLAQAARLRSIPGVGPLISTALALRLSRHPYRNSDALVAALGMDPRPHQSGVSEAPRHLSKQGNGEERRLIYMAAVSACRCALWRKRFDQLIARGLPSTAAHCIIARKLLRIAFAINKNCQLYRAEVLGDDCRAT

SEQ ID NO: 324279 - protein, 319 aa, unidentified
MTQDDLVVAGIDVAKDKVDVCIRSQSLRRAFASTTEGRRELASWLRRRKVGKAVMEASGGYEREWARTLRAARIEVRIVDPKRVRSFARSAGRLAKNDTIDAQMIAWFAETFGEAPHQAYDAERERLAQIVNARQALLELQSELQNRGEHSRPDVVQRVQARLLKKIAAELATLEAAIAATVKATPQFAALAEIIESVPGLARITSAGLIAAMPELGQVSNKVAAALLGVAPYDDDSGKRRGERQIKGGRRKARNLFYMACLGAATRHNPVLKAFYRRLIAKGKEKKVALVACMRKLIVILNIMIARRQKWNPDLYAWD

SEQ ID NO: 324280 - protein, 325 aa, unidentified
MVTLGTDAHKRTYTFVAVDELGRKLAEKTLATTADGNLEALAWASRWPERRWALEDCRHLTRRLESALLAAGEAVVRVPTRLMAAERRAGRERGKSDPIDALAVARAALREPNLPVAQLDGEARKLRLLVDHRDDLVVERTRIQSRLRWHLHELFPEWVIPPKALRRYHILDQVQHRLEGSEGVVADIARELVARSRELTIRANELEKDITVLVKQLTPSLVAMPGCGALSAAKVVGETAGASRFSSRAAFARWNGTAPVPVWSASEQLRLNRGGNRQVNAALHRIAITQWRGVGGIGRDYVAKRMARGNNKTEASSPVTASPFR

SEQ ID NO: 324281 - protein, 344 aa, unidentified
MLHAGLDLSRARLDVCLVGESGEFVAHTAAPPDADGLRHLADRLRGHRVRAVIESMTGARFVHDALEEFGWEVLVADAQKVKGLAPLACKTDKIDARVLAELSWRDLVPVIWLPDPSIRRERELARYRLHLVRHRTTLKNRIHATLMTFGHPCPVSDLFGLAGRELLDRLALPDPWRRNVDASLELIDDLELQIAQLTVEMRRQGADHRYIPLLVTAPGFGWINAFTIASEIGDIERFASPAKLCGYTGLCPRVYQSGNSDRRGPITKNGSRYLRWALFEAAMHACTHPVYKERYQRTKRRLGRQRGPKVAQIDLSRKLTEAIWHMLTRNQPFAPAGAAFRLAA

SEQ ID NO: 324282 - protein, 414 aa, unidentified
MTVAFSFAHFAAIDWAKQTHHAVIVNHTGQIVTEFSFSHTLEGWQQWRQRAARLAPLAVAIETSQGVVIDQLLQTPDCTIYPLNPKAARAYRNRKAPSGTKSDHLDAWSFADALRLDGSAWKPLSKQDPLLEQLHLLCRDEIALIEERTALVNQLLAALHEYYPSALAAFEDWTLPAAWAFVEAFATPQALAHAGKRRWEKFLHTHKLARPETYQKRLELFAKATEFGASEALTLAKSRLALTRVRQLRVLQIQLDDYRQQIEKLFEQHPDHEIFGSLPGAGPKIAPRLLGELGSDRHRFESPQALQCYGGTAPVSYQSGLVHQVRLRTQCNLVLRSTIHLWADRSRHACPWAEIYYQSLRKRGKTHACSLRCLGQRWLKILWKMWQTRAAYNSELHQQNQLRHGSWVLKLHNA

SEQ ID NO: 324283 - protein, 354 aa, unidentified
MTTTTLTQQITGGADDRLDVHVEAALDEGGGLLGVESFPTTPKGYAQLRAFLECFGKVDLLGVEHTGSHGAGSTLHLHRRGVKVVGVDPPNRQRQRQRRQGRSAPQDAISGARAAQGGNATGKARARDRNVGALRVLRVARASARKGRTQAVNQMPSLISTGPDCIRAELLGLHAYPMPKRTSALRPATTRDLVPIHKLTVRMLANRAHELEAEVSAIDAIMDHLVVETAPALVAMSGVGTEMASALLVAVGDNPERLRNEASFPHCCGTSLIDASSGKRERHRLNRSGDRQANSALWHIVITRMVSDPRTRHHIERRMKDGLTKKEAIRCLKRYIAREVFTLIPVGDLAFDSP

SEQ ID NO: 324284 - protein, 347 aa, unidentified
MSHKTAATVALTIGIDTGKNTLHLIGLDDKGAIVLREKVARGRITARLANVPRCLIGIEAGMATHYVARELSALGHDVKQVPPAYAKPFRQGHKNDFRDAHAIAEAVQRPSTRCVPVKTDDQLDLQALHRVRSRLVGQRTAVINQIRGFLLEHGIAVRQGLRFLRQQLPDILAKRSDVLSPRMIRIMEDLSGDWRRLDERIEHVTEEIEVLAHGSEGCRQLMTVPGIGPLIASAMVAAIGNGAAFAKGRDFAAWLGLVPKQMSTGDRTILGRISKRGNRYLRTMIMQGARVILLRPANWAKHSFGPWLTAAANRLHHNVLATALANKLARIAWTVLMQARSYEARVN

SEQ ID NO: 324285 - protein, 327 aa, unidentified
MTGAEERLYVGADLHGNNVVLSVLDAAGAKVWERRVKARLDTVLRALDPIRDRVAAVGVESTYNWYWLVDGLLERELPAMLANPSRLNPYKGLKATDDFADARWLAELTRLGAFPASYICPEPLRGMRDLLRRRLLLVEMRTGLLNSLGALRARHGLDQGMEAGRWTKAQAEIMTDQADRLGEAILKAEKLVLEAVRPTPDLRRIMTVPGLGQVLGMTVLLESGDFTRFAGAGHYASYARTVKSTRTSNGKVKGSNNARNGNPHLARAFAEAAHHASRHYPRIAKWFAGKARRRPKPVAWKALASKLAKGTWHVMNGEDFSMERLFG

SEQ ID NO: 324286 - protein, 315 aa, unidentified
MLIIGCDYHPGFQQIAFLDSESGEWNERRLGHREEAEQFYRDLKVRGVKVCVGMEASGHARWFEHLLGELQFELHIGDAAEIRSRRVRKQKTDRQDAQLLLTLLVEDRFPRIWVPNGENRDLRQLLWHRHRMVQMRTRIMNQLHVVALNEGVRLKKALWRPAGRAQLESLLLAPWASRRRQDLLELLDQLTPKIQELTRELEQEVEKRPVTRQLMTHPGVGPLTALAVELVIGTPERFGSSKQIASYVGLVPCEESSGDRRRLDTSASKATLCCASCWWRRHKSPCDAIPIGVASFCTWRCDGNDGSPRSRWPAS

SEQ ID NO: 324287 - protein, 278 aa, unidentified
MYYYIGIDVSKKVLNVFDGKKDLIFDNKENLSSFKKYLKKRHPDFSSLVILFEATGIYSYHLKAFCATHMIKAYIINPQASHNFAKSLGTRSKTDTTDARTIWAYHRLVNDKDIRIPKVDPIVTTLSSYLTSYRLTLKQRLSFANHLEGVKDKTLYRLLKKEQERLCKLEHELLIQMDTYIKKYPKLNEDYQRLLSISGIGQKTAISLLTLFQTYPDTNRNQITALIGLDPIQRQSGTSVHGRSRISKHGNQMMRKSSCLGALIFLGPLVFAEGLFYF

SEQ ID NO: 324288 - protein, 443 aa, unidentified
MNKKRSSHLRGERGQAFTELIRGIAPEQIMCVSLDISKYFHVAMIHNGLGEIVTQPFDVDIYQSGFDQLCQAIAQARACTQAQVVLVGMEPTSHYFENLARHLIDCSQPVKLINSFSVKQNREQQLMRREKSDQIDVAAIGDLLRRGEGTPYQPATGIYLQLQQLDRVRLGKVKIAGILKNQIIGHIDRIFPGLVLMDESAKERYTPHFSVDFWKCQTLQDLIRVCPNPNELVKWSPKQLAQAFHNQQCRLGPATAAKIIAQAHKTLLPDPELAAIRCELLQHDLALLEAVQSRITLLEQRLTALVAQTPYQVWIKLKGLSAVQVASLAAAMGDPTHYTEAAQVFRRSGLVSGRNDSGNRQRKGKGNHILKTGDVYLRHALMSATATLILHQPVLAHFSRNLQITKPAGVARVATARKTIGILWAVLRDQSSNSLISCKGAVM

SEQ ID NO: 324289 - protein, 367 aa, unidentified
MGKDSTAVIGLDVHKESVDIAIADGREARLFGRVGGEAAAVDRAVRRIRSVHRDPLFVYEAGPCGFWLYRRLKSQGLRCMVVSPSMTPRRSGDRVKTDRRDALMLARLARAGELAPIYVPDARDEAVRDLVRAREDAVCMQRQARQRLQALLLRNEIRYVGRSAWTQAHRRWIAHLRLPDPAQQIAFEEYVQVVEEAGRRLERLEGAIAAQLEHWRWRPVIEALQALRGVSSIHAVRIVAELGDLARFESPRKLMGYLELTPSEDSSGKRRRQGAITKAGNSSARRAFIEAAWAYAHPARVSWVIARRHTGLARSVTDLAWKAQLRLCARFRRLAARRLPRNKVVVAIARELSGFVWAIAQQVKPAA

SEQ ID NO: 324290 - protein, 427 aa, unidentified
MPFAALDLHRRVVEAVILDDRGAVLRRDRFPATRQELLAFARAHLTRQHHLVMEATTNTWAVAALLEPLVARLVVSNPLRTKAIASAKIKTDKVDARVLAELLRCDYLPTVWQPDAATRRLRAATTERTCLVSDRTRIKNRIHAILHQRLLPVPPGDLFGPGNRQWLDQLPLDDAARSFLERQFRLLDATETELLAVTENLAQEAYADPRVKLLMTLPGCDFAVAQSLLAALGDHTRFRDGDAAASYIGLTPSTYQSADKCYHGPITKQGRSHARWMMVEAAQQMDRHAGPLGVFFRRKAKSKNRNVAVVATARKLVTIAWHMLKNNEPYRYAQPSTLQAKFDRLRIRATGEKKKGGPVKGTPRSQQYGQGRTRAVPALRSIYAAYGLPALAPPKSGERAMLERHALTAWSQSLQQPRRAAKGRGKP

SEQ ID NO: 324291 - protein, 383 aa, unidentified
MRPTQVKDFTLDEEVLAVALELSKGSWKVALHDGKRDKPAIHTVSSEEAVKRLAQALAVIEEVKRKWKLAEQIRTVVMYEAGQDGFWISRALGKLGYEALVIDPASIPVERYARRAKTDRLDAIKLVLALRAWLRGERDRMHVIRIPEPEAEAQRHLVRDRGELQKECGQHRDRIRKLLRTVGCWDNVESDFGSRLEKGAVVCHDGQALPAALQARLMREWARLALVEQQLTALEKTLVKQLPEPVQERIKDLTRLKGIGEVGSMRLVLELFWRDFDNRCQVGSCIGLVPQPYDSGESRVDQGISKQGNRKVRALLIEMAWMWLRYQPKSALARWFAQRTQGGGPNKRGRRIMIVAVARRLAIALWRYLKDGVIPEGAAMKAA

SEQ ID NO: 324292 - protein, 384 aa, unidentified
MTTEWYGRLPSSAAALVHMSASCCAAARVSVRAPFSQDGGSEMNAVHTVVGVDVAKNVFQAYWVVAETGEIRNMQIKRAKFLEHFAGRPRCLIGMEACGGAHHWARELSKHGHDVVLLPAKAVGAFVAGNKSDAIDARAIWTAAQQGGIKRVAVKSEAQQAVLALHRMRQQLVKVRTAQSNALRGLLMEYGEVFRQGRASLARGIAAALERIEQRLPRVVVESLMELWQRVGQIYGQVKQIERRLKSLLTEDRNAQRILQIPGVGMLTATAVSATMGQASAFASGREFAAWLGLVPAHTGTGGKTRMLGISKRGDSYVRTLLIHGARSVFSSTKHPGPWLQKISQRRPLNVAVVALANKMARTIWALLAHGRTYQPDYVSRAST

SEQ ID NO: 324293 - protein, 333 aa, unidentified
MLDESGQIQLEQRVRRNAKGLREVFGELPHSRIAREIGTHSPWISRLLSELGHEVIVANARKLRLIGESRKKDDRLDAQTLARLARIDPELLYPVKHRSEQAQADLTLIRARAGLVRARTGLVNTARGLAKSYGERLRSCNVRNLNPEKAESLSPELQAALEPLLNAIESLSERIVDYNERIEMVAQQSDRQVALLKQIKGVGTLIALTFLLTWEDPHRFGKSRDVGCYLGLQPGRRNSGQSEPQLHISKEGDPYLRTLLVQGAQHILGPFGVDCDLRRWGLKLAERGGRNGKKRAIVATARKLAVLLHHRWVSGEVYEPLHTSQRTTVAAAA

SEQ ID NO: 324294 - protein, 410 aa, unidentified
MEAAVITVVGIDVSKSKSTVAVRRPGGKIALRPFEVHHTNSDLKKLASTLKKLGGDIRIVMEHTSTYWRPIALTLKEAFFVSVVNAMLIHDFSDNTIRKLKTDRVDSLKIANYALTFWNTLPPFNNEEETRLLLKMQSRANERITATATALRNGLIALADQTFPGVNIAFDPNTKNANGHEKWVDFFLRYWHKDCVCQYSMEAFTESYRGWCKRKNYKFRTDTAHKIYLLAQEGVATFPKCESTKMLITQACKSLNAVCEAKQSTQLEMQRLAAMLPEYEVVMQMEGAGPITGPALMAEIGDVRRFKNKKALVAFAGIDAPPFQSGAFESKSRHVSKRGSPHLRRTIFIISNIILTRSNPENSVYCFMDKKRSEGKHYYVYTVAGSAKFLRVYYARVTEFLRFRPSSDAC

SEQ ID NO: 324295 - protein, 326 aa, unidentified
MSKKKLDLCLRSNGKDILYDVIPNDLSSIKSWLTRTFEKFFLSEDSLVVCAEHTGQYTYPLVCATKSIGVYLCLEDAAKIKYCHGIPRGKNDKIDACRIAMYAERYNDCLQPYTASELIIQKLKNLSTERSMLVADRAKYQSQLKDQVDYMEHSIYIAKCNRVEGIINTFTDYIAQIDLEIKELINQAPVITHQMDLLMSVDGVGERVALKMIMETDAFTSFTDPRKFCCHAGVVPFVYVSGSSQRSKNRVSNRADKSIKHLLHMAALSVSQVKNSPLKKYYDRKVEEGKNKMSVLNAVRAKLVTIMFAVIRTDAFFSRNYQNSLA

SEQ ID NO: 324296 - protein, 481 aa, unidentified
MKPKTQEKNEKITKPRTNHWKKMNRKQRRELTRKIQSQDLSLEVVHPDAAGIDIGNESHYVAVPSTRDSQPVRRFGCTTGELKAMAEWLKQCRIRTVAMQSTGVYWVAVYDILEQAGFEVYLVNARDTKNLPGRKSDVQESQWLMKLHTYGLLRNSFRPSQEIRMMRTYWRQRNDLVQSAGRHIQRIQKALTQMNLQLANVLSDVSGVTGQAIIKSILRGERDPQKLAALRDLRVKASEEQIAESLEGNWQPDLLFVLKQEQDGYEFCQKQIAECDHQLSQYLQQRKDRSQGAPLPEEERKGRRRKKKGNTPQFDLREGLFRMSGTDLTRIDGIDVMTATTVISEAGWDMSKWQTEDHFVSWLRLCPDNRISGDRIIGKGRLPTNNRVTIALKIAANGLRLSNTYLGAQFRRLRTKLGDPIAIKAMAAKLARLVYRMLRYGMKYVDQGALFYQAQHRQLQIKQLKWKAIKLGFRVVQADAA

SEQ ID NO: 324297 - protein, 360 aa, unidentified
MRNEITKESFKDQSFFVGIDYHKKSWKVTILGEQYEHKTMSQDPSAEVLARYLKRNFPGATYRAVYEAGFSGFNSCRELNQLGVNCIVIHPADVPTNQKERLQKTDKADSRKLARALKNEELEAIDVPYPELEADRALVRQRFRLVKDISRTKNRVKSLLFQFGIPIPENISTAQSRHWSKPYTNWLKELPVEMSSLRQVIDNYIGIAESQRKELLVVNKQVRMLSFSQGYKANYTLLLSVPGIGIMTAMTFLTQIGDINRFERLDDLCNYIGLVPSMYGSGDKMQTGKMIHRGRKELKIMLIEASWEAVRKDPALMLKFNELIKSMHKNKAIVRIARKLLGRIRFVLKNQQHYELSVVK

SEQ ID NO: 324298 - protein, 357 aa, unidentified
MKKLIIGIDFSKEKLDATIILACGMNEIGSREYGRFPNNTTGYRKLCNWVKTNAWNTIAEEWLFCGEDTGSCSIGLSKWLYGKGYDIWIENAYAIKHSSGIQRVKNDKADSAIIAEYAWRQQDKVVPFEPLNESLAQLREVFLYRHKLVGQRVAMELRKEDKSQSNKSKAISFINRKSKHLIAEINKTIAECDKAIDSIIEADEELKENYAIITSIKGVARQNATCMLVYTNNFKKFGYDPRKIACYYGVAPFGKQSGTSVNTPAHTSHFANKLIKSLLGQAAHIAKIYNPEIRDYYQRLISKGKKPQVALNNVKNKLIRIIVALVRKKVPYDQNTYKYYEEREIIERKKNEKLIYC

SEQ ID NO: 324299 - protein, 355 aa, unidentified
MSQEKYIGLEVHQASISAAVMDPSGKVLMECLLETKAATILEFIQGLRGTLSLTFEEGTAAAWLHDLLKPHVSRRVVCDPRKAALLKAGNKNDRVDARKLAELLRTNQLKAVYHGEHGIRTLKELGRSYLTVSKEITRTMNRIKSLYRSWAIPCSGTTVYAPRDRREGLAKIMEPGVGVRAQHLYQQLDNLQPLRLEARRELLLESHKHAAVTLLRQIPSMGPIRAALLVALLQTPHRFRSKRQLWAYSGFAVETHDRGEYRWVRGKLQRNREPITVRGLNDNHNHDLKNLFKGAAISARARPGPLQDFYLARVTQGMRPTMARLTLARKIATITLTMWKKGANFDPQPVHRQAV

SEQ ID NO: 324300 - protein, 359 aa, unidentified
MGKLSKGEGLTVGLDLGDRWSHFAALDGSGVKLEEGRLRTSEAALREHFSQQPPMRVALETGTHSPWVSRVLEDCGHEVLVANSRKLRLIYENASKDDRVDAMYLARLARVEPELLSPVQHRGSRAQKDLALLRSRDALVSARTLLINHVRGLVKSLGERLPACSTGSFSKAVSGQIPESLKPGLLPVIEQIASLSAQIKAVDQQILVLADEGYPQTKLLRQVKGVGPITSLAFVLTLEAPERFGKSRAVGPFLGLVPGRKQSGRSDPERRITKHGDAGLRRLLVNAAHYILGPFGPDSNLRRFGQKIAARGGKVAKKKAIIAVARKLAILLHYLWRSGEVYEPLYQSTHRVGRRGQIA

SEQ ID NO: 324301 - protein, 378 aa, unidentified
MARQPSKGKKDSARGDATQGLVPLNLDAAGIDVGSAEHYVAVPQDRDAEPVRKFGSFTADLHRMARWLRDCRIKTVVMQSTGVYWTALYDVLESSGLEVNVANARHTKSLPGRKTDVQECQWLQKLHTFGLLNNSFRPPEEIRVLRGYLRQRENLVATAAGCIQHMQKALTEMNIQLANVISDISGTTGMAILRNIVRGERDPQKLAMHKHSRIRASRQEIARSLEGTWRQEQLFVLEQSLDLCQTYQQKIQTCDQRIDEQLRSMEARIDPRSEPLPEPRRGKDARSHPSGFDLRGHLYRITGVDLTQIDGIEVQTAQTIVSEVGVDMSRWKTEKHFASWLGLCPDNRISGGRVLKRGTRRVVNRASTALRLAASALL

SEQ ID NO: 324302 - protein, 460 aa, unidentified
MCLAGLAVIDAPWGVCAGCVFFRAPVQGSAKIAVARVVRTGEEGVTNDKRWYAGVDWASESHHVFLTDDDGRKIGERVFRHGGEGLAEMAAWLMATSGAAEGPQIQIAIEVPHGPVVETLIEREFKVHAINPKQMDRFRDRFTLAGAKDDSRDAQVMASALRTDPRCFRLLAVADPIVIELREWSRIADDLAAERNRLTNRMREQLWRYFPAMLELEHDLGAEWFLDLWETVPTPDKAARIRRTTIAKLLKRNRIRRFDVAHVLAVLRKLPVKVAAGATEAASAHIATLVVRIRLVNRQLKQAHHQLDTLTARLIPTEEAEPGQRKQHDVEILASLPGVGRVVLATLLAEAFDALQRHDYAALRSLTGVAPVTKRSGKSCIVVRRQACHDRLANAMYHWARVAIQHDSRSRSKYSALRSRGHSHGRALRSVADRLLNVACAMLKSRTLFNPSLAAPKTTC

SEQ ID NO: 324303 - protein, 381 aa, unidentified
MRQVCGLDVHKDSVFVCILNENGVVFQEKFGVLTPELEQMAAKLQELDVSEVCMESTSVYWMPVWRVLEPYVAEMKLVNPYFIKQLPGKKSDVKDAEWIATCLLKDLIRGSYVPADIIQQLRQYDRRISDLNAECVRKLGKLDAAIQRCNIRISNYLSTTDGKSYKDVVRLISEGVKEPKELIKVVHSRIVNKAGKDVILASLSGVLSDTDIDIIRQLREEIVLAERHKDECQSKMDAICQQYFPEQLKNLQTIPGIKGRSATAIIAEVGSDVSSFQDAAHLVSWCGLKPRNEESAGKIKARSITHGNKYLRKTMIECAWAASKTQGCFLNKFSYYQTVVRRKNRMKVQVAIARKMLVAIWYVLHGNVAYRDYTPDIAPTA

SEQ ID NO: 324304 - protein, 354 aa, unidentified
MSIKYIGMDVHQATIVLVVLNEAGKCVMQTIIETKGSTIVQFLRGLQGSLYVTFEEGTYAAWLYDLLTPYVDKLVVCDPRKNKLLPSGHKSDKVDARKLAEWLQKGELSPVYHGSRSLRTLKELAHSYLYLVQDTTRGMNRLKALFRARGISCSGRAVYHARQRDLWLKLLTEGGARQRAELLYQQLELLQPWRKTAHQALLVESRRQPAHRILRQIPGLGPTRVALLQAIVQTPYRFRSKRPFWSYVGLAVVTQASAEYRVVDGRVCRSSKIVATRGLNRSHNHVLKEVFKSAATGAIQRDPVFKLGYFRLTQRGVSPEMARLTLTRKLAALTLTLWKKGARYDPEHVKPQAA

SEQ ID NO: 324305 - protein, 412 aa, unidentified
MNQKVYVGIDLAKDSSRVAVVDKDGSKLTSPFSIKNTRDGMEKLLSKLNNYKNDEILCGMEASSNYWENVYSYLKEKKVSCLLINPYQVRRYRQALGLKIKTDSVDAEAVAQLIRAKKYDNLYISDEVAVELKELVRIKFSFARRVKDLKKGVMSLLCLVFPEYTRIIPHPFSKVSTEILSKYPTSCHMAKASVSKLVKIFRRYQGCRFGTDTAKELISAAKESFYSGRASRSRGISISMQIEEISSLSKRMEEIEEEIKSILDPADPKGGPPSFGILNSIKGVGIGTISAFLGTVGDMSRFLNSDKLVSYIGFYPRIFESGKYKKKNPEIQKAGPRELRYMLYLSSVAAIKHNIYLKKYYNDLVSAGMPAKKALIKVAVKIVRMMYSMLKYKTHYDPSRVFLQYRPEKIAA

SEQ ID NO: 324306 - protein, 373 aa, unidentified
MQHTIFIGLDVHKATISVAVAGGERGGEVRHWGAIPHRPDHVRKLAEGLGADGCQLYFCYEAGPCGYGLHRQLVELGHDCIVVAPSLIPMKAGDRVKTDRRDAVMLAKLHRAGELTAVWVPDTAHEAMRDLVRARATAVRVVGKARQHLQGFLLRHGRIYAGKKGWTVAYRRWLTTVRFQHPAQQIVFQDYVDAVADAEARVERLTGQIAELLPTWNLAPVVEAVQAMRGVAFIVAVTVVAEVGDFHRFDNPRQLMAYLGLTPTEHSSGATVRRGGITKAGSGLARRALIEGAWSYRMQARVSRKLHDRPAKGHPRHRLEGTVADVPALQASGSRWQGEGRGHDRHRPRDGRLHLGHRQSSDGVSSMTSLLRG

SEQ ID NO: 324307 - protein, 484 aa, unidentified
MSKPKKHSKQLGEKKTVAGKGKRGLKRKGMCLEDRPILEANAAGIDIGAREIFVAVPPDRDEHPVRVFPTFTEDLEQMAQWLVSCGITTVAMESTGVYWIPLYDVLEKHGVRACLVDARGMKNVPGRRTDWHECQWLQFLHSVGLLRAAFRPEGAVCAVRSMMRHRTELVAMTSQHVQHMHKSLTQMNVQIQHVISDLTGVTGLAIVDAIIAGQRDPMVLAKLRDPHIKADEETIRKSLVGNWQPEHLFTLKQSRQSYQHYREQIAACDEQIEKLLVAFQPRVNPEEKPLPPDRKKKQSGRRKKNVNPKTGFDLRTESYKLFGVDLTQIPGLMAIVLALFSEVGRDMSRWPTASHFISWLALCPDNDISGGRVLWRGMRRVQNRAGHLFRLAAHSLHHDQTPMGDYLRRMKSKLGPTGATTATAHKIAIIFYTMIKKQVEYDATIWAERDAEREKRFEAKLRRQAQQRGYKLVPIEENPARVSA

SEQ ID NO: 324308 - protein, 382 aa, unidentified
MPWVFVRLLGSSNLTNMNYKLKAAPAAQVVKSRKAPSAKRIVIGVDVHLRSYFAARKIDNAAVGTVAKFGNQQEFELYVERQRQQAEEVVVLYEAGPLGYVLYRALKAQGVQCYVCAPDSTQQKQTRRKTNQIDARSLASNLFSYLNGNERAVRMVRIPSQEQERARLISRQCDGLVEERKRLGAKGNALLLSQGHGGSKNWWRPKAFARLSQGLEAWVLELLKVWLPLLRQLDELITQAKAGLASRAKGPRPKGAGAQSLVQLEAELLNWNLYSSKRKIGSLAGMVPSEWSTGTGQRLGSITKVGVPAIRRNVIEMVWRFKRFQPQYGPIQKWKAVLEAAHSSLKKKAVVAIGRQLIVDLWRLQTGRASAQELKLIMVGGD

SEQ ID NO: 324309 - protein, 457 aa, unidentified
MPKSEKKTLPSRFHETLHPLRKDVAGLDIGAEEIWVDVGAENDSAPVKRFETFTSDLNQMASWLMDCGINSVVMESTSVYWIPACQILEDRGIEVLLVNPRYAKNVSGRKTDALDCQWLRTLHCYGLLPASFRPAREIACLRSYLRHRQMLIEYAAAHIQHMQKAMTQMNLQLHHVLSDITGLTGMRIIRAIAAGERDCKKLASMRHERTHVNEATIEKALKGDYRAEHLFSLKQSLDTFDHYQKQLAECDQQIAQHVRTLETKSDPTAGLKTARPLKRKQRNHIDFNVREEAFRISGVDLTQINGISESAALSLISEIGINMSPWQTEKHFASWLSLSPNNKISGGRVLKRRTRKTANRARTILCFCAQSLLRSHSALGAFCRRICSRLGKPKGLVATAHKLAILIYRMLKYGRHYADIGQEQYDNQFKERALRSLARRAKEFGLQLVPNPEAVVP

SEQ ID NO: 324310 - protein, 397 aa, unidentified
MLVQSNQRSFCPTDFDIFLGMDVDKKSIDFTCSDSKRILRSVHIPNNSEHLVRYVRKHFPDQKVLFAYEAGPTGYGLYDGLAAAGFACLVSPPSMIPTAPGQRVKTNRLDSKKITEALRAGQLKSIHVPSPTYRHLRHLTKIRDLVVRQIAGSKCRIKALLLFEGIPFPEAAPKSHHWSRSVIAQLHQLPCSGAVRFRLDRLLEALEFQRQQYLKITRELRNFCRQDPELKRCLSYLTSLPGIGQIVAPHLLARIGPWQNLQEHRVHELAAFLGLVPTEHSTGDRVHRGSITRGGDGRLRSKLIQSAWTAIRQDPELREFYRSVYRRHPQHLAARKAIVAVARKLTTRIFAVLKEQRPFVLRPEIRSRPLLPGEIGPRERLDASQKEEERDLPSFVP

SEQ ID NO: 324311 - protein, 341 aa, unidentified
MEQATTIGLDIAKHVFQAHGADAAGHALFRKRLARTKLLGFFASHPPCVVAMEACAGSHYWGRQIGKLGHTVRLIPPAYVKPFVKRQKNDAADAEAICEAAQRPSMRFVPVKDDEQQANGVVFRARDLLVHQRTQCVNALRGHLSEFGYVFPQGITHAPTLIAHVEDPNASLPDSARAILKILIDTFTALEAQIKELDAEINKRSKADPVARRLMTIPGVGPIAATAITALVPAAESFRTGRDFAAWLGLTPLQKSTGGKQKLGAISKRGERTIRRLLILGASAVIRQACLRGAPAGSWLAQMLPRKPKMLVTVALANKMARVVWALLVKGGVYRTPATTA

SEQ ID NO: 324312 - protein, 372 aa, unidentified
MAAGKRSGKTKGCKMNSIVAGIDLGDRESLATVLSPIGDVADRFTFPMNEEGYAFFASRVPKNARVAFESTIMAYPISRALRMHGYSDVTVAHPKTLAWIVRSKKKNDRVDSLKIAKLHMAGMLPESHLLDRNDQIARDLLVQRVKLGVEIGRLNSVIGYLKREGVYDSLPRTGDNFSARRRKAIHSLRFNDERDLVLGTMMDRLRFLEKQCTPLEDTVRENARLSDDVKILMTITGVDFYLASLISSFIGDVERFPSDDHLASFFGIVPTSRDSADVKRRGKMTKDGSSIARWALSVMVDTVTHHNEPIREYYTSVKKRTGSGKLAHVSTMRKLTRMLYHMLKTKQHWKWENPRLTERKMARLELVGGDGS

SEQ ID NO: 324313 - protein, 337 aa, unidentified
MKYSGIDLHSNNSVVTVTDDTDRVVAERRLPNDLAKIIGFLLPWRDELVGVVVESTYNWYWLVDGLQEAGFEVKLANTGAMKKYDGLKHSGDESDARQLAHLLRLGILPTGTILPPEHRATRDLARKRMQLVRSRTSHILAIENILARQRGATINSNAIKRLTAADVNRMGLPEDVALAVQSNLAVVTTLGAQIELLEKRLQERLGERTEYALLTSVPGIGRILAAIILLETGPIERFRAVGNYASYARCVDSQHLSNGKKKGEGNVKNGNKYLVWAFVEAANFALRFNAEAKRFYERKKARTNNVVATKALAHKLARACFHILKERTPFDVRRCFA

SEQ ID NO: 324314 - protein, 431 aa, unidentified
MLQPDSQPEPQEGEEPNFAAFVAIDWADQKHVWVLQKAGSQTREHGEIEQASETVEAWMQTLLQRFGGQPVAVCLEQSRGALVFLLMKYPMLVLYPLHPAAVGRFRAALYPAGTKDDPLDAELQLELLVHHRHRLRAWTPDTVETRSLQILAEHRRQLVDQRTGESNRLTQTLKLYYPQVLRWFEDVASPLVGAFLQRWPTLELAQKARPRTLRDFFYRHNCRNAKLIQRRIGEIGQAMPATQDLAIVRTCVLQVKHLIQSIALLRDSIAVLEKEIDKLVQSHPDFAVFDSFPGAGEVLVPRLIAAFGTQRERFSSAVDVQSFSGIAPVTCRSGKSERVHFRWACPKFVRQTFHERASHSIGFCKWARVYYQQQRDKGAKHHAAVRSLAAKWIRIAYRCWKDRTPYDEQIYLDALRRHGSPLAAKLAPAKG

SEQ ID NO: 324315 - protein, 397 aa, unidentified
MTYIGIDISKSKHCIAAIDQTATVLLKPTFVSQDNEGFETIVQQLRLLGTPEEVKIGMEATGHYWVHFFNFLTEQGWQVELFNPVLSSAQGRAHLRGRKTDKDDAITIAKTLRDGGYSPWAIPSGQHAEMKLLCRQRSFVVSELSNAKRRLTSLLDLTFPEFSAHFSDAYGKAPIAVLKSVPSAKALLALPIKELTKTLHDNSAGRHGEVMAKKLREAAKNSIALSHKSEALSFSILSMLEQLEFFHRQLEACDQQIKTIFAALDDPIEKIPGIGPKNGPVILSEFGDLSRFKGGYKKLLAFAGLDPRIRQSGQWQGSVKMSKRGSPTLRTALFQAASMGRLHNADLQTIYHHHKHTKGKNHRIAISHVARKLVQIIWATCRNGKTFDSDKICEIST

SEQ ID NO: 324316 - protein, 360 aa, unidentified
MHATTVAVDLAKSVFQIAVANEYWCIVQTQRLTRTQFERWFANRSVSLVIMEACGSAHHWARWLNGLGISVRLLPAQYVRAYVRRNKTDATDAAALLEAARASDIRPVRVKSVEQQALQGLHRIRSLWMGTRTSRINALRGFCREFGITIPQGARTGVETIGRVLADPRSAVPDLIRHTAGMLLEEIRLLEARIAQVERELASVARQSPACTLLLSVPGIGLLTATALVAATSGDVTHFADARHFSSWFGLTPREYSSGSARYLGRISKKGDRYLRMLLTHGARSVLRAAKVAEGAGKEICGIRRWALDVQGRSNHNKATCALANKLARICYATLRDHAPFDEAARLNKKQSRQSFALPA

SEQ ID NO: 324317 - protein, 368 aa, unidentified
MKKETITRNGISGESLVNDVNQVLNLGLDVHYRQVTVAMQEDGGRIKAGGKMGHADFLNWVRKKLEEGWKIYSCYEAGASGYWLHRELVKLGVKNLVVVPKAMGRGGQKQKTDKRDAGELCDSLDRYQRGQKKALSVVAVPTAEQEEKRALIRYHRQMMKDRGRCEARGKGLLCAQGIEVRGRWWQGDTWLTLTSDPRLKDWMKEQLVGWRSKILSTDEEQRALRQRIAALAPAILPKGVGAYSAAVLHYELRGFDHFKNRRQVGSITGLCPGVHLSDGRGKEGSINRCGIGIVRWTLVEMVWRLMIWQPQYPPVRRLAAGLVKSKRAKKRLVVQAARRLAIDLWRLSTGQTTPEKLGLVMQSNPPAN

SEQ ID NO: 324318 - protein, 335 aa, unidentified
MVITKQSIGIDVSKDSLDVVFKEQNGSQVKIKGSRKFDNKPNGFSQLLEWCNKREKCDNIIYVLEATGVYHEELLCFLYNNGKNVCLELPQRIKYFAKSKGIKTKNDKVDSKTIADYGLERQLRFWQPPSEQFRKLRDLSREHTDITNLKTVVQNRLHAAKHAHGKEIKTINRYYDQIKFYENQLKDIETDIKSVLKKDKKLSAKLNNVVSIKGIGIITAVKIIAETGGFYLFSSISQLVSYAGLDVVENQSGNKFGKTKISKKGNSNLRKSLYMPALSAIQYDNKMKSLNDRIMKTHIYKKQAIVAVMRKLLILVYTLWKNDELYDENYVWNQA

SEQ ID NO: 324319 - protein, 317 aa, unidentified
MTNTSSFVGIDIGQARLDVAVGKVGEEWSASNDTAGIQSVVERLTRLQPALIVMESTGGLEVPLMLEISKTGLPFARVHPGRVRDFARSIGVLAKTDKLDARLLAHFAEAVQPPVTDLPSEAEQQLNGLMVRRRQLLDILITEKNHLLSTPLFQRSDVEEHITWLEDKLAQFDQEIKDHIGRIPEFNEKQTILRSAKGVGPILCAKLLSGLPELGKFNRKEIAALVGVAPFNDDSGRRRGKRKIKGGRADVRAVLYMATVAAVRFNPILKHFYEHLLSQGKLRKVALVACMRKFLTILNAMVRDMRPFVYAPVPANP

SEQ ID NO: 324320 - protein, 322 aa, unidentified
MTYIGIDISKDSFVAAFPTVSGYQTQTYPNTVKGIRKFIGSLSVTEHHCVMEATGNYGFLLLYLLDRQGIAASMVNPKQIKHFSRMMMAVTKTDPKDACMIAMYGEKMNPRLQDAFRNRHLLKQKKTIIRQLKKQLTASRNLRSSLVVLPFQDKNGMKALDKTISFLASQIESLESELADLASSEFDRQVKLLTSIKGIGITLATALIVATGGFSYFNNAKQVSRFIGICPTYQQSGTSVHIKGGINRNGDASLRSLLYVASWSALRGNTTCKECYTRLKANGKPSKVALIAVANKLVRQAFAVIKSDAPYVDGFVSTQQTK

SEQ ID NO: 324321 - protein, 347 aa, unidentified
MKKNIANKEIKVLGIDLGKNTFHLHGVDRHGKMVFRKTLTRKKLVEFMARLKPCLVGMEACGGSHHWARKFREFGHDVRLMAPQFVKPYVKSNKNDKVDAEAICEAVQRPSMRFVPIKGIEQQDLQSLHRVRSLAIAQRTAQINQIRGLLQEYGVVLPQGACHVRRLIPELLEDAENGLTMWMRELLSHLREVLVRLDERIAEYDASVKAISQEDEGCRLLMTIPGIGPLSATALLAAVGDANVFKNGREMAAWLGLVPRQHSTGGKERLLGISKRGDAYLRTLLIHGARAALRGADRKEDRRSAWAVDVKRRRGPNIAAVALANKNVRTAWALLTKREEYRLQQAA

SEQ ID NO: 324322 - protein, 359 aa, unidentified
MISKYHEDGLSIIDTIPTKNFEGGHMNYIAIDAHSSTCTMCVLDSKGCEKDSSQIETNGRLIKNYLRSFTGKKIVTFEESELSSWLFDIIRPEAEEVLVCNPVAIKDYTKKKTDKLDSRKLARLLRGGFLVPVYHDGSKREKFRHLISGYNALVEDAVRMKNRYKSIFRKSGNKQTGTKIYNDGSLLEDISDAGHKFVGHHLYTLLVEMEKSREAYVREIKTQLKGFEEIKYIKSIPGLGDIQTAKIIANVVDPRRFANKHKFYSYCGLVRHQRISDGTKYGSNKIFGNRTLKCVYKMAGYSAINGNNVLNQYHAYLIKNGVNERNAYNAVCRKIAAISLAVWKNKKYFNDEEILKLIK

SEQ ID NO: 324323 - protein, 346 aa, unidentified
MSNHKLKGSVVVLGIDLAKQSFQLHGVDANGQVVLKKKLNRGKFSAFVAQLPLCLIGIEACGGANHWTRVFEKLGHTVKMIAPQFVKPFVKSNKNDAADAEAICEAVQRPSMRFVPAKSVEQQDIQSLHRVRSQAVARRTAQANQIRGLLMEYGVIIPQGISHIRKSIPLILEDAENELTAMFRELLAGLYDEMVHLDERIETLQNKLEALCAQNEDCQRLLSIPGVGVLSATAMMASIGDINAFKNGRELAAWLGLVPRQHSTGGKPTLLGISKRGDTYLRTLLIHGGRAVVRFADKHQDRRSQWVTQLDARRGKNISAVAVANKNARIAWALLSHKTMYQTSAV

SEQ ID NO: 324324 - protein, 338 aa, unidentified
MTTKISMLAIDLAKGSFQVCAVGPDGPVLYDRALSRTRLAALLAEQPTCIVAMEACATSHHWGRVAQRHGHEVRLVPAAYVKPFVKRQKNDRADAEAIAEAALRPSMRFVAVKSAETQGRAVAFRTRQCLVRQRTQLINALRGHLAEFGVVAPKGPASLKLLENALADEASDLPDPVREMGAVYVEQIARLTEVIERLAGELEAATKTDACLRRLSTIPGIGPVTAGAVAAFAPGLDTFDSGRNFAAWLGLVPRQRSTGGKAKLGSVSKMGQTDIRRLLIVGAMSVIRWVVRKGGSENRWLAAPVARKPKMVAAVALANKMARMIWAVTTRQEDYRMA

SEQ ID NO: 324325 - protein, 381 aa, unidentified
MKKNSIAKLQVTKSQLRRKAAKQRLTVGLDLGDRTSRYCILDEAGEKAGENQLPTSRAGMDAVFAKMAPSRVALEVGTHSPWVSRQLAGMGHEVMVANPRKVRLISQSVKKNDRMDAEQLARLARVDPKLLSPIRHRGAEVQADLAVIRARAGLVESRTGLINTARGLVKPMGERLKKCDADQVREALGEGLSEEAQNVIGPLLKSVEEITKQIQVYEQKIEEIEKRYPETKVLKQVSGVGRLVALTFVLTVEDAERFEHSRDIGPYLGLTRKQRDSGESQPELGISKAGDELLRWLLVQAAHCILRRGAPESDLREWGLRKVQAVGGKKGGKTRKKKAAVGVARKLAVLLHRLWVTGEVYDPQYNRKARETAKGKRKAAA

SEQ ID NO: 324326 - protein, 259 aa, unidentified
MAMLSFGGIDVSKDRLDVMVLPEEQCSSVPNDAAGWAKLVEQLRGFSISAIGIEASGGYERGAVRALLAAGMSVRQVNPFKLRQFARASGVLAKNDPLDARMIASFVAVMPTRPAQRQTPAAERLAEMLAVRRQLSAEKVAAENASRLLEDAMLQRLSRRRIARLAADIDMLDGHLVEVVGTDAPLAHRYRLLTSMTGVGTVLACTLIALLPELGGMTRKQVAALVGVAPYAFESGTLKGRRASGAVVRTSARCSTWRR

SEQ ID NO: 324327 - protein, 521 aa, unidentified
MSVYSPTDGRTSRNPITQWRSCEPAFQHGTRHCDQVSGDVTARSTSGGDDLVWEIASIFAAWPSLPSEKGAMSKKKYRNRRSSNKVFVRPVTNPDTAGIDVSPYWMYVAVPPDRDPEPVRKFSAFTTDLKAIAKWLKACRIRSVAMESTGVYWIPLYQILSDAGFDVCLVNARHSKNVPGRKTDVCDAAWLQYLHSVGLLMASFRPVQEICAIRSIARYRETLISQAAVQVQRMQKALDEMNLHLHHVIDDLTGKTGLAIVNAILKGERDPRVLASMRDKNIKATRQTIEKALEGDYRPEHLFVLGQALETWKHFGEQIAKCDREMERQTTALGSQVDTSGYVLLKRPSKNQPEGDWGRLLYGAFGVDLTAVPAINVATVLTLFTELGTDWSRFPSASRFASWLTACPDNETSGGKVLKRHTRRSSQRIKRALRIAAQSLWRSKSALGDKFRRLRAHLGTPAALTAMAHALARILWYMVTHKTPYSESIFALNEAKYQEKRRKRMIKEALTMGLQLVEVTN

SEQ ID NO: 324328 - protein, 341 aa, unidentified
MKITTVGIDLAKNIFAVHGVNEHGRTVLKKILKRDQVAAFFANLPDCVIGMEACASAHHWARKLQGMGHTVRLIAPQFVKPYVKTNKNDAADAEAICEAVARPNMRFVPVKNIEQQSVLSLHRVRQGFVRARTAQANQIRGLLSEFGIVVPQGIAHLVRRVPELIEDATNELTGSFRLLIERLMDHLKGINRQVRELEAQIQAWHRRDGASCKLASVPGIGPLTASALVASIGDATSFKNGRQLAAWLGLVPRQNSSGGKNVLLGISKRGDTYLRTLLIHGARSVMQAARRKECKSGWLHDLLQRRNANVAAVALANKNARVVWALLAHGGEFRRDHQATG

SEQ ID NO: 324329 - protein, 316 aa, unidentified
MQTILNLGVDVDSRYLVVACAARSFTPQRIVNERRAISGWLRSLPRGSRLAMEATGEYHELLAELACKAGLQVFVINPHDLRRYAQSIGRRGKTDRVDAEVIARYVAREHDELHTYVAPSKEQRALARFMRRRAKLVVLKGTLTQSLRGLPSVGAQLKQATAALDRLIAKVEQLTQRALEGVPAAHDTATRIATICGFGPIGSTCLAHSFTRVPYSNSDAVIASTGFDPRPDDSGKRRGRRRLSKHGASETRRVMFNCARSASKTKLWRPYYQAQRAKGLSSTAATVILARKMIRVAFAVFRSKEPFDPARLGFHA

SEQ ID NO: 324330 - protein, 368 aa, unidentified
MNTILYVGLDVDDKAFHATIINSNTGELTYLKTRPVLSKLTKKLLKYHSKSSDFKICYESTYIGFSLCRGLRSEGFNCDVIASGLIPETAGHKVKTDRTDSEKLAKFYMKDFLTRLNIPDEEDEAERDLVRSRTLVSKQVVKTKNHIQSLLRRHGIDYRNEEKALNLWTDKYRKWLYGKASKLNEHLKINLNLLLSQLEFLESSLKTYNQKIEELAISEKYKKKVDALVAYRGIETLTAMKVITELGDIKRFSHPRKLMSFLGFDIREYSSGGKERKFGITKYGNKVVRTALVEATQRCSTPPKVSYRLKHRRKETPAELVVVADKCMQRLYRKSNHLLAREKNRNKIKVACAREMCGFIWDSLMRVS

SEQ ID NO: 324331 - protein, 385 aa, unidentified
MAPPARPEIVIGLDVGKSSHWACVVTREGELLASKPVLNRENAIDGLYAQYPGALVVVDQVRNIGSLALSRARLAGMPRAYLPGLAAHGASRLFAGDAKTDERDAMVIAKTALGIPDALLPVADRPPEIEAARSLAAQRDFLTCENTRSKNRLRSILLESCPEFEAHADLSDPATLKLMAAVGGPWSISEASPQAVGALTRGCGRAKVAALVESVGSSSRPHPAAVACEDRAVRLLARRISENAAEIESLTSEISALLSADETRRCLLTVPGIGPRTASELVISIDIADFAGHDRLASYCGLAPRNRRSGTSISSVSASRQGNKRLKNLLVFSCNCLARSRNRWGGYYARCRDRGMPHGKALKAVARKRLKVIYAIMRDKVPYSA

SEQ ID NO: 324332 - protein, 369 aa, unidentified
MEKNIKSKSRQRRQTTKIRKSDRVTIGMDLGDKTSRYCALNGVGEVIEEGACPTTRKGMAQFFGALPHCRIAIEVGTHSRWISQLLKSLGHEVIVANARQVKLISQSSRKNDKLDAQMLARLARMDPGLLRPIRHRSEEAQKDLMTIRVRSALVEARTGLVNAARGLTRASGERLASCDADQMNVGKLEELPAELRESLKPLIKEVESLTEKIKECDRKIEQIACDRYPETKLLRQVSGVGPLIALTYILTIEDKERFKKSRDVGCYVGLRPKQSESGERQPELRITKEGDVYLRKLLVQGAHCIMAKRAPDTDLKRWGTELAGRGRKNARKRAIVAVARKLAILLHHLWATGEVYEPLRNSQAMAKAA

SEQ ID NO: 324333 - protein, 374 aa, unidentified
MSNIASLKTERHQFLYVGMDIHKDNHTAIATNCFGQNLLELAISNSEQDFDDLVAQIERLSRTKNLKPVFGLEDSYGYGLRLAKHLYEKGLSVKMVAPVLVDRDRQYETHPEKSDSLDALGVAKVLIQRIDRLPNYSISKNDEISKNIKELTLDREFLVKEQGRLKNHLHRLLHKSHNSEYRTKFKDPFSLKALKYWRGHPVPRKRVDTAGNIFILKNQIRRKVKRLLDIREETKEIEQELNCLIQQTNQKIETLNGCGTVLASQVLAEVRNIDRFHSPHSLAKYAGLCPREKSSGKTFRHIKTKSGNRRLNMAVHRIALSQISKSGNKRAKEYFQKKISEGKTKVQALCCLKRRLIDIIFMMLKHKQAYNYSN

SEQ ID NO: 324334 - protein, 337 aa, unidentified
MSYLGVDLHTNSFTVCRRTKQGKNSIGTFQIVRIADFRKTLRKHDLVAVEATGNTAWFVSQICDRVKKVTVVNPYQFEVIRRSVKKTDKHDAKTLAFFLSKDMLPEARMKTKENAQLHSLATTRDKLVKQRTALINKIHNVLNSYGIKFKKESLGSEKGLKSVWAYEWDEIVRIELVALVEQIRSLNKSIKTLDKEMTDHGQKLKGHKSLMSIKGIAGRSATVLLSVIGDVNDFADGNKLAAYFGIVPRVSDSNETVRHGRITKHGSKLGRTTLVQCTLVAKRYSPYLRQYYERIKSHRGTGKAIIATARKFLGIIYNTLKNGWVFEDFPNFVIANS

SEQ ID NO: 324335 - protein, 429 aa, unidentified
MNYTQNEKIEQVTDTTMVVGVDIGSQTHYARAFDNRGRELTKRVFSFQNDIEGFNSFHLWTEKLKNENKKTAVLIGCEPTGHYWFAFAKYVQDHQKTLVMVNPFSVKKIKELDDNSPKKTDAKDPKTIAKLVVDGRYSIPYMPEGIYAEIRDLVYSRDRIMKQHNISANRIQRWLAIHFPEYLGLYTRFDATSGLAVLEQAPLPKDVIALGVEGIRKIWHDKKMRGRGVTEDRAKTLVEAAHNSVGLDGGIGTKSELYMLLEEHLLWTSQLEAVNKVLEESIRKVQHVEKLLAIKGVGSVTIAGFIAEVGDIRRFKSPKQIQKYAGLELVENSSGKYKGRTRISKRGRRKLRKSLYQVMVPLLARNKEFRTIYDYYVTRVKNPLKRRQAMIAVSCKLIRVFYAVLTKGVDYDRFKMMSDIHHESGLIAA

SEQ ID NO: 324336 - protein, 412 aa, unidentified
MEVIYPCCCGLDVHKKSITACVLWAEAKGKSRKQKKRFGTFTHDLLQLADWLGQCGVTHVAMESTGVYWKPVWNILAEQFEALLVNAQHIKAVPGRKTDQKDSEWIADLLQHGLLRGSFVPPQPTRELRDLTRYRVSLVQEINRIANRIQKVLEDAHIKLASVATDALGASGRAILEAMLAGEEDAARLAEMAQGKLRNKIPELKLALEGRVTEHHRFLLRQLFEHLRFTESKMQQIEEEIERRMCPFEDKVIRLCTIPGVDRVTAWGLLAEIGLNMDQFPSSAHLASWACLCPGSFESAGKRLSGKMRKGNVSLRRCLSQAAWAISMMKNNYLSALYRRIAARRGAKRAVMSVAHALLVIAFHMLKRKENYHELGADHFDRIDIGRVRRSLVRRLERLGHKVTLEPLAQTA

SEQ ID NO: 324337 - protein, 338 aa, unidentified
MKLYGAIDLHSTNNVMVVINEHDQVVYQKRLPNDLSLIAQQLSSYRRSLEGIVVESTYNWYWLVDGLMEKGYRLHLANTAAIQQYNGLKYTDDHSDARWLAHLLRLGVLPEGYIYPKQERAVRDLLRKRGQLVHQRTANLLSIQSLISRTTGNSISAQYIKALNIERVDGVLPNSDLVLALKANLAVMNSADGQIEILEKAVQDRVKLRPQFRFLKTVPGIGPILALTIMLETGQIERFASVGNYASYCRCVGSKKISNGKRKGSGNTKNGNKYLAWAFVEAANFAIRFNSKIKGFYQKKKSKRNAIVAIKAVAHKLCRACYYIIKDQVAFDITKAFD

SEQ ID NO: 324338 - protein, 418 aa, unidentified
MALNIDVSKMVILHTKDRVMTAFISPKEFIVGIDVGSLNHAVAISDEDGKILKEFEMPHTSKGFDLFFKTIEKIAHQNNAILSIAMEGYNGWARPLDGLIQQRGYKLYNVNNLKLTRFKEIFPGAAKTDRIDARKIVELFHLQKHIPVSKKVLQEIRPSDDVNARLKKITRRRKQLVEEKIAIINRFTTELQSIAPDLRKITSTVNNLWFLRFVTLKKDIRHLVKLRANTILTIERLSSKKLALIQAWQKEASFSAELDYISPMLYEDAVRILELKTKIKQLENDIAKLIPLSHIAKTIQTIPGFAAVSAGELAGEIGTLVRFQNEASLALYLGMTNLDNSSGNYRGSKLNISTSKQAKMTMITATMKHTQHVEESKRYLEKKKAEGKKYQQAIRSIERHLVRVIWSMIQQDRAYEIR

SEQ ID NO: 324339 - protein, 318 aa, unidentified
MNMKTNQSINVGVDTGKYQLDIYIRPLDIYFTVENNEKGIKEAVKTIKKYNPNRIVIEATGRLEMPFILACAKASLPFTIANPVHIKRFAGALGQRAKTDKLDAQLIAHYSEAIQPKLSRLKPDTMQAMSDLVTRRNQLLNMQTMEKNRLQIMPKELAMTIKPVLTLFKNQIIKIEDKIVKLIESCPEYQAKNMILQSMKGIGKIAAASLISNLPELGYINSKQASALIGVAPINRDSGRYKGQRKIQGGRPQVRTVLYMAMMSAMQSNPVFKATYQRLLAAGKPKKVAIIACIRKMIVILNSMLRDGVMWEAPKVIN

SEQ ID NO: 324340 - protein, 484 aa, unidentified
MASKHFKLSGKPAGVTITAGIDVHKYKLQVFVLGRLGREDKPLGEQTFCNDATGRTELCRYLQAYYPDEIVMEKTGKLSDPVLDALNKHRGWKKGVPRVSLVPPDAIKRYPGEKHTDPNSALKLAMLGISGLMNPMRIPTEAGEQLKLLTRESERYITQSTAIINGMKDMLSGLGYTLPDLTLTSSWGLALLKLLLADGIAGNIAKVYELLEGGHLNLHSSSKKALLDRKAKYMQYSYLSISPFNARYLQRQLFALEMAESLKASNTKQLEDLVNETPLVKSRVQAIEHVGGISSPGAAGIIAEVDDIGRFGSWKQFALYAGRAIAPDESGEHVGKPHMTKRCNHHLKRIFKQAGLTACFNLQEDSDIKRYALRELGKHPRVPMIACANTSAKIVKIVYKILHDNVIYEPLHDVTKKNGLFLMHGIASSDEKTYSLSEARRRANRFRKFTRQSVKDLPPGEMKSMLTRVLEILDKALDKTGVKK

SEQ ID NO: 324341 - protein, 432 aa, unidentified
MKHNQSSKQNQRIERISETTLVIGTDIAKNNHVARAFTYRGIELGKRCLFQNDEQGLLNLLAWAEALKQEHGMNDVILGVEPTGHYWFPLFHFLKGHGIQVVLVNPHHVKKSKELDDNSPTKNDIKDAKVVAKLVIDGRYSEPQLPEGIYADLRVLMNQRERLNGDLNRVKGRIHNWLDRFFPEYTQVFKDWEGKASLITLGQFPLPQDVVSVGETTIVAAWKKNGVNRAVGPKRAELLYRKARKSIGLTEGAAAARHELAMLLEQYAMLCRQMDQLMALVAELVEQIPGAAEMMSIPCIKLITVAGFLAEVGDLSRYDHSQQIVRHAGLSLREDSSGKRKGETTITKRGRCRLRALLYRAALTLVAKNPEFRALHAYFTTRRDNPLKKKQSMIAICTKLIRVLFELGRKKKAYDASKVLGPHREAQLQAAA

SEQ ID NO: 324342 - protein, 339 aa, unidentified
MVSHSRSRSIPAASAGRLACAGSGGLSFAGPLCVGADVSKAWIDFCDTQGRTKRVDNRPEAIEAAFVGPWADAAFLVCEATGGYENALMQTAAKLSLRLRRVHPSRARAFAQATGRLAKTDPLDAAILARFALFTFDEPAPPAPSAQAQELAAMVSRLNQLTDLRQSEICRAKLAPGKAIKATIDLMLKAIGEQMAAMQKAIDAFIAADATLAENARLLRSCKCVGPKSVQMILALLPEIGKLNRRKIAALVGVAPITSKSGSSIDHASIAGGRKALRDCLFMAALAASRHNPTFRAFGERLTAKGKPHKVVIVAIMRKLVTTLNAMIASRQTFQSALT

SEQ ID NO: 324343 - protein, 423 aa, unidentified
MMKLKYSICCGLDVHKNVIVATIVTTNKDGISEYLQKSFSTINSDIQRFHNWLIENNCYHVCMESTGKYWIPIFNYLENDIDVCLTHPKYVKAIKGKKTDKKDSKWIADLYKFDLVRCSFVPPKDFRQLREIARYRFKLVCMKSSEKNRIQNCMTVSNVGIASVLSDPFGKTSTEIMSYLLKHTADSMDEKAVRKLIKQRAKAKSDEIIEAIKGYSIETDQAKKLKLARGHLKYLDDMITQTEVELYVRIKPYYEIVEFVSSMPGMTDLSSTIILAETGVDMTVFDDAKHLCSWCGLSPANNESAGKKKSVRISKAGDYLKPMMVQCALAAIKSKKQPYFAIKYGRIKKRRGHKKAIIAIARMMMVCIYHMVSEKKPFTPTDYEELIDSQNHVERVVLNENNVFAYLESLGYDSSKLVKRNDN

SEQ ID NO: 324344 - protein, 342 aa, unidentified
MGELTTIGLDIAKSVFQVHGVDAEGRVVIRQRLTRRRLLPFFTKLPRCRVGIEACATSHHWARELRGLGHDVRLMPPSYVKPYVKRQKNDAADAEAICEAVQRPTMRFVEPKTVEQQSILMLHRVRLMLTRQRTQTGNAVRAHLAELGLVAPIGRKGLASLLDIIADESDARLPATTRACLSMLAAQLQLLAAQILQNDRAIREAARASEVGHRLMEIPGIGPLLASALVASVPDPAMFKSGRNLAAWIGLVPKQNSSGGKQRLGGISKQGNRYLRQLLVVGAIAVIRYAERHGTKRPWLVKLMSRRTTKIAAVALANKTARMAWAIMTSGEPYREPKLAAA

SEQ ID NO: 324345 - protein, 441 aa, unidentified
MNRVIPTSGAAKSQRKESEMKTWNDMTHFAGFDWAKDHHDVLVLDGAGKIVSEFRFDHTAAGWALCQEKLAQFPQVAIAVEAGHSAAIEKLVTLDYRVYPVHPRSSKSYRTRRLPSGTKTDRADCWALADALRLEGESWRVLTAPEPLVQRLRLLCRDEVALIEQRTALVNQLQQALYEYYPAALEAFGDWCAPSAWAFVERFPTPQSLVQAGKRKWQNFLHAHNLFHPEWNQKRMEIFAKADQFCGVEATIAAKSALAVATVKILQTLEAQLAGYRALITDCFKQHPDHALFASLPGAGPKLAPRLLGELAALKPLADTPQALQCLAGMAPVSYQSGKVSVVYLRYQCNRFLRATIHLWVDLSRHYCDWARIYYEAHRKKGQSHACALRCLGMRWLKIIAAMMRHQTPYDAAIHTRNQLQHGSWVLQLQPVQVVKKNGGD

SEQ ID NO: 324346 - protein, 392 aa, unidentified
MRERITEMQMMIEGQSHFQPFGLSYWGFEDLNKGVGSMTASYEYHIGVDYHKSYSHLVVQDSSGKTLRSGRVKNDRQSLGGFLERYRENSHAVVEATRNWMVMYDWLDDICDDVVLAHPLKVKAIADAKIKTDKIDATVLAHLLRADLVPEAWAPSERSRDLRVALRERMFYVRLRTMTKNRIVTVFDRYPEQTAQLKKLGDLFGKAGRVQLAQVNVSEIDRIQIDRGLAFIGDIDMRIKQSEATIRAMTKANANVKLLKTIPGIGEFFARLIDAEIDDISRFRHPKKLAAYAGLVPSTYSSGGKTFHGKIIKQGNKWLRWAFVEAVTPAIASDPQLRAQYEHLKIKGVNKARVAIARKLLTIAFQILRDQRAYEPRGTATMEGASTISRLS

SEQ ID NO: 324347 - protein, 344 aa, unidentified
MDNHTQYSGFAGVDLAKKVMQIHFVTGDGEITDKQVKRAEFLDFFRNRTKCLIGMEACGASQDWARKLEAMGHEVHLMSPKAVKPFVSGQKNDYNDAIGIYKAMFNGVRRVPVKSTEIRDLQTLRRIRSQVTKDKVKEINHVRGLLAEYGIVMGKSITAFNKGISSALESLKERGDVSPLVAEELRTTVESIKTKIERQKRLDREIEQLARGCKNYENFLKTPGVGPFTAAMLCVLLCDPAIFANGRQFAAYIGLAPRSRGSGGKNFIIGIPSKFNCDSESRAVFVECAQALARYKNKSPWVDGILRRKPKKVAVIAIANKLARQVWAMANKGESFKQMTILTA

SEQ ID NO: 324348 - protein, 372 aa, unidentified
MRFVGIDLHTNCFTCCYIEGNEGKRTITYRLDEEGIGEFRKTLDKTTHALIEATLNTFAFVERFQELVGSVTIANTYRLKIISFTNKKTDRVDAEKLARIIKSQILSGEEQIQPVTIPPKVVQDLRALLSTYRLLTKEITITKNRIHSLLKQHLIQISRAEVFNKKNRSAVREISDDPVLRFQLNLLFDSLEVLEAELAVLSEKIQVTAAPFLHEIDILTSMKGISVMAAIAIMSDIISVDRFPNSKHFASYLRSVPKVASSNETTFIQHTHRWGRKMTMVFLSQSAHHCRDADPHLSNWYEKLTQYKKKGLVRMGLCRLVITQLYQMLKKDKYCYYRDEANHASKMAAYCALLSRHGIEVEKTESALRIAS

SEQ ID NO: 324349 - protein, 476 aa, unidentified
MNSKTKRANNQVNSVMNVQEQREMVEKANRILSEMKSFTWRDLETQGKFSKNDKLSFISDDMLILGCDIGSETHYVRAIDTRGRELSRKALAFDNNAEGFQKAHDWAVQLAAASDKKQIVLGLEPTGHYWFCLAAWMVSNGISVVQVNPYAVKQTKELEDNSQQKDDRKDPKLIANLVKDGNYGMPYLPEKVYAELRRLSMFREQLTEDRNRSMNRLHREMKIYFPEYKDAFGKIDGAFCMAVLKEAPFPEDILKLGGEGIREIWHQAKLRGRGYSRAAEIVKYAETSIGLKDGTAAGREAVRWFAEKIMELDEELAEVENKLNEKCREIPHAENVLEIPGIGGKILSGILAEMGDISRFDDAKELQKLSGLGLVSCSSGKHKGETRISHRGRKRLRYWLFQAARSAVAHGEEYKWIHAHYTTRAGNALQKMQSLIVIACKLLRVIDTMLKTGKPYDPEKLLKDIRYPENVQTAAA

SEQ ID NO: 324350 - protein, 348 aa, unidentified
MSVTMIGLDTAKSVFQLHGIDATGRVQLKRKLRRGELIPFFEQQPPCTVVMEACGAAHYWARVLSGLGHEVKLIAPEAVRPLVKRGKKNDAADAAAICAAASRPDVKFVPVKSLEQQNVLALHSARTLLVKQQTMLANALRGLAAEFGLTAPKGMNKLEDLTALVEADEAFPEQARRVFTELLEHCRATADRVATLEAGIVAHARQDDTARRLATIPGIGPITASPVAATVGDGIVAFKSARHFAAWLGLVPRQHSTGGKTRLGRITKTGNREIRRLLVLGATSMVYRAARWNSAAGAWTRGILERRPVRLATVALANKMARIAWALMTRKEVYQARGRVIAAAQAAA

SEQ ID NO: 324351 - protein, 375 aa, unidentified
MFYSGIDLHKDNCFITTVDDRGETVKQERVPNVPEIILAYFASLPGPHKAVVECTAGWYWLNDLLEAHGIELILAHANYLKAISYAKVKTDKVNSETLAKLLRLDSIPQAHKIRRDLRDLRDLMRARLRLVQKRTSCCVSIRNLGRKLNCGAQLVIEKRTIPEDLPEAYRLHLRNLYEQINLLDTQILNLEHFLQPVLIPNDDIQRLVWVPGIGKTTAFTVYLEADGIERFLSDKHFVSYCRLVPGAKNSNKSLRHKSGCKDGNKYLKIAFTDMAVHAIQYFPEYRRLYQKIRRRSNEPIARTVVAKELAKIVYHILKNKTEYRGLKGQPISHQKANQYPRLKRRSQPKAVTPLASLATPGKPVRLTDESSASAA

SEQ ID NO: 324352 - protein, 416 aa, unidentified
MDVMFKFCAGLDVHKKIIVACVLLSSPEGLQRHIKTFPTMLAGLEALAAWLSGFGVTHVAMESTGVYWKPVYNVLSAQFDVWIVNARDLHQVPGRKTDVKDAEWIAQLMRLGLLNRSFIPAVEQRDLRDLTRYRTRLTAERAAASNRLQKVMEDANIKLAAVASDSQGVSARAMLAALINGETDPAKLAELAKGRLRAKIPALEQALAGRIREHHRFMWREVLEHIDELNTRLLLLNARIRDLTAPYESIIQRLAAIPGVDRYTAEVILAEIGPDVTAFPTAKHLASWACLCPGNNISANKRRSGKTRRGNNWLRTALVEAAWAASRTKDTYLGSQFHRLRARRGDKRAAVAVAHSILIVVYHLLAKPEAVFTELGGDYFLKRNPEQEQRRAVRKLEGLGFTVTLTPVGATAATAA

SEQ ID NO: 324353 - protein, 351 aa, unidentified
MLIIGLDYHPEFQQIAFIDDESGEFGERQLLHQNGEAEKFYRELKRRGVKARIGMEATGHSRWFERLIAELDFELWIGDPAQIKAKRVRKQKTDREDARLLLTLVLENRFPRVWLPSPENRDLRQLLWHRHRLVQMRTRVMNQLQAVAMNEGVRHKKGLWSNAGRAQLESFSLAPWAAQRRQDLLELMDQLNPRIEELTTAVKKEAQKMPEVLRLMTHPGVGELTALAFVLIIGTPQRFQCGKQIASYLGLIPCEDSSAGHQRLGHITKQGNSLLRFLLVEAAQAAARSHPDWRRRFLHLAMRRERRIAKVAMARKLAVCLFWMWHKEWNYQQLLKFGSHAGDSEYVHGVQ

SEQ ID NO: 324354 - protein, 401 aa, unidentified
MIISPQLQVAVDVGCRRHRVAVGNVAGAVLEEFDIEHNAAGLAEFFARIERLRAERGWPVAVAMEGYNGWARPLDRQVLLRGWRLYNVNNLKLARYKEIFPAPSKSDAVDTRRMLELFRLHGQLRVARNVLQEVAPVPLENDQLKRFTRRRRQLVGEKGRVLNRLQSDLQAVCPGLLSITGEADNLWFLNLLACREDIRKVVGLRRATLLSLQGVGQKYAAVIQGWQKQACFSAEAPWVGPMIVADARRVLELKGQIHALDHAIAGLVQRSEMAGHIDTIPGFGPTCSGELAGEIGTLERFRTEAGLAVYLGMATLDNRSGDSNGAKPPRQVNTRAKAAMMVAVARHVEQVPASRAYYEKKRTEGRTHNQAIRALGRQLVRVIWSMLKRGRDYELRAAVPG

SEQ ID NO: 324355 - protein, 368 aa, unidentified
MDKSPAYARLLTVASAGDLPTAREGSVKQYVGLDVSQKQTALCVVDQDGKVLFESKIPSDPGVLARVIRKRAPEAERIGFETGCMSSWLWHELKRIGLPVVCVDARHAHAALSVRMNKSDPNDARGLAELIRVGWYREVRIKSNESQAVRSLLVVRSRLVKIRRDLENQVRSLLREVGLVLPRAVGSRFRKQVLSLLDEKHILWSIIEGLLSIHQQVEGQQATLDKRVRMAARSDETTRRLMSVPGVGVVTALAFRHTIDDPTRFRSAQTVGAYLGLTPRRTQSGELDFNGRISKWGDRMLRTYLFEAATVLLHRTRRWSALKAWGTRLMKRVGAKKAKVAVARKIAVILHCIWTDGTSFEWGVQKPV

SEQ ID NO: 324356 - protein, 359 aa, unidentified
MSKITTIGLDLAKKVFHVHGVDVAGNVVVARRLKRKEVLAFFAKLPPCLVGVEACGSAHHWGREIAKLGHTVRLMPPRYVKPYVKRGKTDPIDAAAICEAVTRPTMSFVPIKGVEQQGLSMLHSARSLLIGQRTQLINAARGHLSELGIVAARGLLGFAELAAIVRDERDQRLPATARAALMVLVRQIEAISAEIASLDSILMKENKASELGSRLDTIPSVGPVIASAFRARVTDAKLFENGRHLSAWIGLVPENDSTGGRLKQKGLSKKGDRYLRSLLVNGAMAVVRQAQKRPDKHPWVTKLLGRMSAKQAAIAIANKTARIAWALMVHGGVYETGHRAPPYRAQACAAARIRGWAMG

SEQ ID NO: 324357 - protein, 341 aa, unidentified
MQITTIGLDIAKNVFQVHGIDAAENVIVRKQLRRGQIIAFFEALAPCLVGMEACATSHHWARELTKLGHEVRLMPAKDVKAYVKRNKNDAADAEAICEAVRRPTMRFVRIKSAEQQGQLMLHRARDLLMRQRTQLINALRAHLAEVGITAAQGREGIKELLAIIAQDEGSRLPVDAHASLTVLAAQLQAVQTTIGSIEKRIVAQHRSNEASKRLETIPGIGVVGATTITAVVTDPKAFRSGRDFAAWIGIVPRQDSTGGKQKLGPISKQGDQYLRRILIVGAHSVLRRARQQPQKYPWLTQLLARRPFKVVAVALANKMARIAWALLARGGTYRAPQLVAV

SEQ ID NO: 324358 - protein, 404 aa, unidentified
MEVLHRRCCGMDVHKRTVAACLKTGGKTEIRTYETTTDELRGMALWLKEAGCTHVAMESTGVYWKPVYNILELSGMEIEVVNARHIKAVPGRKTDVKDAEWICDLARHGLVRASFIPDRSQRELQELMRYRRSLIGERSREVNRIQKVLEGANIKLSSVVSDVMGVSARAMLEALAKGETDPDIVMTEVHTKLKATPDELRKSLAGFMGQHQQLMLTTQLAHIDLLNEKLADVDTEVERRMSPYHAIVARLDTITGVGRITAQEILAAIGTDMSRFPTARHLASWAKVCPANHESAGKRRSVKTGKGNPFLRATLVEAAKAASKSKNTYLHSRYYRLLRRGPNKATIALAHSILVAAYYVIRDGVEYRELGPSHLDQTDVRATARRLTRRLQKLGFTVTIAPAD

SEQ ID NO: 324359 - protein, 310 aa, unidentified
MDRIIVGIDVSKDRLDVAVRPSGEAFAVSRNAAGIEQLVGRLRKLSPHIVALEATGGFETVVVAALGAAGLPGAVVNPAQVRAFAKALGQRAKTDPIDAGVIAHFAEATNLEPRPLPDEQTRLLADLVARRRQIVAMIGAERQRQQRLTAPRLSKSIARLIKALEKELASLDADIGDAVQGSPAWRAKEELVTSVPGIGPVISRTLVADLPELGQIGHKQITALVGYAPFTRQSGKWRGKSFIGGGRTAVRAAIFMGAMVAKKHNPVLKAFFDRLVAAGKPKLVALIAVARKLLIILNAIVRDNRPWQNA

SEQ ID NO: 324360 - protein, 323 aa, unidentified
MSSPAIYAGVDVSKAHLDVALTGTEERPRFANTERGIAELVSQLEAAAPELVVLEATGGFEVPVAGALAAAGIPVVVANPRQVRDFARSTGQLAKTDALDAGILALFAERVRPAVRPLPDAATRALDALVGRRRQIIDMITAEKNRLGFALPAVQKGIRKHIRWLERQLSDVDDDLDEQIRQSPVWQAKSDLLQEVPGVGPNLARTLIAELPELGQLSHKEVAALVGVAPFPRDSGLMRGKRMVWGGRAPVRSALYMSIWSASKWNPVIRVFYERLRSKGKSPKVAQVACMRKLLTILNAMVRDGRRWDPQIPLQQLQAQHSC

SEQ ID NO: 324361 - protein, 449 aa, unidentified
MGNGSGVSRGDRNRNARLARLRTLVPATNAIVGIDLADNKQMVVVTDHDSKVLARKTFRCRAWDLGAALDWAGKQAAAQGFAAVTVACEPTGHRWRVLGQLAAERGMPFVCVQPMLMSWARRSEDLTFDKTDEKDAVIIARLTAQLRCYVPEPVDETWGRLRHLGARREQLLVESGSQVQQMRALLECVWPAALSTARQPFRSSTWTATMGVVLDRDGGDLARTHRLGLARLVSAVRREITRRGKQRPCLRIVRLLFAALTDGAGVTAHRPGTLERVCLLLGDWRETHRRLLDTEQRMTSILDELRLTELVTSITGLSAIGVAAILAQTGDPHRFATARALVKHAGLAPREKLSGTFVGRTKLTGQGRPSLRLAAWRAVWGAQRANPVYAARFTHLTTRDHNRLTATQAQAVIAAAILRQLHAVITTGQRWDPLIATHGTKQPGVPIAA

SEQ ID NO: 324362 - protein, 403 aa, unidentified
MNAVGIDVSKGKSMVTILRPFGEIVSSPFEIKHTSSDIHSLIKLIHSIEGESRVVMEHTGRYYEALAHQLSAADLFVSAVNPKLVKDFNNDSLRKIKSDKADSVKIARYALDKWQSLEPYSITNELRAQLKVMNRQFHFYVKQKTAMKNNLIGLIDQTYPNANTYFNSPTRSDGSQKWVDFVSTYWHVDCIRKMSLNAFVEHYQNWCKRKKYAFNKSKAEEIYTKTKELVPVFPKNEITKHIIRQAIDQLNSTSVTVETIRTLMNETASKLPEYSIVMQFKGIGPSLGPQLMAEIGDVTRFTHKGALTAFAGVDPGVNESGSYAQKSVPTSKRGSSNLRKTLFQVMDVLIKTMPQDDPVYQFMDRKRTQGKPYYVYMTAGANKFLRIYYGRVKEYLSVLPDPS

SEQ ID NO: 324363 - protein, 471 aa, unidentified
MTCRRLVGIDLGIASAHTVRVLDETGATIAKRKAWPTTESLAEVEAIALGGAPAGTRLEVVMEPTGPAWLPIAVFFAARGHLVFRVSSAKSADLRRFLSRHTKSNGIDADTLARLPLFDPTGLAPLRLPDAGPAALDRRVRATDRLTRAGAEHKLRIKDLVRQLLPMTPLTGDLGVSDLVVLQRYADPHALIRLGSARLTELIVKTSHGHLGADRAEEWLAAARASLELYGEHPAVAFADLAAEVATEVRLLIAIQAELAAHAEARETAYRWVDPLGLARSLPGVAEIGAPALVAAIGDPTRFPNGKAFRAFTGLVPRASETGDTDRKGQPMSKAGSSLLRTTLVRAADNARHQDPQLARIYYLQMTERGKDHLGALCVVAAALAERFWTVMNRGMPYVICDTDNNAVTPAEAKIIIAELWTVSPEVRARRRSKKTGKAPQKVPTGPTQRGDLPHPRSSTPPAADVNKRTA

SEQ ID NO: 324364 - protein, 324 aa, unidentified
MTDAVLGIDVSKTTLDTSLLAGAKPRSRSFANSSEGWHQLIAWLAKEKVRQVHACLEATGRYSLGIALALHEAGHVVSLVNPAQIRDFARTKLGRNKTDPVDAAHIREYAELFKPRPWIPPSPALRRLCELQTIRAGTVAGLTEWKNRSTSGMVDDRALALAKATIQHLTSQLEAVDQAIAETIDNDRELCAKRDLLVSISGVGETLAGIVLAELPGPEVLGSSAAVAAYAGLNPRQHQSGTSINRPARISKIGNAVLRTALYMPALSAMRYNPAIAALVDRLKAQGRLKGKQIVVAAMRKLLVICFGVLKSGKEFDPTIAMGQ

SEQ ID NO: 324365 - protein, 354 aa, unidentified
MLIIGLDYHPGFQQIAFVDTETGELQERRLQHREEAEKFYRDLAAQGVRVRVGMEASGHARWFERLLAELNFELWMGDAAEIRTKRVRKQKTDRQDAQLVLQLLIEDRFPRIWVASWENRDLRQLLWHRHRMVQARTRIMNQLQAVALNEGLRCKKRLWGEAGREQLESFRLAPWASRRRRDLLELLDRLNPTIAELNQAIEQQVEKSPEAQRLMTHPGVGPLTALAFVLIIGTAERFRSGKPIASYLGLVPCEESSGDRRRLGHITKQGNSLLRFLLVEAAQVTVRSDPAWRSRYFHLAMRRGRKIAKVAMARRLAIRLYWMWRKGWDYEQLTKFGSHAGQPGNRFGEPLNTE

SEQ ID NO: 324366 - protein, 426 aa, unidentified
MNYTQNQKISQVTEETLIVGVDIGSETNFARAFNWRGQELSKKVFRFNNSQEGFQSFLAYLNTYTTIASAKQIIVGCEPTGHYWFNLARYLEENNIKLALVNPYHVKQIKELDDNSPKKTDLKDPKTIAKLVVDGRYSYPYLPEGIYADLREAVSSRERIVKELNAITNRIKRWLKIYFPEYLVVYKNFSAESGLTVLETVPLPQDIVQLGPEGVNQLWRDKKLRAVGMKRALTLVEAAHNSIGLPGGSCARMELQLLLEDFRTKQSQLEMITEVLEEETLSVPYADKLLAIKGVGLITVAGFLAEVGDVRRFDSPKQIQKLAGLEVKENSSGKHRGRSSISKRGRKRLRKILFQVMLPMIQNNAEFGEIYQYFTTRQKNPLKGKQAIIAAGCKLIRVFYAILKHGVDYDPGKLRADIIHPELEAA

SEQ ID NO: 324367 - protein, 415 aa, unidentified
MSSFASFAGFDWAKEKHDVTIVAPDGRILEQFQFEDTAEGWGRFQKQITPHLPMAVAIETSCGAAVDRLLQLGVAIYPIQPMAAKRYRERKAPTGVKDNALDAWSLADALRLDGHTWRSLQPEDPLTQELRILSRDEVALIEQRTALINQLQQAIYEYYPAARQAFKDWTSPASWQFIIQFSTPEMLIRAGKRKWERFLKSNGLHKAETNAERLEIFANAKQFHGTPPVTAAKSVLAVATAKQLLTLEEQLTTYRRRIRDLFAQHPDHEIYDSLPGLGEKLAPRLLSRCAGDRFGSTQEMQCVAGTAPVSQESGKSRVVKFRYACDKLLRATVHHWANLSREKCAWAEAYYQRKRDYNMSHAAALRCLGHRWLKILYKMLATRTLYDEALHLRNQVAHGSWVITLMPNSVPAKPS

SEQ ID NO: 324368 - protein, 374 aa, unidentified
MKEKVRFLGLDVHAETIAVAIAEQDGEVRSLGVIPNRAEAVRKLVKKLGQAEQLRACYEAGPTGYVLYWQLTELGVECAVVAPTLVPVKAGDRVKTDRRDALKLARCHRADELTAVWVPDAGAEALRDLVRAREAAKQDQLRARHRLSKFLLRTGQRAMPGVKAWTQPYMAWVRQLRYAQAAQEWTRLDLLHEVEHMGERVKRLEEAIREAVKLAPAAMQEAIRGLQALRGVAEISAVTVVAELGQISRFESARQLMGYSGAVPSEESSGQRTRRGSITKTGNAHLRRIAIEAAWSYRLKPAVGPALRKRQQGVPEEIKEIAWKAQLRLHKRYARLAAGGKDQRKIVTAVGRELLGFIWAIGVKTEAAGQALAA

SEQ ID NO: 324369 - protein, 341 aa, unidentified
MSTVTTIGLDIAKSVFQVHGISATGAVLIRRQVRRGQVLKFFASLPPCLIGIEACASAHHWSRELQSLGHQVKLMPPAYVKPYVKRQKNDMADAEAICEAVTRPTMRFVETKTPEQQSVLMLHRVRLMQVRQRIMLTNAIRAHLAEFGLVAKIGREGVDELLLLVRDGDERVPELARTCILALAEQLVLVKRQILEMDRRITACHRASEVSRRLAEIPGIGPLLASALVAHVPNPKAFSSGRNLAAWIGLVPKQNSSGGKERLGGVTKQGNRYLRSMLTVGALAVIRFAQRHGTKRPWIVQLLARRATKVAAVALANKMARMVWAIMAKGEHYREPVVQAA

SEQ ID NO: 324370 - protein, 312 aa, unidentified
MNQNITSVYAGLDIAKASLQLHLQNRSYDLSNTSAGHAQLIKRLAAIPGAHVICEATGGYERAVVAALQAANLPVSIINPARVRQFARASGELAKTDPIDASMLTAFGFAFAPDPTPPRTAAEIKMAALVTRRAQLLELRVAETQRADTCAEPSLSKLFRSWLPQIEKQITKVEALIEELLAEQTTLAHHVERLDEITGVGRITAVTVLANMPELGQLNRRQAAALAGLSPYNRDSGQWAGKRCITGGRNEVRRALYMAALSASRRNHHLKPFYDRLIAAGKPAKVALTAVMRKLIILMNHLLKNPSFSLAH

SEQ ID NO: 324371 - protein, 389 aa, unidentified
MPTEVDRAETPIAIQTHFAAIFISLELSRSVWLITSLKPGGGERMSKHSVRAGDVAALLSQLSDLKQKALARTGKSFPLVTIQEAGLDGFWLHRVLKKEGIESHVVDPASIATSRRRRRAKTDKIDGEALLRALLAYKRGEPRVCAMVKAPTPEEEDRRRLSRERKVLIAERVEHVNRIKGLLFTQGIADYKPLRRDRRQRLEDLTTGDGRPLPTHLKTQITRELDRLELLIDQIKLTEAERDALLATQQNTSPAPAGRMLLDFKGIGAEFAVVLWLEGLFRHFDNRRQLAAYAGLAPTPWQSGSIDREQGVSKAGNARLRTTLIQLAWLWLRHQPHSALSRWFHERVKRDGGRVKKTTIVALARKLLVALWKYVTTGVVVEGAIMKAA

SEQ ID NO: 324372 - protein, 352 aa, unidentified
MLIIGCDYHPSMQQIAFVDTETGERGERRLMHRDGEAERFYRELKQRRVEVRVGMEATGYARWFERLLAELSFELWIGDPARIRARRVRKQKTDRQDAQLLLRLLLEKDGFPRIWVPSPENRDLRQLLWHRHRLVQMRTRIMNQLQAVAMNEGLRRKRALWSEAGRKQLESFLLAPWATRRRKDLLELMDRLNPTIRELTGAVEKEAENKPEVQLLMSHPGVGPLTALAFVLIIGTPQRFHCGKQMGSYLGLIPCEDSSADRQRLGHISKQGSSLLRFLLVEAAQVAARVDAEWRRRFLHLAMRRGRKIAKVAMARRVAVGLYWMWRKEWDYQQVVKFGSHVGQLELRHGVQ

SEQ ID NO: 324373 - protein, 449 aa, unidentified
MPPFERESQTLDVHAGSAVGAPISRSGREPTVEIIFERVAAIDVGKKIIAVAVRTPGERAGTRRQLVRKFNTYYRTLVEMVAWLVAEGVTHVSMEATGVYWRPVFHALCEAERPLEVLLANAGHVKNVPGRKSDALDAVWLAKLTECGLLRGSFIPPPEIAVIRELTRYRKKLIEARTSELQRLGKVLEDSGIKIDSVASKLTTLSARDMIEALINGERDPGVLAELARGRMRSKIPDLTMACAGRFGAQHALMCTLHLEHIDHLTDMIARLDTRIDEASLPFVEQTELLATIPGLGERAAEVIISEIGVDMARFPTAAHLASWAGLCPGNNESAGKHRSGRTRKGSKELCAILTECAWAAGRTNTYVGAQFHRFHRRFGKKGGHKAATATAHTLIVIIWHVLAETTAYRDLGSDYFTRRIDSPDARKRRLIRELEALGHKVSIEPAAA

SEQ ID NO: 324374 - protein, 295 aa, unidentified
MNATTVAVDLAKNVFELVAADEYWRVTERARLTRGQFERWFANRSVRLVVMEACATAHYWARTLRSRGMEVRLLPAKYVRAYVRRNKTDAADAMALLEAARGSDITPVAVKSIEQQALQALHRLRSGWMSTRTRRINTLRGFCREFGMEVSVGAARGLAQIARLLADEHSAIPAMLRTPMRLALEEIRLMEARIDALERELAQIARQSEPCQALASVPGIGLLTSTAMVAAVGDPRSFASGRRYSSFFGLTPREYSSGDHRYLGRISKRGNRYVRMLLTHGARSVSRTAQISPVV

SEQ ID NO: 324375 - protein, 358 aa, unidentified
MRRYIGLDAHAASCTLAIVAETGKRLRDFPVETNGAALVEAIRAIPGPRHLIFEEGTHSAWLYETLAPHVEEIVVIGVRTSRGPKSDARDAYALAEKLRTNAVDQSVFKAPKEFAVLRELARVHRMLVRDVVRVQARLKSIYRSRAIATTGSTVYGPRQRHAWESRLPAATRHTTSKLYAHYDWLLALKKQAEAELIAEAKRHPIARVLQTAPGLGPIRVARLLPIVVTPHRFRTKRQFWSYCGLGIVMRSSSDWVRGRDGGWQWAQVAKTRGLSRQHNHTLKETFKGAAMSVVQQGKKVPIYADYERLVAAGTKPNLATLTLARKIAAIVLRMWKDKEVYRPDKLASPTTPAARSPT

SEQ ID NO: 324376 - protein, 532 aa, unidentified
MGSGLFLLTCSVTMNLAGLGARGSSRSVTVVRCGAIGCPVGRLVPEADNCAVWRAPAGWSVYPVGEVCPFKDAFGREPAASWITMNTTLPVLDSQAAFVDVGSEHMHVSIAGGRPEVFGAVTGELHRLRDWLQAQGVRSVAMEATGVYWLPLYGVLEAAGLRVLMVNGKHTRNLPGRKTDMQDCQWGATLHAHGLLRGGFVPPAHIRRLQDYLRLRQDHLTLAASHVQHMQKALERMNVKLHDVISNLVGVSGRAVIEAILAGERQPLRLLALCDAQIQKRKAARVHEALRGTWAEEHLFALRQAWESWQHYQGQIAACDAQIQQVLQALEATLRGAEEPAADRPGPATRKRPSLNAPVIPGLDELIQRLCGGRDLTVLPSCTSYSALQLIGEIGLDLNAWPTAKDFTSWLGLAPGSHQSGKRYRGTGRKRNRAGRLLCVMARSLARSKDMALGGFYRRMAARRGGLVAIIATARKLAVLIWQTMVKGLGFVEEGLKRYEARVLETKQRTLHRLAKQLGFAVLPAPAAPKTQ

SEQ ID NO: 324377 - protein, 308 aa, unidentified
MSKEHLDAAWADRVERVANDAGGWDVLAAKFKADQVDVVVLEASGGYEKAGACALQAEGLALVVLNARQARDFAKAMGQLAKTDRVDAQVLKQFAAVIAAHPQREHYVRALPQAQRSYVAALVTRRRQLIDMRRAESNRLELAHEAARPSLRAILRALDKQLAVVDHDIDQYVRQHFKNLAKLLDSVTGIGDVTISTFIGMLGELGQLPRRPIAKLVGVAPLACDSGKHRGTRSIWGGRADVRSVLYMATVSAIAHNRAIREFYERLIGKGKPKKVAMVACMRKLLTIVNAMVRDGSTWDESKHSRPA

SEQ ID NO: 324378 - protein, 392 aa, unidentified
MYIVGIDIGKNHHEASIVSPEGKQIGRSLRFATTHKGADSLMSFIFKNIGNSPCVFGMEATGHYWYPIYSFLKAKGYTIYVINPIQSDSLRKMYIRQTKNDSIDSFLIAEVIRFGQFGTTSMADENILAMRQLCRYRDSVISSRTEIKLRIGTIMEQIFPEYEKQFSSLWVSTSMGILEKYLTPENIENAPIDELFEIIKDKSHNRLTRAKAISIKEAAADTFGIKIAQDAFSFQLKQLIDRMNFLDKQIEALDCQILEYYEKFDCYLHTIPGIGMIAAATILAEIGDINRFKSSSALVAFAGIDPTVRQSGEFSSTHNHMSKRGSPYLRHAIFLAATTCSFHNSPLNAYYKKKREQGKHHLTATGAVARKLTTVIYAVLRDGKPYEPKSFC

SEQ ID NO: 324379 - protein, 360 aa, unidentified
MPVPARSDAEVPVTVGVDTHLDLHVAVALDHLGRRLDDLTVPTTEAGYAKLLRWAEALGNLERVGIEGAGSFGAGLARFLRERGVEVLEVGRPKRRDQHRSGKSDPIDAELAARAVLAGTAIGEAKDSEGTVEMIRVLRAARRSAVKARAQAAKQLKALLVTAPENLRTELRGLSTAKLVRRAAGFRPGDLPEDVAAATKFALRSIARRYRTLSEEIRELDGHLARLVTDTAPALVAVHGVGVDTAATLLVAVGQDPKRLKSEAAFAHMCGVAPIPASSGKVVRHRLNRRGNRDANRALHVVAAERMSRDERTRAYAERRTSEGKSKRETMRCLKRYIARELYKVLVSTVVPTTTSLSAP

SEQ ID NO: 324380 - protein, 375 aa, unidentified
MKEKVRFLGLDVHAETIAVAVAEQDGEVRSLGVIANRAESVRKLIRKLGPATQLRACYEAGPTGYVLYWQLTELGVECAVVAPTLVPVKAGDRVKTDRRDAVKLARCHRGGDLTAVWVPDAGAEALRDLVRAREAAQQDQLRARHRLSKFLLRTGQRPAQGLKAWTQPYMAWVRQLRYEPAAQEWTRLDLLHEVEHMAERVKRLEEAIREAVKLAPPAMQEVIRGLQALRGVAEISAVTVAAELGRISRFASARQLMGYSGAVPSEESSGQRQRRGTITKTGNAHLRRIAIEAAWSYRLKPAVGPGLRKRQKDVPEEIKEMAWKAQLRLHKRYSRLAAAGKDQRKVVTAVGRELLGFIWAIGVKAETATGKAMAA

SEQ ID NO: 324381 - protein, 349 aa, unidentified
MIWIGVDAHKQVHLALALGREGVLGERTIANTPAAWAALLDWARQWPERIWAVEGAWYLGRGLAQYLAGQGERVHEVNGRWTARRRRGMRTPGKSDRLDARSVAPLLREEAGTLPRVYAEEDEQAAVTLWSHTQAELTKDLTRLINRLHDLLLQCDPQYKATLPDLTTKAAIAALKAYVAPGSGVLAREREALVRAAAAQLELLDDQDRELRRKLERASRARFSPLRQIEGVGPLIACAIAAELGAPRPGFGEAQLAALGGLCPLEASSAGGVRHRLNRLGNRRLNMLFHQIVLTQARLYPPARTYLLRRQAEGRTAREARRALKRLIVRRVFLAWRACFETNAERVAA

SEQ ID NO: 324382 - protein, 411 aa, unidentified
MERFVERCAGLDVHKDSVAATVHVPGPEVSRLQETRTFATTTRGLLALADWLASYGVTLVGMESTGCYWKPVYYLLEERFECWLLNPRHLRNVPGRKTDVADSAWICQLLEHGLVRASFVPPRPIRELRDLTRYRKTQIEERSREVQRLDKVLQDAGIKLSSVASKTLGVSARRMLDALVAGTHDPELLAELARGRLRRKLPALKEALSGRFRSDHHGLLVAQILAHIDYLDETIATLSERIEQAIAPFSRERELLQTIPGVGRTGAEVLIAELGVDMSVFPTDAHLASWAGQCPGNHESAGKRRSGRPRHGSKWLQTTLTESAKAASRSKGTYLGAQYTRLRGRRGPRKATGALRHSILIAAYHILAQNTAYRELGADYFDRRSTDQRTKRLVRQLEKLGHTVTLEPLAA

SEQ ID NO: 324383 - protein, 408 aa, unidentified
MKTLHRRCAGLDVHKKEVVACLRLAIRGKASYEVRRFPTTTRSLIELADWLEQAGCTHVAMEATGIYWKPVWHILEGRFQQVLANAAHIKGVPGRKSDMNDATWIADLLAHGLIRASFVPPQPIQELRDLTRTRKQLTREIVQHTQRIQAVLEEANVKLSSVITDILGASGRRILKAIVAGETDPANLSDLGGPRLAATRAELADALHGRIRSHHRFLIGQHLKTIDQLEETILAFDARIEAALEPFRDAVERLKEVPGLSETSAQILLAEIGTDMRQFPTAGHLLSWAGLIPRLDESAGKRRSTRVRKGAPWLKPVLVQSAWAASRKKNSYFQAQFLRLKARCGPKKAVVGVAASILTTAYHMLADGTCYQDLGADHFPRRDPARAAAKLAARIRNLGFNVEIRPAA

SEQ ID NO: 324384 - protein, 307 aa, unidentified
MRAAGIDVGKLSLDLAVDGQPGARRFANTPAGITGLVAALRALGVERILVEATGGYEEPVLEACCDAGLWISRINPRQARDFARATGELAKTDAIDARLLALMAGMFGDRLRRHTAPPPWQRELRDWLRRRGQVVILIQAQKQQASLAPPAVRKLVARTVAALTRELVAIEQAMKALIHAHSTAAMRSSKGLGPVFQATMLALLPELGHLNRRQIAKLTGVAPMNRDSGQGQGKRRIRGGRSPVRVALYMATLSAVRWDPLMKAHYQQLRARGKLAKVALVACMRKLLGIVNARRRDELRAEGLVVL

SEQ ID NO: 324385 - protein, 346 aa, unidentified
MLADAWEYVLGVDTHRDVHALAVVAAPVGTVELETTIAASGRGYREALRLAERQAPGRRVWAIEGTGSWGAGLCRFLQAAGERVLEVDRPCREGRSPAKSDPLDAIRAARTALALERLPEPRSAGKREELRALVTAREGALTAKRAGLCQLRALIVTAPEPLRNELRRLSRARLIARLRGLRPDCNTSQPRGLLLALGSVANRLSELTREERELAAEIRTLVRELAPQLLDEPGIGPASAAQILLAWSHPGRLHSEAAFARLAGAAPIPASSGQTIRYRLDRGGDRQLNRALHTIIVSRRKTHPETIAYIDRRTSEGKTVREAIRCLKRYLARSLYRQLEAMPSIA

SEQ ID NO: 324386 - protein, 403 aa, unidentified
MNAVGIDVSKGKSMVTILRPFGEIVSSPFEIKHTSSDIHSLIKLIHSIEGESRVVMEHTGRYYEALAHQLSAADLFVSAVNPKLVKDFNNDSLRKIKSDKADSVKIARYALDKWQSLEPYSITDELRAQLKVMNRQFHFYVKQKTAMKNNLIGLIDQTYPNANTYFNSPTRSDGSQKWVDFVSTYWHVDCIRKMSLNAFVEHYQNWCKRKKYAFNKSKAEEIYTKTKELVPVFPKNEITKHIIRQAVDQLNSTSVTVETIRTLMNETASKLPEYSIVMQFKGIGPSLGPQLMAEIGDVTRFTHKGALTAFAGVDPGVNESGSYAQKSVPTSKRGSSNLRKTLFQVMDVLIKTMPQDDPVYQFMDRKRTQGKPYYVYMTAGANKFLRIYYGRVKEYLSVFPDPS

SEQ ID NO: 324387 - protein, 347 aa, unidentified
MEKVIRIGVDTSKSVFQLHGVNEGEQVVLRRKLRRGQVLDFFARLAPTKVGIEACGGAHYWARELRALGHEVVLLPPQYVKPYVKRGKNDKIDAEAICEAMSRPTMRFVPVKTEAEQAALMLAGMREQMVRRRTQVSNAIRGYASEFGLVAAKGLSKLEALLARIAADPRVPEMAKDIFTAYGQEYAELDRRIAKLEARLMAWHRQNEASRRLAQIPGVGPITAAMLVMKAPDPATFRSARHFAAWIGLTPKDHSTAGKTRLGVITRAGDEDLRRLLVCGAMSVVQQVQRGRGKPAAWLLELVKRKKPKLAAVALANKTARIAWKLMLSGQSYDPRRANATSMAKAA

SEQ ID NO: 324388 - protein, 424 aa, unidentified
MPCERSRFPILLWSWERRIGFRLFELARAFDPVKEINLHLFPNDHPEAWGLPVTSNRSLVWPFTPHPGFRFPTTGEFHMAHIGVDLHTNSFTICRLEADGSQAFATYQLAQADLERCCLSIDADDEVAVEATANRAWFCDEIRPCVGRIVVVNPHQLQVIRRSVKKTGKNDARALATFLSKDVLPETRLKRPGEAELASLTQTRDMLVKSRTKVLNKIHGIFNRHGIKLKKEGFSDRRLRGLEIEDFGDVEKIELTVLRDQALDLTTSIRKIDKVLAEAASALDGFEEIISIKGVGARAAAIFLSGIGDVRDFATADKLAVYVGIVPRVASSNGVTQYGRITKQGNKLVRTTLVQCTLSAIRYSGYPSAFYRRIKKRRVSGKAIIATARKLLTIIYNTLKNQWIFEDFPAFKLRNPGQMAGQTS

SEQ ID NO: 324389 - protein, 396 aa, unidentified
MNGPIISFDVSKGSSHMQGFLDHGKPAGKAKVIRHDLEDFAKIDALRGKIREETGSDPVAVYEYTGVYSHTLERYLDSIGMRRYAISPLESAKVRKAMIRPTKNDSLDCRTIAEVYYLRTLREVRNDDEIHDSLRDMGRFYHYLLEVKIVEKGRYYRCLDDVWPCFDKVIEPDSPKSLAIISHYGHPSKIRSKEQVKNFLMKLPRQGRASTDELAEKIAAYAKTHVSGASPDSYKVKEVKLMSARVKGIINESERVMDSMISKAENLPEFALLKTIPGIANVTAARLIAEIGDINAYPKADSLIAYAGLDPAVMQSGQMTGEHMHITKKGNPHLRATLYVAVINMIMSKAENMITKYVLKKKNSGLPYKAAVIAGCSKLLRLIHAMLRNGVCYSDK

SEQ ID NO: 324390 - protein, 404 aa, unidentified
MRFCGIDWANDHHDALSIDEQGRQLGSIRVAHSPEGLNQLDTYLAGIAGPGGKEQLACIVETTHGLLIAHLLEQGWPVYPVNPRTVERRRAPSGAKTDIIDAYLLAKTGRADFQDLRRLNPDSEQIQELKTLTRDQDALVHMQTRLVNQLTACLKAYYPVVLELFSQLQQPTTLTFLRAYPTLQAARSTSVEDLTALLKQAKYPGARKAAQRIAQHLQQPCLQANEVTTRTKSRLMLALVDQLEPLLKQIAEYDKEIERLFLRHADSELFQALPRAGSRLAPRLLAEMGDDRSRYESACSLQALAGTAPVLFQSGTYQKAHRRLGCIKPWRNALHQFAWQSTLQEAWAREYYQRKRAAGKSHSVAVRALANVWVRILYAIWKKKEPYQAATFEQARQAHAPRVA

SEQ ID NO: 324391 - protein, 369 aa, unidentified
MADRITYVGLDVHKESIVVAVASGGLRGEVREYGRIANTATALDRLLRKLGGEGMTLRFCYEAGPCGYGIQRRLSTQGHECVVVAPSLIPKRAGDRVKTDRWDAASLAKLHRAGELTAVWVPDARHEAMRDLVRARLDAVHSLRRARQQLSGFLLRQGCHYGRPAWTKLHRRWLAGLTFDQAVHHLVLEDYIAAVEAAMARRDRLTVQIEAMLPDWTLAPVVAALQTMRGMALVNAATLIAELGDLSRFTNPRQLMAYLGLVPSEHSSGASVKRGGITKAGNGAARRLLIEAAWSYRFPARLSRELLLRQESQPKPIRDIAWKGQVRLCARYRRLARTGKPANVVTTAIARELTGFVWAIARQVTVTPG

SEQ ID NO: 324392 - protein, 357 aa, unidentified
MKKRLNVDTMNVNGKTVNVGIDVHKVSWHVTALVEGVIVESATIKPSYRVLKKLLAPYKGGRIRIAYEAGPAGFNLYDNLNADEIECIVVPPSLIPVESGNRVKTDKRDSKKLAQYLESNLLKRVYVLSKQERAHRQYVRTRRQLSNHRTDVMRQIKSLLLFHGLPSFDGKRGFWTRPVLRALRSITPDEYVSYSLNKLIDVYEYLTQQVKHMTREVRRLARTETYARKVELLTSIPGVGVLSAMEILTELQDVSRFATADQIAAFLGLTPSQYSSGQHVRMGKITHAGNHRLRTRMVECSWIAIKKDPGLNKTYQAIKKRRGGKRAIVAVSRKLIIRIRRILLDEVTYRKECAIAA

SEQ ID NO: 324393 - protein, 382 aa, unidentified
MNRIIKIGMDVHSTNYTLCAMEPVLDGEDRIFTNIQVTPDYKNVIQFIDNLKERLGSSDSYSIECGYEAGCLGYSLYHQLTKAGVKCTILAPTTMLTQQGKRVKTDKRDAVMIAQCLSYGGYHAVHVPTDQDASVKEYLRMRDDHKLALKKIKQQINAFCLRHGYIYGGHKWTIKHLEWLKKLDLSKLNRETLNEYMTSYEEQTAKIERFDKRIEELAADSDYHENVRKLSCLLGIQTYTALSLIVETGDFKRFRKGNTYAAFLGLAPGESSSGEKISRTGITKAGNSRLRTLLIEAATGICKGQVGHKSKALCARQTGNPAEVIAYADRGNIRMRSKYKRMIRHEKKRNVAVAAIARELACYVWGIMTNHIEPREEGKKAA

SEQ ID NO: 324394 - protein, 365 aa, unidentified
MQKISTMRTSGKKIFKGQLTIGLDLGDRSSSYCVLSEAGEVILEQKLPTAPEAIKQTFTKVPLSRIAMETGTHSPWVSRLLKALGHEVIVAHAQNVRLIVKSRRKDDRMDARTLARLARIDPELLSPVQHRSAQAQLHLTEIRARAGLVSARTALVNAARGLVKSHGERLRKCGTSQVGREITSALSTELREALEPLLREVESLNERIHEYDRRIESMTKERYPETALLKQVKGVGDLIATTYVLTIEDPHRFRKSRDAGCFVGLQPGRRNSGESEPQMHISKQGDEYLRKLLVQGAHYILGPFGEDSDLRRWGQRLAARGGKNGKKRAVVAVARKLTVLLHRLWVSGEVYEPLRNSQKAISAAA

SEQ ID NO: 324395 - protein, 367 aa, unidentified
MRKISTVAAKESSDFSQPKLTIGLDLGDRSSWYCVLDERGELQGEGKVSTTAKAMRGAFHRMPRSRIALETGTHSPWVSRLLSELGHEVIVAHARKVRLIGESRRKDDRRDARTLARLARIDPQLLSPVKHRSAQAQADLTVIRARAGLVRARTALVNTVRALAKSYGERLRSCNVRNMDPEKAEGLSPELQAALQPLLGTIESLSAGIREYNQRIEALAERSYPEVALLKQVKGVGTLIALTFLLTLEDPHRFRKSRDVGCYLGLQPGRRNSGQSEPQMHISKEGDPYLRTLLVQGAQHILGPFGADCDLRRWGLKLAERGGKSGKKRAIIATARKLAVLLHRLWVSGEVYEPFHNSRQLVVPAVA

SEQ ID NO: 324396 - protein, 503 aa, unidentified
MGSAILMELTGEPVLQRAAFLLAESDRLLQTAPRPSGSQATMRLVAASSISLARLPIHHEFSLVLTGRYSRSCPLVNAHAIGVRRETTRMSESSFPMPAPAPLAYVVGIDIGMESCMMCCLTMEKRQVIKSSSFTNKAEGFSNLFERLERLGTPADQILVGLEATSRYGENLYHALLSRGYRVCLLHPAQMHAFAQQRGLRAKTDRVDATTIARALLSDDARFGYVPSEQVATYRELVRLQQQLSDDVVRYKNEVHALLVVLFPEFTQVFADPTRPTALAFLKRYPSAQAVAQTEIDTLSQVLRELAPKRYGQRTARKLVDLAKRTISSGVALAARSTSLRILCDQLEHTQANLKQLQQEIEALLDQDPKVKGVLLIPEFGVMTVAVLRAELGDLDRFARMDQVVAYVGLDLQVKQSGKWKGQTKLSKRGSGRVRRILYLAALRSIWLQGSPFGAYYHRLVDRGMKKGMAVVAVMRKLLIVAAHLIQTQQVYEPGKVAAPSVG

SEQ ID NO: 324397 - protein, 380 aa, unidentified
MRGISFVVAPIRDHAYGMARPSPLAHDCVVDEDCTEEKPMNEIKVLGIDLGKDVCSIVGMDEAGKVLLRRRMRRDSVLKLTARMPACVMAMEACCGAHHLGHMLRKQGHEVRLMSPEYVQPYVKAQKNDDRDAEAIAEAATRPTMRFVDLKSDEQLDIQSLHRARDRLVGKRTTLINQLRAFLLERGIVIAKGRRKLELRLEQLLAGEMTISRRIRALIEDMQAEWRALDARIDAFDAEFAELARTDASMKLLSTIPGIGPLNATAFVASIGKAETFGRGRDLAAWLGLVPRQMTTGGKPRLLGITKRGNGYLRRMLIHGARAALPALAKGKTPLGEWLRDLLSRAHTNKVVVALAAKMARIIWAVLSSGRPFEMSPSAG

SEQ ID NO: 324398 - protein, 337 aa, unidentified
MNYSGIDLHSNNSVVSVIDETDRVVAEKRLPNDLAKILAFLAPWRAELAGVVVESTYNWYWLVNGLQAAGIVVHLANTTAIKKYDGLKHSGDETDARYLAHLLRLGILPTGTILPAKHREVRDLARKRMQLVRSRTSHILAVENTTARQYGTRITSNQVKQLDRAAVDQLHLPDDVALAVRANVAVITTLSAQIAIVEKRLQERVAPQADYALLTTVPGIGQTLATVIVLETGTIERFASAGNFASYARCVDSQRISNGKKKGEGNTRNGNPYLCWAFIEAANFAMHFSAEARQFYERKKARTNPVIARKALAHKLARACFHMLKERKPFDVTRCFA

SEQ ID NO: 324399 - protein, 342 aa, unidentified
MKDMMIGVDLAKNVLQVHGALHTGEIQFRKKLTRTQFPVFMAKQEPSLVIFEACGSGHYWAREMEALGHEVKLIAPQYARPFVKRKKNDAADAEAIVIAARQLEMRFVEPKTVEQQSRAAVFRGRERLVHQRTADVNALRALLYEHGHVFPQGIRSLNRMTALVEDKTADLQPLIREECLDLLAQITEKTARIIERTAKLKALAAESDRARRLQTMPCVGPLTAIAVEAFGPEMAQFKTGRDFAAWLGLVPKQHSSGGKERLGRMTKAGQADIRRLLIIGAMSRLGWLGQRKITEGSWLSRMLARKPKMLVAIALANKMARQIWAMLTKNEDYKDPALAVAA

SEQ ID NO: 324400 - protein, 346 aa, unidentified
MEYIALDVHKNYTWARVENGKGDRLYESRLAHVHGSIKNFVNRWTGGSPVAVETVGNWYWVVDEIEAGGGTPQLVNARLAKLMMGNVNKSDKLDCKGMNRLQRTGTLPTVWIPTSSVRDVRELPRTRMVLSRQRTQLKNRVHATLGKYGYTVQGASDAFGKKGRKIVEELLLKLPPHTQQALRLILNELDHVRENLKEIEGQMIEVFSPCPQTHWLKSLPGVGDILAVVIWSEIGSIERFNRAEQLASYSGLVSRESSTGGKIRLGPVRRDVNVYLKWAFVEAANSSLLNAERCGYGHISRLYQRIKPRRGHGKAKVAVARHLSEASFWMLKKGEPYREPMSSTQR

SEQ ID NO: 324401 - protein, 343 aa, unidentified
MQAITTVGLDIAKSVFQVHGIDAVGQVVIRRQLKRRYVLAFFQKLAPCLIGIEACASSHHWSRELQALGHTVRLMPPAYVKPYVKRQKNDATDAEAICEAVTRANMRFVATKTPEQQSCLMLHRTRHLFIRQQTSVINAIRAHLAEFGIVAPVGRHGMEELLHVVADVSDKRLPEVARACLAALGGQLRMLRAQILNFDRMIMVWHRSNETSKRLDELPGVGPTLATALVASVANPKAFRSGRDFSAWIGLVPKQNSSGGKHKLGSISKQGDRYLRSLFTIGALAVIRYAKIHGTRHRPWLTALLARRPTKVAAIALANKIARMAWAMMARGERYREPVALAA

SEQ ID NO: 324402 - protein, 403 aa, unidentified
MNNVAGVDVSKGKSMVSVLRPFGEVVAKPFSIGHTGSELKELADYLKSLDGETRVVMEHTGRYYEPVARFLHEEGVFVSAVNPKLIKDYGNNTLRKVKTDKADARKIARYGLDNWAELRQHTPMDTIRMQLKTLNRQQSLYAKTKTMMKNNLIALLDQTYPGVNALFDSPVREDGSQKWVDFATAFWHVDCVRNMSLTAFAERYRKWCKRHGYNFSQSKAVEVHTGAQDLIAMLPKDALTKTMVRQAIDALNAVSASLERLKAEMQALAAQLPEYPVVMAMHGVGDSLGPQLMAELGDVARFTHRNAITAFAGVDPGADQSGTHEAKSTRVSKSGPPELRRALFLVMDCLLKTQPQDDPVYRFMDKKRAEGKPYLVYMTAGANKFLRIYYGRVKEYLASLEEN

SEQ ID NO: 324403 - protein, 312 aa, unidentified
MTKYHNFIGIDIGKFSFVINVYGEKVVTEFDNTNAGIRKFIVQYKGILSSSLSILETTGGYENNLLQFLSMKGYAVHRSDTRKVKNFIRSYGNAVKTDALDAKALALYGKERVDGLSLYESPPKQQKLLFQLSQRRMELKQMIVAEKNRLSGPDSNNIRNSCNTMIKAIEQEISRVTEEIQAISSQDEVISSKVKVLMTVAGIGEITALNLLILLPEIGSLSRRKIASLAGLAPRANDSGMFKGYRSVGHGRQGIKPILFLSAMAARNSKTDLKEFYDKLISRGKKKMVALTALMRKILVIANAKLKSITLN

SEQ ID NO: 324404 - protein, 343 aa, unidentified
MDHFAGLDVSVKETSICIVDETGRIVGEVKVASEPEALLQVLMNPAYHFKRIGLEAGPLSQWLFSALGEAGLPVICVETRHMQAVLKAQINKTDRNDARGIAQMMRVGLYRPVHVKTLRSQKLRMLLTHRKLLQSKAIAIDNDLRGTLRNFGLKVGMVGKVKFEARIKELVENFPDLAVLVEPLLVVRRVLREQLGILHRRLLAIVRDDDVCRRLMTTPGVGPVVALTYRATVDVPARFRNSKAVGAVFGLTPSKYQSGEINRTGAISRCGDEMMRMMLYEAAQSMLVHSARWSWLKAWAMKIARHRGMKKAIVALARPLAVIMHRIWVDGTEFRWTREVAAA

SEQ ID NO: 324405 - protein, 327 aa, unidentified
MAQKMDVVGIDVSKATLDAYALASRQARQFANDPAGHQELVAWLQELGVEVAVFEASGGYERAAAHSLRRAGLAAHVVDPKRVRHYAQAAGQLAKTDRIDARMIAAFGAAFLLAVPGGVAGADDPARRDLAELVGTRQVMVDHRTTLQQQADGVTSTIAKKLLRASLKQFDRRIETLDRHIAAAIARHAPFAALARRLNTVPGLGPVSIAALIAWLPELGQLGRRQVAALVGVAPFADDSGTRTGQRHIQGGRMKLRNLLYMATLAAATRHNPLLKARYRRLLENGKKPKVALIACLRTLLTILNAMVAHQQDWNPIQRPATEPTAA

SEQ ID NO: 324406 - protein, 403 aa, unidentified
MNSVGIDISKGRSTIAVMRPFGEVVISPFEVRHTGSELSKLARQLKSLDGETRVVMEATGNYHASVAKLLHDAGLYVSVVNAKLVHDYGNNELRRVKTDRKDAVKLANYGLDRWLTLPRYIPEEDTRLLLRNCYRQYRQYSKVQTVLKNNLISLLDTVFPNANRLFSSPIRGDGSEKWVDFVAEFWHCRCVSEKSERTFTNKYQRWCKKHGYNFREAKAHTIYAEASGHIGVMPKSETTKLLVEQAVAQLRATSTALAALKLEMQTLASQLPEYPVVMDLFGVGPTLGPQLIAEIGDVRRFYSKKALVAYAGLDAPPNDSGDVTGRHKSMSKIGASSLRRTLFLVMSVYLQNAPLDEPVYQFMDRKRAEGKPYRVYMMASANKFLRIYYATVKAYLESLEHTA

SEQ ID NO: 324407 - protein, 310 aa, unidentified
MIHPDVIGCDIAKAHLDFFDSGLERHFRIDNTPAAISAWLDGLDGRGVHIVFEATGRYDRQLRIALETRELPYSRVNPARARDFAKAIGLLAKTDAIDARLLARMGQSLPLSTQAPDDPARHVLARLHTRRDQLVAMRQQERTRLHETEGIERDSAESHMAWLDAEVARIEMACRDVLKAEKTLQEQEARLRSIPGIGPVAALTLIAHMPELGNRSAKAIAALAGLAPFNVDSGTSRGKRHIRGGRKRIRDALYMAALTASRMPRAFKSHADQMKEAGKPFKVVIIALARKLLAIANAIIRDKTTFRRTT

SEQ ID NO: 324408 - protein, 343 aa, unidentified
MKHFAGLDVSLQETAICIVDEDGIVISEGKTTSEPDELARWIAATGLTITRVGLEAGPLSPWLHTELRAAGLPAICIETRRMKKGATAAVKTDRNDARAIAHAMRVGWFTIVHVKTAESQELRLLLSNRRTLLEKRIAIDNEIRGTLKAFGLKLGPVTVASFEARVLELLASRSRLLGMVKPMLAARTALRQQCDVLHRMVLKMVQANTVCRRLLSVPGVGPIVALTYATGVDDPARFAHARDLGPHFGLTPRKYASGEIDRNGSITKAGDGAVREALVQAALTLLTRVQRWSVLKAWGMAIAKRRGLRRAIVAVARKLAIVMHRIWVDGTTFTWSRETAASA

SEQ ID NO: 324409 - protein, 365 aa, unidentified
MQKISTMRTSGKNIFQGQLTMGLDLGDRSSAYCVLNETGEIVLEHKLATTLEAMKQVFGSMPRCRIAMETGTHSPWVSRSLTALGHEVIVAHAQKVRLITKSRRKDDRLDARSLARLARIDPGLLSPVKHRSAQAQLHLTEIRARAVLVSTRTAMVNAARGLAKSYGERLRKCGTEQFRRETTSGLSAGLREALEPLLREVESLNERIQEYDRRIEKMAKQTYPETALLKQLKGVGDLIATTYVLTIEDPHRFRKSRDAGCFVGLQPGRRNSGESEPQMRISKEGDEYLRTLLVQGAHYILGPFGEDSDLRRWGRKLSGRGGKNAKKRAVVAVARKLAVLLHRLWVSGEVYEPLRNSQKMINEAA

SEQ ID NO: 324410 - protein, 329 aa, unidentified
MYHVGIDVSKVKLDICLLADGLDGKRKTKSLPNGISSAEAVINWLVMQKRDPKQARIVMEATGIYHEHLAYGLHREGLSVSVVNPCRIHEFAKGMGILTKTDKVDAYVLACYSSLKQPQEWQPPSEEIRKLRALLQHRDVLLEDKLRTENRLNTLSSTQSTEEVMMSLSLMINHLKDELARIEALISKHVDNHPGLKDDLSLLTSISGVGPQTGLNMLVVLRGNTFESASQAAAYLGVVPIERRSGSSVRGKSRLSKTGPSKLRAKLYMAALTAISKNMHVKNQYERLLLKGKAKMQALGAAMRKLVHLCYGVLHTQQPYSQDFGMATE

SEQ ID NO: 324411 - protein, 414 aa, unidentified
MDQIYERVAGLDVHRDSVVACFRSLGPRGGVVREKERFTTTTAGLCELEAWLADRQVELVAMEATGVYWKPVLYALEGRFTVWLCNARNVKKVPGRKTDLTDAEWLADVAAHGMVRPSFVPPLPIRELRELTRYRKTQIDARAAEIQRLEKVLQDAGIKLTSVASRVLTQSGRAMIEALIAGERDGARLAELAKGKMRPKIPALTDALTGHFGSHHAVACRRILSHLDFLNESIAALTEQIDARTAAFAPVYTSLLQVPGFDRLTIDVIIAETGADMSRFPSPGDLASWVGVCPGSHESAGRHRRVGTTKGNPWLRRALIESARAAARTKGSYFGAQYRQVARRRGPNKAAVAVAHSLIELVWHLLSTGEVFKDLGDDYFTARQDPERRARRLVAQLEELGFTVTLEAASAIPA

SEQ ID NO: 324412 - protein, 355 aa, unidentified
MNAIKYIGMDVHVATSSIAVLDANGKLMMEATMATQASALVDFIRGLSGTLQVTFEEGTSAHWLYTVLAPHVARVVVCDPRQNPRRLGEKKSDRLDARKLAELLRLGSLKPVYHGNALGPALKELARSYRTLVSDTARVMNRLKALDRGRGIRCTGARVYSPRFRDQWLEQLREPGVRARAELLYKQLDLLLPLRQAARAAMLAESRQHPAHRILCSIPALGPVRVALLMALLQTPHRFRGKRQLWTYAGLALVTRTSADYQMVDGQVTRSRKPALVLGLNANHNPTLKGIFKDAAASALAHPGPFKDFYTTRVAQGMKPELARLTLARKIAAITLTLWKKGESFNAEYVKAQAA

SEQ ID NO: 324413 - protein, 420 aa, unidentified
MKEPKIEDFAALIGIDWADKKHDICEVAIGSKKHQYSVISTKPQALHEWAMSLKKRYPNKPIALICELKKGPLIYALSKYEHMTIFPVNPSTVAKYRKAFSLSGAKNDPTDAFIQVEILTLHMNKLTPIEPESANIRILAQLVEYRRKMVQDRVDLSNRMTAILKNYYPHVLDWFKEKDTIIFCDFIRKWPSLHQAKKARKQALLTFFNQHHSRHPKVNENRISDIKDAVALTEDDGVIIPNKIMIEMLIQQLKLLIESIDNIDKEIKQSYKSLTDRVIFDSFPGAGPQLAPRLLVAFGENRSRYKAADEIQKYAGIAPVVEQSGQKKWTHWRYSCPTFLRQTFVEWAGQTVRYSFWARAYYEQQIKKGKQHNAVIRSLAFKWIRIAFRCWKDKKPYDESTYLNALKKRGSPLLEYAMNS

SEQ ID NO: 324414 - protein, 317 aa, unidentified
MPQSERIVGIDVSKHQVEACLRSPPARLAQPSTPAGRQAMIGWLHQHDVAVAVMEASGGYEREWATALRGAGLAVRIVDPKRVRYFARSAGRLAKNDPIDAEMIAWFAETFATAAAPAHDPEREAVDRLMTVRAMLVRLESQIGQLGEHRQPPLVERAGRVIAGVIVRQRKQLETAIAARIARHADLAERHAIIQSVPGFGPRCAAGIIAWLPELGQIGSKPATALVGLAPYDDDSGGHRGERHIKGGRREIRDLLYMAALAATRCNPVIKAHYQQLRARGKKFKVALVACMRKLMVILNTMLMRGQMWNPPAAAVG

SEQ ID NO: 324415 - protein, 356 aa, unidentified
MLYSGIDLHRRLIVICTMNDAGAVVARTRMATEADAVERYFHQWKEPHHAVVECTSNWYWLCDLLRSLGIVVVLAHAKYLKAISYAKVKTDAIDAHTLAQLLRMGFVPEAHQLPPEYRAMRDLLRQRMVMEHKRTNLMLRVTSMLAKFNITDLPMGPSQSGFADFLAECTIPEQYRMTMLMYHQQCLQVTDHKKQLEHYFKAQLRQTATLQLLVSIPGIGDITGAIIAMETGDIHRFADAKHYCSYCRLAPGAKDSGGKHSHRSGSKDGNQYLKYAFTEAAIKAMMFYPDIKRFAVQLERRSNTTIARTVVAKELARIVYYVLTRQQPFDTFKGIRVTKRHDWPRTYKPVRQCDRW

SEQ ID NO: 324416 - protein, 463 aa, unidentified
MKKSKQSNKTKPASLSQLNPKCAGIDVGAAELFVCIAKNSSEQEVRSFSTFTADIKLMIEWLKKNKVESVAMESTGVYWIPPYEFLEEAGFEVLLVNARFFKAVPGRKTDVQDCQWIQQLHSYGLLRGSFRPEMDIVELRSYVRQRSRLFESAGTQVQLMHKALTLMNIQLNHVISDITGMTGMNIIKAILQGERDPRALANLSVAGCRKKMDLIAKALEGHYKEEHVFALQQAYEAYEFFHGQIDACEKKIQQVLHDIQAKEEVFIKGQHQLELIKKGNPKKAYNRSPYHFNAVVEIQKITKADLTTIPGIDENTAMKILSEIGTDMSRWRSAKAFVSWLGLCPGNKVSGGKVLSSKTKPSDNKAAQALRMAASSLYRATSYLGAFYRRMRSRLGAPKAITATAHKLARMIYRMLVTGENYRELGENYYEQQYQDRVLANLKKRAKEMGYALTSIEALPKAT

SEQ ID NO: 324417 - protein, 341 aa, unidentified
MDHFAGLDVSVKETSVCIVDDTGKIVREVKVASEPTALLAVLKNPAYQFKRIGLESGPLSQWLYSALAEAELPVICVETRHMQAVLKAQINKTDRNDARGIAQMMRVGLYRPVHVKTLRSQKLRMLLTDRKLLQSKAIAIENDLRGTLRNFGLKVLVGTVKFEARIKELVENLPDLALLVEPLLVVRRVLREQFVILHRRLLAIVRDDEVCRRLITTPGVGPVVALTYRATVDVPARFRKSKAVGAVFGLTCSKYQSGEIDWSGRISRCGDEMMRVYEAAQSMLRSKKWSWLKAWAMQIARRRGMKKAIVALARRLAVIMHRIWVDGTEFRWTRQQAAAAA

SEQ ID NO: 324418 - protein, 408 aa, unidentified
MNTLYVGIDVSSKSNVIYLMLPNGDKHSNFSVANSHEGSTQLVKRILSALTSHSLDTVLIGLEATSVYGDNLVYFLREDATLAPFNRKIHVLNPKQVKKFHDAYNDLPKNDYVDSFVIADCLRFGRINKEVYMGDYRYKALQNLTRARFFAVQNLVKEKQRFMNVLFKKYSTMTQEKVFSDTFSTTALAVYDEFESAEALANMDLHELTDFIIEKGKNRFPDPDAVAKAIQKAARSSYRLPKTVNDSVNQVLSISITSMKALESQIKEFDKAIKAQMELLPNVLISIPGIGPVYSAGIMAEIGDINRFNSQAALAKYAGLAWKQHQSGGFESEVTRLIPSGNRFLKYYLCEAAFSLVRCDKEYSDFYHLKYKEVNRYQHKRVFALTARKFVRLVFRLLKDNRLYTSAE

SEQ ID NO: 324419 - protein, 385 aa, unidentified
MLAHPTQTQAAARCQANTLFVSLELSKVRWLVTVSAPASDKLSRYDVPGGDGQALLKLLARLQAAASERTGAPVAIVVIQEAGLDGFWIHRLLVQNGITSHVVDAASIAVNRRHRRAKTDKIDGVKLLRTLMAWMRGERQVCSMVQPPSPEDEDRRRLARERARLLKERVQHTNRIKGLLWGQGIPDYDALHRDRRARLAALTTGDGRSLPERLKTEIGRELDRLELVVSQLAAVERERDALMAQTAEADACAAPAALARLRGIGPELAALLSLEALFRRFDNRRQIAAYAGLTPSPWKSGGIDREQGIAKSGNPRLRRAMIELAWFWTRHQPGSALSRWFAERVGAARGRVRRIAIVALARKLLVALWRYVTQSVVPDGAVLKG

SEQ ID NO: 324420 - protein, 308 aa, unidentified
MEVQNKVFENNQKGFNALVEWLDKHGASDAHMCMEATGVYWEAVAEYLTAKDMPVSVINPPQIKAFGASRLARSKTDRGDAQLIAEFCFECCRTTWQAPSPAEQALRASVVRLEALQTMRTQESNRLEVARKVVAVDIVGHIEWLDTEIKKLLKKIRDQIDGDPDMKGKRMLLDGIPGLGERTIAVLLAFCMHPGRFANARQAAAFAGLDPRQHESGSSVKGRPRMSKVGHAFLRKALYVPAMTTHWGKRFRERLAAFGKPAKLIIGSMMRKLVHVAFGVIRSGKCFDPKLQNAWRGSQYLFCRGGRS

SEQ ID NO: 324421 - protein, 339 aa, unidentified
MGLYTGFDLHSTNTYVGVIDEDGKRIWKKKLRNDPSLIVAALRSLKEDIIGIVVESTYNWYWLVDLMIEEGYRVHLANPSRVQQYSGLKHGDDEDDAFWLAEMLRLKILPEGYIYPKEQRPLRDLLRKRGHLVRLRTSLMQSLQNILARNIGAKMNANHMKALRTDHVTPLLAGNDDLSLAGKVSKDAIDDLTRQIKAIEVVVEKRIDIRRPYDLLLSLPGVGRVLALTIMMETGPIDRFPEVGNYVSYCRKVPAARFSNDKKKGTSNRKNGNKYLSWAYGEAAELARRFDSAARAYYNRKLRRTNAPVAHSALAHKLARAAYYMMRDGVPFMSEKAFV

SEQ ID NO: 324422 - protein, 359 aa, unidentified
MLVERTCVGLDVHARSVAAAAIDGVTGELSEARLTPSHAHIRSWVERFDGPVAVVYEAGPTGFGLYRALNPVGVRCVVAAPSKLQRPPGDRVKTDAKDAVHLARLLRLGEITAVTVPTVDQEAARDLVRARDDCRGDLMRARHRLSKLLLRHGFVYSGGQAWTGVHDQWLRRQRFDHRATTMAFESGYEAVTAITARRGRLDKAIAELAAGSEFTPIVHRLGCLRGIATLTAFALAVEIGDWNRFTGSSIASFVGLVPSEHSSGASRVQGSITKTGNTHVRRLLVEAAWQHRPAYRPGKVMRDRWDLADPAARARGDAGNRRLHQRWVQFNLRRKRPVIANIAIARELAGWCWSLAVMG

SEQ ID NO: 324423 - protein, 317 aa, unidentified
MSEVTTIKIFVGIDVSKSNLDVAINPSGEILRFANDPTSIESVVKNLRTLSPERIVVESTGGIEKPLVAALAEAQLNVAMVNPRRVRDYARAMGHLAKTDRIDCMVLAAFAANVDTRLTPLKTDEQELMSALLARRRQLVQMLIEEKNRLASSPTTLRKEIKAHIGYIEKRITRCDDDIDKLVTNSELWRAKDELLQSVPGVGRVVSHTLLAGLPELGTIDRKKIGTLMGLAPLNRDSGKHRGKRHIAAGRATVRSVLYMGTLTAIRVNPVIKAFYKRLVAANKPKKVAIIACMHKLITILNAMLKSNSPWRTIEQP

SEQ ID NO: 324424 - protein, 404 aa, unidentified
MLDTEGIGVFLGLDVGKSVHHGHGLTPAGKKVFDKPMPNSEPKLRAVFGKLKAEFGTVLVIVDQPASIGALPLTVARDAGCEVACLPGLAMRRIADLYPGEAKTDAKDAAVIADAARTMPHILRSLELTDEITAELTVLTGFDQDLAAEATRTSNRIRGLLTQFHPSLERVLGPRLDHPAVTWLLERHGSPAALRKAGRRRLVELIRPKAPRMAARLIDEVFDALNEQTVIVPGTGTLDIVIPSLAASPAAVHDQRRALEAQISTLLEAHPLHPVLTSMPGVGVRTAAVLLVTVGNGTSFPSAAHLASYAGLAPTTKSSGTSIHGEHAPRGGNRQLKRAMFLSAFACMNADPASRTYYDRQRTRGKTHTQALLRLARQRVSVLFAMLRDGTFYESRVPAVTLAA

SEQ ID NO: 324425 - protein, 352 aa, unidentified
MDATTVAVDLAKDVFEVAVANRAARIVDRRRLTRRQFETFLDSLAAGTTVVMEACGTAHYWGRRGQARGLHVRLLPVQYVRPYVRRNKTDRTDVEGMLEAHRCAGIQAVPIKTVDQQALQALHRARTQWQAARTARINVLRGLLREQGHPMPTGSRTVLARVIAVLDTAGDTLPGLLQTLIRTLVDEVRDLEGRVATLDRQLAAVARTHPDAQRLQQVPGIGVVTATAFVGAVSHIHAFRRGRDFASWLGLTPRESTTGRRRYLGRISKRGDGYLRCLLTHGARAVLLAAQRTARDRPHRLTRLQQWAVALAARRGHNKTAIALANKLARIVWAVWCRETDFHSPTAAPVAA

SEQ ID NO: 324426 - protein, 379 aa, unidentified
MRAVFGIDVSKTSSEVAILVNGEKVHGYSILNDAIGFNRLLGDLKTVHNPEIIFEATGVYSRCLQAFLEECGYAYTRLNPLEAKKQLDSLRVRKTDKIDAEKLAKSQLVHNRKPTYVQEEVYQHLRDLSRFYQNMTEDLVRAKNRLHKVLQVTFPELENLLSTPTGEQYWNLVMAFPCKEFVLSLSQSDLYEIIRQSTSKRISEKRIAYLTDKLIKLAKQSFCAVKKTSPMLEEVRYYAQELLRLSERRQVVLNDMVALAQPLPEYDILRSIPGIAETTATSIIGELGDIRRFQSTNQINAFIGIDLRHYESGNFLAKEHITKRGNPYARKILFKCIHNIASASHTNPCHIADFYEKRKRQSTIASTKPHAIASIHRLI

SEQ ID NO: 324427 - protein, 331 aa, unidentified
MNMHVGLDVGSRTTAMGWRNGGRFAGQCNIDQTPAGRKAAVGKLLELKPMSVVMEATGIYYLDLAMELAAAGLPVSVINPKSFHNFAKLMLKNSKTDAIDAQLLAEYGERMSPRLWTPPTSIQLELRAIGRHINRLTGHRTRAKNELHALKATQTTLLMLIEDEEEAINAFDKRIERFRLAGRALIDNCPTLSAQFAHMIAAPGMGEISVFAALAELTTLPVTLKSAQVSRHAGLDVRLTQSGTSIDKPGRISKGGNAYLRSAMYMPALTAIRCDPNVKAFYEALVARGKRKMQAIVAVMRKYLTGLWACMRAGEDFSTAKLFSDKHTQKA

SEQ ID NO: 324428 - protein, 427 aa, unidentified
MAYRIAAIDVHKKMLAVVVADVAGEGEYQFERRKFGATPDQLHLLAQWLVQQEIEEVVMESTAQYWKPVWGALEQYWKPARQKREGATKMSGTLHLCQAKSNRGRRGRKNDFVDGERMIKRLVAQELVLSFVPDPEQRLWRTVTRRKHQLTRHKVRFQNQLESLLEQAHIKLSSLVSDLLGVSARRMLKAMAEGETDPAVLAALADYRLRATPEQLRDVFGACAQLPGVYRRLLKMALEELKLVEDQIEQLEREAFDLLKEHQDKVQRVAEVPGFGVDSALQMIAELGPEAAAFASEKALASWVGVCPGDEESAGESKSTRSPKGNRPMRRLLNQAAHAAIKVKGSIFQVTFQRLFPRMGYQQAIWAIAHRLCRLLWMILRKGIHYEERGPAVSAKSKRTRAARMIKELKALGYRVEGGPLPAGAPV

SEQ ID NO: 324429 - protein, 407 aa, unidentified
MEVLYARCAGLDVHAGSVTACARIASGPQVTYEHRTVPTTTRGLLDLAEWLATHGCTHVGMEATGVYWKPVWHVLEAHFTLVLANAMHIRNVPGRKSDMNDATWIADLLAPGLIRSSFVPPAPIQELRDLTRTRRQLVHEVARHVLRIQKTLEDANLKLTQVMSDIVGVSGRAILNALIAGETDPHRLADLTRGRLQATRADLVEALHGRVTDHHRFMMQLHLTQIDTLEAAVATIEARIGDALGPFRAAVSLLTPMPGLSETTARVVIAEIGIDMTRFPSVGHLISWAGFCPRLDESAGKRRSSRTRQSAPWLKPTLVNAAWAATRKKDSYLRAQFLRIKTRRGAKKAILAVASSMLTAAYFMLRDGVEYHDLGAHHFEQRDKEQLAKRLIQRLRDLGVAVEVKAA

SEQ ID NO: 324430 - protein, 342 aa, unidentified
MYYIGLDVHKKTISYCVKDVSGRVHQEGKLGATRCELDLWMRTLPQPWTVAMEATIFTGWIYDHLHPHATQVKVAHPLMLRAIAAAKKKNDRVDASKIADCLRCDFLPECHMASPETRDRRRTLRYRGLLVRQMVQTKNRISGLLMETGVTYNKQRLHKVGYFRELLASNEEVNESIRPLLRLSRDTIARLQKTERALVSSLQRDPLLTERIKRLRTVPGVGPITALTWALEMGEISRFRSIRQAISYCGLCGDERSSAEKSIRTPISKQRNKNIQFVLIEAAKLAPRQDHDLALLYEREKQKGNANRATLAVARKMVAYLLAVDRGQRDFVPAEDGRCDAA

SEQ ID NO: 324431 - protein, 329 aa, unidentified
MNNASTTTDLVVYIGVDVASRDCHAVFEGRKPRCFGLSAEGAGALCAWVRQTHPAAELCAVMEHTGVYSLAWYFLLQAQGIRCALCHASKIHHFAKADGQRSKTDKADAKAILSYALHYRPEPTTLAPRAQRQVALLLKQRDNIIEMRVALQNQFTALSFLPEDLALVEELFSKLLAGLAQAEADLATKIEAVISQDVRLREAYQIVRQLQGVGPVSGSTFCSMLDKILDCNPKELTALCGLAPAHKQSGNSQKPSHIDKQGRAQTRRNLYLAGLAASKYNPKCIEIKQRLEARGKPRKVIIVAIARNLLLQTQKALKAHFLSTAPTAC

SEQ ID NO: 324432 - protein, 330 aa, unidentified
MQYSYFVGIDVSLKTLTVVISDADKKQQPAREFTNTPKGHRQLVSCLRRLKAGVHAVLEPTNVYHLKVSLALYMADGIDVSVISTSAASHFAKAAMQRAKTDRVDARTLAEYARVHEPAPWQPPHAEAVKLRSISRHIGSLVKRQTALKCQRHSAKRGQAAPIVIQELNAELRWLETHIDKLRKHALALIKADEQFARWYELLLSMDGIGMITAIYILGELGVLPPGLTKKQWVAMAGLDPQPRESGISVHKPRRISKQGGARLRRALFLPANTAALHCAEIGYYYEKLQGVTGSKLPALCAVMRKMLQAIWGMFHYDQPFNPALFCQQN

SEQ ID NO: 324433 - protein, 395 aa, unidentified
MFIVGIDVAKRSHEVCMITSDGQTVQRPFSIRNNCTGYNLMLEKIRKHTNIKSQIVFAMESTAHYWLALFTRLRKDGYHVILLNPIQTSAMRDMFIRKIKTDAKDSFIIAELIRFGRYAESNVAQDRLLALKELCRNRFYLVDMAGDLKRKLIALIDRVFPEYEAQFDTIFCKSSVALLKKYPTPQKLSNAHLDKLTELLWNSSNGHFGEWKARELRELARNSFGVEDCDGAYSTLILLMLDQIQSLSGKADALEKEIFRLFQSFDTTVTTIPGVGPIIGAVILSEVGDISRFSSADKLAAYIGVDPSVNQSGEFQAAHAHMSKRGSPYLRRCIWMASQVAVQRDPMFRAYYEKKAAEGLKYMTIIGHVTRKMTAVIFAILRDHKVYEPVLPTAA

SEQ ID NO: 324434 - protein, 346 aa, unidentified
METLTIVGLDASKTSIMATAVDPLGHRIDQQKLGPGDPELIKFLESLSGPKRVVLEASNVWEHIYDAAASTGAEVLLANPAKTRFIAEATLKTDRVDSEALALLGRLDAVPPAYAPTLEQRALRRLMRDRVFYERKRRDVANHTYAILLQKGVPYEEGILFKKSRRDELREHRIAEVDRGLDAMVKLDEITRPLDLEVHTAFTRSTEAQVLATVPGIGEITATTLVAFLCPIERFPDLDAVVKYCGLCPSVFQSGTTTHHGPLVWDAHAILKWVLIEAQWQTRRRERRGDVAKVGKRVARRGNVNDGAVAAARKLARICAAVLRRGTAYQSHAPGPSSRRPTIAEP

SEQ ID NO: 324435 - protein, 478 aa, unidentified
MRPHIKLMEDAMDNSKKQKNKKHQKVNTSHLEQLNINAAGIDIGAKFHYVAVPNGRDPEGQDVRHFATFTADLHQLADWLRQCQIDTVAMESTGIYWIPVFEILDSQGFDVRLVNPRNVKNAPGRKTDVLDCQWIQQLHTYGLLPSAFRPEDHICELRAYLRQRAMLLSYGSHHIQHMQKALEQMNIKLNEVLSDITGVTGMKIIRAIISGERNPVKLASMRDARCNNSKTIIAKALEGNWRSEHIFALQQAVELYDFYTKQIIACESEIQHHLESFDDRSNGSPLEKPPRKSHGSSNQFHFDARGYLYRMTGVDVTRIEGIEAPTALTIISEIGIDMSPWPTEKHFTSWLALCPGSKITGGKVLSSKTKPSANRAAQAFRLAAYSLQRSNSAIGAFLRRKKAQKGAPKATTATAHKIARIFYNMLKYGTEYVELGQEYYEQRYQDRVIANLKRKAKQFGFELVNIKEHKLLTGLSAT

SEQ ID NO: 324436 - protein, 337 aa, unidentified
MGLYCGIDLHSNNHVLTVIDDSDRRVYERRLPNDLARTRAALEPFRSELVAVAIESTFNWYWLVDGLMDTGYEVRLVNTAAVQQYSGLKHTDDAHDAFWLAHLMRLGILPTGYIYPKATRGLRDLARQRMRLVQHRSSHITSVQNQVWRSTGVRLNARTLKGEGSEVWPELSDPDVALSIESGRAAIDALTAQIERLEVVLLKRLRLSPDFRLLKTVSGIGPILALTIALEVGTIKRFPGVGEFASYCRCVDSKKISNAKKKGEANRKNGNPYLAWAFMEAAHFAIRSLPAAHRFYERKRRQRHPLLAVKALAHKLARACFYILRDQVPFAPDRLLV

SEQ ID NO: 324437 - protein, 409 aa, unidentified
MLFVGDDWAEAHHDVEVQDDSGRRLVKRRLPEGVAGMAALHALIAEHLGDSEPDQVVIGVETDRGPWVAALIAAGYQVYALNPLSVARYRERHVVSGAKSDAGDAHVLAGLVRTDRVAHRPVAGDSELAEAVKVLARTHQNLIWSRQRQTNLLRSTLREFYPAALAAFDDLDGRDALAVLAIAPNPVQGKALSQSKIAAALRRGGRQRNIDTTAQKIQAALRTEQLAAPAAVAAAFGHTVAALVGVLGELSRQIETIEGELSAHFDRHPDALILRSQPGLGPVLAARVVAEFGDDSTRYADARSRRNYAGTSPVTRASGTRRVVLARIAANKRLRDALYLQAFAALNVSPGARGYYDAHRARGQTHHQALRALANRLVGVLHGCLRHRQTYNETTAWATTKQGDLAQAA

SEQ ID NO: 324438 - protein, 345 aa, unidentified
MKVLIGVDPHKASVAVAAVNEAGELVEGAHFSQNRAGLRALERWSKRFPERRWAVENAGGLGRHLAQRLSAAGESVVDVPPKLSARVRVLSTGNSRKNDGLDALATALAASRNKRLATVDPEAASEVLRLLSERREDLVAERTRALNRLHGLLRDLVPGGVAGTLSARRAARILRGIRSQGASARLRRRLASEVLRDIRTLDRKIADLNERIEAEVETSGTTLTEIFGIGPILAAKIIGAVGSVVRFPTKAHFASYSGTAPVEASSGQVVRHRLSLAGNRKLNNALHMVAVCQARSDARGGTYYRKKIAEGKSRKEALRCLKRRISDAVFKSLMADSQAPSCSAA

SEQ ID NO: 324439 - protein, 460 aa, unidentified
MESYYMGIDISKGYADFVILDAKKNVVEPNFQLDDTFSSHCKLFEILKRFFDHHCESVIFAAVESTGGYENNWLHSLNGFHGSLNIRSARLNPLGVWANSKASLRRVITDKISARDVAEYLIAHPEKVTYQQEDSLASLRRQWGFVRLLVKQKTQILNQFESLLYTANPELITYCKSGVPAWLLKLLKQYPTAAKLAKAKASSVARTPYVTADRAKKLVGQAKKSIASATDETTGKLVSAMAEQIIRMEETIRIQTQQMVKQCAIPEIALLKTFPGISDASAIGLMLEIQSVKRFSSVKKLAAFFGLHPAFKTSGDGTSSVRMSKQGRKEPRKILFMVAMVSLTANPHIREIYEAHTEKGMKKMAAIGLCMHKILRIIYGMLKNNQAYDSQVDQENRKNRKNRTTREATHTAKNENRRYEMFNQQAPISRRQNNKRKEWEQSQGDNITQCGIDVSTPSAA

SEQ ID NO: 324440 - protein, 449 aa, unidentified
MRNRAYRSTSVKQVQVSEVLLRLAEGPVWVGVDVGKRTVLAVVRDSAGHFERPWKALIPSELRELVNCLRELAAQRSLVVAMESTGTYGDALRQALTDAGLPAHRVSGKAASDYAEVFDGVPSAHDGKDAAVVAELAAIGKSAPWPLEPLALRQAEMSVEVSWLDTQQSILQLWLGRLEALLARHWPEATRLLGLTSGTLLRALAEYGGPAALAADPEAATRLARWGGRFLKPEKIAAVLESARHTVGVRVDEPTATLIKRCAQQALAAEAEIRQAKRRLEAFVEQDPRLAAEAQVVGKATACVLRVSLGDPRDYHCGEAYRKAIGLNLKERSSGQHQGKLKITKRGPSLARRWLYFSAMRTIQQAPVRSWYEAKRRKDKDHGNGALVAVMRKLALALHVVSTRGEAFSLERLLPGSPLPRAVSCAAGQVQRTKDSVDEKGLSPRPKAK

SEQ ID NO: 324441 - protein, 390 aa, unidentified
MDVLYQSCAGIDVHQATVVVCILHGPLTSTRPKREMAQFDTTTKGLKACHDFLSQFHVEAVGMESTGVYWRPVWHELCDDFELILAQPAHMKAIPGQKTDKKDAHWIAQLTRIGLLPRSFVPDETIQELRELTRQRKHYVESRNRETNRIHKILQSGGIKLTTYIEDIMGASGRNLLQLLIDETPVTPRMIHQSVYTSLKRKVPQLLEALDGYFSAHHRFMLGQSLEIYDFYQKQIDCLEERMNGYLNLYERPVEILDSIPGIDLITASVIISEIGVDMSQFPTAGHLASWAGLCPGNNESAGKKRSTKIRHGNSYLKRCLCQAVFAAKRQKGSPLAERYYQIQSRRGPQKATIALAHQLLKIAYILLKENLTYQEFVLQKKATRDEPVA

SEQ ID NO: 324442 - protein, 341 aa, unidentified
MQVYGIDLSKDKFDVNFFDATGKINTRTVKNGLAGISDFLSGIPSEAILCAENTGSYGDLLVFLCGQYGVQIALVPGYTVKHSLGLVRGKSDPIDAGRLREYGERFFDKLSFKTYQSETMSELRQLYSLRSQLVKARKELRTGAHARQTMPMQSIRTNQILKNTLGSLDAQILEVEKEIELIVKSDSELRENYTFSISVKGVGPVIATDIIIKTGNFKVIDTARKAASYAGVCPFPNASGKMVGKARTSHFADKELKCLLYMGAKSAVKHNKEYNLYYQKKKLEGKPHYLIINNIMNKLLRTIYSVVKNKNAYTPEYMCIDPREKNVNSSDKKSGKKIVFN

SEQ ID NO: 324443 - protein, 342 aa, unidentified
MRTWVSSTSMKQKEKHNTIGLDLGEGRHRFCVLDEAGEVIEQGSLSNERAALARLTQCYRGALVVMEAGTHSPWISRYLKELGSEVIVSNPRKVRAIYQHERKSDQRDAQMLARLGRMDRALLYPVRHSSEQAQQDLLRIKLRDSLVRARVGLINSVRFSLKSLGYTVRNPSSERFHKVVWETLPEAVRQMISPSVQALAELSVRIKVLEHEINVLARTKYPQTLWLQQVPGVGALTALYFVLKIEDPQRFENVRDVGAYVGLCPRRDQSGGNDPQLRISKRGDAYLRRLLVSAAQYILGPFGPKSALRAYGLMLAADGSARAKKRAVVAVARKLAVLLLSL

SEQ ID NO: 324444 - protein, 408 aa, unidentified
MNTLYVGIDVSSKSNVIYLMLPNGDKHSNFSVANSHEGSTQLVKRILSALTSHSLDTVLIGLEATSIYGYNLVYFLREDATLAPFNRKIHVLNPKQVKKFHDAYNDLPKNDYVDSFVIADCLRFGRINKEVYMGDYRYKALQNLTRARFFAVQNLVKEKQRFMNVLFKKYSTMTQEKVFSDTFSTTALAVYDEFESAEALANMDLHELTDFIIEKGKNRFPDPDAVAKAIQKAARSSYRLPKTVNDSVNQVLSISITSMKALESQIKEFDKAIKAQMELLPNVLISIPGIGPVYSAGIMAEIGDINRFNSQAALAKYAGLAWKQHQSGGFESEVTRLIPSGNRFLKYYLCEAAFSLVRCDKEYSDFYHLKYKEVNRCQHKRALALTARKFVRLVFRLLKDNRLYCPAK

SEQ ID NO: 324445 - protein, 417 aa, unidentified
MNIPNTLFIGIDRSDKQLDFTVLDGAGGLIERGKVSTDPAALHPWIEGWRNRGAANTRVVIAFEQPAPNLVVFFGQFEGIVIYPLNPATVRSYCRSFAVSNAHSDRTDAAMIARYTFHYHGELRALEQASGPMRHLRSLVEHRRTLIDERTVLTNRLQALLKLYFPQALKLLSEDLWRPMDCDFLLRWPSLQALRKARPSTLDAFWAAHGSRSEKRLRERLDLLAGARALTEDADTIAPFVLRVESLVRQLQVLAHSLEVVERRIEELAPTFVDYAFFRALPGAGRAFAPRLLAAYGEDRSRWTSASALQCYCGIAPITRQSGNTRCVIRRLHCPNFLRQSFHEWSAESWKHSRWARAFVRYHQSHGKSFHTIIRMLAYKWIKILTRAWHDRELYDEERYLQCLSRRGSPICKYLGE

SEQ ID NO: 324446 - protein, 391 aa, unidentified
MDEAWAGVDAGKEFHWAHVLDASGRELLSRKVENDEADILRLIDEALSFAEEVVWAVDQPEGGAALLLALLWERDQKVLYVPGLSVDRARQTYRGESKTDARDARVIADQSRMRSDLGELAPSEQELSELQLLLGRRRDHITDRSRTITRLRETLLSLFPALERALDVNSKGPLILLTHYQTPAQLRRAGHKRVAAYLRNRGVKGSNKVAHKALSTAGSQSVTLPTQEVASRIVAELAAEVLSLKERIESIDEEIGQRFFARPEARILSSLPGMGPILGAEFLVCVGDICAFESADRLAAYAGLVPATRDSGKRVGNRRRMRGGNKTLKRVFYQSAFASLRGSQESRAFYDRKRAEGKRHTQALIALARRRVNVVWAMLRDGTTFEERSAA

SEQ ID NO: 324447 - protein, 343 aa, unidentified
MEIHTVGIDLGKTLFHLVGVDSSGSVVVRKRCSRSQLLAFTANLRVQRIGMEACSGSHFLGRALRNQGHDVRLMPAQYVKPYVKTNKSDYIDAEAIAEAVQRPTMRFVPIKTEDQLDLQAVHRVRERWVMRRTAVVNQIRGLLLERGLTLPKGRSHVDQALPDILEDATLRLSDSFRALLAQLKLELDQLTARIEQMGAILQHTAKENDACQRLTTIPGIGPVIATALIAAIGNGSGFRRGRDLAAWVGMVPREYTTGGKQKLLGISKRGNSYLRKLFVQGARAVMQHRHNQAPGLSAWLAQLLARSHQNVVIVALANKLLRMAWAVLCKNERYRPPAAVESS

SEQ ID NO: 324448 - protein, 344 aa, unidentified
MTRHIGIDLHRNCFTAAVLSGNGRTYVTGYRMEQMDRFIERLRPDDEVAVEVTGNTRLFYKKVKPHVGKVAVVNPQQFKVISQSVKKTDTNDAKTLALFLSKDMLPEVRMKDDANAQLHSLVQTRDKLVKLRTTLKNKINNILSANGINMKKEALSSERGLRAVLGMPLGAVVDLELKVLVDQIRSLNNSVAELEKVIRAEGEKLRGHKNLKSIKGIGDVGASVLLSVIGDVNDFADEGKLASYFGIVPRVNNSNETERSGRITKRGSKLGRTTLVQCSLIAKRYSPYLQSYYERIKARRGVGKAIIALARKFLGIIYQTLKNNWIFEDFPNFVLKETTAGCSV

SEQ ID NO: 324449 - protein, 405 aa, unidentified
MNKKANPVKRVIGLDAHPDTFTAALLQGTTPAAAVLEKTFNQVPLAQLSRWAQKHTTPADLIVLEASGNSFHIVRTLARMERQALVLESGHLGKLKEAHANNDRISAVRIGKAYLAGTAKTVWVPDLKTQERRDWFHSHRKAVQRTTQLRNRLRSYLSDQGVRLAQGTPLARGAAATASLRQLKSWSPRQWQVLEGLLLELRHADEQRAHWRSLIAQEVLGDPQLLSLVRLCGVREMVAFALGAIIGDIHRFAEPRKLVKYIGLNPAFDHSGQGEWSGGIAGHGRKDLRGLLIEAAQSILRSGHPLARWGKKLLARKGSRNLAAGAVARKLTVAIWYLLMGRWTQLEELDAPLALKIGKIITGVGAQGLKQLGQTRKSLREASHRSLLTGRVYLLQHHKTHAAIT

SEQ ID NO: 324450 - protein, 403 aa, unidentified
MISIGIDVSKLKSTFCILNEYGEVLQTAREISHTETDLNELIRQVKSFGGKDDVRVIMEATGAYSKPVLYSLIEEGIFVAEINPLAMKKYRSDINFRGVKNDPIDALAIASYGIDKWHRLKEYQKADKEYAAMKALSRQYLSYMKPHVSLTQNLDHLIDQVMPGIKDEFDGYDPATGKDRLTDFLEEFVHYDCIRSLGPKRFDERFKRWAKKKGYRPRQGKSGKIYSLAKEGIPTLAYDSISRLLVKQAAEALRSMNHVLNEILSQLRSLAKQRPEYPIIRAMNGVGDVLAPLLIAEVGDPRRYHSGSALIACVGIDVPPYESGQFKASERGITRKGSKQLRKLGYLMVKNLRKIKPVKDTAVYDYYLKKKSEGKKDKKAIVAAMNKFFRIYYARAMEAYKTE

SEQ ID NO: 324451 - protein, 427 aa, unidentified
MNNTANSNSTSAPTQPVPPPEVWIGLDWGDAQHAFALQDRAGHTQEGTLTQSAESLHGWLRELQKRYGARPVVLAIEASRGPVIHALVQYPWLTVYPINPVTSARYRKAFTPSGAADDLPDARLLLELVRDHAAKLRPLQPQDPQTLKLTGLVETRRDLVDRKKQVLNQLCGLIKSYYPQALKLVGNLNTPMAWAFLDRWPDLPSLKAAKPGVIKAFYYTHNLRRPELLKKRLEFIGQAEALTTEEARVSVAVLHLRALLDQARALHKHIALLEKEIKTGFAAHPEAGLFRNLPGAGQHLAPRLCVAFGTQRDLYPEPASLQKLAGVAPVREKSGHSLWTHWRWLAPKFQRQTFVEWAGQTVMYSAWAKHYYERMRAKGKDHHKILRALAFKWIRVLWKCWQTRVPYAEERYLKQLRHRKSPNALAA

SEQ ID NO: 324452 - protein, 313 aa, unidentified
MKEEKTFIGIDVSKEKLDVGVRPQVDFMTFANTEDGISLMTDFVKSKQPELIVLEATGGLEMAALRSLVVARLPAVCVNPRQVRDFAKAMGVLAKTDKIDAHVIARFADSVRPEIRPLKTEETEMLDAFNTRRSQIIIMLTAEKNRLTTASKWTKKDIEKSIKGLEKALAKINREVENLIKKSPHWRHMDKILQSVPGVGPVMSLTILADLPEIGTMNRRQIAALVGVAPLNRDSGKYKGRRAIWGGRARIRSVLYMCVISGICHNPKIKAFYNRLINSGKKHKVAITACMRKLMIILNTMINNGTCWNESGC

SEQ ID NO: 324453 - protein, 335 aa, unidentified
MKEITTVGVDLAKLVFTVHGVDAAGHTVLRKTVRREKLMELVAGLPPCLIGMEACGGAHEWGRKFQGHGHRVGIMMARFVTPYRKSSKNDGNDAEAICEAVARPNMRFVPVKSAEQQAILSLHRVRQGFIEQRTATINRIRGLLAEFGVVLPQRAEQVRRAAVVVAEELPVLARDAITDLRAHLSYLDNRITQYEKQLVELARQREAAVRIQRLPGVGPLTASAITASISDGHEFANGRQFAAWLGLVPRQYSTGGKPRLGRITKRGDAYLRTLLMLGARAVLQSAAQKSDRLSRWAMALRARRGYHRAIIAVAAKNARIIWALLANNREFAPTA

SEQ ID NO: 324454 - protein, 342 aa, unidentified
MSTITRIGMDTAKNVFQLHGVDQAEAVVLRRQLRRREMIKFFEVLPPTLVAIEACASSHHWARLLQSFGHEVKLIPPQYVKPYVKRGKNDAADAEALCEAVTRPSMRFVPVKSREQQAACMLMTVRDRLVSVKSQLSNAIRSYAAEFGIVGLAGRQNVDGLIKRVLEDDTLPEMASELFRLQAREYATVVARLAEVDAKLMTWHRADDLSRRIATIPGVGPIGSTMLSMKAPPAETFRSGRQFAAWLGLTPKDHSTGGRVRLGGITKAGDPAIRSVLIVGATALLRHIRKGRTKPSPWLAAMLDRKPPKLVAVALANKFARIAWRLMMSGGIYNRPPALMPV

SEQ ID NO: 324455 - protein, 442 aa, unidentified
METRIIGIDLAVKAAHRAVVLDQATNSVVGGLFTFRSYPAHLDRVLAKARAGTSADVRIKAVLEATGMAWYPVSTYLERKGVSVYRVNGQQTADLRRVYSRYTKNDRLDAHVLARLLLVAPESLHRVWIPKGDQQALQRACREMEQLTQLVSASKNRVRAIDQWAWLGWPLEDTYGPTARWVRQNWYNPWRVSSVGADSIADAWRKAHPDCQGELEWLSPLMKRAERVQELYGSTREIDYERLQAYVTRQQNRWQRLEAERDHLRLQRVRPTYRRLHPSRHLESPQGVGQDSAAIYIAFIGDVRRFPSLRQFRGWTGMVPYSRQTGQTEARGLRLTQAGPDLIKTTAYRNAEVARLWDPQIAAVYHRQMMDYGKHHLQAVCACATDLLNRIYAILRDQRPYELRDVDGTPVSKKEARRICLTEYRVPEKVRRRRNHRNRERR

SEQ ID NO: 324456 - protein, 365 aa, unidentified
MPSVTPPAGLIHLGMDTSKNTIVAAVLLPGEQIPAVDRIFNDEAAIRRLVGRFPDRELLRACYEAGPGGYDLYRLLASMGVACDVVAPSLIPKGGSDKVKTDKRDSFRLARLHRAGELTPIRVPSPAEEAVRDLARVRAAVLADRKRAQQRLTAMLMRHGRVWRNTYWTGPHRAWVAAQSFPEPALATALAHYRAALDTRESELACIEAELAPWARREPLAAAAGRLCCYRGIAELNGLTLAAEVAGWRRFASARAFMGFTGLVPAEYSSGQRTWRGHITKAGSGPVRTALIEAAWAYRFSPAVGVTLRRRQQGAAPDTIARSWKAQRRLHGKYRRMVTGGKAAPEAVTAVARELAGFVWAEMTS

SEQ ID NO: 324457 - protein, 381 aa, unidentified
MQAIKTLVGVDVSAKTLAAKRRRKNEGKDEAKEFPNDAAGHRELLKWIGRGARLCMEATGVYHLQLALMLVAAEVEVMVVNPRVAKDFGRALANRSKTDRIDAGTLLEYVARMDFVAWKAPSSAVMELRELGRRLSELVHAGAEEKNRFHAKNVAAISRAVISDVQAHVAQIEKRVTQIEKAAALVIRADADLREQFEILTKIPGIGRRSAILLLSELAVLDPTMTVKQIVGHAGLDPREYESGSSVQKPPRISKAGNAHLRAILYMPALTAIRHDRGARLFFAQLVARGKKKMQAIVAVMRKVLHGIWIVLQRRVAFDSSVLFAVSLAKAESSDSAVAANQPEPSQDHPKGRSEAEELRQQLDPGSAQATRSRRKRSKAA

SEQ ID NO: 324458 - protein, 413 aa, unidentified
MEILYARCCGLDIHKRTVVACLFVPGAEGTPTKEIRTFGTMTNDLLALSEWLAAAECSHVAMESTGVFWKPIYNLLESSFGVLVVNAQHVKAVPGRKTDVRDAEWIGDLLRHGLLRASFIPDRPQRELRELTRYRTTLIHDRANEVNRLQKVLEGANIKLSSVATDILGKSGRDILEALVAGTTESAALAQLARGRLREKIPQLEHALAGQFSAHHRFLIAQQLAHIDFLDASLERLSAEIAERVRPFDAARERLQTIPGVGRRTAEVLVAEIGTDLTRFPSAGHLASWAGLCPGNDESAGKRRSGRTRQGSPWLRTALVEAAQAAARTKDTYLATQYRRLAARRGAKRAVVAVAHTILVLVYVLLTREQESYHDLGSHYFDERDRNVVQRRLVRRLEALGYTVSLEPTIPAA

SEQ ID NO: 324459 - protein, 397 aa, unidentified
MIAVGIDVSKSKSTVAILNADGTQLVRPFNMAHTLPEMNSFVERLRALEGPVIILMEYTGHYHYPVLKKLQAEGFPVCLINPYQMKKYGDVEIHKAKTDKKDAVRIATYALEKAYKLSPYSAMDQKYEDLRFLSRQYGQRIADVSRLKTQLLDHLDQTMPGITALLSLKSRTPEKCMLMLFIKRFKSFDEVCRIGKTRFFSAYATLVKKTADRFAAAKALAIFELALNSITTRGDDPYIWSVQAQCVDLLAAAQNAADAIILQMQNIAETIPEYKVLRAMHGVGDRLGPIILAEIGDVRRFHSAKALNSYAGNDAPPYQSGQFESRNRHISKRGSPALRKACFEVMQALKLTKPQDDPVYLFILKKEQEGKPHNVAKMAGVNKFLRIFYARAMELYR

SEQ ID NO: 324460 - protein, 343 aa, unidentified
MKLHVLGIDLGKTVFHLVGLDSTGRVVIRKKCSRTQLLTFTANLQVDLIGMESCSGSHFLGQALREQGHEERLMPAQYVKPYVQTNKSDFLDAEAIAEAVQRPRMRFVPIKTEEQLDLQALHRVRERWVMRRTAVVNQIRSLLLERGLTLPKGRCYVGQQLPRILEDGELRLSGSFRVLLAQLKLELDQITARVEEMDRVIQKTAKENEDCQRLTEIPGVGPVTATALIAAVGNASAFRKGRNLAAWMGIVPGEYSTGGKQKLLGISKRGNKYLRTLFIQGARSVVQQRHKQAPGLSHWLAQLLVRAHQNVVIVALANKLVRMAWAVLCKNERFHAPVLAVTN

SEQ ID NO: 324461 - protein, 320 aa, unidentified
MMAQNDQIVVGIDVAKDKVDACIRMLSQRHAFPNTAQGHRKMIAWLHKHKVSKAVMEASGGYERDWARVLRRAGIEVRIVDPKRVRSFALSAGRLAKNDAIDAEMIAWFAETFSAAPSQIHDAAHEELVALVKARKHLLDLQTRLKTQNEHAAPEAIQKAHARVLKSLATEITRLEAAISAKVKATPEFADRAEIIESVPGLAETTSAILIAGMPELGTVSKQIAAALLGAAPYDDDSGKRRGERHIKGGRRWVRNAIYMPCLGAATQNNPVLKAFYQRLIAKGKEPKVALVACMRKLIIILNTMIARRQKWDPSRYALN

SEQ ID NO: 324462 - protein, 348 aa, unidentified
MEARLDVFQEHLYVGLDLHKRRWISTVRTRDLFLKRMATPADKELFVQSLRRQWPQAKFSVVYEAGCFGYHIADYLRTQDIEPIIVAPHRVPVMPGDRIKTDAIDSNKLAEALAAGTLKSIHQRPAPVLYDRGVLRKRLQLIKRRVQIQLQLKADLLFYGFELRSPGSTRWSKRTVASLRSLMFPNERFRRAYLLALDEYDGIAAQLSELNTMVHELLVAEPYVKRVTLLRTIPGIGPLIALSLVLEVEDFARFRNHGEFASYLGLVPSEHSSGERIRRGHLTGMGHTYLRSLLIQAAWVAVRKDPELRRVFDRLAVGGKQRAIVAVARKLAHRIRTVVIEQRPYQVR

SEQ ID NO: 324463 - protein, 460 aa, unidentified
MKRNKMKKAQRIRSHLKQVNLFAAGIDIGSRSHFVAVPDELDEQPVREFAGFTGDLNRLADWLVEIGIQTVAMESTGVYWIPVYEILESRGLEVLLVDARHVKNVPGRKTDVLDCQWIQQLHTYGLLRGAFRPPEEMVALRSYLRQREGLIASASDSIRHMQKALRQMNLLLDNVVSDITGMTGLRIIRAILAGERDTKQLAQLRDKRCRNNEQTIADSLEGHYREEHLFALQQAVERYDFYQQQVEACEGVIERHVREIEGDNDNDQDVPPASKPKGHSKNGFDFDVRSQLYRLTGVDLTEINGMSESNVLTIVSETGIDMNAWPSEKHFASWLGLSPGNKITGGKRLSGKTKPSPNRAAAAFRLAAFSLANSKTALGAFYRRLRNRLGAPKAITATAHKLARLFYRLLKNRTPFIDPGQDYYEQQYQERATRNLKKRAAALGYKLIPESTDGLQESMC

SEQ ID NO: 324464 - protein, 416 aa, unidentified
MSLALPEAQVFAGIDWAAEVHAVCVMNAAGKITAQFTVAHSADGIAGLVRRLARLGDPADVPVAIERPDGRLVDLLLEAGHPVVPVKPNAIKAWRDGEVLSGAKSDAGDAAVIAEYLRLRYHRLAPVAPYSGETKALRTVVRTRDDLVEMRVAATNQLSALLDALWPGAKAVFADVESPISLEFLTRYPTPAAARHLGEKRMTAFTVKHGYSGRRTAAQLLERLRSAPAGTASEPVTEALRDAVLALVTVLQALNAAVKDLDRSAAAHLGEHPDGPIFASLPRSGQINAAQMLAEWGDCRQAYAGPDSVAALAGVTPVTRQSGKHRSVSFRWACNKRFRRAVTTFADNSRHASPWAAKVYNDARAAGKDHPHAIRILARAWIRVIWPCWINGTPYDPALHGAAAALAEQTSSQFAA

SEQ ID NO: 324465 - protein, 355 aa, unidentified
MKTTQSDFSSLQLYIGLDVHKKQWSVSIYTDSSHHRTFSQPPTPQALKSYLDHHFPGAKVICAYEACKLGYWIQRALTSYGYKCLVVNPADIPTSNQEKANKTDPIDSRKIGKSLRAGLLSSIHVPDEATEGDRHLFRYRRKLLGDLTRVKNRIKDKFLFTGSSIPEEFDNSNWSKAFLRWLNQAHLPDAHTRVCVDMLLEQYHFLYRHFLKTSIEVRKLQRDSRYKQRAKLLRTIPGIGPLTTVELLTEIADIHRFSSFKKFNSFIGLKPSSHSSGERDWKGRMSYRQHKGLRSSLVECAWTTISKDPVMLQRYDELRKRLTGKRAIVKIARKLASRIYYVLKNEKPYEVGLAK

SEQ ID NO: 324466 - protein, 315 aa, unidentified
MTQTNITTAGIDTSKLKLDIAIHGRAERWQVANALPGWRALAANLAKAGVTRVGIEATGGYERGVVEHLRAAGLTVLVLQPMQVKAFGRVHLRRAKNDTLDAVLIAACAATLDQPRIAPDPRLTELAGYLTFLEQAEEDIARFKTRLEHIDEPQLRRLVTSDIKRLKARKAAQLRDIAKRLRAHDDLARRLDLVLSIPGIGERTALALIIRMPELGRISREEAAALAGLAPFDDDSGKYKGQRHIAGGRGRLRRSLFAAALPAAFRWNKALIDLYARLIAKGKVHNAALIACARKLLIYANTVVQRGTPWNEKAA

SEQ ID NO: 324467 - protein, 338 aa, unidentified
MNLTRIGLDLAKQVFQVHGVDRHEHVVCRRQLKRAQVRDFFRQLPPCLVAMEACGSAHYWARELRELGHTVRLIAPQFVKPYVKGDKHDAHDAEAICEAASRPSMRYVPVKSAEQQAVQSMHRVRSRLVRARTALCNEVRGLLGEFGLIATRRGRAATMALLETVMATEPASLPAPMGELLRELKDELQTLEARIARLERQIQAHVRGDARIQRLLAVEGIGPISASAVAASAGDARQFRTGRQFAAWLGLVPRQHSTGGQQRLGNISKRGDTYLRTLLIHGARAVVRCCANKTDARSRWLQGLLQRRPANVVAVALANKNARILWALLSRETCYRPG

SEQ ID NO: 324468 - protein, 420 aa, unidentified
MIKKDAMKFERVIGLDSHPDSFTAAVLRGQTPAQALVEKVFNKVAISQLQSWAKKHTTAEDLIALESSGNSFQLVRVLAAVQRRAVVLESCQLGKLKEAHASNDRISAVRIAKAYLAGTAKTVWVPDPKTQERRDWFHIHTKATRRTTQVRNRLLSYLSDNGVRVKKGTRLTQLKGTQEQLQKAKQWSARQWQVIEGMLMELSHAEQQRKHWRSLIAQEVAADPQLLSLVRLCGIRDLVAFALGALIGDINRFASPGSLVKYVGLNPAFDDSGAGQWSGGIGGHGRKDLRGLLVQSAQAILRSREPLAKWGHHLAARIGSVNLAAAAVARKLTVAVWYLLMGKSTPLEEVDERLSCKIGKIISHVGVEGLKKLNKTRKALRQETVQALKTARTYVLDPNKKFTPSKVQPPSSLAQEYGLA

SEQ ID NO: 324469 - protein, 357 aa, unidentified
MRIIGVDLHARQQTIAMLDTETGELVEKTLEHEAEKVREFYSALPGPVWVGIEATGSMQWFLKLMEDLGIDCQVGNPAKIRAAEPRQQKHDRRDAALLLKLQVENRFPSIWMPSTELRDLRALLRHRHQWVRMRTRVQNALQAIALSHGLRRGKSLWSQTGQHAITSLPLAPHTAHRRTELQALYRQLDEQISKLEERITDQAWQRPGARRLMTHPGVGPITALATEVFLGDPARFTDGKALASYVGMIPSEYSSGGQQRLGGLSKQGNPLLRFLWCEAAIHAVRRDPELKRFYRRKLQQKGLGKARVAAARKLGIRLWIMLRDQIDYQEFCRRGQMRQKSGGARAGIPEEGRGPAV

SEQ ID NO: 324470 - protein, 410 aa, unidentified
MGYETLIRRAHVMTKKNTLKSLPTDTEFRVVGLDLAKSDVSVAAIPVDDNTPSLVDRMTYADLLDRAGKISPTLFAMEPCNGYSLLCLQLENLGHEIKVISGSTVSMWINTHLSGQKTDLNDAIALARLAVSDAELTPIRHKSITEIRIQTVQAVRQQLMSQRSKSIVSFKALAQQWGIPCAAGHRNLKKLRESIEAKVDLITRPVANAMLFLLDAVKSLDRQIGQLNQTLQELVMSDERGRLLQSVLGVGTQISARVITVVGNVERFNSPRSLVAYVGVAPRNFITGHKNLTKKKHGNCPDLSHKGQGKISRRGDKLLRSLFIQGAACLYMQFCKDQLPECQLKRWILKQLAMQKPYGKLIVSLAAKLIRIVWAVLTYREKFNIQKAGMTRSMWSEMALETPLNKEVPA

SEQ ID NO: 324471 - protein, 366 aa, unidentified
MATNISNNKREKNHNSFLKNPYAFKPVYVGIDVHKQTYSVVTVFEGVIIKKWRTVANPEKLAQQLKNYFPGAFIETAYESGFSGFVLHRVLEKAGIHNIVVNPGSMEVAVHNRVKTDKRDALKIATLNEAGRLKGIRVPTPQQEQQRLLTRTRQQLVEDRSAIKNKIRMKCHQMGLIDSDDPREMSHKLVSQMLSRTPSPEFSLAIEAYWQVWKTIETQINLIEQKLSEQAQIDPHETIYRSAPGIGFLSARILSNELGDLTQFDNERQLFSYTGLTPSEFSSGESIRKGHITRQGNKRVRYILNQAAWRAIKKDRELKEFFERLYPRTGKKRAIVAVARKLIGRIRAAFKTGKPYQMNPISLQPA

SEQ ID NO: 324472 - protein, 340 aa, unidentified
MSEITTIGLDLAKHVFQVHGVDAQGTTVLRRQLRRGQVLAFFSRLPRCVIGLEACATAHYWARELGALGHEVRLMPAQYVKAYIKRNKHDAADAEAICEAVQRPTMRFVPVKTAEQQATALLHRGREQLVRQRTMLVNALRAHLAEFGMVAAQGLRNVGELIAIVRDDGDTRLPDAARQVLQVLANQIEQIETAVAGLEKQLLAWHKTNPVSQRLASIPGIGPIIATAIATTVADPKVFRSGREFAAWLGLVPRQNSTGGKTRLGGITKRGNRYLRRLLINGASANLLRSKATKADPWVIGLRRRRPPLVVAVALANKTARIAWAVMLREKEYQPRAVAA

SEQ ID NO: 324473 - protein, 343 aa, unidentified
MEQYAGIDVSLESARVCVVDSTGRIMREAKVVCEPEALIAWFTKLGVSMARIGLEAGPLSQWLYARMREAGLLVELLETRHVRDAFKAMPVKTDRTDARGIAQLMRLGWFRPVHCKSLPAQELRAILTARKLVQNKRHDLEMSLRGILRGFGLKVGQTTPRNFEARVRELADGQPTLLVVADAMLLARAVLVEQLGKLQKRLVSLARQDTRARLLMSTPGVGVLVALTYVAAIDDPARFRSSKAVGAHFGLTPKKYQSGETDVTGRISKVGDASVRTALYEAANVILTRPVRGSLLKSWAMRVAKRTGMRKAKVALARKLAVILHRMLANGSAFVAGKAAAKA

SEQ ID NO: 324474 - protein, 320 aa, unidentified
MLEKKSKSFIGIDVSKQLLELAVHESDYQFRCANKVSSFGQLISELISLRPALIVLEATGGLETRVVSALQAAGLPVVVINPRQVRDFARALGQLAKTDRLDARVLAHFAAAIKPPLRPIKAKEQQELDALTGRRGQLVEILADEKNRRASAASDTVRDQIEEHIDWLEDRIAELDQQIKALLQTSPSWQVKDQILQSVPGIGPVASFSLIADLPELGTLNRQQICKLVGVAPLNRDSGQQRGHRHIYGGRAGLRRLLYMAALTATRHNAVLKEFYQRLRANHKPFKVAITACMRKLLVIINVMMRDGTCWNLNQVPVQA

SEQ ID NO: 324475 - protein, 376 aa, unidentified
MQDSIFVGLDVHKATISVAVAQGERGGEVRHWGTVPHRPDHIRKLVEKLGAGGRRLHFCYEAGPCGYGLYRQLVELGHDCIVVAPSLIPVKAGDRVKTDRRDAVMLAKLHRAGELTAVWVPDAAHEAMRDLVRARATAMRVLGKARQHLQGFLLRHGRIYPGKKGWTVAYRRWLTTVRFQHPAQQIVLQDHVDAVTDAEARVEKLTGQIADLLPSWSLAPVVEAVQAMRGVAFIVAVTVVAEVGDFRRFDNPRQLMAYLGLTPSEQSSGATVRRGGITKAGSGLARRALIEGAWSYRMQARISRKLHDRLEGLPKAVRDIAWKGQLRMCQRYRHLVAAGKAKVVVTTAIAREMVGFIWAIARAVMPSPGAPARIQG

SEQ ID NO: 324476 - protein, 342 aa, unidentified
MTAIGIDTHKATLAACAVDELGRPVGEATFTNDPAGHLEFIAWARAIAPEATVGVEGSSSFGAALARSAQSAGLVVREVPPHLSRVERLRTRRPGKSDPGDALAIARVTARESNLPPIRLPDRTTELRLLLEAREDLVAESTRARNRLHAHLLTLAPGYGGTVTNLVAARHRATVGRLLRGVGGVQAELARGLLLRLARLEREVKTLTSRIGALVAGHPLLGLPGAGPITAARLIAEVGDVRRFRSADALAALAGVAPIPASSGQVQRMRLNRGGNRQLNRAFYFIAVIQSRFYPPAKAYVTRRMEVDGKSWREAIRALKRMLVRPVFRLLVEGAAAQVEAA

SEQ ID NO: 324477 - protein, 341 aa, unidentified
MSVIAPVFSFGLNGYAGSGLALQDKAEKRLMKITIGIDISKETLDAYRFPDNHHIQVANGRAGHKSLVRWIGKQNESLVVFEATGAYHRNLEAALAANGTAFAKVNPRQARRFAEATGRLAKTDRVDAIMLAKMGAILGLKAHEPRTEALHILRELITARRALMKDKVAAKTRLQTTRQTLLKNQINARLKQIKIQIQQVDAAITEKVAQDEVLSNKLDILTSIPGIAETTAFSMLIEMPELGTLEGKQAASLAGLAPMSRQSGKWQGKERIKGGRAFLRRAIYMPALVATRYNPGLKAKYDQLIRAGKSGKVALTAIMRKLVVMANALLRDGRTWSELRP

SEQ ID NO: 324478 - protein, 427 aa, unidentified
MPYRIAGIDVHKRMLVVVVSDVEVHDEYQFERRELSSSPAQLRLLAAWLSEQEVEEVVMESTAQYWKPVWGALERHWQPACQQRAGARPTSGRLHLAQALSNRARRGRKNDFADAERLVKRLVANELTLSFVPAVEQRLWRTVMRTKNQLRCNQVQVQNRLEALLEEAHIKLSSIVSDLLGTSGQRMLNALANGETDPAALAALADHRLRATREQLRDALDACQDLHPLYRRLIKRALEDWQRIETQITQLAEEMAGLLRPYQDQVERLAEVPGLGVDSAQQIIAEVGATAATFPSAGDLASWVGACPGENESAGVNHSRRSPKGNRPMRRILNQAANAAVKLKGSIFALLYRRYVIRLGHNQTIGIIAHRLCRLVWKILHQDIRYQERGPAVSKKSKQNRAARMIRELRTLGYRIELTNSPAASPA

SEQ ID NO: 324479 - protein, 430 aa, unidentified
MSYRISGIDVHKKMLAVVVSDVEVDGEFRFERRMFGSNPEQLRSLAAWLLEQEVEEVVMESTAQYWKPVWEALERYWKPIREKREGARRKSGTLHLAQAQSNRGRQGRKRDFPDAERLVKRLVARELTLSFVPDAEQRLWRTVTRKKNQLRRDRVRLHNQLESLLEEAHIKLSSLVSDLLGASARRMLKALADGETNPAALAALADQKLRATPEQLCDALGVCKDLKPVYRRLLKMALEQLQFLEQQISQLDQELATLLHPYQDAVQRLAEVPGLGVDSAQQIIAEVGPAAAVFPSAKQLSSWVGACPGDEESAGVNYSHRSPKGNRQMRRILSQTANAATKTKGSIFDIVYRRSVTCLGHNQAIGAIAHRQCRLIWLILHQGIRYEERGPAVNKQSKQRRTWKMVRQLRSLGYRIQPPNPEQPSQAQAQ

SEQ ID NO: 324480 - protein, 332 aa, unidentified
MSLVSTVGIDLAKNVFSVHAVSQDGTVILRRTVSRAKLPELVAQLPPCVIGIEACSGAHEWARRFSSFGHTVKLMAPKFVIPYRKSGKNDGNDAEAICEAVRRPNMRFVPVKSLQQQSDLSVHRVRQGFIEERTATLNRLRGLLAEFGHVIPLKAIELYRRVPALLEILPPRVATCARDLLEHATRCEAKALEYERDIKRHVTCHALAQRAQTRPGVGPITASAVVATVGNGHDFKNGRQFAAWLGLVPGQYSTGGRTRLGHITKRGDPYLRALLVMGARSVLQRAARLTDPLSRWALAVQARRGYHRACVAIAAKNARVIWALISKEPVAA

SEQ ID NO: 324481 - protein, 414 aa, unidentified
MEGEINKSCGLDIHKRFFIATILSRSGEIQQQRFDRDDNGILNLKNWVTSEKCDVVACESTSDFWVPIYDSLINHLPVIVGNARDMKAFTHKKTDKIDSEFIAKLALNKMVQPSRVFPKNQREYRSYVRLRLALVRKRTDMKNEAHAILSSEMLRLSDVLTDIFGKNGRAILSGISSGKTVDQIIESLSPNVRKKGSQIREILDREISQSAAIRLQICLNLIKHFDDEIKLLEREIFNYAYGKHKREMEILMSVPGIGEIGAATLIAEINNFNDFSSGDKLASWLGLVPNVYQSADKYHNGRITKRGSKVARWILTQIAQAAARKKNSKLKEFFNRKKKSIGHAKAIIALARKIATIIWHLVTNDEMYEDETGYEKSEIQKRKIVETETFTVDERITIISGLIAIMGKEDREST

SEQ ID NO: 324482 - protein, 318 aa, unidentified
MQSILDLGADVDSRFVVVACAAGSFRPHSIANERKAISGWLRTVPRGSRLGMESTGGYHELLAELGCKAGLRVYVINPRDLRRYAEGIGRRGKTDRVDSQVIARYVAREHGELHAYVPPTKAQRELTQLIGRRAKLVQTKGALKQSLRGVPALGAEAKRLIMSIDRLIAKLEAMMQRALQQTPAARQAAEHIATIPGFGTLSSTYLGHAFTRLPYANSDAVVAASGLDPRPDDSGKKKGRRRLSKRGPGEERRLLFNCARSASLTKLWQPYYAAQVAKGLSATAATVILARKMLRLAFAVYKHGQPFNPALFAGRACQ

SEQ ID NO: 324483 - protein, 344 aa, unidentified
MSIMHYIGFDIHKKVISFCEKKVDGTIVDQGVIRATRSSLAEWAEQRSGQWIGAMEATLFTGWIYDFLLPYALKLKVAHPEMLKAITAAKKKNDVADAEKIADLLRCNLLPECYMAPEKQRNLRRILRYRTFLVREASKMKIKTASLLMEVGAEYNKARLHGTKYFQELLGSLDYVPESVLSLLQMTRINMESFAKMQKSLISALRSNPQISRRVEMLMSIQGIGVVTALTWVLEIGDVERFSRISQAVSYCGLCSAQKESAGKSYRGPISKKRNKHLQTVLIEAAKLAPRWNPRLAEVYERESAKGNRNRATLAVARKLVAYMMAVDKNKTPFESREELPKAT

SEQ ID NO: 324484 - protein, 411 aa, unidentified
METIFERVSALDVHKAQVTGCVRVPDESGVRVEQLAEFATTVPGLLGLLDWLKAHGVTHVAMEATGVYWQPVWHILEDEFELTLVNARHVKNVPGRKTDVKDAQWLCRLMEAGLLRSSFVPPKPQRQLRALTRYRKTQIAERQREANRLHKALEDTGIKLDCVATDILGKSGRAMLNALVAGTTDPEVLADLAGGKLRAKIPALRDALQGRFEAHHALIVGAILAHLDFLDGQIEQLSQAIEAQLGPTGLAGVQLASSITGVAARTAEVLVAEIGTDMTKFPSHRHLASWAGQCPANNESAGKRRSGRIRNGSKWLGIALHEAALAAIRCKNTYLAAQYQRLRPRLGHGRALGAVKHSMLTAYWHMFTNGELYNDLGGDYFARRDPERATRRLVAKLQGLGHNVTLEPAAC

SEQ ID NO: 324485 - protein, 391 aa, unidentified
MTRISAGVDVSKNRSTVCIMDQDGKFIMRPFLVWHSTEELDFLADTLKRLNGEVRVIMESTSIYQYPIALQLKERGLFISIVNAYEMKQFANTDFRGGKTDKKDSRTIASYGISYWYKLVEWQIPKDTYFNLDLLNRTYMNAKKHRQIILQELQHYIDCAMPGMDKELHSLNLSTKKDFMLDFVEKFWHRDEIVNMTEAEFTEVFTAWAKKKGYRPVEGKAAKIYAIAKSCIPYYPANPTVKTILQCIVDKLSGVNRTLVTIVTQMIEEAKKLPEYQIVREMPGVGDPLAARFFGSAGDIRRFKNSKALVAYAGIDSPPDESGDFSSTHRHITKKGSKVFRDTGYEIMMALRAQKRTWEKVRKNPDVYDYMLRKEAEGKPPTKLNELARFN

SEQ ID NO: 324486 - protein, 361 aa, unidentified
MKNPAQHLIAEVPRRQAKAEMTIGIDLGDVWSHYCTLDQDGEVVDRGRFRTTPKAIGKWFTDVPPARVAMEAGTHSIWISAQLQELGHEVIVANVRELRAISHSDRKSDQVDAEKLARYARLDPNILRPIAHRTVAQQEALTLIRARALLVRLRTAAVNAVRGLTKSCGYRMPASATTCFAQRCLAVMPPGLTQALGPVLQQIAEITVKIKQYDRQIQQLGQTEYPETQALLKVHGVGHLTALTFVLTLGSKERFGRSRDVGCYLGLRPRRSQSGDHDPQLGITHAGNAYLRSLLIECSNHILRPHGRDSALRQWGLHLAARGGKQAKSKAVVAVARKLAVLLHHLWSTQESYMPFYEQAA

SEQ ID NO: 324487 - protein, 311 aa, unidentified
MQEVFVGVDIAKDWLDIFHPGSGLRRIDNTAAAARRFAKASAKDGVWVIFEASGGYDRLLRDALEAAQARFSRVNPRQARDFARAMGVIGKTDRVDARMLAEFGARLRPAATAAAAPERCALQALTTRRRQLVEIRKQELTRLPQTLDPAARADIRSLILILNARIRRIEGAMAAQVGATPDMAQAARRMQTVPGVGPIVAATLLAELPELGQLDRRRIAALAGLAPIARDSGKHLGKRRIGGGRPTVRAILYIAALHASRLSPPFKAFRDRLKAAGKPTKVTLVATAHKLLDILNAMLAASTDYKANTMP

SEQ ID NO: 324488 - protein, 354 aa, unidentified
MSQATTTPLPVTIGLDLGSRTSQFAICSPSGEWLGEGKVATTSTGIRGLLERHRDARLVMEASTPSRWIRDIGVELGSEVVVANPRSIPVITASVRKSDRNDARLLAQLGQLRPELLNPVILRDASHQEVRSLLFARQQLVEQRTALINFVRAQARMLGENLPSASTRAFVAKCASLLPASLSKMLEPLLQILQAVGQAIRVYDERIEQLSHSDFAQTAVLKQIHGVGPLTALCFVATIGDPARFAKSRQVGPYLGLVPRSDQSCGHDPDLPITRCGDTYMRTLLVSVATRILGPFGQDSDLRSFGLRIAAKGGKRSMARARIAVARKLAVLMHRLLVTGEVYRPLSRPEAAVA

SEQ ID NO: 324489 - protein, 310 aa, unidentified
MDRTIVGIDVSKDRLDVAVRPSGEVFAIERNPVGLEQLTLRLTALCPELVALEASGGFETVVAATLAAARLPVVVVNPAQIRAFAKAVGQRAKTDPIDAGVIAHFAEATRPEPRPLPDEATRLLADLVARRRQILEMMVAERQREKRVTVPHLRKSIVRLLKALERELTSLDTDITDAVRGSPAWREKEDLLASVPGVGPTIARTLMAELPELGQLSRRQVAALAGLAPFTRQSGQWRGKSFIGGGRSAVRAALFMGAMVAKRHNPILKVFFDRLVAAGKPRMIALIAVARKLLTMLNAILRDRRPWQTI

SEQ ID NO: 324490 - protein, 381 aa, unidentified
MPSMQLRRDDVIVGVDTHKDNHIAVAIDGLGGRLGDIAIPATIAGFEELLAFCLAFVGSAGRLIGFGIEGTGSYGIGLARHLRNQGHEVHEIARPARAVERRLAGKNDTIDAEHAARQLLAGHGLSTPKTADGAVETIRLIKIAYDGAVQARTTAMITLKATLATGSETLRAELEKLTDHKLITACAALEGPAPARPVRRGAPAVVVPTDPDAAMRHVLSSMAKRWLALHEEAKAHAASLKALTTAAAPRLLEAVGVGYDTAAQMLITAGDNTNRIKSEAAFAKMCGACPIPAGSGKTNNRHRLYRGGNRQANAALYRVVIVRMRWHQPTIDYVARRTAEGLSKPEIIRCLKRYLARELFRLLPTPDAVTNPAARELEIAA

SEQ ID NO: 324491 - protein, 357 aa, unidentified
MFEGSWVGLDVHARSVVAGVLDVGSGELRTLGVPSGSAETVAWLRGLPGPVRVVYEAGPTGYGLARACAEAGIVCTVAAPSKIGRAPGDKVKTDRRDAERLARLLRLGELVAVRVPEPYEEAARDLVRAREDVRGDLMRARHRLSKLLLRHELVYDATAWTVAHDGWLRRQRFESRPLALAFDECYSAVLQAKTRRDALDVAIAELAAEPPFAEVVGRLCCLRGVSTLTALGLTVELGDWTRFRPQSLGPFLGLIPSEHSSGERRRQGAITKTGNTHARRLLVEAAWQQRRDLRTSTALERRRQGQPAAVRAQADRSARRLHARWQTLEQRGKRRTTVAVAVARELAGHCWALATME

SEQ ID NO: 324492 - protein, 344 aa, unidentified
MYPFYLGIDLHLKRTYVVLMDDMGQIVDERRLPNDEMQEYLITTVPRNTYAVLEATRNWPFMYDLLSEHVDRVELAHPKELHLIAKAVIKDDPIDSKALANLARLNYLPIAYAAPREIRDLRTYIRHREWLIVQRTRAKNRVHAMLAYYNLVSPVTDLFGSKGREYLDKVMPILRPAARRVVMDSLDMISHLNQNIDNLEDEMELTPEQKKQIKLLITIPGLGKTIATVILAEIGDIRRFDNPKALCNWAGLTPRVRKSDLSVKHGRISKQGSAYLRVSMTRAAAVASRINSHWHLVHEGLVPRCGKKGAKVAVARRLLTVIYFMLKRDQPYQEDYSQCHAADR

SEQ ID NO: 324493 - protein, 377 aa, unidentified
MKKATQFVGLDVHSESIAVAVADSDGSVRSLGQIPATEDAVRRLIKKLGPARDLRVCYEAGPCGYALYWQLAAMGVACDVIAPTLVPVRSGDRVKTDRRDAVKLARAHRSGDLTAVWVPDKQTEALRDIVRAREAAKKDQLRCRHRLSKFLLRQGRRSPETKKWTGKFMDWAKAQRFESGAQQAVLADYVGEVERVAERIARLEQAIDDAVEQMPSTPKAVIAALQALRGVAKTTAATIVAEAGLLSRFARPKQLMGYSGVVPREYSSGNRIQRGGITKTGNAHLRRVLVEAAWAYQHRPSISLKLRQRHQGLSEEIKAIAWKAQHRLHRRYCRLLAKGKPRPHVVTAVGRELLGFIWAVGTEAERQAKPAAVRAAA

SEQ ID NO: 324494 - protein, 314 aa, unidentified
MQDVFIGVDVAQDKLDIAGSPGSEHLSLANQKRAIDQWLKQLCPGAAIAMESTGSYHQLLATRARQAGMHVFVLNPKQVRHYAKSEGRRGKTDRMDAQVIRNFLRHHIERLHPWCPGTALQAAIEKLHRRRQTLERHFTAIRLSMHDLGALQSELDTLMQGFQALTQAIDVRIQLLIAQDEQMARKDALLRTIPGVGPQGAAAWGSVFARIPFARADAVVAYVGADPRPRDSGKRRGKRRLSKQGPSHLRKQVWLSGFSASHSKLFKPLYEALRARGLASTEAFMILGRRILRIAWAVWSTNRPFDPRLLTRQT

SEQ ID NO: 324495 - protein, 336 aa, unidentified
MQVKFIHFAGIDVSKKWIDVCVLINADKSMLHEQRFEQTKQGFAELRKWLIKLAANQVQQLFICIENTGLYDDALLYFLADKGFTVCLENAAKIKVSIRDRRAKNDQLDARNIALYALRHSDELEAWQKPRPVIDQLKQLLAARTSLLGHLTSIKQTQKEIETFNWCKQKKTKNYQAGIKGLQKDIEQIEADIWELIKSDEALYKMFLLLISIPAIGKITAWYFICYTNEFKRVKSGKNLSSYCGVVPFQEKSGTSRSSPARVSKEANRTLKKLLHLCALTALKMKGEFALYYQRKIAEGKHVLKVINAIRNKLALRIAAVIRNQEPYNENYVYHP

SEQ ID NO: 324496 - protein, 328 aa, unidentified
MDKGIWIGIDLGKAAFYAARASAEDRPADWRALPAREFANDVDGVEAFVAWAREAAAQEPLDGICVESTGRLAFILVEALAGRVAPVSIINPRLSKNYRQALGMREKTDRVDACVLAFYGAQMRPKPTQIQGESQRELRELNRHFSRCSTLLVATRQQLLDTPSKPIRASLKRTEEHFEFELQSIQKQMEEIIAADAALSADAERIITIKGVGKRTVHVLLAELGDLRAYTRSELIGYAGLFPKRYESGTSVHRHPHMAKEGGGRIRKALYLCAMSARTHNPQMRAIFERLVKEGKPPMLALGALMRKLLLLARTLLVQQIDYDPAFA

SEQ ID NO: 324497 - protein, 339 aa, unidentified
MELYAGLDLHSRNTYIGIMDKTFNRVFKKRVPNHLELIVQTLDPFRDQMKGFVVESTYNWYWLVDGLMDAGYSYAHLANPSAIKQYEGLKHSDDQHDAFFLAQLLILGILPQGYIYPKKDRPVRDLARKRMFLVQHKTAHILSLQSLLQRCCAMKVRANDMRHLTVEELEMWLEEEHLVLSAQANLDSINFLKQKIKQLEKAIIQKVKLNKAFKYLLTVPGIGNILAMTIMLEVGDIKRFSKVGNFTSYCRCVPSRRLSDGKSKGQGNRKNGNRYLSWAFTEAAQLGRRHNERFRKYYNRKVAQANTSLATKALGNKLARICYYIMRDQVPFREKLFCQ

SEQ ID NO: 324498 - protein, 533 aa, unidentified
MTRGDRRRNARRERLRAMLPRDGVVIGIDLAEDKQALVAVDHDVRVLARKTVRVKAFRLGEALDWAAGQARAKGFTQVTVACEPTGPRWLQVQRLCAERGLPLVCIQPLVSHIAREQQDYTPHKTDEADCVLIARLATELHCYIPEELDETWAHLRHLGRRRAQLITTATASVQRIRDFLSVAWPTVTETCAQPLESKTWLAAMQAVTNRCGGQPGRLAAMGLEAFTALVRGAVAGWGGQKAWGTISQRIFAALTDTEGVVVSSRRGLLRRCADELGDLQRTRAQLRAVEADMVAVLSELGLSRLADIPALTAVGAAAILAETGDPRRYDSSSSLVKHAGLSPSDNASGAFNGEAHISRRGRPGLRLTVWRAVWPMLRFNPVLAAKYAAMTKAADGAAEAAAIQADTGSRQATAAAAAARARRAKARVACAASLLRWSSTAPAGTPMSPRVPPPARRRPPDQRVHRRPPCHGRPRPSSPMRGRTSPYGRRGPTPLTTLGSSPPVARSFSPTRLNAVGAGLPASRRHAEPACTT

SEQ ID NO: 324499 - protein, 317 aa, unidentified
MIIAGIDTGKGKLHVCLLPTGERFSVNNDEGGIATLVAHCRAAGVVRAGIEATSIYHRAAAQALREAGIETAELQPRQAHGLAVALLKRAKNDTIDAFVIAKLVELLNGPWKQPPAAQLEALAEALTFIDMLDERLVVLKTQRERFTAKRFLAGLDKAIKALEKQRRGELRRLIACLRKDQMLGERLDLLLSIPGLGERTAASLLIRMPELGSLTREQAATMLGVAPFDDKSAERDGQRHIAGGRARLRKTMFMAAFAAAHHWNADLKAFYARLRASGKAHTAAVIACERKLIILANAVLMRGTPWQDRRGMPCLAN

SEQ ID NO: 324500 - protein, 359 aa, unidentified
MESQSQLEKSFFENKELFVGMDVHKAKWVVTVRTYDLELKTFIMQPQAEMLEKFLLSTYPQAKYKIVYECCFSGFWIYDYFFEKGYSIIVTPTNRIYKDGNTIKTDKIDSRKLAFQLSRGLLREVMVPAKKIREYKYIFRIYDKQKMRKGQILRQVKAILEQKNHPLKWEKWNKGLVEKLKLLTFEDKLFDLKFGNLLKEYEYVVSQIKDSEEIIGKIKEDEILGQRITRMENINGIGIISSVRMSVYLFDRKDRFDSSEKLNHYLGLTPSERSSGEKVSRGRSGMCGNRQLRSIIIQLAWKTVRKDGALLDKFDRVYKKSGSKQKAIVAVARKLMTKLFAIIQKEEEYRINTKTVQAA

SEQ ID NO: 324501 - protein, 354 aa, unidentified
MSSVEQPQTSAFNPIGVRLVGMKRQLDLHGNVVASFCPTTEERAHRFATGRTPGGQLPYGYDRARSAQESEWVARHLESLGHEVVVADPNFAPMYATRRRGVKTDRRDARTLAEACRLGAYRPAHRASDGQRHVRAELAVRDALIRTRTRYIALTKALVRRDGLRLPSGAPAHTDAKLAALPLPPALVAELAPLRALWEPVNTQIAAADARLAHVAAADPVVVQLMTAPGIGPVTAVAFVATLDDVTRFASAHQVEAYLGLTPREYSSGEQQRRGRISKTGNARMRALLVEAAWRVLRTTTPAAAALRAWAEGIAQRRGRSIAAVALARRLAGILYAMWRDGKDYRAPPSAAVA

SEQ ID NO: 324502 - protein, 420 aa, unidentified
MKPLSDDEFTAFIGIDWADRKHDICLQGAHGERREFARIEHKVDAIDQWAISMRQRFGGPIAVALELTKGPLVYALQKYDFFVLFPINPATLAKYREAFKPSRAKDDPTDAEHALELLMHHRDRLTALKPQSVPMRTLLHLVEQRRRVVDDKTRFTNRLGYALKQYFPQALDWFDHTDTIVFCDFLTRWPTLLQVKRARATSVRAFFWSHNVRHVNVIDERVQAIKVARPLTQDVAVITAYRLQALVLVDQLRVTLQAIDRFDAQIAEIAPNLPDYALFKSLPGAGPQLTPRLLVAFGEQRERFATAAEMQKYSGVAPVTERSGNKCWIHWRWQCPTFLRQTFVEWAAQTINKSFWAGAFYRQQRDKGSSHQAAVRALAFKWLRILYRCWQTRTPYDESTYLNALKTRGSPLLNQLGTQT

SEQ ID NO: 324503 - protein, 405 aa, unidentified
MGKVFVGHDWAETHHDVYVEDGAGQRLGKARLDEGVSGVARFHELVSSFVDDPGEVTVATETDRGLFVGALVAAGYRVLAVNPMSAARYRERHSTSGAKSDPGDAFVLAELARTDGHHHRPVAADSELAEAVKVLARAHQSMIWTRQRQVNQLRSTLREFYPAALSAFDDLASSDALAVLALASTPSLGRGLSRSKIASALRRGGRQRRIDERAAEIQTILRADTLQAPGPVAEAMGASVRALVAVISEQVAQTARLEAELADHFELHPDAKIIRSLPGLGTILGARALGEFGDDPNRYTDAKSRKNYAGTSPITRASGKHHVVLARHARNRRLADVCYQWAFAALTASAGARAFYDQHRAAGDTHHQALRALANRLVGILHGCLRHRTPYDEHTAWGHRTAAAA

SEQ ID NO: 324504 - protein, 355 aa, unidentified
MLKVAQKFDFTGKTIYVGLDVHLLQWNVSIYLENNTFFKAFQQAANPGQLVRYLEDNFPGAQYHCAYEAGFCGFWIQRELTKKGLQCIIVNAADIPTTDKDQKHKTNKRDSKRIALSLQAGQLDPIYIPSVQLESDRRLVRFRKRTQNDLTKARNRIKSELHLMGLDIPERYKGWSKSFLTWLKGIEVPYSSLRYTLDQTLVRVEQLRAQLLELNRELRKLIREDRYVETGELLMKVTGLGLITSITLLTEIGEIERFPFFDQFNNYIGFCPTEQSTGEEEHKGKITPRSNRVLRGYFVEAAWMAIRNDPAMAACYSKLIQRMTGKRAITRIARKLLNRVYWVWKTKRVYTNGIN

SEQ ID NO: 324505 - protein, 346 aa, unidentified
MTIVGGLDVHRQQITFDYVDNDGVVHWGQIRPATRKTLRRWLGEHCPNGDGEFALEGCTGWRYVSEELAAAGTVAHLGDPAETAALRGPKKRAKTDRADARLLRTLLLEGRFPESWIPPAHVVEMRTLGRLYCALMDERRAWQQRIHAQVFHQGCPPIRALLSESGRGALTTAELSMAGRQYVDTALRRIDELTDEIDPLRTQLVSFARRQPGCRALQARHYGVGWLCAAIIWAEIGDARRFRSSDQVVRFAGLDVTVYSSAGKRSPGHLSRQGSPELRWAAFEAAKCAARPGSPDYAYYHRVAAGPGGKTPALAVERKLLRRCYHTLRDLGDAALAAPAPDHKAA

SEQ ID NO: 324506 - protein, 353 aa, unidentified
MRRPKDKLIAGMDLHGNNVVIGVINQDGKRVAHRKVDCDLKQVIEFLRPLKAQLQSAAVESTFNWYWLVDGLRDAGYGIDLANPAKIEQYSGMKHADDQHDAFFLAELQRLNILPKAHVYDPQLRPVRDLLRRRTNLVRQRTALLLSFKSLYARTHGESLDLNEVKKMEPAEAAKLYEHPANQLIAEVQAEHMQALEKSIRRIENGVLASAREIPLYEKLLTIPGIGRILGMTITMEVGEVKRFKTDGDFASYCRMVDAKRLSNGKCKADNNQKCGNEYLAWAFVEAANYARRYDEHCRRWYDRKAAKTSNVIATKALGCKLAKAAWHVMVGKCDYDQKRMFPELAAKPMKTS

SEQ ID NO: 324507 - protein, 397 aa, unidentified
MDYDVVIGLDVGKAAHHACALDRGGKRLLDREITNTESSLRAIFTSMAAKGRVLVVVDQLHSIGALPVAVAQAMGVAVAYLPGLSMRRLADLHPGNAKTDARDAYVIAHAALTMPHTLRTLDVPSEAQADLAMLLGYDDDLAAQVTAAINRLRGLLVQIHPSLEKALGDNVAHAGVLHLLIKAGGPDGLRTMGKARIDTALRKYAPRIHERLATEIWDGLAAQTVIVPGTSAAAKVLPGLAAQILQLRDQRKEIAKDVEKVLDAHPLAEILTSMPGVGVKIAARLLAEIGGDVTAFPTAAHLAAYAGLTPVTKRSGTSIRGEHPNRGGNKRLKNAMFMAAFTSLRADPASRTYYDRKRAQGKKHNAALICLARRKTDVLFAMIRDHQPYTPSQPAAA

SEQ ID NO: 324508 - protein, 406 aa, unidentified
MKHSPPKQSTKPSSPALGPTLGPKGRAVGLDIHPDSFAAAVLEGRDPLAARIAQSVTQQPLEALGAWATRHTSVQDVLIIEASANTFTIAERLKALGRQVVVLESHRAGQIGKSYLANDKVDAAKIARIYLSGLAIKVWQPDSETRQRRELLSTYQRCVKDSTRAQQHLRSFLNEHALRLPKGFRLCRPEAGARLVSLKEWSPRQKLLLQEMHGALLAARERRQRLRRMMALELEEQPDFLRLYKLAGLNLVTTYALIAIIGDIQRFSHSRKLVSYLGLNPSVVESGLSDHGGALHGHGRGSLRALLIQASKRLLTTQNPLQKWGLSVALRRGQNKAAVAVARKLTVAVWHVLQGHWNQLLEETTTLLTKLTKLATELGIRTLQELGYASKLAFQEQKLEVLRTHP

SEQ ID NO: 324509 - protein, 374 aa, unidentified
MLMQGSNLESVGSNLKEVSLPKLTIDSTVIGIDLHKYSHTAVALNCLGEELSRLVFSNDELDECVEWLSGLGSKESLLVGLEDTNGHGLHTANRLEKEGFSLIYVPPVLTERARKHSVHKDKSDLLDAKRVGKVILHRSEETLPATPSIAQEKQIIREIDLLLQERSDLIKEQTRLKNQLHSLLHQCFGNNYRKGFKDIFSLKALAFYSASLKQQSEPSPLARSIVRRIERLKLVFGQVKEIDSALRKESRDVPSIGKLQSNLRGCGHLTACKAIAEIVQIGRFKTCHKLAKYSGAAPVIKGSGKSRRLHTNRHGNRKLNQAIHTIALSQIGIASLPEAQIYYQKKLSEGKSKLWALRCLKRQITNRIFNILTD

SEQ ID NO: 324510 - protein, 355 aa, unidentified
MSIVGGVDIHRKQLTFDYVEQETGQWERGRIAPADRQHLAGWLTRFEGVEDVQFAMEGCTGWRYVAEEMRAAGVVPHLAEPAETSTLRGRKRRAKTDRADSKLLRELLAAGRLPACYIPPSAVLEWRAMLELYHDLRMQHTGWAQRIHATCFHHGATALGEAGVIRGDRQHLAQIVEEQLSPVGRLQVNTALAVLEALDEHVDRLRKRLLATARHVHGARVLMHEIYGVGAMTSLALCAWLGGADRFSSSRRAVRFVGLDITVHSSDNKRSPGRLSRQGPEVLRWLLFEAAKTSARSAAPGYGYYAAVRERIDANRACLSQARRIVRHSVHLLAELGDEAFTIVAQPAAPSIIAR

SEQ ID NO: 324511 - protein, 377 aa, unidentified
MEKDSRFVGLDVHAETIAVAVAEPGGEVHALGAIPNTPEAVRRLVKKLGPPETLRVCYEAGPTGYVLYRQLTALGVPCAVIAPTLVPVKAGDRVKTDRRDAEKLARSYRSGDLTPVWVPDPGHEALRDLVRAREAAKKDQLRARHRLGKFLLRQGRRAPTGSKAWGVKHRAWLQTIRFAHAAQDATLLDYLTEIDHAADRIARLERAIATAADLAPAPVRAVIAGLQALRGIAKLSAVSVVTEVGALSRFAKPRQLMGYSGAVASEHSSGPHRRRGGITKTGNAHLRRIVIEAAWAYRHRPAIGGTLRTRQEGLSEEVKALAWKAQHRLHGRYARLLAKGKAPTQVVTAIARELLGFIWAIGVHIEQHTAGGAPAAA

SEQ ID NO: 324512 - protein, 345 aa, unidentified
MIIGCDFHPSWQQVSWLDTETGETGEQKLVHASGDAKSFYARLPRPVLIGMEATGNSQWFIEVVQDLGHEIWIGDAAQIRASYVRKQKTDKRDAAHILKLVVEGRFPRLWTPDREQRDLRQLVLHRHKLVEIRSRVKNELQHLALNRGMQRKAKLWSQAGQKLLRELPLKPWAACRREDLLGLLEMLHQQIGKLDEAVQQAAEEHPQAKLLMTQPGVGPNTALAFVLTMGDVSRFPRGKQVASYLGLIPREESSGGRQKLGAITKQGNQLVRSLLVEAAQIAVRFDPGLRKQYRHRCHQKPKGVAKVATARKLAVRLYWMLRTEKPYPEIVRIESSPRVALVGAS

SEQ ID NO: 324513 - protein, 467 aa, unidentified
MGLAPFTACRPRAAWLQNEVPARRISSRRGSKEARALADLLLGMPAAFYSHLLLIINWSVLMTAVMIGVDPHKGSHTAVVIGVAEQSLGKLRVDASAGQAGELMAWASEWPERTWAVEGAAGLGKLLAQQLVAAGERVLDVPPKLASRVRLLEAGDTNKNDPNDARSVAVAALRSRAVRQVAAEDHGAVLKIWARRHRDLARARNQVACRLHAVICDLIPGGVRKEISAGHAAKVLDKITPAGPVETARRDLAAQFLEDLRRLDSQLAETKKKLAAAVRASGTTVTEVFGVGPVNAGTIIGDAGDISRFPSRDHFAAYNGTAPVEVSSGNRKIYRLSLRGNRRMNHAIHMAAITQIRHAHSDGGAYYDRKIAAGKSHKDALRCLKRKISDAIYARLRADAAITSPPAGKGPGGQKGNDSDSSAAGSHPERRLFGQATPGPATTLRPQARTPRQQPRTRRLKDLEKTR

SEQ ID NO: 324514 - protein, 356 aa, unidentified
MKQVKTLSFAGQDIYCGIDVHKKAWSVCIRDDERELSSFSQPPQPAVLTEFLGRNYPHANFHAVYEAGFCGYWIQQALSHQGIDCIVTHAADVPTSDKDRRQKTDAVDCRKLAKELSEGSLKGIYIPSRQIIEDRSLVRGREQLVQDQTRYKNRILSWLHFFGIIIPEGYKKNTHFSRRFISWLEQLQLNESTKLALQVKLGGLQCIRQQLLLANRNLRKLALSDRYQKQVELLRSIPGIGITNAMIFLTELDNIARFETFDHLCSYAGLKPDIYSSSDTIIIKGITHRCNSLVRESLVESAWKAVAKDPALLMAYKQYKKRMNYNNAIIRITKKLLSRIRYVLLHQTCYVTGVVG

SEQ ID NO: 324515 - protein, 344 aa, unidentified
MKKLLKQVAGIDVAQQELVVSFGRMYDDLVPEIYANKTFANTDKGFESMAQWVNKMADPEAAVHYVMEATGVYHEKLAYYLAAKGHPLSIILPNKISNYLRTLEVKTITDKTASVGIARFGLERKLDTWQQPKPIFKRLRQLTRERDQLVQTRTTIKNHLHAEQAGADPNKSSLSRIKKQIALLDKQEREIIEEMRSLLKQDEQVKQSVKLICSLPGVGFLTAAIVLAETNGFELIRNKRQLTSYAGLDVKEKLSGTSVKGKPSLSKKGNKYLRKAMHFPALAAIRHDERFKAIFIRLVARQGVKMKAVAAIQRKLLEMIYTLYKNNTAYNKDYLSSNQPLATP

SEQ ID NO: 324516 - protein, 429 aa, unidentified
MTEDTTLTSQTWLVAIDIGKSFHAVLVEAADGRRQHFRMANSVEDYDRLVAFLRALLGTVRIALEPTGDFHRTLAHRLLREGFPVVSVSSVAGARYREAMFNSWDKNDPKDATVILHLLKQGIVQHYHDPLLAGDHDLQELAKTYHQIVLARKRLADSLLNHYLPLYFPEMGRYWESTRVEWFVDYLEKFPTPAAVCALPKEEFVKAAWSVIGRKVNKRAKLEELYELAHHSIALPVSIDSVAIETFRLQLGQLRRLAELRQALEVRAHALLKDRADFQHLCSLPGVAAVLAMVILAEGGDLRRFPHHRQFLKYCGLDLAKCQSGQFRGRETLSKRGNARLRMAFWMAAQRAVRMNENSFRDKYERYTKQDPGNPDVRRKALTAVAAKMARVAYAVVKRNQPYRGYHEHACPADRSLSCGPSGRVRPRR

SEQ ID NO: 324517 - protein, 367 aa, unidentified
MMGWMAPLRHLSAKLLSDRISSEWEPSMGEVTTIGLDLAKHVFQVHGVDAEGATVLRKQLRRAQVLAFFSRLPPCLVGLEACATAHYWARELRALGHEVRLMPAQYVKAYVKRNKHDAADAEAICEAVVRPTMRFVPVKTADQQAAVLLHRGRERLVRQRTGLVNALRGHLAEFGVIAPQGLRNVGKLIAIVRDEGDARLPDLARQVLQVLAAQIEQLEAAVAAIEKQLMAWHKSNPVSQRLASVPGIGPIIATAIAATVVEPSGFRSGREFAAWLGLVPRQNSTGGKHRLGGISKRGNQYLRRLLINGASANLLRSKATNADPWVIGLRQRRPSLVVAVALANKTARIAWAVMHRHENYQRVAAAA

SEQ ID NO: 324518 - protein, 369 aa, unidentified
MPHVTSIGLDVHARSVAAAAFNPFTGEVVHRDFGTDAAEIAEWALGFEDPRACYESGPTGFHMARELRAFGLDCAVAAVSRMQRPAADARRKNDRRDAEFIARMLATHNIVEVPLPDAAVEAARDLDRALEDTAADYLRARQRLNMFLIRLGYVWDERNADGTRKGSWTRAHWRWISEIRLEGPQRDVLEHYVTAVRCAESDRRQLEKKVLALARTDRWRPAVEALSCIKGIDALTAFRLAAEAGSFTRFRTAPAFASWCGLIPSERSSGETERRGGITKAGNRLARTALIESAWHYSRCTPRPKAPPPGADVPAAIRARAGDCTARLCRRREALAAAGKSACKANAAIARELACWVWEIGRRVEGTLG

SEQ ID NO: 324519 - protein, 339 aa, unidentified
MKYTPVGVDIAKHLIQVHFIDEHTGEVIDKQLRRQDFLMFFCNREPCLIGMEACRGSQHWGRELTKLGHKVRLLQAHFVKAFVMGNKNDVMDARAIWMAVQQPDKDIAVKTEEQQSVLVLHRSRRQLVKFRTMQINSLHGTLLEFGKTIHKGRAAMERELPEALERMKERLPPYLITVLENQYNRLNELDSLIEDIEKKLTSVARQNETSKRLLDIPGVGPLIATAAVATMREASAFKSGREFAAYVGLVPKQTGSGGKIRLLEISKRGNTYLRALFIHSARAAALLPKEPGPWITELKKRRPTSVAIVAMANKLARTVWAIAAHGSKYDKNHVSIRSY

SEQ ID NO: 324520 - protein, 353 aa, unidentified
MDRYIGLDVHSQTCTLAVLGPTGRKLRLQVLETTGPALIQAVRAIPGPKHICLEEGTQSAWIYELLEKEADELVVTMAERRGGSKDDARDALQLAEALRTRAIKRRVYKACGPYSELRAAVRSYGLLRDDLARTKNRLKALFRSRGMLTGDDVFHPEKHLRWEKKLPTPQQQSAALLYAQVELLTKLWAAAEERLLAASKPHSIIKVLSTAPAIGPIRAAQIVAIVVTPHRFRTSRQFWSSCGLAIVMRSSSDWVRGPHGDWLRSNVRQTRGLNRNRQPTLKSIFKGAALQLATQMTNHPLHADYQRLLDAGTKPNLARLTIARRTAALVLSMWKHEEVYDPAKHRSHIIAQA

SEQ ID NO: 324521 - protein, 449 aa, unidentified
MGRSIGLDVHRDFCEIAVADGGRARSAGRVATTRGRLKLFACSLLPDDRVVLEATGNALAIAGILQPHCREVIVAHTKQVRAISHARVKTDKIDARVLADLLAADLIPAVWVGDERIRALRRLVSRRRGLVKRRTQIKNEISAVLHRNLTPRAPVTDLFGVKGRQWLANQLLPVDERLTVDGCLRQLDFLGEELAKIDTLVAQEALQEADIRRLMTIPGVDVTTAATLVAVIGDVRRFPSAKHLAGYLGLAPRVRQSGIAAAHHGRISKEGSAAARHVLVEAAWITARSPGPLRAFAQRTAARRGRHIATVAVARKLAVLCWHLLARGEDYASQRPSLVRRKIRALELKAGAPRARPGPNSNPTWNRDHEGREQQIAEQAEAAYRRLVSDWQASRPRDGAGATPGRASQGPLRARPRGRLRAPEPALRLVSHPHQKGGSHFHTRSSTQI

SEQ ID NO: 324522 - protein, 451 aa, unidentified
MHENHNELFVGVDVCEARFDVAYLDCLGQAVRGDASFPNTPDGIRDIKGSIIACSSLVGKRPGISVGMEATSNFHKGLEQALHAARPRTIKVHVLNPFVLKQFKRMNLKVYKTDKLDAYMIARYLVKMSPKPPVECTLEQETLKQLTRLRRSLQEETTRFKNRLRYLLRIYFPGYKQYLGVKITRRMLVLFSQIASPDKVLEMPISEIAGLKVCHRHRVGDAFAGRLVLLAEKAPQKYLDPGICMVIKWTAARILELLAQTSQLDREISRMLDREFPAHPLRTIPGLGPVSCASILAEIGDINRFATPGEFVGYMGLYPVVWESGQTKVRFQMTIKGNKMLKMTFLVASAAARLYNPAIRQYYDRLRARGKSKKAAGGAIARKLACIVFAILKTGEPWSAQKALAGMEKGSLMAGETGQDIQKGNRQPTGVKPQTVVNATNSTLGLALSTR

SEQ ID NO: 324523 - protein, 406 aa, unidentified
MTAYRVHVGIDWATVAHRVVVVDAEQRVVGERTVRHEGGALEAFAVWLGELAGGEPSEVAVALETPRGAVVDVLLARGFHVWALNPKQLDRFRDRYTVAGAKDDRRDALALAAALVTDLAAFRRLAPEDPLIVELRELSRLEDDVQAEAHRLSNRLREQLHRYFPQLLQLVPAADEPWLWALLERAPTPSAAQHLPRATIQTILTRHRIRRVDADAVRALLRAPALPVAPGTVQAAQRHLAVLLPRLRLVHQQRAECATLIEGLLERLGESQGHRDVPILRSLPGVGRIVAATMLAEASQLLAERDYHALRTHTGVAPVTKQSAKHRQVQMRYACNRRLREAVYHWGRSVVCHDPHSRAHYEQLRARGHSYARALRGVVDRLLRVLVAMLKTQTVYDAHRRLPIAA

SEQ ID NO: 324524 - protein, 339 aa, unidentified
MNATTKAVFGVDVAKLVFQVHTVDQGTGEVISKQLKRAKFLEYFANRPSCLIGMEACGGSQHWARRLKEMGHEVKLMAGKQVKAFVSGNKNDVADARAIWLAVQHSSIRSVAIKTEAQQAVLAMHRMRQQLVKFRTMQSNGLRGLMGEYGEVMAVGRKALNEAMAGALARLADRLPAAVIETLREQWNMLAKLDEQVLQIERRLLAWMRQDPASKAIEAIPGVGLLTATAAVATMGDPKAFRSGREFAAWLGLVPAQVGTGGRVRLLGISKRGDTYLRTLLIHGARSVLLHSKEPGKWIEELGKRRPPNVVIVALANKMARTIWAMLAHERAYQRDYAK

SEQ ID NO: 324525 - protein, 411 aa, unidentified
METICNDPQVCRIVDLPVYYELETNNGNRDYRIQIGGHYMNYNTVYVGMDVHKESFTLCSCKYEDEKASHYQRTPASYKNVLRYLAFLRTIYGEDTRFVCGYEAGCLGYSLYHQLENFNVECVILAPTTMLEQRSKRRIKTDKRDAEIIARSLAQHNYSPVHIPTETDNQTKEFIRMRDDHKAELKKIKQQILSFCLRQGYQYDGSGNWTAKHVKWLRSLKPAGLYKEILDEYLLTYTILTDKLNRLDQRIEELASKEEYTESVSKLTCFLGIKTHTALSVIVEVGDFQRFVSARKFAGYLGLVPGQHSSGDDRNGLGITKAGNTHVRRLLVESAQSYTRGKIGYKSRVLRSRQAGNSPQVINYADRANERLRRRYYKMVLKDGKKYNIAKTAIARELACFIWGMMTDNIY

SEQ ID NO: 324526 - protein, 340 aa, unidentified
MSEITTIGLDLAKHVFQVHGIDAQGTTVVRKRLRRGQVLAFFSRIPRCVVGLEACATAHYWARELRALGHEVRLMPAQYVKAYIKRNKHDAADAEAICEAVGRPTMRFVPVKTAEQQATQLLHRGREQLVRQRTMLVNALRAHLAEFGLVAAQGLRNVGELIAIVRDDGDKRLPAVARQVLQVLAKQIEQIEAAIAALETQLLAWHKANAVSQRLASIPGIGPIIATAIATTVADPNVFRSGREFAAWLGLVPRQNSTGGKIRLGGITKRGNRYLRRLLINGASANLLRSRATKADPWVIGLGRRRPPLVVAVALANKTARIAWAVMLRQNEYQPRAVAA

SEQ ID NO: 324527 - protein, 341 aa, unidentified
METQRHIGIDLHRNQFTCCVRLANGRNYLTEWRLEDLPRFVKKLRASDEIAVEVTGNTRLFRDAVAPHVARVVAVDPNQFKVISHSVKKTDPNDARNLALYLEKDLLPEVRMKDKTQAQLASLTQTRDTLVKLRTSLKNKINNILSAHGINLEREALSSEKKLNEVLAMRFDPMVKIELEVLVEEIRSLNQRIAKLDKTIADEGSKLEGHKNLTSIKGIGPLSGSILLSVIGDIDDFADEGKLAAYFGIVPRIANSNETEHSGRITKRGNKLGRTTLVQCALIAQRYSPYLKRYYEKIKARRGTGKAIIALARKLLGIIYRTLKNNWVFEDFPNFVLAEAA

SEQ ID NO: 324528 - protein, 343 aa, unidentified
MKLSRVGVDLAKNVYQLHGVDRHGKTVWKRRLRRGQWLQALLQKAEPGCVIGMEACTGAHHWARALQSRGYTVRLIAPQFVKPYVKSNKNDANDAEAICEAMSRPTMRFVTVKSVEQQDIQATHRVRTELREQRTAKANQIRGLVAEYGLVAPQTLLALRRAIPCWLEDADNGLTDYFRSLLHGLWGDLVALDDRMTELDKQIKKLADSNEVTRRLQQLRGVGPLVATALVATVGTGEQFKKGKQMAAALGLTPRQCSSGDKQRLLGISKRGDVYLRTMLIHGARAVVSQAKHRDDRLSQWVTSIARRKHPNVAAVALANKTARMAWAMLRNDANYDPDFAFS

SEQ ID NO: 324529 - protein, 339 aa, unidentified
MDTIRFLAIDLAKNVFQVHGLDAAGKLVLRRRVGRAQLIELVLRLAPCTIGMEACSSAHHWARQFLQQGHTVKLISPQFVKPFVKGNKTDGNDAEAICEALQRPSMRFVPIKSVEQQDVQSLHRARSRLVSNRTGLVSQMRGILAERGIVLAQSITRARREIPVIVADTSNALTPLAREMLADLMDQLRELDRRIAGFDRRIDLVFKASETCQRIAQIEGVGPKTATAIVAAVSDPKDFRNGRHFAAWLGLVPRQSSSGDRTHLLGISKRGDRHLRTLLIHGARAVLRTAPTKHDKKHAWALALKARRGANRAIVAIANKMARVIWSMLATGQSYQKAG

SEQ ID NO: 324530 - protein, 277 aa, unidentified
MKQNIVGIDIAKDTLEVCLMANEKIGNQQFPNSTEGHHRLGAWLKKQKTKPLHICLEATGQYGNVVAEFLYEQNYTVSVVNPARIKAFGQSKLRRNKTDKADAQLIADFCASQKPTSWTPPPASFKELQALIRHLEDLQTSRQQDLLASIPGIGKLTAAKLLGEIREITEFDSARQLAAYPGLTPKNFSSGSSVHKKSRLSKTGNAHLRKILYMPAISAKRWNPIVSTFCKRLATSGLTPLQQIGAAMRKLLHLILGILKSDRPFNPDYLVNVQAFS

SEQ ID NO: 324531 - protein, 341 aa, unidentified
MEEVSIVGLDIAKNSFHAHGAAEDGSKVFSRALPRGRVLELFGQIERCTVAMEACAGAHHWSRELSKLGHDVRLIAPQYVKPYVKRQKNDANDAEAIAEAASRPTMRFVTPKTIAQQGQAMVLKSCDLLTAQRTQTINALRGHLAEYGIVAPKGPQHLPLLERAVAENAERLPVDVTVLSQMYFDLIDGLTKHIDALTRQLRQIARQNDVARRLMTMPGIGPVTAVSIAVLAAPPEMFRKGRDFAAWIGLAPRQHSTGGKTRLGKISKMGQRDLRRLLIIGAMSAIQAAQKRGGAPGGSWLARMLACKPKMLVAVALANKMARMAWAIMAHGGVYETPANA

SEQ ID NO: 324532 - protein, 333 aa, unidentified
MVEGTEGSHHKEGTTKMSKHSMVCAGIDTGKHKLDVALDGHPEQMQVDNTPDGHRVLSTWLRKHRAQRIGIEASGGYEQAVVATLRRNGFVVIVFQPAQVRAYAKFHLQRAKNDKIDAALIALCSAATKTVHAPPDPRLVPFAASLTMIEQITEDIARLKTRRESCRDQRLRRFWNEEIGRLKSLMRGELKQLIAAIRQHPDFAEQLDLIASVEGIGHRTAVALLVRMPEIGSLTREEAAALAGLAPYDDDSGKRLGERHIAGGRERLRTSLYAASLPAAFNWNPQIIALYRRLTAAGKSHKAALVACARKLLIFANTVVARGTPWVSKTATS

SEQ ID NO: 324533 - protein, 357 aa, unidentified
MVQKHTILDWLGQHVFVGLDIHKRSWVVAIVTEQADFKTFTQPPDVKLLVSYLDRHFPGATYHCVYEAGYCGYWICDELRAHGIECMVINPADVPTMDKERKHKTNKVDARKLARSLRNGEISPIYVPSRAALEDRTLVRSRQMFVSKQTRCKNQIKALLSFYGITVPEDIADRHWSARYVAWLESLTLHSPSGTYALKILLDELAHLRKSILDTTRAIRLLAGTEAYAVNVVNLITIAGISTVVAMILLTEIITLERFHSLDHLACFVGLVPGESSSGDERTMTGMTERKNRYLRWVLTESAWVAIRNDESLALAFNTLSRRMPKNQAIVRIARKLLNRVRFVLKHQQPCTVFKAA

SEQ ID NO: 324534 - protein, 366 aa, unidentified
MSDITHIGLDVHKDSIAVALLRPGSTEVDERVIPNTPEALRRLLRRHEDPSALRTCYEAGPTGYDTHRLITSLGIECDVIAPSMIPRRSGARVKTDRIDARNLARLHRAGELTPVRVPTSAEEAARDLIRVREEVKSDRRIARQRIRSLLMRYGKRYPGSSDKWSVRFEVWMRALRFDEPLAQEAYQQLVGAYFVRDAQLAEMGRRIEELATEEPFAEGVALLGALRGIGTLSAMTILAETCDFYRFPDAKSYMGFTGLTPSEHSSGASRHQGSITKTGNRHIRRVLVESAWAYRHAPAVRGKLKKRLEGQSPDVVAYSWAAQCRLHGTYRRLSAKKGAHTAVVATARELSGFIWGLMTDNMGPQR

SEQ ID NO: 324535 - protein, 402 aa, unidentified
MERIYDKCCGIDVHKKLIVACLRSGNQKKGEIREFGATTRELLELADWLKESGCEMVAMESTASYWKPLYNILESSELNAIVVNAQHMKAVPGRKTDQNDAEWIADLLQHGLLRPSFIPDKDQRELRELVRYRKSLIGERTRELNRLQKMLEGANIKLSGTVSQINGKSARNILEYLISGQTIDSDKYDEMYANRTIAHNLKATKEQIIDDLNGVMSPLQRKMMHILLLHLDELNAHIEELDHDIDVFMKPEEKTAAKIIQDIPGIGNTSAQAIIAVIGADMSRFPDAAHLASWAGLCPGSNESAGKRKSGKTRKGNALLRSTMIVCAQTAVKNKKSYFHAQFMRISPHRGKKRAYVAVAHSMLIAIFNVLRYGVEFKDLGAEYYNQFNKERKINAYLKKLK

SEQ ID NO: 324536 - protein, 404 aa, unidentified
MTNQQNNVGGVDSHSDTIHVAVITGIGQTVADREFPTTVAGYRRAVAWLIERGPLDSVGVEGTSSYGVGITTELLTAGIQVIEVNRTRPADKRKQGKSDPLDAYRAARSVLSGEATTSPKNPSIEPLRALNIARRSAVKAQQAAWRQINTLLVNTRPELRDRYRGLPEAKLLTTLHDSRPDQLHNSDDADTMHALRTLARRHRALADEISQLDERILRRARRANPALMAIKGVGPAIGAQLLLTAGENPDRLRSSASFAALCGTEPPPSPSPQDAPTGIASAEEATGKPTPPCTTWSRSGCPTTRPPSPTATRASPKDGPARKSSEPSNEPSHVKSSAPSLGTPKHPTTPTSDQPDEPRTSRSPRQPNTSAYGPHESENSNSADAPTPNSQCATENGSTPLDTE

SEQ ID NO: 324537 - protein, 304 aa, unidentified
MFGIGIDVSKATLDVVVHGEQFRQFSNDKRGFVRLIRWLKTWPIKQVVLEASGGYERAALDVLHAAGLPMVRINPARARRFAQGTGRAAKTDRLDATVLAQMAHLLPLTRYVPPAPWQQRLAEFAQCRRHLVQMRVSEMQRLRRLVDPDLIAMKQRHIAQLSDDLKQLDKAIAEQLEGQPGWKNIGTLKGVGPILISTLACELPELGSLGSKAIASLVGLAPMNRESGTWQGQRRISGGRAVVREALYMAALTAIRYEPGLRAFYAGLKAKGKSSKVALVAVMRKMLVILNARKRDAEVALGCP

SEQ ID NO: 324538 - protein, 355 aa, unidentified
MDRTKYIGMDVHQASISIAVRDASGKLVIESLIETKAATILEFLQGLKGTLWVTFEEGTSAVWLYDLLKPHVFKVIVCDPRKNALLKTGNKNDRVDARKLSHLLHAGLLTPVYHGGSGVRTLRELARSYLTLTKDLTRVMNRLKALYRSWAIPCAGEKVYSPRHRSAWLEQLSEAGVHRRAEQLYQQLDILLQIRREARRELLRESRKHPAHELLRQIPQLGPIRVALLIALVQTPHRFRTKRQLWAYCGLALQTRSSGEYRFTAGQLQHSNRLPALRGLNTNHNHDLKNVFKSAATHVSTSPDALGDFYRSLLAKGMKPAMARLTLARKMAAIVLTIWKKGERFDPGELKRQAA

SEQ ID NO: 324539 - protein, 345 aa, unidentified
MQSMYYIGLDVHKKTISYCVKDGSGIVHAEGTISATRGDLDRWMKMLPQPWTAAMEATIFTGWIYDHLKPHAAALKVAHPLMLRAIAAAKKKNDRIDANKIADCLRCDFLPECYMASTEIRERRRTLRYRNLLVHQAVQLKNKISGLLMEAGVSYNKQKLHKVGYFKELLATNPDINEGLRPLLRLCRETLVRLQKTESALVRSLQRDSLLAERVRRLMTIPAVGPITALTWVLEVGDVKRFSSIKKAISYCGLCGAEKRSADTVKRTPISKQRNKHLQSVLVEAAKMAPRLSPELALIYDREKQKGNANRASLAVARKLVAYLVAIDRSQRDFLVVEKENCAAA

SEQ ID NO: 324540 - protein, 377 aa, unidentified
MKRIKFVGLDVHAETISIAVAEQGGEIRSLGVISNREESIRKLVKKLGPVEELRFCYEAGPTGYALYWQLTRMGAKCEVVAPTLVPVKAGDRVKTDRRDALKLARNYRAGELTAVWVPDAAHEALRDLVRAREAAKQDELRARHRLSKFLLRHGRRPPMGVKAWSMKYLEWVKREVHFEQMAQEATLLDYLHEVEHGAARIARLESAITEAVKSAPPQMRAVIEALQALRGIAHVSAVTVVAELGELSRFTRARQLMAYGGIVPSEDSSGERSRRGNITKTGNAHLRRVVVEAAWAYRHRPSVGAKLRKRQAHVSEEVKEISWKAQHRLHERYRKLLGKGKNKGVVMTAVGRELLGFISAIGIQAETAYKEPLPRAA

SEQ ID NO: 324541 - protein, 365 aa, unidentified
MFVERTTVGLDVHSRSVVAEAVDWSTGQAFSERLVPTNEVVLDWVARLPGPVAVTYEAGPTGFGLARAFAAAGVRCEVVAPSKLERPPGDRVKTDRRDARRLARLLHIGEVTGIRVPTVAEEDARDLVRAREAARADLMRARHRLSKLLLRHGIVYYGGNAWTREHDRWLRRQQLDLPVELRGTRTAFQESYDAVLAVTARRDRLDEQIAHTAASPLWQPIVSRLGAIRGIADLTGLGLAVEIGDWDRFTGASIGAYIGLVPSESSSGATRSQGSITKTGNSHARRLLVEAAWHHGRPLRSPGKVLAARRSRLSPAVRARGEAADRRLRHRWVTMSARNKRQPIVAVAVARELAGWCWSLATMDG

SEQ ID NO: 324542 - protein, 351 aa, unidentified
MKWIAFDSHKKYTLASVESEDGRQRHEVRINHAPGVIQEFLSRYPKGSPVAVETIGNWYWIVDEIESAGMHPQLVHARKAKLMMGHTNKTDRLDAQGLNRLQRTGTLPTVWIPPMDLRDLRELLRTRMDLVVQRTQLKNRIHAALARYCLSLEEASDAFTIEGRKELAQLFEKLPPQTRFANTLLLEEVDAVQNQIKRLEERMEEVLEDTPQVQLLRTLPGVGRILSAVIALEIGDVKRFPSAGHLASYAGTTPRVSSSGGKTHFGKLRADANRFLKWAYIEAANVVARFHKQRPEAHLSRIYAKLRKDKGHAKAIGAVARQLAEATYWMLSKNEAYKEPARTGTGSSTEA

SEQ ID NO: 324543 - protein, 436 aa, unidentified
MKDDIVAVGIDCASLKHQYHIKTEGKSTLKGQIRNNLADGNKLVKLIKQYAENKKIVVGLEATSTYHLALKYFLEKNDLKVITINPMKTSAYNKVDNYGNKTDPIDASGICNFMLDGKYKNCKQMNNKYMKLREMCRALILLQADATKLRTRMHTRLAIINPEYNQYFSSDNFCVSNLWLLEEYLLPSKISLLNQEYLQKHLTKISNGFGKKKTAEKIINLAKTSFGVEDNIEGYDYYFRIFLDLYKFYSKKIKELKKEIEEESQNDYCKVEIDNIASIRGISRVLASGILSELGDIDNFEKKSSIVRFAGLIVLQKQSGNFRGREKMSKQGSSYLRCYLYQAAMGTRLHSITFAAVFNNRMNKLQGLNGEDCRIGKKKVMANLARRILETVYVCLKKNRIFDDKKAFQSIEIDSFIRDMISSSFAHKLAIDSKEE

SEQ ID NO: 324544 - protein, 410 aa, unidentified
MEIVYARVAGIDVGKREVAVAVRVPGQSPGQRGQQVRKFKTFYPVLQQMVRWLVEQGVTHVAMESTGVYWKPVFHALCESDSLEIVLVNARHVKNVPGRKSDVIDCAWLGQLLECGLLRGSFIPPPQIAAIRELTRYRKKLIESRTRELQRLSKVLEDGGIKIDSVASSITTLSARDMIEALIGGERDPRVLADLARGVMRKKIPDLTMACSGRFGDHHGLLARMHLEHIDHLTSMIDELDTRMERVLAPFAQQMSLLRTIPGIGERAAQVIISEIGVAMSRFPTAAHLASWAGLCPGNNESAGKHKSGRTRKGNQEIACARWRSTCWTRQKGQACRSVPARWCCNPVREGSPRSSVARTRFEATAAETGAYVALEVPQAGAPPPRHVHDAAEEASMASSTTAMGIPSSA

SEQ ID NO: 324545 - protein, 349 aa, unidentified
MIIIGVDFHPEFQQIASVDTESGELQEQRLQHREEAESFYRELAARGVRVRVGMEASGHARWFERLLGELPIELWIGDAAEIQRKRVRKQKTDRQDAQLILKLMLKDDFPRIWVPSWENRDLRQLLWHRHRMVQARTRIMNQLQAVALNEGLRCKKRLWRRERQRLESFPLAPWASRRRHELLELLDRLNPTIAELSQAVEQEVEKCPEAQRLATHPGVGPLTALAFVLIIGKAERFSCGKQVASYLGLVPLEDSSGNRRRLGHITKQGSSMLRFLLVEAAQVTVRSLPEWRSKYFHLMMRRGRKIAKIAMARRLAVCLYWMLRQGSDYQQWNKFGSHAGQPGNRHGVQ

SEQ ID NO: 324546 - protein, 354 aa, unidentified
MKRTTKYVAFDVHQATTVASVREESGRVIARSVLPTDSGALTEFVRGMRGTRHVTFEEGTQAQWLYELLAPLVDRVVVCDRRGAPRQGNKGDQVDADQLSELLRRGALRAVYHGSADRATLKELTRTYRNLVEDATRVMLRLKALFRARGIPTAGTAVYHPRYRARWLARLLEAGARFRAEALYAELDVLRKLRPKAKAAMVMEAQRDPAWPVLRTIPFLGSVRVALLLATMQTPWRFRTKRHLWAYAGLAVVTRSSADYTIVAGQAVRRRRSPMTRGLNRNHNRVLKDVFKGAATAATARPGPLQAFYRSVVARGTREELARLTLTRKLAALTLRLWKKGERYDPTKLTTPAR

SEQ ID NO: 324547 - protein, 399 aa, unidentified
MFVGWDWASTAHDVTVIDSAGELVHRMAIPHTEDGIARAVAKLADYGDPGELPVAIEATRGLVVDRLLGVGHPVIPVHPNAFHAVRPRWGAARAKNDPGDSFKLADYARTDIHRLPMLVPTLPETLELQALTRQRDCQLALRIAAVSQLAALLDQYWPGGKTIFAQLHSPIALDFLDRYPTPRAAASLTPARIEAFCHRRGYSGRRSGAELLDRLRSAPISASRLGEPVVAQMIRGQVAVVRALQAGIDALDIVIAEKVTAHPYAGLLAVLPRIGTLNLAQIIGEVGPILERATSFDQLAAETGLAPVTRSSGKTHTVAFRYATNRRARQALHTWLDNSRRSSDWAAQRYAAARARGQRHPHALRTIGRAWLRIIWACWRTKTAYDPARDERAKQPTAA

SEQ ID NO: 324548 - protein, 471 aa, unidentified
MRYIGLDLALTTAHKAIVIDDRGQAITPVLSVQTSAAGLEQLFRRAREGCPADEPLVVVMEPTGMAWFPVAVFCQRQGVKTYLVNSQQVADLRRYYRKHAKSDRIDARVLAKLPIVSPEKLHPLQLISAGQLACQRGCKELDRLMDLMVAIQNRLRAIDRFAWPGLEDVLSENIAPLTRWFREHWYDPQAVLAAGAAGLEQAWQENEPESADLSAEMPKPAGWASALVELAGQVVALYGTESAFLDYAYLQAEVRREQALLATLEAEHKQLQLKTVRPLYRDLHPSRNLESLYGVGQDGAAVYLSFIGDPRRFPDHASFRGWSGMIPRSSQSGATEVKGLPISQAGPDLVKKFSFIDAETARLWDPQIALIYYDQIVHHGKHHTQAVCACATHLLDRIWTILKEDRPYELRDVDGTPVTVEQARQIIAERYTVPKEIRQRNNQHTRRARRERQAEKKSERGKVPHGVRGES

SEQ ID NO: 324549 - protein, 353 aa, unidentified
MLSENYEYLIGGDPDRDTIDLAVLDTATGATRAHIEASADGAGYVRMLNWADDHAPGRRMWALEGTGSFAAGLAEALAQAGEDVVEVGGLKRARGAKNDRLDAVRAARTAMAREHQANPRVRGLREAIRALSATRHSVLVSRTKAINELKSLIVVAPEHLRAVLRGRSLAKQLSLIESMTTTATAAVDHRVTIVTMQSITARIRFLSGQLKDIDPELASLIAAHPAGPALLAEPGVGPVVAAQMLISWSHSGRCRSEAAFASLAGVSPLEASSGQRSRHRLNRGGDRALNRALHTVAITRMRCHTETRAYEARRTLQGKTHRDIRRCLKRSIARSLYRIMESSARGQATLTAA

SEQ ID NO: 324550 - protein, 400 aa, unidentified
MDDIDDVGVLLGLDVGKSAHHGHGLTPAGKKVFDKQLPNSESKLRAVFDKLAAKFGTVLVIVDQPASIGALPLTVARDAGCKVAYLPGLSMRRIADLYPGEAKTDAKDAAVIADAARTMPHTLRSLEPTDEITAELTVLVGFDQDLAAEATRTSNRIRGLLTQFHPSLERVLGPRLDHPAVTWLLERYGSPASLRKAGRRRLVEVIRPKAPRMAQRLIDEVFDALDEQTVVVPGTGTLDLVIPSLARSLAAVHEQRRALEAQIGLLLEAHPLSAVLTSIPGVAVRTAATLLVTVGDGTSFPTAAHLASYAGLAPTTKSSGTSIHGEHAPRGGNRQLKRAMFLSAFAALHDPASRTYYDRCRARGKTHTQALLRLARQRINVLFAMLRDGTFYEPRTPRLA

SEQ ID NO: 324551 - protein, 328 aa, unidentified
MKKFIIGIDVSKLKLDLHCYGQSNSLIISNDDKGFKALLRWLRMQVSKDFTLVMVVMEYTGIYTYGIERFLAGHGINYVKRPALDIKRSVGMVRGKSDKADACLISKYGWMRKEQLTPMQPISESQLELQQWMSHRDKLVADRASYQSKLKELRSQMQDKVNRKMTGSMEYIMEVLTIEIREAEQQIKALISSDSELQNNYELVSSVTGIGFATAVHLLIATENFTRFEDARKLICYCGVAPFEHSSGSSIRGKTRVSQLANKKLKSLLTMAALSAIKHDPDMKLKYEQKIKEGKAKMSAINTIRAKLIERVFAVVKRKSAYKVRLAA

SEQ ID NO: 324552 - protein, 322 aa, unidentified
MIFVGIDISKLTFDVAVLIDGKYLSRQFENKQSGFLKLSQWIKSFKNPAYFCSEATGIYGLALAKHLYQTNQKVIVANPLQTHAFAKMEMARNKTDKADAMSIARYCQYLFNRGEIDKGLFIPRSPAFERVQFLVTRLDQLSKMKSQENNRSGVSLDKAAASSIESMLTFIDKQIVVIKKEITMIIKQDEQLTVQLKLLVSINGIGDKTAWALLAYIGDISLFENSKQISSYAGLNPSIDQSGTSLNRSSLSKTGSTRLRKSLYMPAMVAVRYNPLMLAFYNKLLTKGKPKKVALIAVMRKLLVLAFGVLKSGKPFDINYQH

SEQ ID NO: 324553 - protein, 348 aa, unidentified
MDHIGYDLGKVSSQICIITEDGQLIERRIKTDRESIAQLLGTRPPARILLEASTECEWVARYLEELGHEVIVADTNFEAMYSTRTRRVKTDKRDARALAEACRLGYYRAAHRTSDRQRHVRAQLAVREALVRTRSRYISLICTLLRRDGLRIRSGAARYFLMRLEDVQLTAQLRDEIAPLVTLLRTLNEQIKRADEQLATLAQGDAVVARLCTVPGVGAVTATSFVSTLDTAARFEGAKQVRAFLGLIPSEDSSGERRKRGGISKAGPSRARSMLVEVAWQILRRRNPATEALYLWAARIAQRRGKKIAAVALARKLAGILYAMWRDGTSFGAQAARAGHAGAEVTAA

SEQ ID NO: 324554 - protein, 313 aa, unidentified
MRKVMAGMDLHGNNVMVGIVDDQGARLQHRRLACELPEIIEFLAPYKAELESIAVESTFNWYWLVDGLRAAGFPVVLANPAKIDQYSGIKHADDKNDAYFLAELQRLKILPTGYVYDPELRPVRDLLRRRMSLMRQRTTLFLSAKSLHQRTTGRGLELRRLKAMEPEEAAALYTHPANQLIAQIQKEHIDSLDQSIRQIEKAVLKVALQQPYYQRLQTMPGVGIILGLTISMEVGNIDRFAGPGQFASYCRTVDAKRISNGKTKGDNNQKCGNKYLAWAFVEAAHGARRFDATCRRWYGPASIKRTEKKGVIG

SEQ ID NO: 324555 - protein, 367 aa, unidentified
MGKDSTAVIGMDVHKESVDIAIADGGQARLFGRVGGEAAAVDRAVRKIRSVHRDPLFVYEAGPCGFWLYRRLRAQGARCMVVSPSMTPRRSGDRVKTDRRDALMLARLARAGELVPIYVPDARDEAVRDLVRAREDAVCMQRQARQRLQALLLRNEIRYVGRSAWTQAHRRWIAHLKLPDPAQQIAFEEYVSAVEEAGRRLERLEHSIAAQLEHWRWRPVIEALQALRGVSAIHAVRIVAELGDLTRFESPRKLMGYLGLTPSEDSSGKRRRQGAITKAGNSSARRAFIEAAWAYAHPARVSWVIARRHTGLSQRVTDLAWKAQLRLCSRFRRLAARRLPRNKVVVAIARELSGFVWAIAQQVRPVA

SEQ ID NO: 324556 - protein, 342 aa, unidentified
MDYYAGIDVSLECSSLCVVDGTGKIIREGKAASEPAALIAWLGSLGFGLARIGLEAGPLSQWLYLAMKQAGLAVELLETRHVRDAFKAMLVKSDRNDARGIAQLIRLGWFRPVHCKSMDAQEVRAVLTARKLVQTKLLDVENSLRGILRGFGLKVGKTTDRSFATRIQELVKGHPNLEAIGEALLSVRAVLLREFNAFEKRVRAMSRLNARAKLLMSTPSVGPIVALTYASAIDDPARFKSSKQAGPHFGLTPKKYQSGETDYSGRISKIGDAAVREALYQAAHVMLTKPIKGCSELKSWAMRIARRAGMSKAKVALARKLAVILHRMLANATPFNAAAAAA

SEQ ID NO: 324557 - protein, 415 aa, unidentified
MNSFCGIDWAEGHHDIAIVDGEGKLVAKKRISDDSAGFTVLTEMLAAAGDSFDDAIPIAIETPRGLLVAALRAAGRPVFAINPLAVARYRERHSVAGAKSDHADAMTLANILRVDSHLHRRMPADSELVQAIAVLARAQQDAVWRRSKASNELRSMLREYYPAFLDTFAVKSATNLAKPEPRAVLAIAPTPAHPAKLVKTRVAAALRRAGRKRGIDGLAVNILEHLQAPQLRQPELVEKAMGRQALALLAMLDAACTGADELAQTAAEEFRKHPDYAVITSFPGLADLTGARVLAEIGDDRDRFADDRALKAYAGSAPITRASGKVTSITHRRIKNDRLAAVGWVWATYAYINPGPAQDHYRRRRDHGDRHAAALRHLFNKMLGQLHHCLQTRQTFDPIKAFGQPRTAPREPAAA

SEQ ID NO: 324558 - protein, 325 aa, unidentified
MTKVKNFAGLDVSKKFFDVCFGVDGLVSVKRFSNDLQGFKEFSGQLAGDTHCVMEATGPYYLRLALYLHDQGIKVSVINPLVIRRFSQMRLIRAKTDKADARLIMAYGIKEDPCCWEPPKQYIIELQQLQSLCDQLQKHYRALSNQLEAFSASGLLEVGLEGLLMKELEHSKEQIAIVEKQMHELVSVHHGELMDNLTSIPGLGKKTALTLIVLSGGFKKFSNYRQLSAYVGLSPRLYESGTSVRGRSRICKMGMSRIRALLYVCSWSAKKYNTCCKSLYDRLVASGKSKRLALIAVANKLVKQAFAIATSNVAYDKNYGKNICL

SEQ ID NO: 324559 - protein, 412 aa, unidentified
MTHPQHTHFAGFDWVGDHHDVIIVDSAGVLVADFRFDHSAAGWQHWRDQIAAWPQLGVAIETSFGAVVEQLIDSGVTVYPVAPTSAKGYRQRKYPGGAKTDRHDAWALADALRTDGHAWRALSAKDPIIEELRMLCRDEVALIEERTALVNQARQAAREYYPVVLEAFEDWTLPSTWAFIESFPDTQALLKAGRRAWQKFFHTHKLHRAETVQRRIAVLEAAGQWRIAEPMVKAKRLYLLTKARQLRALHIQLEEYRRRIEAVFASHPDSGMFGSLPGAGAKLAPRLLGEIGSDRALYADACSLQSVSGTAPVSYQTGKLHKVQMRRACNRHLRHTMHLFSDLSRAQCAWAKVYYDGLKSRGKTHAQALRSLGQRWLNIIFRMWQDHTRYDPELHTRNQLQHGSWVLQHRPS

SEQ ID NO: 324560 - protein, 360 aa, unidentified
MSAAPAPEVEISNSPDVVVGVDTHKHTHMAVALSANGGWLGSLKLEAKRIGYQELMRWAAEFGSRPVFAVEGTGCYGAGLCRALQTAELEVVEVNRPDRSTRRRLGKDDTIDAEAAARSYISGKATVIPKAGNDLVEMIRMLKVVKDSASGNRTAALNQLHAIVVTAPAALRERLQRLKVKELVDCCSGLRSGEISTPLAAAKLALRNLARRIQQLDQELKDTAAQLDRLTMQHCPELRNTYGVGVDISATLVMAVGDNQERMKSEASFAALCGVNPLPASSGKVVRHRLNRSGNRQANCALHRIVLCRLRWHQQTKEYAERRMAEGRTIKEIIRCLKRFVAREMFGVLRGGPAVRTAAA

SEQ ID NO: 324561 - protein, 343 aa, unidentified
MDKKRYLGIDLHRDCFTCCIRLETGRNYLSRWKLEELGKFVRKLRPSDAVAVEVTSNTRLFYQAVVPHVARVVVVDAHQFRVIAHSVKKTDPNDARNLALYLEKDLLPEVRMKDPQRAQIASLTQTRDTMVKLRTALKNKVNNLLSAQGINLSKESLASEKGLAAVLKFRFDPLLELELKVIVQQIRSLNSSIAELEETITREGQKLEGHSNLTSIKGIGGLSGSILLSIIGDVNDFAEEGKLAAYFGIVPRISHSNETEHSGRITKRGTKLGRTTLVQCALIAQRYSPYLKCYYEKIKRRRGTGKAIIALARKFLGIIYRTLKYRWVFEDFPNFVLADGTTA

SEQ ID NO: 324562 - protein, 434 aa, unidentified
MTLINFVAANQKYYAFNLLSVFIMVFWSVQYLLQHLLVQTQLSAQLLQPLILILQLPQPPQFRYARPGKFFLPVNGMDYLLPLRLTVRNVLTRRITMNIVFLGIDLAKNVFQLCGLNQAGKPVYTKRTGRKELLQTLANIPACLIGIEASTGAFYWQREFEKLGHKVKVISPQYVKPFVRGQKNDGNDAQAIAVALMQPTMQFVPPKSPEQQDIQALHRARQRIVNHRTATVCQIRGLLLDRGIPIGSAVSRARRAIPLILEDAENGLSSRMRRTIAELYDLFNDLGRRIHFFDKEIETVFRQSEACQRIAKVKGIGPKTATAVVAAIGKGTEFKNGRHFAAWLGLVPRQHSSGDRQVLMNMTKKGDKHLRTLFIHGARAVVRVATNNNDGHMNQWVNQLKERRGFNKTTVAVANKNARIIWSMLRNETGYQVV

SEQ ID NO: 324563 - protein, 404 aa, unidentified
MAVMIGVDPHKGSHTAVAVGADERQLGRLRVRASAGQAQQLAEWAAAWPERTWAVEGASGLGHLLAQQLVAAGERVLDVQPKLAARVRLLAAGDTNKTDPNDARSVAVAALRSAGCREVRADDHTAVLQVWSKRHRDLARLRNQVACRLHAVLCELVPGGVRKEITAAYAARFLEEALPSGAVMLARWELASDFLEDLRRIDAQLSQVKKKLAATVKASGTTLTEVFGVGPVIAGIVLGEVEDVSRFRDRDRFAAYTGTAPVEVSSGNRKVHRLSRRGNRRLNHAVHMAAITQIRHPHSEGRGYYDKKLAEGKTPKEALRALKRRISDALFRRLRADARRAAASAPQVTGPGGQMGNDTDASAAGSHPEHQLFGAATPGPEPTLRPAPSARPKKPSSRTSKKMP

SEQ ID NO: 324564 - protein, 407 aa, unidentified
MEVLHARCAGLDVHKDSVVACVRIASGSKVNRETATFGTTTSQLIALSEWLKQSGVTHVAMEATGVYWKPVWHILEESFTLLLGNARRMRNVPGRKSDVNDANWIADLLAHGLIEPSFVPDRPIQELRDLTRTRKQLVRVAADASNRLQKVLEDANIKLGSLLSDVMGPSGRAIIDAIITGETDPQRLAALGSTRLKATPAQLREALRGRITEHHRFMLAMHLQHYDQTQQMVERIDARIEELGHPFVDAVERLVEVPGISRTAAFTLVSEIGVDMGRFERPQRLVSFAGVCPRLEESAGKKKSTRARRAGTWLKTIAVTCGWAAARTKKSYFRAQFQRIKARRGPTKAVIAVASSLMTVVFFVLRGRRFVDVGDAYFDRLNRERTARRLRKRIEALGYSVTIQPAA

SEQ ID NO: 324565 - protein, 430 aa, unidentified
MAAVMIGVDPHKGSHTAVAIDAAETPLGELRVRAGAAQAGKLLEWAAKWPQRTWAVEGAGGLGHVLAQQLVAAGERVLDVQPKLGARVRLLSSGTSNKNDPNDARSVAVAALRSPACPQVRADDHAVVLRVWSRRHRQLSSLRTQAACRLHAVLCEITPGGVPKAITANRAAAILGAHQPDGPAGQAWHDLAEEHLTDLRRIDAQLRGTRATITASVRASGTTLTEVFGVGPVIAATVIGDVADISRFPTADRFASYNGTAPIEVSSGSRKIYRLSMRGNRRLNHAIHMAAVTQIAHPRSDGHAYYQRKLAGGKTPAEARRALKRKISNAIYARLQADAHRAATPADKGPGGQPGNGSASSAASSHPENRLFGQATPGPAASLRPPARPGAKTHTPAARAVSARTGDPRRPGDRDRGRVPAPAGKAVIKR

SEQ ID NO: 324566 - protein, 347 aa, unidentified
MEYFAGLDVSLETVNVCIVNAAGDILLEKKIAAEPAAIVNLLKSFGSPFKRIGLEAGPTSSWLYGELRAAGYGAICLECRHVKAGLSAMRNKTDRNDARGIAQLVRLGWFRQVHVKSEEAQRTRMLLVNRQQLLTKALDIENSVRGSLKVFGLRVGVVARRGFEARVLELVADDPILLAVTEPMLRVRQALLEEFERLDRLCRQLARRDPVCRRLMTVPGVGVVVALTYRTGVDAPERFSRSRDVGAHFGLTPKRYSSGQTDYDGRISRCGDEMVRTALYQAANVLLHHGKWSSLRSWAMRIAKRGSVKGAKVALARRLAVVMHRMWTDGTDFRWSDTRRMTAPTAA

SEQ ID NO: 324567 - protein, 343 aa, unidentified
MKLSRVGIDLAKNVYQLHGVDRTGKTMLKRRLKRYQWFKVLLDKTEPDCVIGMEACAGAHHWGRQLQARGYTVKLIPPQFVKPYVKSNKSDAKDAEAICEAMSRPNMRFVTVKRVEQQDIQATHRIRAELMTQRTAKANQIRGLVAEYGLVAPKHLSSLRAAIPCWLEDAENGLTADFRALLQGVWNDLLGLDDRVCEMDKLIKRLAENNEDCVRLQQLRGVGPLIATAMVATVGDARQYHKSRQMAAAIGITPRQHSSGDRDRMLGISKRGDVYLRTLMIHGARSAVAVAKHKDDRLSRWVTEIAKRRHPNVAAVALANKTARMAWAMLRNETNYDPDFAIR

SEQ ID NO: 324568 - protein, 348 aa, unidentified
MTMLAELVDLVIGVDTHKNSHSAAVIDASTGAVRTTITVGTDPDGLDELIAAADQLPGTRIWSIEGAGSYGAGLTRRLHELGEQVIEIDRPGRPARRGGAKSDPIDAVRAAREALTRQHLAQPRASGERAALAALMVARRSAVQATGDAERQLHALITTAPEPLRNRFRDRTTAVIITTACKLRAHPSWDLETRTYATVLRDLAHRCRALQREADTQHRAITAIVRSWRPDLLELPGVGPISAATILCTWSHPGRCRHEAAFANLAGVAPIPASSGQTTRYRLNRHGDRDLNRALHIIVLTRLRIDPTTRAYAQRRQAEGKTPREIRRCLKRYLARQIYRQLEAPPTP

SEQ ID NO: 324569 - protein, 378 aa, unidentified
MRKVRFVGLDVHAETIAVAVAEWDGEVRSLGTVPNRAESIRKLMKKLGAPTDLRVCYEAGPCGYVLYWQLTELGVQCEVVAPTLVPVKAGDRVKTDRRDAEKLARSYRAGDLTPVWVPDAAHEALRDLVRTREAAKKDQLRARHRLSKLLLRRGLRPAAPSNAWGSGYMKWVKGLRFEQPALEAAYLDLLHEVEHAAERIGRLEQSIDDAIAKAPGSMRAVIAALQALRGVSKMSAATLVAEVGQFSRFEKPRQLMGYSGMVSSEHSSGERTRRGAITKAGNAHVRRIVIEASWSYRHRPSLGPALRKRQDGLAEPVKEIAWRAQCRLHRRYRQLLGRGLPKQKVVTAVARELLGFAWAIAVEVERTIPRRARQRAAA

SEQ ID NO: 324570 - protein, 449 aa, unidentified
MREPQELEDEEYEQLVERVAAVDVAKASGMVCTRVPDPCRPGRRVTKVWEVPATTNAIIELAGHLAGLGVEKVTVESTSDYWRGFFYLLEAAGLAVQLVNAREVKNVPGRPKTDRLDAVWLAKLTERGMLRPSFVPPAEIRQLRDYTRLRVDLTHERTRYWQRLEKLLEDALIKVSSVASTLDTASTRDMLEALIAGERDPRVLAGLARGKMKAKHAALAEALTGRFDAHHAELARMLLDQIDALGAQIGTLTARIEQLLGAIPAAQGVDADGTTGPGAGSGPDAAVLPAATRLDEITGIGPGAAQVILAEVGLDMGVFPTPAHLVSWARLCPRTIQSGAKTRAGKAGKGNPYLKGVLGEAAAAAAKTDTFLGERYRRLVKRRGKLKALVAVARSILVIVWHLLADPAARYADLGADYYADRIDKGKKARNHIRQLEALGFTVTLAPAA

SEQ ID NO: 324571 - protein, 341 aa, unidentified
MEVSIIGIDIAKNVFQFHGSTKTGATVFRRKIRRSGVLHFLAEQPRCLVAMEACASSHYWGREIEQLGHTVKLIPPQYVRPFVKRQKNDMADAEAIAEAATRPEMRFVAVKSAEQQAQSMLLKTRELFISQRTQTINMLRGHLAEYGIVVPQGPSHLRKLEAQMLDEHETDLPLTMRNMCIRLFDHLRLLDWQIDDLTSRIEASAKQDATARRLMTIPGIGPMCAMAVVTLAPPRESFRKGRDFAAWVGLTPKQHSTGGKTRLGRTSKMGQRDIRRLLILGAMSVIQSVERKGGAAEGSWLNRMLKRKPRLLVAVALANKLARMAWALMKKDEVYRVQLAA

SEQ ID NO: 324572 - protein, 505 aa, unidentified
MGACGLESGDVVLAAIPIRKMTIGIAQTLLLVIEWRIAMPKRTTGDRPELKTVSVGAAAIDIGSKMHMAAVNPACTDVPVRSFGTFTQDLHDLADWFKACGVTSVAMESTGIYWIPVYEILEQRGFDVILVNARYAKNVPGRKTDVSDAAWLRQLHSYGLLRGSFRPDAEIATLRAYLRQRERLVEYAAAHIQHMQKALMEMNLQLHHVVSDITGATGMRIIRAVVAGERNPDVLATYRDVRCHSSPETIRAALVGNDRDEHIFALTQSLELYDIYQAKMLDCDRKLEVLIAALSNKGEKPVGKLSKPRIKTKQVNTPTFDVRTALYGVLGVDLTEIHGLGPSLALKLVGECGTDLRAWPSAKHFTSWLCLAPGNKISGGKVLSSRTRRSSSRAAALLRLAATTVGRSDTAIGAFYRRLSSRAGKSKAVTATARKIAVLFYNTLRHGMSYRDPGADHYEQQYRNRVLANLQRRAKSLGFVLQAFRETPIRLFLRKSIAIFAGVQK

SEQ ID NO: 324573 - protein, 320 aa, unidentified
MDAVLGIDIAKAKFVVSLVTPDGKHRRKSCPNTTAGFTELTTWLTRHDIGRVHACLEATGTYGEALATWLVDAGHLVSVVNPVVIHAYARAQLTRGKTDQIDADLIANFTATQHPPAWTPPAPEIRQLQALVRRLDALHGMHTQEANRLAAGVAVIAVRVSIEAVLASLDAQITRVQQLIRDHFDQHPGLRAQRDLLTTIPGIGDATAAVLIAELFDKPYTSARQAAAFAGLVPRLMESGTLRGRTRLSKIGPGRLRKALYFPAVAALRWNPTIRAVRDRLHAAGKPTMVIIGAAMRKLIHLAYGVLKSRRAYHPFEAHP

SEQ ID NO: 324574 - protein, 340 aa, unidentified
MQDQVSRQYVGIDLHRRRSVIVRIDEAGKVLGKAQVLNDPVEFALAMAGAGEGPEVALEATYGYYWAADLLQENGAHVHLVHPLGLHWDNRRVKNDELDATELAKRLWRDDLPEAWVAPAEVRDLRELIRYRAELVALRTSAKAQVHAVMAKCGILPALDDMFGPGGQVLLDKMELPQPYRYRVDSLRRLLGVFDDEIDIAESQARKRLRGHRGYRAVQAIKGVGPVMAAIFVAEIGDVSRFASARHLCSWAGVTPSHRESDDKAHRGHITKQGSTLVRWAAVETVARYHGGAPIAPAFRRVQERRGTMIARVAAARKLLTLVYYGLRDGEVRCLRKEAA

SEQ ID NO: 324575 - protein, 298 aa, unidentified
MIIIGADYHPGFQQIAFVDTDSGEFQERRLQHPEEAEKFYRDLAAEGMQVRVGMEASGQARWFERLLSELHFELWIGDAAKIRTKRVRKQKTDRQDAQLILQLLLEDRFPKIWVPSVENRDLRQLLWHRHRMVQARTRIMNQLQAVALNEGLRCKKRLWRKHGREQLEAFRLAPWASRRRRDLLELIDRLNPTIAELSQAIEQEVEKCPEARRLMTHPGVGALTALAFVLIIGQADRFDCGKQVASYLGLVPLEDSSGNRRRLGHITKQGSSMMRFLLVEAAQVTVRSVPEWRSNIST

SEQ ID NO: 324576 - protein, 461 aa, unidentified
MNYKRSKSRADRTMPTVHPNAAAIDVGATVHMAAVGADAAPKPVRSFGTFTVDLHRLVDWFTECGVETVVMESTSVYWIPIFELLDARGFTVFLVNARDAKHVPGRKTDVSDAQWLQRLHSFGLLRASFRPKGQIAELRAYVRQRERLLEHAASHIQHMQKALTEMNLQLHHVVADITGATGLRIIRAILAGERDPEALACLRHYSCRSSAETIAKALTGSYRTEHLFALEQALALYDAYHEKTSACDERIEAVLKELSIHRGRGHGTVPSASRRQNRTDQANALAFDVRAALFALLGRDITTIDGLGPYLSLKLIAECGDDLTSWPSEKHFTSWLGLAPSNKVSGGKLISSRTRRSGGRAAALLRLAAVTVGRTETALGAFYRRLSSRIGKAKAVTATARKIAVLFYNAVRHGMEYVDPGASSYETRYRTRVVNNLHRRAKAFGFVLQPLEPEAGAAAVS

SEQ ID NO: 324577 - protein, 412 aa, unidentified
MQTLVERGCGWDVHQATVVACLLVMQKDGRIQKQTRTFGTTTRELVGLRDWLRAEGCTHLARESTGVYGKPVYAVLEGALEIVVANAQHVNKVPGRKTDVKDAEWLADLLCHGLLRPSFVPPPPIRQLRDLTRYRRKLVQSQAAERNRLLKLLESANIKLASVATDVFGVSGRLMLRALIEGQASPKEMAQLAKNKLRNKIPELELALEGRIEEHHRFLLKLQLDRLESVEKPIEVLQQHIQQKLQPYTAKLALLDEIPGVDCILAAVIIAELGVDMSVFESVSQLASWAGVCSGNNESAGKRKSSRIPKGNVYLKTALVEAAHSAAKTKGTYLRDKFYRLKARRGYKRAAVAIAHKILVAIYHMLSQQVSYNDLGDLYLDNLNKHHLTRNLVHRLERLGYAVTLTLQDKAA

SEQ ID NO: 324578 - protein, 476 aa, unidentified
MGKGSGMTRGDRRRNARRERLRGLLPRDGAVIGIDLGDEKQAIAVVDHDVRVVARKTVRVKAFRLGEALDWAVAQARAKGFTAVAVACEPTGARWLQVQRLCAERELPLVCIQPLVSHIARQQQDYTTHKSDESDCVMIARLAIELHCYLPEELDEAWAQLRHLGRRRAQLIRSATASVQRVRDFLPVAWPVAPEACAHPFESVTWLAAMQVVTSRSGGQPGKLAAIGLAEFTALVRQAVAGWGGQRPASPVCRAVFAALTSTEGVVVSHRRALLRRCADELGDLQRTRAQLRAVEADMAAVLGELGLSRLADIPGLTAVGAAAILAETGDPRRYDSSSSLVKHAGLSPSGNASGAFEGQAHISRRGRPGLRLTVWRAIWPLLIHNSVMAAKYAAMIAAADAAAAQAAQAQSGTGSRQASAAAAAQARRARARVACAASLLRWIYSMVVHDTGWDPDVASGAASCQHAPRCQAEAA

SEQ ID NO: 324579 - protein, 341 aa, unidentified
MSELYAGLDLHSGNTYIGLIEKGTMKRVFEKRVRNNLEELVWTLAPYREEIRGIAVESTFNWYWLVDGLNVAGYDCVHLANPAAIQQYKGLKYADDRHDAFWLAQMLSLGILPEGYIYPREERPVRDLLRKRSFLVKQRTAHIISLQSMIERNTGVHMNANALRKVKAEDIKQILKEDHLVLLGTTSLETIDFLGKSIKEIEKTVKKTVKTRDAFEKLHMVPGIGDILAMTIMLEVGDISRFARVGDFSSYCRCVPTGRFSNGKNKGKGNVKNGNRYLAWAFIEAAYLSMRQSPKIAGYYKKKASRTHKMVAVKTIASKLARACYYILRDGVEFKEEMLFC

SEQ ID NO: 324580 - protein, 437 aa, unidentified
MAKKGKKTKPMPDNMLIIHPHAAGIDVGAEEHWVCVPADRDAQPVQKFSAFTCDLHRLADWLTACRITTVVMESTGVYWIPLFQILEARGFEVALVNARHVKNVPGRPKTDRFDCRWLQKLHTYGLLAPSFRPPEDICQLRSLLRHRENLIRMTVKHIQHMQKSLDQMHLHLHHVMSDITGVTGMRISRAIVAGERDPRTLAQYRDYRIKSSADTMTKALEGDDRAEHVFTLTQSLELYDFTQQQIAACDQEIERVLATWDSQVDPDEHPLPPPTTTHRHPQRNEPAFDLRTHLYRITGVDLTQVPGFQAPTIHIILAEVGLNRHKWPTDKHFASWLGLCPDNQIRGGKVLATGSRRVQNRASRALRMAAQSLRTSPSYLGAFYRRMRSTLGPAKATTATAHKLAKILSHMLKEKTSYRERGAESYLHRDQERKLKQ

SEQ ID NO: 324581 - protein, 408 aa, unidentified
MNPLFVGIDVSSRNNVAYLMKPDGSKHSSFSVQNNLGGAKLLSERIVSALGSMQLSDVVIGLEATSIYGDSLVYALREDGRLGKFQRKIHVLNPKQVRKFKEAYPDLPKNDWVDAFVIADHLRFGRIAREVYMDDYRYKALQTLTRARFEVIQNLTREKQRFANYLFLKCSGMAQDKDIANSSSTTIALMERFETVDDLANSDLEELTAFVTETGRGRFADPAATAKAVRAAAKGSYRLPKTVNDTVNQAMSVSIASMRALKEQVKVLDKAIEQQFEIIPNTLTSIPGIGKVYSAGIIAEIGDIHRFDSQASVAKFAGLVWHKNQSGEFEAEHSRMIKSGNRYLRYYLLEAANSVRRCDSEFRRYYDLKFKEVNKYQHKRALALTARKLVRLVFRLLKDNRLYIPPES

SEQ ID NO: 324582 - protein, 339 aa, unidentified
MTIVMGLDQHRGQITGEWVDTETGEVQRTRVAPADRAALRKWLSRFRGRELEVALEATTGWRFVVEELRRVGAVVHLAEPAETAGLRGPKKRAKGDRADARHMRELLMVKRLPESWIPPDHILDLRARVRLRHTLSEQRSEWQQRIQATLYHHGCPQRRQLMVGDGREWLAAQPLPAAAREQVTVALAMIDGIEAQIAPLDKQLRAYARRQAGCKALMAHYGIGGLTAVTILAELGDCTRFSSSRQAVRYAGLDITVYQSDRHRAPGHISRQGPPALRWALYEAAQVARRGERSPDREYYLEAKDRVGGNRACLSVARKLLKRSYHTLRELGEEALAPA

SEQ ID NO: 324583 - protein, 352 aa, unidentified
MIVIGCDFHPSWQQICWVDTVTVETEERKLDHASGEAERFYRRLQGSVLVGMESTGNCQWFVELLASLGHDLWIGDASKIRACDPRAQKHDRRDAALILKLLLEGRFPRIWTPSGQEKDLRQLLIHRYKLVRIRAQVKTELQHLAINQGVTRRRKLWSKAGEKVLRELPLKPWASRRREDLFKVREMLNGQIALLDQAVVEAAEKNERARLLMTQPGVGPITSIAFVLTMGDVSRFPRGKQVASYLGLIPREYSSGGHQRFGSISKQGNWFLRMLLVEAAQCAVRYDPQFRNEYLHRCHSKAKGVAKVAAARKLAIRLYWMLRTNTGYPEVVRVESSSRVPLVSASLPGQAS

SEQ ID NO: 324584 - protein, 327 aa, unidentified
MARMQGKTTSDISQLFAGIDVSKAHLDLRLSCERRSRRFANDPAGFAAIDAHLRARAETPCLVALEPTGRYHFPVWRALHEAGHGVAPLNPLHVRRFAESDGELAKTDAIDAAVLARMAAERRPAEKLPPSEEQLRLKALTTSIADRTGRRAALKGQRAEVRDPLIAGFDEAEIAQLSDAIGVLKAERARLINANPESARVSEILCSMPGIGEASAHRVIVEMPEIGTLDKKQVAALLGTAPRANQSGKRDKRRRTKGGRRRLRAALHMPAIVASNANPDLKAFKLRLKAKGKKNAVILTAIMRKLIILANALVAQNRTWTPKMPLT

SEQ ID NO: 324585 - protein, 343 aa, unidentified
MEYYVGLDVSLKQTSICVVDQAGLVVREGVVDSDPEAISAYVTSKAPNAVRIGLETGPTSTWLWTELKRLGLPVICIDARHAKAVLKMQINKSDRNDAIGIARIMQTGWFKEVHVKDIDSHSVRALLASRALLVKIKRDLENHVRGLLKNLGLVIGRAKFNVFAVRVEELIEGRPELVAAIRPLLEARNAVEQQVSELDRKVMKLARRDAQVRRFMTAPGVGPITALAFKATIDDPARFARSRSVGAYIGLTSRRHASGEVDWSGRISKCGDAMLRSYLFEAAGVLLTRVPTWSVVKAWGMKLAKRNGLRKAKVAVARKLAVILHRMWIDGTEFNWSKKEIAA

SEQ ID NO: 324586 - protein, 348 aa, unidentified
MAMEGGAMSEAARLYGGLDLHGDNVFCTLMDAARNIVFERRLPNDMGVIRAALEPYRKRIHVLGVESTYNWYWLVDGLQKLSYQMKLANPARMQENLGLKAANDKTDARFIARQLTNGILPEGYIYPEETRGIRDILRRRMRLVHARSGEWISLEGLVARHTGREMGVSELGHCDIGEVLAGQQHALTMAQASFRHIEFLEREIRALEKAVMSELPDREDYTRLMTVPGIGPVLARTILLETGPISRFREAGNYASYCRAVKAEHTTNDKKKGDCNGKSGNKYLAWAYVEASNYAVRYSPEIRAWFQRKQSRSGKRVIALKALANKLTKACFFMLRDGKDFDVKRLVG

SEQ ID NO: 324587 - protein, 362 aa, unidentified
MNSVGIDISKGRSTIAVMRPFGEVVISPFEIRHTGSELSKLAKQLKSLDGETRVVMEATGNYHASVAKLLHNAGLYVSVINAKLVHGYGNNELRRVKTDRKDAVKLANYGLDRWLTLPRYIPEEDTRLLLKNCYRQYRQYSKVQTVLKNNLISLLDTVFPNANRLFSSPIRGDGSEKWVDFVAEFWHCRCVSEKSERAFTSKYLRWCRKHGYNFREAKAHTIYAEASGHIGVMPKSETTKLLVEQAVAQLRATSTALAALKHEMQSLASQLPEYPVVMDMFGVGPTLGPQLIAEIGDVRRFYSKKALVAYAGLDAPPNDSGDVTGKHKSMSKIGASSLRRTLFLVMSVYLLWRECYAKRTVG

SEQ ID NO: 324588 - protein, 347 aa, unidentified
MDYVGIDLHKKESQICILSEGGQLSECRIRTEPQRFAEVLGARPRARILLEASTESEWVARCLEGLGHEVVVADPNFAPMYATRTRKVKTDRRDARALQEACLLGAYRPAHRLSDAQRHVRGRLAVRDALVRTRTGYIALVRALLRGHGWRVPTGSAETFMRRVVALPLPGRLLSEVAPLLAVMRPINQQLAYSDGMIEAVTRPDARVQRLRTVPSVGPVTAAAFVATIDDAQRFHRAHEVEAYLGLVPREFSSGESQRRGRITKAGNTRMRWLLVQAAVSILRLRDPRTVALRRWAMGIATRRGKKIAVVALARRLAGILSAMLRDGTTYAPGVVSRRAAEAAVPV

SEQ ID NO: 324589 - protein, 352 aa, unidentified
MTVIGLDLHKRYITACAMTEDGEILAEQRRVVPEVEALEAFFAGLPAPLTVAMEATLYWAWLHDQLVARGITVQVAHAYQVKLIWQARAKTDPIDARKLAELARTHLLPTVWVAGPALRGQRKLLRGRAYLVRLRTSVKNRIHGHLMAENCRTAVTDVYGKAGRAWLETLPLPAATRLQVDLLLEVIDALNVRIKRMDRDVARLARHHAVAQQIQTVPGIGVFGAMLLLTEIGPIHRFRSSHELAAYAGLVPSTHSSGGKTSHGTVGRAGNSWLKWILIEAVQALKLAPGPIGAQYQRLVRAKGKQKATVAAARKLCCYLFWMLTEGWTYEQWLLQHHELEVRPTQRMGTAA

SEQ ID NO: 324590 - protein, 348 aa, unidentified
MRFYTKQHKFYCGIDLHARSMYLCILDQKGKTMLHRNFKASPEAFLRAIKPFGDGLVVAVECMFVWYWLADLCAQQNIPFVLGHALYMKAIHGGKTKNDKIDSKKIATLLRGGTLPVAYVYPRTMRSTRDLLRRRNHLMRKRSELLAHIQNTNSQYNLPDFAKKLAYKANRDGVPEHFPDPCVQKSVEVDLQLLDFYDRLLTELELYIVRKAKGHNSRTFYLLRSIPGVGKILSLVLLYEIHTIDRFPRVQDFVSYCRLVKCPRESGGKKSGSKNSKIGNAHLKWAFSEAACLFLRGNEQAQLYHERLVSKHGKGKALSILAHKLGRAVYFMLKRKEPFNMDVFFARA

SEQ ID NO: 324591 - protein, 386 aa, unidentified
MRETTFIPQEYDVFAGLDVSKKSIAATFTSHHGFIRSLQMPHSVEYLLNHVRKHFADQKIAFVYEAGPTGYGLYDGLAAHGYNCMIAAPSMIPRAPGNRVKTNRLDSRGLSESLRGGQLKSIHVPSAVYRELRHLTQLRDTMVRQAAANKQRIKALLLLEGIGFPPAAGGRQWTLRVKAQLRKLECSRTVRFKLDQLLDTLEFSEKQVLSSTKEIRRFCKEDAELSQSIAYLMSIPGIGWIVASQLLARIGDWREIDNVRQLGSYLGLVPTENSTGDRVDRGSITRLGDGRLRSKLIQAAWSAIRQDAELREFYRSVCRRNPRGKGARIAIVAVARKLSMRIYAVLKNQRPYIVREQVHSAPLTQEETSPQGTTRRCAEPGETDDS

SEQ ID NO: 324592 - protein, 369 aa, unidentified
MKNGSTLRVGLDVHKESIAVAYAGEDGTEPVYVGEIGTRQCDIDAVIRKLQSKGAELVFVYEAGPCGYWLYRYLMRKGLTCFVVAPSLIPRKAGDRVKTDRRDAVMLARLARSGDLTPVYVPAVGDEAIRDLSRAREDALHDLNAARFRLKAFLLRNDIRYSGRANWSAEHVRWLARLVLPTPAQQIVFQEYVRTVSERTELLRRLEGELLEQAKTWRLAPVVEALQALRGVQFTVAITTVAELGDLTRFDSPRQVMNYLGLTPSEYSSGERRRQGGITKMGNGHARRVLVEAAKAYRHRAKVSEAIQARQQQLPKEICDIAWRAQVRLCGRYKKLALRGKHANTIAAAIARELAGFMWAIAKAQATPA

SEQ ID NO: 324593 - protein, 339 aa, unidentified
MKYTPVGVDIAKHLIQVHFINEYTGEVVDKQLRSKDFLAFFSNREPCLIGMEACGGSQHWARELKKLGHNVRLLQARFVKAFVMGNKNDVMDARAIWMAVQQPCKEIAVKTEEQQSLLVLHRSRQQLVKFRTAQINALHGTLLEFGETIHKGRAAMEKELPAALERMRAKLPPYLIAVLEDQYNRLTELDSLIDGLEKQLNSVARQSETCKQLMEIPGIGPLIATAAVATMGEASAFKSGREFAAYVGLVPKQTGSGGKVRLLGISKRGDTYLRTLFIHGARAASLLAKEPGPWITELKKRRPTGVAIVAMANKLARTVWAIAAHDRKYDKNHVSIRPC

SEQ ID NO: 324594 - protein, 354 aa, unidentified
MQYANRVDFSGQTIYIGMDVHKKSWTVSLFMEHLEHKTFTQVPDVAVLAAYLQRHFPGARYSAVYEAGYSGFWIHDKLLESGIACMITNPADVPTRDKERRRKGDRSDSRKLARCLRSGQLEGIHVPPRATVEDRGLIRTRQAMVRKQTRCKNQIKSLLFFYGLPVPDAASGWSRNFIRLLEQTRLERESGDLALKAHLTELVHLRQIIAQLNRNILALSRTDEYRERVQLLKSVPGISTLSAMIFLTELGELSRFPSFDKLCGYVGLTPDTHGSGEKLGIGDITRRCNQMLRSLLIECSWVAVRKDPALALAYHSFCRRTLKTKAIVKIARKLLNRIRFVLNNRCRYVSSLAA

SEQ ID NO: 324595 - protein, 343 aa, unidentified
MQITTVGLDIAKHVFQVHGVDAHGHPLIKRRLRRTEVLRFFGELPPCLVGLEACATAHYWARELTALGHQVRLMPPQYVRPFVKRNKNDAADAEAICEAVTRPTMRFVPIKSAEQQSVLMLHRARDLLVRQQTMTVNALRAHLAEFGIIAAQGIQNMSKVIAIIGDAADQRIPDLARETLMSMAAHYEELKRQISAFEKKIVQWHRSNEMSRRLATIPGVGPITASALVATIADPGLFGSARQFAAWVGLVPRQHSTGGKERLGAISKRGNPYLRRLLVIGAQSVLRWGLARLAKASPWLQGLLARRPLNVVATALANKMARIIWAMMTRNESYRTPVIVAAA

SEQ ID NO: 324596 - protein, 330 aa, unidentified
MYSFFIGIDVSKSKLDVSYCLFDKVIYLGEFPNSTVGFTSIIMELKSKVNYELSHWFFCFENTGVYSKGLVSWLHSYDLAFREENPIQIHKSLGLKRGKDDRADSKAICRYAFEKRDTIQASVVSKPLIVSIKKLVLRRDLLIRQKTAIQKSYGAQKQVLDEHLLTLFESQTAQLVNLLEKQIAELEQEIKMCISNDNQLNNNNELAQSVIGIGPIISAFMIAYTNNFSSFKESRKFASYIGVAPFPNSSGEYRGKTKVSQLANKKIKSLFSNAAFSAIRHDPQIANYYAKKLSEGKPKAIIINAIKNKLIHRIYAVIKRGTPYVKFQYI

SEQ ID NO: 324597 - protein, 416 aa, unidentified
MDVLHERCAGLDISKKDAKACVRTPSTKRRGSFTTATTTWGSTTNAVLALRDHLLAAQVTLVVIESTSDCWKPFYYVLAEGLDVILVNARQVKNLPGRKTDVLDAAWLAQLGAHGLVRPSFVPPEPVRELRDLTRARTTATRERGRVVQRLEKLLEDTGIKLSAVASDIMGVSGRAMLEALIGGEGDPQVLADLAKRKLRNKIPELTEALAGRFRAHHAFLTRLHLDLDHYDQLTTMIDQLTGRIEEAMAPFRGVLDLLDTIPGINQPTAEVIIAETGGDMTRFASAKHLASWAAVCPGHHESAGRTKNTKVRPGNPYLKGALGLAAFGAVRTKDTYLQARYKRLTARRGPLRALVAVEHSIITAIWHILTDNVAYQELGGTYFTQRDPERATRRAINQLNQLGYTVTLNPRENAA

SEQ ID NO: 324598 - protein, 402 aa, unidentified
MNFSVGFDWASQEHAVSVLDATGQVCWQGRVEHSADGLAELLRQLARFGPPAGLPVAIERPSGLVVDILMDAGHPVVPIHPNALKASRPRYSAAGSKSDPGDAFILADLLRTDGHRFRPLQPLSDATRALRALVRSRDDLVVQRGALANQLRALLERFWPGAAAIFADIATPIALAFLSRYPTPHSAERLGEKRLAQFLTQHAYCGRRPVPDLLARLRTAPLSQTGELEAEASGDVVRALVAVLLPLLAQIQQLSAAIAAALSQHPDGALLQSLPRSGSVNAAQILAELGDDRTRFPTNEQLAAEGGVAPVTRESGKHRGVAFRRACNKRLRQALTTFADNSRHGSPWAAAIYAAARRRGCRHPHAIRILARAWIRVLWRCWQDRRPYDVTHHRGAQGAAAA

SEQ ID NO: 324599 - protein, 344 aa, unidentified
MTKVTTVGIDLAKNTFVLYGLGLKGHCGWKRKVRRNQLLEQLVRLEPCTVALEACGSSHYWARQIRALGHQVELLPPQHVKGYLRGQKNDYNDAQAIAEASEHGRIRPVPTKNVEQQDDRMLHKLRQGVSKDRVRISNQLRGLLAEYGVIIPQGVAALRRELPRALEDADNDLTERSRQLLNRQYQHFMKLEKELAWYDQQVRQRSKQDEACRRLQAVPGIGEVVASLLKSWMGDGRQFRRGRDAAAALGLIPRQNSTGGKDVLLGISKRGDPYVRAQLVHGARAVVARADGKADRLSRWIQRLKAERGFNKATVALANKLVRIAWVVIARGEHYQPLEQRLAV

SEQ ID NO: 324600 - protein, 341 aa, unidentified
MEKFIRTAIDLGKNYFQVHGLESEGGRSISRKVKRSRMHEVYSQIAPCRVGMESCGSAHYWARQLTAMGHEVVLIPPAYIKPYVKRGKNDAVDAAAICEAMSRPDMRFVPIKSADQQAVLMLHKTRELLVKQRTMAVNALRGHLAEFGIVAARGIGRVDELLALAEADAALPHIARAAVACMAQHLEGLDLSLETMEEEIAKAHRQNPTSRLLDEIPGIGTLIASVTAASVPDPGVFKSGRDFAAWLGLTPRQHSSGGKEKLGAITKQGNRYIRKMLVTGATSVLRVAGKRKGALADWINALRARKPERLVAVALANKLARICWAIMTTGEGFRTEMYVKA

SEQ ID NO: 324601 - protein, 333 aa, unidentified
MREAPTTSSASLSLGIDVGKSALELALSNGEGPIAKTSVSNDSEGHEHLLSWLHEQEANPEETFVCMEASGGFEKAIASFLYEKGYGVSVVNPRRIKGYAKSQLQRTKTDPADAALIARFGDRENPRPWEPPEAAQSRLQELTRARQALQKEKTRTQNRLDEASDEAVRRTYEDLLEEIDGKIEVLEEEIQKQIEDNQQLRDRCQLLETIPGVGLQTAAIVISELGSADRFDSARQAAAYAGLVPSHRESGTSVRGAPRMSKVGNGRLRRAMYFPAMSALRFNPAVKALGDRLEERGKESMVIIGAAMRKLLHICYGVLKTGRTFDLSLHPTP

SEQ ID NO: 324602 - protein, 460 aa, unidentified
MKHLTHCVGIDLARKAQSKAVIASYPFDLDEMPKRAFAFSHDVEGFQALHAHILKIVGANSLKDVAINMEPTGPWRDVSSFFQNQGAAVFFTRTDVVSEVRKAHSRYAKTDRIDSFTLAGMPRIFPKRMIPFTPREERLEILSQYASQRFQIVKDVTRWKNRLLARLELVWKPLLVSLEDEAVFTQSMRAFWKRFPHPADLIQLGSKRFSTWFESHMHGALTPQMEEILWNAGIKAECLWTLLRKGAGERETLCWMIVRDLNIISGLEKQQEAIEKEIEKARKKVPECPLVDEIPGVGPVVSVNLASVLSPASRFSNTRKCSAYTGLVCRKKSSGEKEILGLRITKAGNRRIKRDLVLAADVAMHRDPQLAAFAIRLLTAGKHYNKVRVAVGRKIAVRAYSLLKRYERGEKNVHYEFRDLKGQPVSEQEAKALAQTLWLKYRDHEKRTIPAEQKRKPAGS

SEQ ID NO: 324603 - protein, 345 aa, unidentified
MTNMNYIGLDVHKKTISYCVKDVSGRIQQEGKIGSTRRELDCWMKTLPQPWTVAMEATIFSGWIYDHLLPHATQIKVAHPLMLRAIAAAKKKNDQIDASKLADCLRCDFLPECHMMPRAIRDRRRTLRYRHLLVRQMVQMKNRVSGLLMETGVEYNKQRLHKVSYFRELLSANEEVPPSIRPLLKLSRETIERCQKTEYALVSSLQRDPVLADRIKRLRTVPGVGPITALTWALEIGDVSRFRSIKQAISYCGLCGDERSSADKTMRMPLSKQRNKHIQRALVEAAKLAPRQSHELAVIYDQERQKGNSNRATLAVARKMVAYLLAVDRQQRDFVPAEERRTSAA

SEQ ID NO: 324604 - protein, 342 aa, unidentified
MYYIGLDVHKKTISYCVKDASGQVHREGTIGATRNELDWWIKTLPQPRIMAMEATIFTGWIYDHLLPHAEQVKVAHPLMLRAIALAKKKNDRVDAGKIADCLRCDFLPECHMASTEIRDRRRTLRYRHLLVRQMVQMKNRISGLLLETGVSHNKQRLHKVGYFRELISNNEEVHENIRPLLRLSRETIVRCQKTEYALVSSLERDPLLAERIKRLRTVPGVGPITALTWALEIGDVARFRSVKQAISYCGLCGEEKSSADKVLRTPLSKQRNKHIQHVLVEAAKLAPRQNHELAVVHERETQKGNRNRATLAVARKMVAYLLAVDRREREFVPAEGRSTAAA

SEQ ID NO: 324605 - protein, 436 aa, unidentified
MDSIAAGPSKPSDAAGEPFRSLTHFGGFDWAMDEHQFAVVSPDGSVLLNLRFTNDAEGWAQLRARIAAYPRLSVAIETSCGPAVERLLESGVIVYPLNPKVAERFRDRKSPAGVKNDPLDAWCFADALRTDGQGWRALRPLDPLTAELRIYCRDEIALIEQRTAMILQLRAALHEYYPTALAAFDDWTHAGTWDFVLSFATPDALVKAGKRKWEKFLHAHKLYRPQTAQKRLDLFAKATEFASPSQAVTNAKSLLAITLARQLRTLQAQLDEYRNRIMQLFSNHPDRDCFGSLPGAGAKIAPRLLSELGNDRARFDSHEALQAYAGTAPVTQQSGKRSLARMRRACNKTLRATVHLWADLSRPLCAWAQAYYQQKKNQGMGHAAALRCLGQRWLKILWKMWHSGKPYDEALHTRNQVSHGSWVIGLMTPPLTPTTQ

SEQ ID NO: 324606 - protein, 340 aa, unidentified
MEGLYAGSDLHGNSNFLGIIDAQGKRVFKKKMPNELALIRETLQPFQGELLGIAVESTYNWYWLVDGLMEAGYRVQLANPSAIQQYSGMKHSDDRHDAFWLAEMLRLGILPEGYIYPKEERPVRDLLRKRGHLVRLRTSLIISLQNILSRNLGRKVNVNDVKAVKEDRISVLLEMDEDLALAGRVSKEAIDHLTRQIHKIEWVVQKRIVLKEPYRYLLTLPGVGKILSLTIMLETGPISRFETVGDYVSYCRKVPSQWMSNGKWKGAGNRKNGNKYLAWAYSEASEFARQLYPEPRAYYNRKMQKTNAACAHSALAHKLARAAYYIMKDHVPFRPEKLFG

SEQ ID NO: 324607 - protein, 416 aa, unidentified
MNAAGIDVSSRKSTVAVLRPFGEVVKLPFDIVHSAEGFASLIRQLKSIEGETRIVMEHTGRYYEPVAQILHEAGFYVSTVNPLLIREYGGNSLRRVKTDKADAMKIARYALDNWSELRDYTPMDTIRYDLKTLNRQFQLASKQKTAASNNLIALLEQSFPGVRKCFDSPVRKDGTQKWVDFVYTFWHADCVRKNSLNAFTERYRKWCKRHGYFFKQSNAAEVYELARSVITLVPKGPVAKVLVQQAASQLTSISRSVETYRAEMNRLASMLPEYPVVMGLYGVGESFGPQLMAEIGDVRRFDRKQALVAFAGIDPMPNQSGEKNVRSNKSSKRGSPYLRKTLFSIMMCLLQSAPADEPVFQFLDRKRSEGKPYYVYMTAGANKFLRRYYAKVRDYLATLDNFPPVDMDSTGLNHLN

SEQ ID NO: 324608 - protein, 366 aa, unidentified
MYYVGLDVHQKRSSLCILDGDGKLVKRLEVKGPWPKLIEAVDLHVPRPFAVCYEASCGYGPLHDRLRAAGRAERVAVAHPGQVRLIFRSKRKHDRVDAERLAKLLYLGEVPQVHVPGVDVRAWRGLINYRRKLVGRRAAAKTQVRALLRGLGVVEGVPRGLWTAKGLAWLKDLALASAADRVRRDVMLDDLDELGERVAKVEAELDRIAKGHPGVALLRTIPGVGPRTAEAFVAHVDDVGRFARVKQVGCYFGLVPCQDASADRNRLGHITKDGPAGARWLLAEAAWQGRRRSPTVRAFFERVMRDDGDRKKVALVATAHYLARVMAAMLRSGEAWREDPKASEQQQQQQQQQQQPTTTTTTTTNR

SEQ ID NO: 324609 - protein, 316 aa, unidentified
MISAEIERCAGIDVGKKFLAVCIMVGPLTAEPRVEHRKFGTTVADLEALRAWLQQECITHVAMESTGSYWKPVFNILEDAVQVCLANPKQVKPRKGHKTDKKDGWWLAHLLRHAMVQASFIPKRDIRELRDLTRRRKRLLGAGSSEKNRIQKVLEDANVKLGNVLSDIFGVSGQLMLDALLEGKASAEEIAQHAKQRARKKIPEIVAAVQQHRSDHHRRMIRLSVEHMEFLEKQICRLDEPIEAKIREAGLEKQWQLLQSLPGVQATSAATILAETGPDMEQFGDPGHLSSWAGVCPGNNRSAGKNKSSHTTGSNP

SEQ ID NO: 324610 - protein, 268 aa, unidentified
MNATTAAIDLAKNVFQVVLVDANYRVLEQHRLTRAQFERFFDNRKVSRIVMEACGSAHHWARVFGARGIEAILLPAMYVRAYVRRSKTDAADALALLEALRCADIVAVKVKSVEQQSLQALHRTRSLWMGTRTSRINALRGFCRELGLHVPIGARTGLEAMGRAVADEQSPITPLLRPIMLQLLDEIRLLETRVAQLERQLAQLARESHACKLLMSIPGIGLLTATAILAATAGSVAHFKSARHFASWFGLTPKENSSGTMRRMVTVR

SEQ ID NO: 324611 - protein, 361 aa, unidentified
MAETMTVAGFDVHARSVCGAALHLPTGELVRIRFGGGVEGPIAWLRSLPGPVRACYEAGPTGFGLYRAAVAAGIDMRVVAPSKTPRGPGDRVKTDRKGAELLARLLLSGSLKPITVPSPRVEAARELVRAHDAVRRDLMTARHRVSKQLLRHGRVYPKPSTWTQEHRRWLTRQCFEEAMTELAFADAIAAVEGLTARKTALAERISRLAADGEWWPTVARLRCFRGIDTLTAFALHLELAADWQRFERPKALGSWLGLTPSLAQSGESSHSGSITKTGSTLARRLLVEAAWHYARAPRIGATLQNRQAGQPDHILQIANRAQLRLHRVYHQMRGRGKPHNVTTIAIARELACFLWAAATTD

SEQ ID NO: 324612 - protein, 357 aa, unidentified
MLSSNVKYIGLDVHKEAIAIAVVNGAGKLVMESIVENKSSTVLDFLHGLRGELHVTLEEGTWAAWLYDVLKPHVREMVVCNPRRNALLKEGSKSDKIDARKLAELLRAGLLRAVYHGENGLQTLRELARSYLTISKDLKRVKNRLKALYHSWGICCAGKQVYAARHGEQWLSKIAQVGVHRRAELFYQQLDGLLVLRNTVRGELLAESQKHQAVKILRQVPSIGPLRAALLLALMQTPHRFRSKRQLWTYSGLAVVTHDSAQHRYVDGQLQRSKKPQQIRGLNQNHNHAMKEIFKSAALNASRCAGPLQDFYARLLAKGMKPDMARLTLARKIAAITLALWKKGGSFDVEQLKSQAA

SEQ ID NO: 324613 - protein, 395 aa, unidentified
MEFLKYGLGIDMAMEKFDACISIIDKLQHVMIRSQCSFNNNKKGFEAFILWVTKNTELAIPAVYLMEATGIYYEQLAWFLHNKNRSVSVVLPNKAKKYKDALGLKSKNDRIDAKGLAQMACEQNNTTWKPLTSNIYLLRLITRQIQNVSEQSTALKNQLHAMEYGMYRDKAIEKMYAGQLNLLQKNKKSLQLRVEQIVEKDEILKRKFKHIGKIKGLGLQNLAVIVAETNGFTAFENVAQLVSYAGYDVVENQSGKRSGKTKISKKGNNHIRRCLHFPAFNMIKYEVAPFKNLYERVYAKNKIKMKAYTAVQKKLLEFIYILWKKDEAFDPNYQDKKSRDVEPVSSFASVPQEPSIACGNKETKLKFIKQKITPAITRVTQDKHPSKYRRMPSFA

SEQ ID NO: 324614 - protein, 400 aa, unidentified
MVKTSFSGFLGVDISKDKFDAHCIDMNGEKQFYLSRAMDRTGFEKLVEYLEKLPIPRENLLIGMESTACYHINLFSFLLAGGYTAIVINPLLIANFVKMQLRKTKTDKKDAVVIAQFLLMYADTLVHTSVTPNVSDLRDLSRQRESLLSQMTALKSDMKRILTMIFPELEKLTGVFTKSILQLIRRFPSAHAIVQADPAEISQLLIEHSMGRNSTATTQAIIQAARTSVGTTSPSRELILKQKADVLIHLGNHLKELTAMIIDLCRSDMGDDIDIMTSLRGIGEKTATNFLVEMGGDIKKFKDHRKLIAMAGLDPAIYQSGKHDGQGRITKRGNRHLRRVIWLMTIRVIQFNDCFRQHYQKRRQDGLPFKKAVLATAHKLLRVIFAMLTQRTFFVYEVNS

SEQ ID NO: 324615 - protein, 401 aa, unidentified
MQDTQQHGAVDVFIGVDVGKGQHHAVALDRNGKRLYNKALPNDEAKLRALIAELKTQGQLLFVVDQPSTIGALPVAVARAEGVLVAYLPGLAMRRIADLHAGEAKTDARDAAIIAEAARSMPHTLRSLRLADEQLAELTMLCGFDDDLADQVTQTSNRIRGLLTQIHPALERVLGPRLDHPAVLDLLERYPSPAALAATSEKTLANRLTKLAPRMGKGLATEIVQALSEQAVTVPGTQAATIVMPRLAQQLAALRKQRDEVAAEVERLVLAHPLWPVLTSMPGVGVRTAARLLTEVAHKAFASAAHLAAYAGLAPVTRRSGSSIRGEHPSRRGNKVLKRALFLSAFAALRDPVSRAYYARKIQQGKRHNQALIALARRRCDVLFAMLRDGTIYQPKSAPNA

SEQ ID NO: 324616 - protein, 356 aa, unidentified
MHASPVATRLPVHCVDLAKEKFQVHSFSHSGECLKRCTLTRAQFARRFSDPQLPRGLIVMEACASASYWCRRFEALGHRTRQLPAQFVARHRLGSKNDGNDADAIHATHCDLRVRTVPTKSLAQQDLAALHSARQLLVKQRLQLSNQVRGLLAERGCVAGKGERGFHELLSRAAARDEADVTEPLLAVIGLQLAVLRLVEAQLRTLDRQVEQLARQLPQAQLLTSIFGVGPLIATAFVAEHGAGVARYADARQFAASLGLTPREHSSGNTRRLGGITKWGDAYRRRLLIQGASSVVLHCQRHQDPLSDLAHRLLERHKPRNVVTTAVANRLARIIYAVLKHGEAYRRSPPELARTT

SEQ ID NO: 324617 - protein, 345 aa, unidentified
MEEKMKHFVGLDVSMKETAVCVVDDGGQRVWEGSVPSSAEAIAAIMLEKAPDLVRAGMETGPQAVWLWHALREKGISVDCIHARRAAAALKLQANKTDRNDALGLARLVHSGWYEPVAIKSFERYRMRAVLTARERIVRMCTTMVNQIRGLAKTFGLQLSTGKGQVFEQSVRRALPVDAVLRDLFESLLSVLSGLKDQRRAFDRQLARFAREDEACRIVSSAPGVGSLTAIAFVTAVDDPTRFRSACDVGAYFGLTPKRYRSGEVDIGGRISKTGDRLTRKLLFEAATVILYRASPSIALKQWGLRLSARSGSWKARVALARKLAVTLLTMWKTNTMFENRSFIT

SEQ ID NO: 324618 - protein, 365 aa, unidentified
MKKISTTAAQRIEKVEGQNLTIGLDLGDRSSWYCVLDEAGEVLLEQKVATTPKAMKEVFGGMPRSRIALETGMHSPWVSRLLSALGHEVIVAHARNVRLIGESRRQDDRFDARTLARLARIDPDLLGPVQHRSRKAQADLTVIRARAGLVRARTSLINTARGLTKSYGERLRGCSPRKMNRELAAGLSPELQSALQPLLDEIESLSEHIREYHDRVQQIAQESYPEVARLEQVKGVGTLIALTYVLTLEDPRRFRKSRDVGCYLGLRPGRRNSGQSEPQLHISKEGDPYLRTMMVQSAHHILGPFGADSDLRRWGLKLAERGGKNAKKRAVVAVARKLSILLHRLWVSGEAYEPLRNQRGLAAAA

SEQ ID NO: 324619 - protein, 355 aa, unidentified
MQKIYIGVDFHARQQTICYLTTDSGEILLHQLKHEDKAAVRSFYAQFSGPVIVGLEASGYSPWFERLLEELGCEVWLGHASEIRRRARWRHKNDRRDAALILDLMLQDAFPRLYLPPLPSREVLRMLRYRQKLIKIRTIAKNSLQALALQAGLAKGPHLFTKIGLQELGRAPMSPAMQWQQKQWLQLLEPLNQRLLETMLWLKQQSQADQRISRLRTHPGIGLLTALCLVHSLEPVSRFANTRKVTAYAGLDPVERSSAERQRFLGISKGGSRVLRFLLVEAAHTALRKDAELSRFYQRLAERHGRPKAKVAVSRKLLIRAFIMLRDEIDYAEFQRRAVAARSAPPAHGHLRPEP

SEQ ID NO: 324620 - protein, 350 aa, unidentified
MKYNTQNAKIASITEETLVLGIDVGSETHYVRAFDWRNYEFSDKPLAFSNDEAGFLTFMAWVEDIKEKAGKTAVIPGMEPTGHYWFNLGKFLQDSGMRPVHVNPHHVKKSKEMDDNNPDKNDRKDPKTIAALVNEGRFSYPYIPTGVYAEIRSLSNLRFQTQEEITRIRNRIARWISIYFPEYKDVYGKLDAVSGMMVLKEAPLPVQIKELGAEGINQIWRNAKLRGAGMKRAKNLLSAAEHSVGSQEAPEAASMEIRNLLEDYEKYSSRMDELMDKIEAKIKEVPYVDKLLEIKGIGLKTVCGFIAEAGDLSRFDDPKQLQKLAGYAIVKNSSGKHAGESHISYRDGRD

SEQ ID NO: 324621 - protein, 387 aa, unidentified
MTVCTVNHQPAATHGETARCLFAIELSRKSWVIGIITPLSAKISRRILNGGDWRGLLELIEEVRARVSRETGRALEVISCYEAGYDGFWLHRQLEAHGIRNYVIDPASLQVDRRVRRVKTDRIDTERLLRSLMAYLRGEPKVWSVVRVPSVAEEDARRLHRERDRLVSERVQHVNRIKGLCALQGIYDYQPLRPQAMAGLEQLRTAQGAALPPRLKSEIKRELHRLELVVEMIASLEAERDTIVEDKASTHVNAKKIQNLHKLKAIGPEFAAVLVGEIFHRDFNNRRQLASYVGYAPSPFQSGNVAHDQGISKAGNRKGRTTGIELAWLWLRYQPDSDLSVWFRARVGTVKGRIRRIAIVALARKLLVALWRYLETGLVPRGAVLKG

SEQ ID NO: 324622 - protein, 423 aa, unidentified
MELMHHCVAGLDVHKNSVVACIRTMSGNKPSRECKTFATTTDGLVSLLEWLRSSTISVAAMEATGVYWRPVWKILSDGEFELILANAAHIKAVPGRKTDMNDAMWIADLAAFGLIKASFVPEEKQDELRTLMRTRKQLVHEQTRHVQRIQKTLTEANIRLDSVLSDVMGASGRRMIEAMIAGVRDPRKLAGLANRAVKAKPKELYDALHGRLTDSHRFILKLHLGQWDAIEASIRSLDREVEAHQARMDKEDRADMARFSEAMRLLESIPGVSRLSALTLLSEIGLDMNRFPDAGHLVAWAGLCPGQNESAGKRKSSRLRKGAPWLKTMLVQCAWAAKRTKDSYYKAQFFRLQAKRGPQKAICAVAASILTAIYHMLKNGIFHNDLGADHFDRRSRQTKAAHLAKQIAKLGYQVTLQPAAHAA

SEQ ID NO: 324623 - protein, 387 aa, unidentified
MMTTTCRHESTAPSTTTITLLLAFELGERRWKLGFTTGLGQRPRIRSVPAGAVDQVLEEIARAKRRLKVSEETAVMSCYEAGRDGFWLHRYLVAHGVTNHVVDSSSIEVNRRARRAKTDKLDLAGLLNLLARYLIGDRRVWRVVRVPSVAEEDARQLHRTWESVQQDRSRLLCRLQGLLVTQGVRLRIGEDFLQRLDGARLWDGRAVPEGLKHRVQRAWAQLVLVNTQLEELEAARTTLVPDHETATGRYVEVLPTLRGIGPIGAWVLATEIFGWREIRNRRELGALVGLVPAPYQSGDTDHDQGITRAGNKHVRRLMVQLAWSWVHYQQASALTRWYQGRFGSGSKRVRRIGIVALARKLLIALWRYVEQGEIPEGAIVKTPAPAV

SEQ ID NO: 324624 - protein, 332 aa, unidentified
MEQISRIGMDTSKHICQLHGANTAEEPVLRKKLRRKEMFAFLEQLAPTVIAIEACGASHHCARLLQSFGHSVKLIAPQLVKPYLKRGKNDAADAEALCEAMSRPTMRFVPVKTAEQQAALMLVGVRDRLIRNRTQLSNAIRGYAGEFGLTAAKGKAHLDPLLERIQADESLPALARELFAVQGQEYAQLQAQIDQVDARLIAWHRADECSRRLAKIPGVGPIGAVLLTMKTPEPELFRSGRQFAAWIGLTPKDHSTAGKVRLGGITRAGDQGLRSVLVVGATTVIQHAQRGGRPSPWLTELLKRKPPKLAAVALANKACPGEGRGRRASPGN

SEQ ID NO: 324625 - protein, 328 aa, unidentified
MGNLTYIGIDIGKYQLSCSLPGQKVVDFSNDRQGIQSLLKLARSLAVPLEQLCFVMESTGGYSAFTAETLLELADVKVSIVPPACVSGFKKSFISRTKTDRTDAAAIRKFAESRQPAPWLPPGLAARRLRELQLLMDGIRNTIARQKCLCEKLECGHRPDQFALDSIERQLEAQQAEYELLEAEFEAVIAADATLAEDSANMLSIPHVGPGLRNAILVFCYQQLKHSAQRKLLSFCGLTPEENQSGQFKGHTTMSKAGEGRIRRVLYMAALGAVRPDGLMYDYFQRQKAKGKHGKTILVGVMRKLLYLIQGVVKSKNKFSEKKFLANA

SEQ ID NO: 324626 - protein, 319 aa, unidentified
MQSKLTFGMDIGKNEVVVACHEGAFAILKMANAVAGLRRWLGSVPAGSRLGLEATGGYHEPVAELAYSLGFTVYILNPKDVHFYARALGARGKTDRLDAQIIAAYVAEHSVRLHPFVPLSADEKLLRELARRRATLVNAKSMLQQSLRVLPGFEREGRELLRAMGSFADRLERKLAQIAARSSERATLVKRLQTIDGVGTLTSIRCATLFTRVPFHSSDAVVAFFGLDPRPNDSGQHRGRRRLSKRGPSEDRRLLYNAAMSAIRTPAWRPLYLHLRNRGLASTEAIIIIARRIVRIAFAMYRNHSNFNPRLVPRPYCPA

SEQ ID NO: 324627 - protein, 458 aa, unidentified
MRKNKKHKMHKSSEFKQINFNAAGIDIGAEVHYVAVPEGRDPEGQDVRSFGTFTSDLYAIADWLKQSQIDTVAMESTGVYWIPLFEILESKGFDVKLVNPSFIKNVPDRKTDVVDCQWIRQLHSYGLLKGSFRPEEQICVLRSYLRQRALLVSYASHHIQHIQKALEQMNIKLNQVIRDITGQTGMNIIRAILAGERNPKKLAQLRNSRCKNDAKTIAKALHGNWRQEHLFSLQQAVELFDFYQNQIAVCDLKIEEHLSDFEDRSNGQALGKSRKKSGRNKLAFDARTHLFQMTGVDLTKVDGLDSLTALKVISEIGLDMSRWPTSKHFASWLGLSPGSKISGGKVISSKTKKCASRAAHYLRLAAYSLHNSKTAIGAFFRRKKAQLGPAKAITATAHKLARTIYNMLKTGTEYKDMGQDYYEQRYKNRVITNLRRRAKQLGYELNYVKEQQELMQTV

SEQ ID NO: 324628 - protein, 384 aa, unidentified
MKYTQETLRIQATTKQAALNIAFELGNKEWKLAFSDGSRTRYVSIDARKLYQVEREIERARKHFGLAEGIKIVSCYEAGRDGFWLHRYLVSKGIENLVVDSSSIEVNRRRRRAKTDRLDAGKLLGMLQRYVGGEQRAWRVVRVPTEQVEDERNIGRELDVLMAERTMHSNRIKGLLVQQGIVIKNVISKKFLNKLEVACRWDGQRVAGDFKARIVREHERLRMVYEQMRRLKKERAARVQRQATRSMKQVVQLQKLRGIGPESSWDLVMEFFGWRQFQNRRQVAALAGLTPTPYDSGGSVREQGISKEGNRRIRALSIESAWCWLRFQPESHLSQWFEQRFATGGKRMRRIGIVALARRLLIELWRYLNTGVIPQGAHLSRQET

SEQ ID NO: 324629 - protein, 348 aa, unidentified
MAHFVGLDVSVKETSVCVVDDTGKVILEQKVPTEPADIITLLSSLGVSYGRIGIEAGPLSQWLVNALTVAELPVICVETRHMKALLTAQQINKTDRNDARGIAQMMRVGLYKPVHVKTLVAQEQRMLLTSRKLLQRKLLDLESDLRGTLRNFGLKVGVVSGGRYEVRVRELIAGFPRLAAIAEPLLKVRQVMRQQLAVLHKMLLDTVRDDPVCRRLMTAPGVGAVVALTYRATVDQPQRFVHSRAVGAHVGLTPKRYQSGEIDYDGGVSKCGDALLRTMLYEAAQVLLTHGSKWSWLKAWGVRVVQRRGMRRAIVAVARRLAVVLHRMWVDGSEFRWSKDSAAVPTAA

SEQ ID NO: 324630 - protein, 393 aa, unidentified
MPRKRILVKSIDTSISYQVIGIDLAKHLVSACLITGAGEIFGIDRLTYDDLLKSAERMSPTLFCMELCPEVHYLAEKLQGYGHHTKVIDGAAVKEYIKTHFGGQKTDLNDAQAIAFLSLDTNLPEITPKNTSNSVLSSIQAVREQFRKEYIQSFVSLKGICQRWGLPISKGVMNKNKVEERVSESKKIPQEVKDWLLELLQSCRELQKRLNKISKYLKEYADNDEICQKIMSVPGIGPITATRLKATIGDIQRFEKPKSIVAYYGLVPKSKATGHNEKKGGITRRGDRVARSLLIEGAGVVLNLAAKGFLRSKPLNKWIEKKRKLKMPWGKLCCALAAKMLRIVRAILIQGTSFNAKIAGVARCSLPKESRNNVMGNNKLSEIPSPNGSVYIH

SEQ ID NO: 324631 - protein, 330 aa, unidentified
MLMMFPATIGIDISKATFDVALYQNNSYQPGHFSNDPAGFKKLAKWLNKRNVNGRHICMEATGRYGQALALFLYQAEFPVSVVNPARIKAYSDSLLKRNKTDPEDAKVIAHFCATQNPDLWTPPSPEAQELQMLVRRLENLKAMRTQEKNRHHAAISSEAVLANIDHHLNYLNQQIEQLEQQIETLIDSHPDLKRQRDLLISIKGISHTTAAKFLAEVPDIHQFESAAQLAAYAGVTPKRRSSGTSVHSKGHFSKTGNVHLRTAFYMPAISAMRWNPIAKSLVERLQDRGKESKVIIGAVMRKLIHLAYGVLKTGKPFDPNYLQNLQIAS

SEQ ID NO: 324632 - protein, 320 aa, unidentified
MMSKIILGIDVSKKTLDAALIFDNRILCKQFQNSLEGFKFLAAWLESLQITCVHACLEATGVYGEAVALFLHEHGHLVSVVNPLRIKGYASANMQRNKTDRLDARLIADFCLTQEPEEWQPPSAEVKHLQSLVRRVEVLAEMRQAEENRLANAASEIKPSIRRIIGLLTEEIKELEQQIKRHVDQHPNLKEQNQLLQTIPGIGRRTANLLLSEIEFERYSSARSIAAQAGVTPRKRQSGTSLKQTNLSKLGNARIRRALYFPAIVAKQHNKIIKEFAERLKKNGKTPMQIVCAAMRKLLHIAFGVLKHRRAFDASLAFSA

SEQ ID NO: 324633 - protein, 364 aa, unidentified
MQRYIGLDAHASSCTLVVLTAAGKKVKELVVETHGEALVEAIRLVPGRRHLVLEEGTHSAWLHEILERHVQELVVVPVRRSKGQKSDSIDAQRLAEALRTGAIEQPVFKAPRKFAPSLVQIARSSARLRLPLRDLARGHRMLVRDVVRVQTRVKSVFRSRGVSCPGKTVYGRRQRDAWLAELPPSSQVLVSMLLAQYDALVEIRNQAERALLAECKQHAISKVLRTVPGLGPIRVARLLPVVVTPHRFRSKRQFWSYCGFGVVMRSSADWEQRPGGGWERTGRPRSCGLNHRFNHGLKDVFKGAAQTVLTKHTDEALCAHYARLCAAGTKPNLAKLTIARKIAAITLAVWKNKEAYDSARLQAA

SEQ ID NO: 324634 - protein, 472 aa, unidentified
MAQAIRKQDGKARSVQAGSGGTTELGVIDAHAAGIDIGATEEWVACPPKDGKSNVRKFGTDTPSLGELADWLASEGVVSVAMESTGVYWIPIFELLEARGFRVILTDSRTLGRVPGRKTDMLDCQWLQQLHAHGLLRGCFRPKDATLAFRSLLRTLRTLKAQQDDWIRRMQKALDQMNVRVHRAVSDITGLTGMRMVRAIVHGERDPAKLVALRDPRCRKSVAQIERELTGNWREEHLFNLGMALESYDHFGRQIEATLQRILIELEAIRKQREVTGLSVTPPGEVKEHSNPAKACSMERYGHEPLRAALAATFGVDLTAIEGVGAETAASILGEIGPEIQEAFPDAKPFVAYLRLAPNLAISGGKPVKGKKKMRQGSPVVHRLLRTSAASVRRSKSALGAYYRKTAFRKGAGTAVFATARKIAQHVYRALAHGIPYVTMGIEEQDRQAAERQRFNIERQAAKLGLKLVPAV

SEQ ID NO: 324635 - protein, 452 aa, unidentified
MPKKRQNREVKLPVLRPDAAGIDIGAEEIFVAVPADRDAEPIRRFPTFTQDLNALADWLTKCEIRTVAMESTGVYWIPLHQILEGRGFEVYLVNAQYVRNVPGRKSDVADCQWIQYLHSVGLLRASFRPPNEICAIRSLWRHRESLIQMASQHTQHIQKALDQMNLQIHHVLSQITGWSGLRILDAILAGDRDPIALAKLCNWRVRTSRDIVAKALEGDYRPEHVFTLRQSLAGYRYYQNLIAEIDEELNKYLRALPKATEAGTSPPPRTKTRVYQKQHNDPAFDLRGELYRIAGVDLTDIPGINELTAQTIVSEIGTDVSRFRNASAFASWLGLCPEKQVSGGKVLYTKTRPVKNRVANALRMGAQCLYHANNYLGEFFRRMRRKLGAPEAVTATAHKLARILYHVLRTKEAYTESVFLRHDQEAIKRAEDRLRKQADKLGFQIVPKPTEP

SEQ ID NO: 324636 - protein, 341 aa, unidentified
MVEYVGLDVSKEETSICVKNANGKILAYGKALSDPDSLFDWLREHCICPELIVMETGTMSGWLTRGLRAKGLPVECVDAVRAHAVMKLKRNKTDANDAELLAELARTGFFETVTIKSLPAHHVRSLLKARDQLVRQRKDIDNTIRGLLRSFGIKLSKGRRFPERVVDAIADHPQYRVFIIPLLTARDGCADALKRLDRQVKQLAGKSDICRLLMTAPGVGPVTSLCFSATIDDPNRFRRSRSVGAYVGMTTKRYQSGEMDYTGRISKQGDNMLRAYLFEAANAMMNLVKRAHPLREWAFKLQKKSGSKKARVALARKLAVILHAMWMSGEAFRWPDTEATA

SEQ ID NO: 324637 - protein, 403 aa, unidentified
MEGPLISLDVSKGKSNYRFFENGTDRKGKKGVIRHDIQGFDSIRDEAEKMEKRLRIKPSVIFESTGVYSDVVEKYFTDKGFDVYVISPLLSASMRKEGVRPAKNDSLDTLSIAKVFYSKDDLRKCSENDKKAERLREMSYELDMMNRRIRPMKCQFLRLLDKVWPCLDEVSDYSSRFMLDFIIAFGHPENIKTVKGVLSVIRKSEMGTAGRKDKIAQDLFDYCHTHLSAVSKDSSYVELLKRMAIELKAMAKKKSELIDRMAEEARNKDEFVRLLTIPAVAKTTALKIMARVGDISRFRNAEALVAYCGLDPRVYQSGKMTGEHRTITKKGDRILRSTLFLAVKLMVMLYPDTKVARFVAAKAKNGLSYKQAVVAGSAKLARIIYSMLTHHENYVEFNADIVA

SEQ ID NO: 324638 - protein, 338 aa, unidentified
MNIVILGIDLGKTTCSVVGLDADGRVVLRRRLRRDGVVAFAAKLAPCAMAMEACCGAHHMGRALAALGHDVRLMSPEYVRPYVKAQKNDDRDAEAIAEAATRPTMRFVELKSEEQLDVQTLHRVRDRLVGERTSLTNQIRSLLLERGHTVAQGHARLRGLLRELLDADTDALSPRMAFLLRDMRTRWEELDRRIAAFDAEFAAMARTDERARRLTAIPGIGALNATALVAAVGNAATFSKGRDLAAWLGLVPRQITTGGKPKLLGITKRGSRYLRKMLIQGARAAMPVVSREDTAIGKWLRALLVRAHPNVAVVALAAKMARIVWALLHHGRSFRVVL

SEQ ID NO: 324639 - protein, 455 aa, unidentified
MRIFIGIDIGKEFNLASFLNENGVEIDKRFKFKNNHLGFLSFKDNIDKLTYDCDFNYDDVLIGFESTGHYWINTDWFITEKLNIKTVMVRNNAVRHTRALNSQGKGKNDSLDSRTIAECLKNGYYFDVQGRKEDYIVLRRLTRERSELEKEIARYKNRFRAWLDVNNQIFLENFSNVFSAGALALLKVYPSPLDIIQDSYLEVREKLKEVGYKRTNNTFRIYYEEARTYKNIINGITYADRLEINEYIEALEMYMKKKESLDAKIEALMNFLEGKVYTSLSQVKGMPVAQVASLLAEIGNVNNFKSARHLISYAGLNVQGEGSGKNKGYSWISKTGNRKIRKELYVITFNLVRHNDYFRGLYCYYKSYKRANEKSSKEMLIALACKILRVIYGMLKYNMEFDLNEMLKNYDFRNINKEKFIDEFLGSSEKKQKIIPQEIEDIFLSNRKSNEKSDD

SEQ ID NO: 324640 - protein, 395 aa, unidentified
MNKPTANKHTMNKELLFLGLDVHAKSLTLALAEGGGGEARLYGTMPNDLHAVEKVFAKLKKAHPGVELRVCYEAGPTGFVLARRCAQLRIDCQVVAPSLIPSRAGDRVKTDRRDARKLARLHRAGELSAVHVPEASDEAMRDLCRARTDAVQDLRRGRAQLKAFLLRHGYRYTGKSAWSEAHQRYLRELVLPHPAQRVVLEDAIRTIGAAGERIARLEEAMAALLESWPMKPVVQAVMGLRGFARVGAMVLVSELGGAWRFDHPRQLMAYLGLVPTENTSSDKRRQGRITKTGNGHARWILIEAAQHYRLSPKVSKELSARQQGLSAEVKACSWKAQTRLHQRMMQLLARGKERNKVTVAVARELCGFLWHIFRLMEPRMRPGRTAAALKKEETR

SEQ ID NO: 324641 - protein, 410 aa, unidentified
MTKAKSNTNNTIWVAIDVAKHKHDVLIEYPNGTRKILVIKQSQEEFDRLKTYLKQENSDVTIGFEATGYYHRLLAYYLLKQNFTVKLISSIATARTRESQYNSRDKNDKKDAQVIMYLLKSGITQHYHDPLVHNILDIQELSNTYRMTSLRKTKLQHSILNHYLPLYFPEAERYFCSTRANWFAKFFYEFPCPSAITQYSLDTFIKKSSKLAGRKVDKENWLKDVYKTAKNSIGLPINSNSKTIDMFKLTLNEFSQLCTLRANIEEQADNYLCDNIDYNRLKTVPGIGPIIALTILSEAGDIRRFSHVRQFLKFCGFDLTTKQSGNSRGKSTLSKRGNADLRKMFWMAGTIALRMRENTFRKKYENYMKESPKNADVKRKAYVAVAAKMVRVVYSMITHDTDYYCTHESQ

SEQ ID NO: 324642 - protein, 309 aa, unidentified
MIAVGIDVSKATLDVGVHQEPMLQQYKNTPAGIAKLVRQLRRRDDVRILVEATGGYEEAVLAACAAGGLWICRVNPRHARDFAKATGQLAKTDALDARLLAEMMAVLSDRLRRHEPAAEWANELKNWLRRRNQVTEQIIANTQQLAMALPLIVRGIKLTLAALRRERTVIDAAMKKLLAAHATPAIGSGKGMGPMFQTALLALLPELGHLDRRQIAKLVGVAPMNRDSGKHRGKRTIFGGRAQMRVALYMATLSAVRWEPELKAHYRQLRARGKVAKVALVACMRKMLGIVNARRRSELRRGDQMACAA

SEQ ID NO: 324643 - protein, 452 aa, unidentified
MPARKDKTMQYQKVLKMLESIPYLSVGLDVGADFTWMSIMLPNGTLAGKPFKIIHSDPQSRELAVAKIKEAQEAYSLKSRCFLESTGIYHIPLLCFLRDKGFDCSVINPIITKNSTNMNVRKLHNDKFDSKKAAKVGLDASLKTSIIPDDEVIDLRNLVRDYYYFKDLQSAVVLKLTAELKVSFPAYRKVFSKVTTQTSLKLLEAYPLAADMLAAPKDILVETIRKTARFGEKYAVSKYDAIRAAAKDAAVFGRALQSSALRIRLYIKTYREYQEHLDNILEDLHKAVDKLEGTPVYDRIFLLQSLRGVGFLSAAVLIAEMGSFDLFSSPKKLYAYFGLDPAVKQSGKFNGDKVHMSKRGSGLARRILHMVAINNLKVDKGTKTPVNPVIHGYYSDKCKSKKKNVAVGAVMHKICNIIFAMLRDNKPFEIITPQEHCERYLAAHPDKIQNAA

SEQ ID NO: 324644 - protein, 386 aa, unidentified
MAQLNDLSRSLVILEQDATLIAVIEMGQSSWLVAGIVPGVERSPLKKLAVDESALLKLLNRWREEAEKAGRRVERIAIAFEAGRDGFWLARWLRARDIEAHVIHASSVAVSREHRRAKTDRLDTELLKRAFLGWLRGERDHCKMVAIPTSKDEDAKRPNRERESLVGEQTRIVNRMKATLIRLGIRGFNPKLKKAAGRLEDLRTPEDEPIPPNTMAELRRDMDRRRLVSDQIRQIEEARLDRLKQTPDDGPHAMLRLLARVIGVGIETADMLVQEVLARNMRDRRAIARYAGLTGSPDESGTKRREKGLARSGNARVRRGMIQLAWRFLLFQKNSALAQWFRARTENARGTRKLMIVALARKLLIALWRLVREGVVPDGVVLRPTQ

SEQ ID NO: 324645 - protein, 419 aa, unidentified
MSFKIFKFNCCGLDVHKTWIYACIGITDSNNRTEYKQARFSSFTKGLNELCDWLAKYNCKDVCMESTGKYWIPVFNILEQHSFWVTLSHPKYTKPMKGNKTDRKDAKWICDLYMCGMVKPSFIPPADIRELRDLVRYRFKLTCMITGEKNRAQNCLTVSNLKLDDVFSDVFGKSSRSITEHILQHPGEKFDIAPFVDSRCKTPITEIQAAVDGAISKEQVVKLRQCLDHIDELNKHISEVEQEILRLSDKYEAALNLIRTVPGFNKNPLTAIQVLSEIGGDMSVFPTAKHLVSWAGCCPRNDQSNQKIKSTRISRAGSYFKPVLVQVANALIKSKKHSEFTSRYKRIKARRGHKKAIIAICRMILTAIWHILSDLKPYTPEGFLESRPVKEEKVLSTSQALNLLKQRGYIIKGEPLAVS

SEQ ID NO: 324646 - protein, 357 aa, unidentified
MITMKMKQWIAMDLSDKEDEVCLIDEAGKKIRSHKIDNRPDVIDQFFSEFDKNIDLTLIIEAGTCSGWISEIAESHGITVIVANPRKLRAIWDTVNKSDERDAELLARLGRVDPLLLAPIKHRSMEAQAHLSVIRLRETAVKMRGIASNSIRGTLKTLGIFLEDIKSPEQMPKKAPQQLPSNLLKLVEPLLIAMSTLNQQIVSYDKKIEKLCKTIPTCQQFMQINGVGPITALTFFLTVFDPNRITHTRDIGAYLGLVPKRDQSGTVDKRLGITKAGDTLCRTSLVRAANYIIGSFGQDCDLRSFGLKIKDKGGKSPTKRASTAVARKLAVLLLSMWRSGEDYKPFRKSKKKEAIAS

SEQ ID NO: 324647 - protein, 322 aa, unidentified
MSLPGPLCVGIDVSKATLDIAASSAIEPFSVTNDTDGFDSIIAELRKYSVALVLMEATRGLEAAVACALQAEGFELAVVNPRQARDFARAMGYLAKTDRIDARVLAQMAEVINRHPERSRFIRALPDVERQVLNAMVVRRRQLIAMLVAERNRLYLAPPQSRKSINTIIKALEDELVRIDDDMNNHIRRHFKELSERLSSIKGVGAMTVAALLAEVPELGRLSRREISALVGVAPVNRDSGTMRGRRTIFGGRAGVRTALYMAALVATRYNPVIKAFYTRLVAAGKPKKVALVACMRKLLTILNAMLRKNEEWNESYHHVAP

SEQ ID NO: 324648 - protein, 341 aa, unidentified
MSNTKTYIGVDLHKKTCYITVMNEKGKIKKQTEILNQEEKVKKFFKKYRGEKVAVESTMNWIPFYESLEALGCKVMLSNPLQTKAIASARIKNDKIDSRVLADLLRTNLLPTAYIQPRDIRDLKELVRQRVSYVELRTKIKNKIHSVFFKTNVKHEFTNLYGKAGMEFLKTVEVRNIYREELNRYIFTLESLNNQIEELEEVIKKNAKTDYDCMLLMSIPGISFFTALVIKSEIGDISRFRNSQKLCSYAGLIPSTYQSAEKIRFGRITKRGSKWLRKALIDSVTSGSRNPNKIAAFYKKLKKNKGTGKAKVAAGRKLCSVIFAMLSDKQYFKELSPTKQR

SEQ ID NO: 324649 - protein, 351 aa, unidentified
MLIIGCDFHTRFQKIAMMDSTTGELVKRRLEHGTGEAERFYAALAAPARVGIEATLATQWFEKMLRHYGHELWIGDAAEIRAAMVRKQKTDDRDALHILDLLMQNRFPRIWVPSPAERDVRQLVRHRHKLVRFRTSVMNQLHALAMGQGLCLRKKLWTTVGRQKLESLTLAPWASRRRRELLELLDQLDPSIGELDRAVISEAESRPTAVCLMQQVGVGPVTALAFVLTVGPVSRFPNSKKLVSYLGLNPSEESTGGRQRLGAISKQGNTMLRCLLVEAAQTSARLDPELRRNYQRLKLRRGNSGVAKVAIARKLAVRLYWKLREADRPNTAARMQGSPVSPVVGESLSAN

SEQ ID NO: 324650 - protein, 409 aa, unidentified
MSSENCTEVFAGLDWAVHTHAVCVIDAVGGVLERFEVAHDRDGLAELMRRLARFGGHVRIAIERPSGLIVDALVEAGHHVFPIHPNAVKASRPRYRSHGAKSDASDAYLLADLLRTDGHRWRELSPQSDSIRALRALVRSRDDLVSTRVSLSNQLRSTLEAFWPGAACIFADIASPIGLAFLRRYPSASAGAKITEATLSRFCTSQHYSGRRSAAELLGRLRSAAVGLAGAQTNEAAGQLVRSMVAVLQPLVEQITDLTRSIERFVESLPDGQIVMSFPRAGRVCAAQILAELGDVRERFPSADQLAAEAGTVPVTYQAGKTCSVAFRWACNHRLRQAITCLADNSRHANEWARSVYTAARTRGHDHPHAIRILARAWLRVIWRAWTDRRPYDPALHNAAQRLVPAGGG

SEQ ID NO: 324651 - protein, 343 aa, unidentified
MNITTVGLDLAKSVFHVVCFNEHFKEVKKRMLRRNQVLQFFAQLPPCRIGMEACASSHYWGRELRAMGHDVKLIPPQYVKPYLRGNKNDYNDARAIAEAAPRPSMPFVAIKTVEEQDMQALHRMRSQCLRDRTALCNSTRGLLGEYGITLPKGIANLRSSIPELLEDAENALSDHFRDLLARRYEQLVELDGHIAFYTDKLEKLGQQDEACWRLQTIPGFGPIVSSAFRSSIGDGRAYRRGRDAAASLGLVPRQHSSGGKNVLLGISKRGDRYLRSLLVHGARAVVVQAARKDDRLSRWLNRIREERGWNKAVVAMANKMARMGWAILRHNTSYQPSSADPTC

SEQ ID NO: 324652 - protein, 370 aa, unidentified
MNQFSTLYIGLDVHKESIAVAYIAKDHGADVLYLGTVGTRHVDLDTLVRKLQSKAKHLIFVYEAGPCGYWLYRYLRKKGYICWVVAPSLIPKKAGDRVKTDRRDAIQLARLMRSGDLTPVYVPTVEDEAIRDLCRAREDAIADLKAAKFRLKAFLLRHDIRYTGQATWGPAHLRWLSEVVCPTPAQQIVFQEYVRAVTEHTERLQRLEHELHEHVKSWRLYPVVEALQALRGVQFTVAVTTVAELGDLTRFENPRQLMKYLGLIPSEYSTGERRRQGAITKAGNTHARRALVEGAWAYRYPAKVSRHLQLRLEKQPKVIQDISWKAQVRLCKRYRRLMARGKHANQVVVAIARELVGFMWAIAKQVPMTP

SEQ ID NO: 324653 - protein, 424 aa, unidentified
MKVTYPTCCGVDVHKSFLVATIIKTTGGIEPSYQKKRFSTFNNSILDFKSWLLENECHDVCMESTGKYWVPVFNLLEDQINVTIANPKWVKAVKGNKDDTKDSKWIGDLFRLGLVKGSYIPCKSIRILREYTRYRYKLVSCRSSEKNRYQNALTVCNIALDSVVSDIFGKSSSSIIDYLLEQSGTTINHKEIASKLLRRLKSKEDAVIESIEGYQMTDAQKYRMRLVRAHMDYITAEINDVDKQIESLISSVPDYVKAIRLLTTIPGVKHDSAITIISEIGIDMSQFCNSKRLCCWAGLTPGNNESAGKKKSVSITSAGVYLKPALAQCSHAAVKSDKSPYYKTKYESLVKRRGKKRVVIAIARMILTVIYRMLSTGEVWNPSDLYKIDMPAPLVEKQKAKAIKQTKKLLQKEGLLPPDEPLAS

SEQ ID NO: 324654 - protein, 351 aa, unidentified
MPKRTNAVAVSTIGIDTGKNTLHMIGLDEKGEIVLREKVSRSRIAARLVNVPPCLVGIEAGMATHYMARELVALGHVVKQVPPAFAKPFRQGHKNDFLDAHAVAEAVQRPSTRCVPIKTDDQLDLQALHRVRSRLVGDRTAVINQLRGFLLEHGIAVRQGHRFLRQQLAQILATRTDALSPRMIRIIGDLVEDWAHLDERIERVTDEIESLARTDSSCGRLMTVPGIGPIIASAMVAAIGNGAAFAKGRDFAAWLGLVPKQLSTGDRTILGRITKRGNRYLRMLFIQGARAIQLHPASWAKHSFGPWLTAAARRLHCNVLTVALANKLARIALTVLVQARNYETRIAPAAA

SEQ ID NO: 324655 - protein, 356 aa, unidentified
MLNDKKYIGMDVHKESISIAVRNDAGRIVMECVIETKASVILQFIDGLRGDLQVTFEEGTWAAWLYDLLKPHVTELVVCDPRKNASMREGNQSDKIDARRLAELLRLNHLHPVYHGEHGLRSLKELVRSYLTITKDLGRVMSRVKAIYRSWAIPCTGKQVYAPRHRAQWLAKLTEPGVRRRAEFYYQQLDALRALRQQVRRDLLAESKKHPAWKQLCQIPSIGPIRAAVLLGILQTPHRFRGKRQLWAFSGFGIETQSSADHRSVDGQLQRVKKPSSIRGLNRNCNHDLKNLFKGAAILASSKPGPFQEFYTALLTKGIRPEMARLTLARKIATIVLIVWKRGASFDAQHLKPQTA

SEQ ID NO: 324656 - protein, 391 aa, unidentified
MVCVGIDVAKDKHDCCILDSDGMVRADCFTIPNNMDGFKQLLQTIQNCTKKSDKIKVGLEATGHYSYNILGFLLDNDLAVYVMNPLHTNLYRKSLSLRKTKTDRVDARTIATMLLSDVDLKSYTDIAYHNEELKSLTRYRFDKVQERAKLKQSVSRLATILFPELEGLVSSIHGTSIYALLSEYPGTKQISEVHLTKLTNLLTTASKGRYGKEKAIQIREAARASIGSVMPAKSLELKHTIKLIQELASEINEIEDSIQKIIDELNPPILSIPGMGVNSAAVILAEIGDFSNFSSPDKILAYAGCSPSTYQSGKLTNCYAHMEKRGSRYLRHALYNATKYVCYWNPVFAEYLAKKRAEGKHYNVALSHAMKKLVRLIYALQKSGKAYLAAA

SEQ ID NO: 324657 - protein, 399 aa, unidentified
MRTIQQLAYCGIDTHKHTHTAKVVDCWLNPLGEITFENRPGKFDSFLKKIKQISGHLQPVFGLEDTRGYGRNLAVYLTGQQYIVKQVNPAYTSAARRSAPTVYKDDSYDAFCIAQTLRDRNQQLPDANQEDIFWTIRQLVKRRDTLANSAKMLQNQLHVQLVNSYPSYKKFFTLVTCTTALYFWEKYSSPMHLRNITPEELGKELRQIGKNACSTRKAQKIVSLIEADGQIPKAYQAERDFIVKSMVQEIRYKSEAIKEVEQQLQHIVPLTGYQLETMPGIHLITASRIISEIGDIQRFANADKLARFAGIAPVHFSSAGKGKEQRSKQGNRVLNATLYFLAVQLLSVRGGKPRNPAFHEYFQRKVKEGKKKSQAIICIQRRLSNILYGMMKHKTAYKL

SEQ ID NO: 324658 - protein, 317 aa, unidentified
MSQSSVFIGIDVSKNQLDVAVRPHQVFFSVINDDAGIQELVQRCAKLQPVSIVLEATGGYENMVALALGAAGLPISVINPRQARDFAKALGRLAKTDKIDAACLAHFAQLLDPLPLPLPTAAQEKLSSLTTRRRQLVEMITMEKNRREHASPQILSHIQRHIAWLQAELKQLERQINDFIKKTPMWKEKLKILKSVPGIGVVTSSILLAELPELGVLDNKKLACLVGVAPFNHDSGKFKGRRRIKGGRKVVRDKLYMATLVDTRWNPVISEYYQRLLQAGKAKKVALVACLHKLLNIINIMLKKNSLWQPNLSPQTS

SEQ ID NO: 324659 - protein, 412 aa, unidentified
MEVMIERCCGIDVHKSKLTACLLVSKPDGKAEKSIKTFSTMTSDLLALKDWLEAEGCTHVAIESTGVYWKPVFNIIEDSITVILANARDIKNVPGRKTDVKDCEWIADLLRFGLIRASFIPPKPIRELRDLTRYRTKLIGEMTSEKNRVQKVLEDANIKLSCVATDIFGTSGKEMLSALLQAESTPEEMAELAKGRLRKKIPALIEALRGNVSEHHRYLIEMGLRHLESMGELIADLDEKIDKAMEPYREEQKLLMSITGVEKKSAESVIAEIGVDMSQFPSEKHLASWAGVCPGNNESAGKRKSGKTTKGDTWLQRTLIQVAHAASKAKNTYLKDKYHRIAGRRGKKRAAMAIAHKILGFAYYILRYRVPYRDLGEDYLDKLNKDGQEWKLIKRLEALGNKVTIEPVLQAA

SEQ ID NO: 324660 - protein, 323 aa, unidentified
MKHILGIDVSKDTLDLVLDQRFHRKVFNDIRGFQQIHQWLVSQHVDRVHACLEATGQYGDGVAEYLYEMKHFVSVVNPARIKRYGESKLHRSKNDKADAALIAEFCMKEKPACWKPISNNMKHMRALVRRLSDLQTSRQQEQNRFGSGEKNEWVLSDLQSHIHYLDDCIHNTTKAIHQFIDQNTSLKSQRDLLISIPGIGKLTAARLLAEIGDISSFENAPQLAAFAGLNPRGFSSGSSVHKKTKISKQGRAFLRCILFMPAIVAQKHNPVIRQFCNRLADRNLPKMAIVVASMRKLLHLCFGVLKNQVPFDPTFGDQFNFAT

SEQ ID NO: 324661 - protein, 412 aa, unidentified
MTVTNQFAAHVGLDWADKKHDVCVQFKNGERVFDVIEHTAEALDAWLTELHQKVKGRIAIALELKKGPVVYALQKYPFITVFPVHALSLARYRQAFSPSGAKDDPQDAELALELMLRYPQKIKAIEPDNADIRLLQQLVEQRRQLVEDKRRFVNRIINTLKQYYPQPLEWFSHRGSLLLCELIIRWPSLQQLKRARRDTIRNFLNAKGGRAMALTEQRVASIDNAIPLTTDPSVIEANALMAAALATQIKVVSEIIKTYDERIETLFDTLPDAGLFKSLPGMGPCMGPRMLAALGDNRDRFNSAEEIQNYAGIAPVTERSGQKSWVHWRWQCAKFVRQTFVEWAAKTVNSSYWAKLYYQGLREKGKSHQSAIRALAFKWIRIIYRCWKARTCYDEAKYLLALEARRSPLLKP

SEQ ID NO: 324662 - protein, 358 aa, unidentified
MGEITRVGVDLAKRVIQVHAVDAMGRVIVAKQLQRDGFTAWCAQLPPGCLIAMEACSGSHHWGRRLRAMGMEVKLLAPHFVSPYRLSGKTGKNDAADAAAICEAASRPTMRFVAVKSVEQQSMMALHRWREGCKEERTACINRIRGLLAEFGLVFGQRPEVLRAVLSEVVEDASNELGAVARMALQRAHLHWIELECHIAWCDERIAMHVRSDEQAKAAAKLCGIGPVTASALVATVDDFKQFKNGRQFSAWMGLVPRQSSSGGKAVLGEITKRGDEYLRTLLIQGAKSAVFTAHRRSDRLSRWIVQLRDRVGWQKAAVALANKHARILWSILVGGQRFDPEHVPTKHRMPSLAAMAG

SEQ ID NO: 324663 - protein, 370 aa, unidentified
MSIKRILVNQIDTNLEYEVIGIDLAKNCVSAILLTTDGEIFGIDRLDYQELEKSAQELSPTIFAMEPCTEMNYMVQKLEDWGHHCIVISGKNVKDYVESHFSNQKTDLNDAQALAFLTKDTQLRTVKAKDPEQLKYASLTTLREQYVKQYRQTMVSLKGICQVWGLNISKGISGKARLKDMIENHAAFPAELRTALVGMVAHAQAVQKDLKSVTKILEELAKKDKACQLIQTVPGLGTICSCRLRATVGDIKRFKHPKDFPAYYGLVPRSMATGHNEKKGKITHRGDKTMRSLMVQGAGIVINQATKGNLHSKQLTKWILKKQKEKMPWGKLVCAVAAKLLRIVRAILISGKPYNPKIAGVAKCSLPKAS

SEQ ID NO: 324664 - protein, 342 aa, unidentified
MNYIGIDHHKQYSHMTVMDEEGSIVKAGRVLNLRAEVEDFLGAVKQGSGAVIEAGRSSYTMADLLGEMGVEVTIAHPQEVKSIAHAWIKTDKRASEILAHLLRTDMVPGVYRRGKENREAQRVLRQRAWYVAALTGVKNRIRVLLAQQREEAQQEASGFKKLFSREGLKFLKEVALPGTDKELLEALLKSYEHLEERIKESDELVKRVHQELREAQRIDTVPGFAEFLSVLVAVEIADIKRFSRVESLHSYAGVIPSTHSSGQRSYHGKIIKAGNRWLRWALVEAVWPAITVDHDLRVFYERLARRKGPNMAKVATARRLLTIIYKILKEGRAYVPYKRGGK

SEQ ID NO: 324665 - protein, 359 aa, unidentified
MDVMEGSRRRVVGGVDTHKDLHVAAVVDEQDRVRGSRCFATTRQGYRQMLAWMRSFGDVERIGIESTGSYGAGLLRFMQGSGIEVLEVTTPDKHDRRRRGKNDDLDAQNAAHAAFAGKRTVTPRSRDGMVESLRVLSVCRKTAVAARRVALQIIQTTIVCAPDGLRDTLRAMTRMQLVRTLAAWRPDLTAYRDVEAAYRISLKSLARRYLELHDEIADLDTMIGSIVDDLAPELVARNSIGHTGAAQLLLTAGDNPERLRSEASFAALCGVSPVPASSGKTVRHRLNRGGDRAANSALHIIAIGRLRTDPATKAYVAKRIAGGHSKLDAIRSLKRYIAREVFHIITRRHREINQTRIAA

SEQ ID NO: 324666 - protein, 315 aa, unidentified
MEQPPASPCFVGIDVSKDRLDVHVRPSGLIFAVARDGQGLEQLITQVRDLAPALVVLEATGGFEITVAAALASAGLPLAVVNPRQIRDFARATGRLAKTDVLDAQIIALFAERIRPEPRPIADADSQALAELIARRRQVVEMIGMETNRFRQARNPRVQRTIKATLKTLEAQLAELDREINDTVRGSPIWRAADDLLTSVPGVGEVTSRTLIADLPELGKLDRRRIAALVGVAPVNRDSGQMRGRRTIAGGRTDVRNALYMATLSATRWNPVISQHYKSLVERGRPKKVALVACMRRLLGILNAIIRTGTPWQNA

SEQ ID NO: 324667 - protein, 390 aa, unidentified
MLRFVGIDVARRTHLVAIVGETMTVLVKPTPITEDSAGYEKLIALVGSPADSLIVMEATGHYWRNLFVYLCARDFRCAVVNPLRIRRFAQEDLRRAKTDRTDALTIARFGAQKHPEPTPSPDPVLDELRELVRLHERLGQDFGDRLRQLHRLLVLVFPEFPDVVRTLESQRATALLRQYPSAEAFRRADERDIARLRCDGRRRLGAAIAASLVTAANTSVAQHHSAAYDLSVRAFCADIDLLRQSLHDLELEIQKSVGGHALASLLTSIDGLGTLTVARLLARLGDPARFRNAAALASYVGVVPATNQSGLHRPGRAPVSPLGNAELRASLWMPTLTATKRNAWLRAYYERLVARGKPRKLAMVAAMRKLLTAVYSVAKNRRPFVARLDA

SEQ ID NO: 324668 - protein, 366 aa, unidentified
MSTYSVLRDKNSMYFVGLDLGDKYSYIAILDKEGELIEETRLPTTKTSFQQRFSMLPPCRVAMEVGTHSRWASHLLTELGHEVLVANARKLRAIYHNPRKDDRADAETLARLARLDPELLSPIYHRSPQAQADLAVLRSRDAIVRCRTLLINHARDIVKASGSRLPSCSADSFAYKVVPDIPEPLIPALTPIIDIIASLTKQIRGYDQKVKTLCSQRYPETKLLRPVGGVGTLTALGYILTLENPHRFRRSREVGPALGLVPRRDQSGDRDPQLRITKTGDAYLRRLLVGSAQYILGPFGPDCDLRRWGLKLSERGGKNAKKRAVVAVARKLAVLLHHLWKTGEIYDPFYLARKHDRAPEVAPAAA

SEQ ID NO: 324669 - protein, 355 aa, unidentified
MTAPSMTQTIAEVTVGIDTHAEVHVAAAFDQLGRPLGHLEIPTTPAGYRQVLVWARGLGSVVAFGVEGTGSYGAGLARYLANAGCQVLEINRPNRQTRRRRGKSDPIDAEAAARAVLAGEAHGVAKADTETVGMVRALRVVRRSALKARTQAFNQVQGILVCAPAPLREEFRKLSMEKLVQRAAAFRPGPATTATAASKLALRSLSIRHQALTDEIEFLDLELRRLTMSTAPALCRLKGVGPDVAGALLVAAGDNPERLRSEASFASLCGASPIPASSGKTNRYRLNRGGDRIANNALWRIVMVRLATDQETRNYMVRRTLEGRSKREIIRCLKRYVAREVYRTLLAPAVLAVSA

SEQ ID NO: 324670 - protein, 354 aa, unidentified
MKNVKYLGLDVHLSTISAAVLDEQGKLVMESVLPTHSAAILDFIHGLRGILHVTFEEGTQSAWLYDLLVRQVQEVLVCNPRKNALLKAGNKSDAVDARKLAELLRAGLLSPVYHGETSTVTVKQLGRSYESLTQDSTRVMSRLKALYRGQAIPSAGQRPYGPRREEWLGKLGGVGVQSRARRLYQQLDALHVLRREARQELIGECRKHAAVRLLRSIPFLGPIRAGLLIGRVQTPHRFRTKRQFWAYCGLALETRSSADYRFVNGQLERTRKPVWIRGLNLNHNHDLKNLFKSAATTASARPGPFGSFYQGLLAKGTPPAMARLTLARKMAAITLSVWKKGEKFDAEKLKSPAA

SEQ ID NO: 324671 - protein, 361 aa, unidentified
MGIDTHKYEHTAVVINRFEEQLTSFNFVNTPSALHNFLNQLSHWHSQYRQDSYQDLNSSQMLVGIEGSHHHGFELAKALIQQDYLVYEVNSIYTKSRRGYGTSWDKSDEIDARLIASVLTRHLDQLPQLNLNPAFVSADFQSLVEAVAYLEDLIQTQTRIKNKLHHLFHLLDSKYRSKFKAVFGYQALKYWQRRAYRHHHQLQYQHLLSLLRQYNSLQKQLSNLDQWLKFWLINHRFDFLLTLPGVGVRNGAKLMAYIQDINRFSNQDKFCRYVGCVPEQHSSGTRTSFHKAKMSHKQLYRTFYSIALTQLKLVPSAKEYYDKKLDQHKTKKQARRSLIKNLAVIVYQMLKHYQSYQPTNN

SEQ ID NO: 324672 - protein, 347 aa, unidentified
MEEEPVPNFAGLDVSLDQTSICVVDDAGAIIRELKVASEPEDLIVALTPYADALERVGLEAGPLCTHLYSKLAEAGLPAICVEVKHMARMLRAQFQNKTDRNDARGLAQMMRAGLFKAVHIKTERSQRLNVLLRTRKVLLSKLLDVEADLRGVLKNFGLKMGKVTPKTFEARVRELASFDPFIAEVVEPVLAARRAMREQFDRLHTLLLKAAKDDPICRRLMTMPGVGAVVALNYRVVVDVPTRFAKSRTVGAHIGLTPRRHQSGELDWTGRISKAGDPMLRASLYEAANVLMTRVTKPTALKSWAMRLAKRRGRKKAVVALARKMAVILHRMWADETDFRWEGQCP

SEQ ID NO: 324673 - protein, 356 aa, unidentified
MKKNTLVDWSEQTLYVGIDLHKKKWVATVRTDELVLKTFATDGKKESFVKAVLRNWPGARIKAVYEAGYFGYHIAAYLNGHGIETMIASPQRIPKEPGYFVKTDKIDSRKLAEFLSKGLLRGIWQWDTETLQDRGLVRKRGQMVKRRVQIQLQIKADLAFYGIEIKTTKWGYWSKRYIAQLKQIGKECSHDYYGTVFRMMIEEYEQLRIRIREVTKLIIQLSKTDKYRENVALLRRIPGISVLSAMILLTEIGNISRFPSEEKFVSYIGFTPSEYSSGERVRKGSLTGMGNGTLRKMFIEIAWIAVRKDPALLEKFDRVRKGKSKTKAIVAVARSMANRVRRVVITGEPYVIGVVA

SEQ ID NO: 324674 - protein, 338 aa, unidentified
MGKITTIGLDLAKNVFHVVCCDRHGKIIKKKMLRRSGLLAWFANLPPCLIGMEACASAHYWARSLQAQGQRVKLIPAQHVKPYVRGNKNDYNDALAIAEAVTRPEMRFVSIKTPAQQDIQAVHRLRERRLRDRTALSNQLRGLLGEYGIVFSRGVNVLRTRIPEILEDSENGLSDFFRCLLSQGYQQLTELDAHIDAYTQALEAHGKRDDACQRLRTIPGYGPIVSSAFYSVVGNGAAYRRGRDVSASLGIVPRQHSSGGKAVLLGISKRGDRYLRSLLIHGARAVVNQAASKEDALSRWINKTRAARGFNKAVVALANKLARIGWAILANNTVYQAR

SEQ ID NO: 324675 - protein, 344 aa, unidentified
MITEASRELFAGLDLHSSNVYCGIKDSSGAPIVRRRLPNELCVILQSLEPYRAQLKAVAVESTYNWYWLVDGLQAAGYPVRLANPAKMDAYSGLKRTDDESDALWLAEMLRLGILPEGYIYPKEVRPVRDMLRRRLLVVHQATQTLLSLQSMVTRHTGKTVSGAKLKEWTLKEVNESFPDGFLQETAAALLELLGEQRRIQHSLEKSVLAQVKLGGRWEKLLTLPGIGNILGITVMLETGPIERFVSAGHYASYCRTVDSRCESNGKKKGENNRKNGNKYLAWAYVEAANFAQRYNEAAKSWFARKQARTCRVVAVKALACKLAKAAYYVLRDGVEFDEQKMFG

SEQ ID NO: 324676 - protein, 337 aa, unidentified
MKYCGIDLHSNNSVVIVSDEEDRIVFSKRLPNDLGQIGAALEPHREDLAGVVIESTYNWYWLVDGLMATGYQVHLAHPSAIKKYEGLKHSGDFADAAYLAHLLRLGLLAEGYSYPREERGARDLARKRMQLVRYRTAQVLSIEGILMRQTGARMKGEAVKRLTAEQVDAFAFAPDVSLAVEANRAVSQTLSQQIEALEKRLKQRVILRPEYHLLKTVPGIGDVLATTIMLETGTINRFTQVGNFSSYCRCVDSLKESNGKRKGEGNTKNGNKYLAWAFVEAANFALRCCPQAKRFYDRKKSKTNRVLALKALAHKLARACYHMLREQKPFDVHLCFG

SEQ ID NO: 324677 - protein, 351 aa, unidentified
MSEALQADLVVGVDTHLDTHTAAICDARGRVISQLQVPATTAGYAQLLAQVRSAAAGGQVIWAVEGTRHYGLGLARHLAGQGEQVAEIDCSRHVGKRRAGKSDPIDAVRAARELLARPAPAQMRADGDREAPRLLMIDRDNAVQSCKTARTALAAVLVTAPADLREQIRPLPRERRAKACAALTCPDGADRQTRVLHQTLIRLGQRIAALAGVAAELEAQITEIVEEMAPGLVATEYGLGYLSAAQILLSWSHAGRIRTEQAFAMLSGTAPVPVSSGRTDRHRLNRLGDRQLNRAIHTIAVTRMRCHQPTQAYVQRRRADGKTDREIRRCIKRYLARHLYRTLNNGILSSA

SEQ ID NO: 324678 - protein, 421 aa, unidentified
MTQPYGNTGGVVLVAIDVAKKQNAVLIRLPDGTRKKLTVTNNLADYRELSNYLKKLEVPCKIGFEATGNYHRALAYYLQQRGFDLELISSVAASRTREAMFNSWDKNDPKDAQVILHMLQTGLTQTYHDPLVHRINDIQELSKTYCQVSLRKTRVQHSIMTHYLPLYFPEASKYFHTSRAEWFTSLLMTFPNPASVLKYSREGFIKAAQTVSGRKVNKAAWLKDFYETARESIGLPVPEDSEAVRMFRLVLQEHQDLCRMRRAIEARAELYLKDNADYLRLRTIPGIGAVIALIILAEAGDLRRFSHYKKFLKYCGLNLSTQQSGGFRGMSKLSKHGNSRLSYAFWIAGTSAIRMRENTFRKKFENYIKTDPQNPDLKRKAYTAVAAKIARVAYGLIKSGRDYRCYHESSIPSGIILSVGR

SEQ ID NO: 324679 - protein, 342 aa, unidentified
MEKSLFIGIDFSKKTFDVSVVHQSNLQVVDYGQFENSKEGCVSLLKWVKASTKEPFDKWLFCGEHTGLYSICLSEFLVRKGLNIWLENPLQIKQSCGIRRDKNDKADSREIAFYAYRFQDKAKTYSLPCKALKSLELLLSFRERLVSNKQSLLVSSVEIRRVMQKDATARFIYEQSKKDIDRINKEIKEVEKRMLQQVQSDEHLRENYELVSSIKGVALINTAAILVATQNFTRFENSRQFACYTGMAPFGKQSGTSINTKPRVSQLADKKIKVLLTQAAKCAIRHDPNIRQYYQRKLAEGKDKWLITNNIRNKLIHRIFAIVRNKLLYQVNYINLLDKTSA

SEQ ID NO: 324680 - protein, 377 aa, unidentified
MKKVRFLGLDVHAETITVAIAEPDGEVRSLGTIPNGEESVRKLVKKLGPAEQLQACYEAGPTGYVLYWQLTGLGVKCEVVAPTLVPVKAGDRVKTDRRDATKLARSYRAGDLTAVWVPDAAHEALRDLVRARESAKQDQLRARHRLSKFLLRQGRRAPLGVRPWTLRYMQWVREQVQFEQPAQDYTRLDYLHEVEHANDRVRRLEEAIGEAVKLVPVTMREVIQALQALRGIAQISAVTIVSELGPISRFAGARQLMAYSGAVPSEESTGQRIRRGAITKTGNAHLRRVVIEAAWAYRHRPAIGATLHQRQQGVCEEVKEIAWKAQHRLHKRYRSLAAAGKNQPKVVTALGRELLGFIWAIGVHVERDASPQHQWAA

SEQ ID NO: 324681 - protein, 366 aa, unidentified
MDAIYIGVDFHSRQQTICYLKTETGELVITELKHQDKERVRAFYQQFQEPVIVGLEASGYSPWFEAMLEALGREVWLGDATEIRRRARWRYKDDRRDAELIWDLMVHQEFPRLHQPSPQSRDILRMLRYRQKLIKVRTMTKNSLQAIAMQAGLAKGRQLFTAAGQAEFKAVAISPVLQYQRDHWCELLKPLNQELLETMKWFKAAAKGEVAIARLRTHPGIGLLTALCLQHTLQPVSRFRNQRKVVAYAGFDPMVRRSADSAIQLGISKAGSRMLRYLLVEAVHTAVRYDPDLDRFYKRVAERRGRPKAKVAAARKLLIRAYIMMRDEIDYAEFNRRAVAAHPARKSQGTPGVPEVLIGRSASPGA

SEQ ID NO: 324682 - protein, 388 aa, unidentified
MIYVGIDITKLNHFAAASSSDGEILIEPFKFTNDYDGFYLLLSNLAPLDQNSIIIGLESTAHYGDNLVRFLISKGFKVCVLNPIQTSSMRKNNVRKTKTDKVDTFVIAKTLMMQDSLRFMTLKDLDYIELKELSRFRQKLVKQRTRLKIQLTSYVDQVFPELQYFFKSGLHQNSVYALLKEAPTPAVIASMHMTHLAHLLEVVSHGHFGKEKARELRVLAQKSVGVNDSSLSIQITHTIEQIELLDSQLFHTELEMANLVTCLHSVIMTIPGIGFINGGMILGEIGDIHRFSEPKKLLAFAGLDPSVHQSGNFQAQRTRMSKRGSRVLRYALMNAAHNVVKNNATFKAYYDAKRAEGRTHYNTLGHCAGKLVRVIWKMLTDEVEFNLE

SEQ ID NO: 324683 - protein, 428 aa, unidentified
MDEVNRNRLEEFRQLRQEVRHSEEYLIVGIDVAKDRHHAFFGTATGKTLLRRLVFSNDYEGFTKLLDQAEALRVRHGLKKVVYGMEPTANYHKPLGEFLIHLGRTVVLVSGVTVKQNRESLDGRWDKHDVKDSANVADLISQGKCLYYEYPSAQLRGLRGLLSLKRRLKKQEHGYRVRIRNNLIVQYFPEMDRDYDRLGAEGLSVMRWCFPPSQMTVLDVEPFIERVTSGRIRVEKRQRLEGIWEKAGESIGCDGVPGVEHEAKVMVEGLRQVREMIKETEDKIQELCKEFSEYPYVLTIPGFGPDLSARVLGAIGEADRFQNGKQVLKLAGLDLSADRSGKNSDKAIPEISKRGKADLRYALYQAALIASTKNQDFMRYYARKLEGRQKEKGIQTKMWVKLSAKILLIAWTLMKKKEPFDPAYLNAE

SEQ ID NO: 324684 - protein, 352 aa, unidentified
MFQVHAVDAKGEIVVARKLMRSQLIPLFAELPPCVVAMEARSSGHHWGRALIELGHEVRLIPPAHVKPYVRRNKSDQVDAAAIYEATSRPGQRFVPVRSIDNQAELMRHRARELLAGQRTAALNALRGHLAEIGLIAPQGAHHAYGLKRMAADGFNENGEIVVPDCVRGALRSLVGQIDALDEAIGAIDRELAASVKADETAKRLMTIPGVGPVTASAIRATIQDASAFASGREFAAFLGLTPRQNSTGGKTRLGRITKMGDRYLRKLLVVGACATLRHRRGHSDASRLWANGMFERKNTVGDSLPEAHSERQEALPPPRRRSARETLTSADRDTSLGRPRDDDSAQTAVVP

SEQ ID NO: 324685 - protein, 368 aa, unidentified
MKKNNTCLKSPKRSKTRQRSITIGMDLGDKTSRYCVLDSEAEVVREGTVATTKKGMKQRFGNLARCRIAIEVGTHSPWVSRLLSSLGHEVIVANARQVKLISTSSRKDDRLDAQTLARLARVDPQLLRPIRHRSEKAQGDLMQVRVRAALVDTRTGLVNTARGLAKAMGERLPKCDADQMGVGKMQGLPAVLVEALAPLLETVELLTQQIKASDQKLEQLAGRDYPETELLRQVSGVGSLISLTFVLTVEDPKRFRKSRDVGCYVGLRPRRSESGESRPQLGISKEGDEYLRKLLVQGAHCILSHKSPDTDLKRWGLKLAGKGNKNAKKRALVAVARKLAILLHHLWVNGEVYEPLRNSRLLEQKAVA

SEQ ID NO: 324686 - protein, 341 aa, unidentified
MKLTTIGIDLAKNVLQVHGADDKGRAVLKKQLKRAEVLPFFANLAPCRIGMEACGSAHYWARKLQALGHTVQLIAPQYVKPFVKRNKNDAADAEAICEAMARPNMPAVPIKNAEQQAVLSLHRARQGFVKARTAQANQIRGLLAEYGIAIAQGIRHLPKRVPEILEAGQDELPSSFRLLIQRLLEHLKELDRQVSELEAQIQLWHRENAASRKLASIPGIGPITASAMIASIGDAKNFQNGRQLAAWLGLVPKQHSTGGKATLLGISKRGDTYLRTLLIHGARAVVRMAERKPQAGSWIAGLLARRNKNVAVVALANKNARRIWALLAHDRDYEPDYGQAA

SEQ ID NO: 324687 - protein, 336 aa, unidentified
METFSFFIGIDISKATLDFAIVVANKLLFHFQSTNDKAGIGAFIKHLKVQCPAANFTNCLYCMEHTGIYNNHLLTYLHSKKAKVWLEHPIHIKDSLGMIRGKNDKIDAQRIAVYAYKNRDEVHLWAPKRDIIQKLDRLTATRSRLVKVCKMLQSPLTDSKGFLTKKEHSEAKKSCQKSIDSLKKDIQQVEKQIHNTIQGDTYLKELFGLIESVKGIGPVIATEILIITNEFKDITEAKKFACHAGVVPFEHQSGKYKGRSKTSNKANKKLKALLHNGAASAIQHSKEIKEYYIRKTSQGKNEMLVRNNIYNKLIHRVFSCVHRKEKYKDFYTPSVA

SEQ ID NO: 324688 - protein, 364 aa, unidentified
MEASGRFVGIDLGKRTYDMCLVEPKGKITRTNGKTDFKGIDKLCEKLGADDLVAIEACNLAMRIERRIRQTVGCKVYILNPGKLAVIYMSTRKTDKEDALKLAKLLKNHDEDELPIVTPPTDEEWERRKLLSEYKSLKGARTREVNKLHAIFEHAGYTQFKRKDMCCEKNRNNILPLLKGYEKEEAERLIERLSLLEKQIEQLLQKINAEVEKDDKVQLAMTVPGIGAITALAYVAYMGDLSRFENPHQVSNFLGFVPKIDHSCTIKRNGHTTKKGNALLRSLLVQAAWGTVRSKDGGALRDKYKYMSGTKGMSKGKSIVTTARKLGELLYMLLKENKSYEPQKFRTPEYHISKLADEALAANM

SEQ ID NO: 324689 - protein, 476 aa, unidentified
MAGSKKAISNMALIPMLPHETLYVGVDVGKSRHVAGFLSRTLLQRHERFEGCPTFVFEQSREGFRSLVDRIREYVPLEQATVLLEHTGHYHKNLEQYLLEWDITVYRIHVQERPKGMTKTDKRDALSLANRLYTQLELGAQVEEKMQLVRRAVHPTQAAMQLRGFMQHRYELSHQRTQLRNKLTAICDELFPEFTHIFHDPNLEVALAFREKFPTPHDIATASLSALRETRVKYFPSEANLLRLQQLAGETIGINNKDRLRGMKLEQELLIKELRLVQGHLERLDTEITDIVRTSREGQILLSMPPIGPVQAATIIATIGHIDNFEKASELKSYFGWAPTRDQTGVTFDRTKLSHRGVRPVKQMLFLMAARATTLDGEWARIYRRLLPRMATYDERVKQYRGKKKVLGRIAGQMVSMIFALLKTDQETLSRVPSGEEPPPPMLYDPEIHRKHQEGSYRSLKPGTQPRKILQLPSKS

SEQ ID NO: 324690 - protein, 346 aa, unidentified
MKIVAMDLGKSKSVVCDYDSESGKHTFVTIRTRPQAIHDLLVEREPDRVVIETGPVSGWVYDLARALGVETQVANTNHAIWRWENNTCKSDRYDAFKLARLSALGQLPTVYMPSKSVREWRSLIEYRLSLRNRRTAIKNHIRALLTREGIAWPAGKTGWTSASVAALESMSRPMDSREEGSLWRMQLSVELTLLASVEQALNEVTTKLDAMGQARSSVRLLQRVSGVGPRLSEAVVASLVVPDRFASGKQVGRYAGLTPRQYQSGQQDRKGRISGQGNSTLRSLLVEVSWLMLRCNDWARRTYARLLENCGGRKKVAIVGLARKLLVRLWAMWRDGTVWRDSAVPN

SEQ ID NO: 324691 - protein, 342 aa, unidentified
MEQVSVVGLDLAKSVFQVHGVNAQGEAVLRRRLTRGQLLKLFEKLQPCLVGMEACASAHHWARELAALGHEVKLMPPQYVKPYVKRGKNDAADAEAICEAVTRPTMRFVGAKSPDQQATMMLHRVRKILTRQRTQISNALRAHMAEFGITAAIGRGGLDRLIAVIADQDDARLPDEARSCLGVLCTQLEMVKEQILDNDRRILADARKTEAGRRLMKIPGIGPLLASAIVACVPDPSTFGGGRSLSAWIGLTPRQNSSGGKERLGSITKAGNPYLRELLVVGAMAVVRRARQGSTKRPWVAQLLARKKPKVAAVALANKNARIIWAMMATGEPYREAELAAA

SEQ ID NO: 324692 - protein, 310 aa, unidentified
METKVFVGVDVSKDSLDVAIGSQKDIITFANDQKGVDALVKKLSRIDAELTVFESTGGYELLAASSLAEAGLPVVIVNPRQVRNFAKATGILAKTDAIDARVIAHFAQAVKPEVRPLKDRETSELTALVTRRRQIVEMIVAERNRLRLANKRNIKDIKDHIRWLKKRLDKIESDIGKMIQGSPIWRCKDDILQSVPGIGPITSASLICDLPELGVLSPKKIAMLAGLAPLNCDSGKFKGRRRIWGGRASVRSGLYMATLAAIRCNPAIKIFYQRLTDAGKCHKVAATACMRKLLIIVNAMLRDQTLWQQN

SEQ ID NO: 324693 - protein, 387 aa, unidentified
MHIRGLGRQCECLIRQAATNATTFVGLDVHARSIKAVAIDVMTGEVRSGSFGYDHVAVADWVRSLPQPAKCVYESGVTGFDLQKKLDAMGVDCVVGAVSKMIKPAADKRRKNDRNDAEFLARMLAVGNIVEVWVPDDECEAARDLTRALEDAREEVARSKQMLSKFLLRHGCVFDEKTPTGRRRGNWTAAHWAWIGAISFPQKADNDVLAYYIDRVRQAMEDKRRLDGLVAAEAAKPRWKKRVDSLRCLKGVETATAADLVFEAGEFSRFKNARSFAAWIGLTPSEHSSGESERKGGITKAGNRHLRRSLVEAAWHYLNASPHSKDLAEGQAPDPAARRHAAKGVRRLVGRRASMLERGVHKNKANVATARELACWAWAIGCMAEGA

SEQ ID NO: 324694 - protein, 343 aa, unidentified
MLTKNVIAIDLAKNVLQASHISIHGELLSNKPLSRQKMKEFLAKAKPSIVAMEGCCGCHYWGQLAEQFGHEVRIINPKKMKGYLEGHKTDHNDALAIANAAIQIGIKYSRPKSLEQQSMHSLETSRRFLSRSVVSLALHIRGPILGYGIANPRGEKGLKVSVQTVLDGDTSIPANVVSVLSMLWEQYKELKAKLIASEKEKNALTRQIEPCQRLMAIEGVGETTAAMLYTTLGDGKQFKNGRQASAFVGLTPKQHSSGGKVFMIGIDKCGGVKELRSLLYLGAMSYVGRLPEKPKTQKDAWLRSIIDRIGFKKACIALANKVVRTAWAMLRNETEYKPVLLTN

SEQ ID NO: 324695 - protein, 397 aa, unidentified
MIAVGIDVSKSKSTVAILDSYGTILATPFTMAHNQPEMNALVSRLKAFEEPITILLEYTGHYHYPVLKKLQDEGFPVCVINPYQMKKYSDVEIHKAKTDKKDALRIATYALERSYRLVPYSFMEQKYEDLKFLSRQYQQRIAFVSKLKVQLINLLDQTMPGITKSLALKSREPEKCALLLFIKRYKSFDEIQRIGKTRFLSTYTTLMKKTPDRYAPKKGLEIYELACKSITTRGEDPYIWSAQDQCVDLLATAQNAADEIITQMQNIAETIPEYKVLRAMNGVGDRLGPVILAEIGDIRRFHSAKALNSFAGNDAPPYQSGQFESRSRHISKRGSSTLRKACFEVMQALKLTKPQDDPVYLFMLKKEQEGKPYNVAKMAGVNKFLRIYYARAMELYK

SEQ ID NO: 324696 - protein, 386 aa, unidentified
MTAEVINQPAVMHVETARCLFAIELSKQSWVIGFIRPFSSKISRRILRGGDWKGLLELIDEVKTRASRETGRAVEVMSCYEAGYDGFWLHRLLEAHGIRNYVIDPASLQMDRRARSVKTDRIDTERLLRSLMAYLRGEPKVWSVVRAPSLAEEDARRPHRERDRLISERVRHVNRIKGLCALHGIYDYQPLRPQAMARLEQLRTAQGISLPPRLKSEIKRELQRLELVVEMIATLEAERDAIVEDAASTHINAKKIRDLHKLKAIGPEFAAVLVGEIFHRHFNNRRQLASYVGYAPSPFQSGNVARDQGISKAGNSKGRTTGIELAWLWLRYQPSSDLSAWFQARVGATKGRIRRIAIVALARKLLVALWRYLETGLVPRGAVLKG

SEQ ID NO: 324697 - protein, 345 aa, unidentified
MLYIGLDIHSKWMTIAILNALTGVMSTINRVPNDPEVLREIFGGFRGKLHGVMEAGTNAWAMYRILQPYFSELVVADPAKLWRRSSDRVAKTDKRDAERMALMLSRGEIEPLYIPDERTQDLRQLVRAKIRSSRLVTKLVNEIGGLLRSWGYVGSRSLISKSGRRELEKAELPARSQRVLELWNELLEKAEEIERELDAVIKEEAQSEPVCQLLETMPGVGPFTSLLIRAEIGDISRFKHSSELASYVGLTPRVLQSGNRCYYGRLGNWGNRWLKYAFGLLAQRIGRSVQDNPLKRTYWRVAIRRHTNAAKIAVARKAVRIVHQMMTHGEQWTEAKASARTKSAA

SEQ ID NO: 324698 - protein, 338 aa, unidentified
MVHVGVDLHKRMSQIAVLTEDGEIAQRRLANDPERLEAFFAQLPPRTPVAIEASGTWWWLVDLLERSGHRPVLSNPKQTKAIAAARLKNDRVDAERLALLLRGDLLPTVWIPPAALREARELIRHRVSLVWLRGEVRNRLLAMLARRNLQPTSGKSWLTGRGQRELQALPLTPIATTIREDCRALLPLLDEQIRRLDDDLRQRWDDDPRVRRLMTLPGVGAFIAIVLVMELGDIDRFPSAKHVASYIGLTPRVRASADRIRSGHISKEGNRLLRWVLVLAATQAARQPGPLRAWFRVMKQRKGTKIARVALARRLVEIVYHVWKHDYFTVLRRGAVRG

SEQ ID NO: 324699 - protein, 343 aa, unidentified
MQIRSVGIDLGKTTFHLVVLGASGKVLVKKKFSQKQLLAFTANIQTSLIGLEACSGAHFLGRALRQQGHDVRLIAAQFVKPFVKSNKNDFVDAEAIAEAVERKNMRFVPIKTNDQLDLQAMHRIRDRLVSRRTAVINQIRAFLLERGMVFAQKPAKLKAAMADVLENAENALTPMMRNMIGILWDEWKTVEQQIDELTDRLEQIASSDAGCCRIRQIPGIGPIVATAIVAAIGNGAAFRKGRDFAAWLGLVPRQYSTGGKAKLLGISKRGNTYLRKVLIHGARAAAMRIKRDRFPIGAWMNALEARAPRNVLVVAMANKLARIAWAVLSTGEDYRPAFSATAA

SEQ ID NO: 324700 - protein, 380 aa, unidentified
MTVLSVHSFRQSVSETAGKDIPVTKSKQTIPVVGGVDTHKDLHVAAVVDDNDQVLGTQSFATTRQGYKLMLTWMRSFGDLQRIGVECTGSYGAGLLRYMQTAGVDVLEVTAPDKLDRRRRGKNDDFDAQSAAHAAFAKRRTVTPRSRDGMVESLRVLKVCRKTAVQARRIALQIIQTTIVCSPDRLRDLLRNMTRMKLIRTLAAWRPDLTGYRDVEEAYKIALKSLARRYLELHDEVADLDNMIEAIVTDLAPELIARNGVGLNSAAQLLLTAGDNPERLRSEASFAALCGVSPVPASSGKTTRHRLNRGGDRAANSALHIIAIGRLRLDPKTQEYVARRIAEGHSKLEAIRCVKRYIAREVFNIIARRHKQINQAQIAA

SEQ ID NO: 324701 - protein, 423 aa, unidentified
MKRIDFLGALFVGIDVSSKTNVVCAMDFSCNQLLTISIANNQPGADELVVALSNILLENAFNSVIIALESTSFYSTHIATYLSDHSALKPFGVAVYCLNPKTIANYRKSFIGMNKTDPKDAYIIADFARVGRITQQPWRGSQFLALQRLTRHRLHIVECITREKTYMISNMFLKFSQLAVDGGSPFSNNYGATAEAVLTEFLSLEEITDMPLDALVDYVCQKSRNRFTNPKQTAAILQKAARDSYRLDKCLYEPLTISIASSFNCISAFEKEVKIINKAIEHTIKGLNVNEYQCLMSIPGIGPVFAAGILSEIGTIADFKSQDAVAKYAGLVWREHQSGDFRSDNTRMSKEGNRYLRYYLIEAANSVKNHNPLYADFYHKKYNEVTTHQHKRALALTARKLIRLIFGLLDKNQLFSDKVNIVI

SEQ ID NO: 324702 - protein, 355 aa, unidentified
MESTKFVGMDVHKDAITIAVMNSAGKVIMESIIETKAVTILQFIQGLRGDLHVTFEEGTWATWLYDLLKPHVTKVVVCNPRKSALLTDGSKGDKIDARKLAELLRGGYLKPVYHGDHGLRTLKELSRSYLTISKDLTRVMNRIKALYRGWAIPCGGTQVYALCHRSVWLSKIPEAGVRRRAEHFYEQLDALQGLRKQVRRDLLAESRKHNATKLLRQIPSIGPIRAAELVALIQTPHRFRTKRQLWNYSGLGLKTHDSAQYRYVDGQLQRSRKPQQLRGLNQDHNHDLKKIFKGAATMASISAGPFHGFYEALLAKGAKPTMARLTLARKIAAVTLIVWKKGVNFDAKHLKQQAA

SEQ ID NO: 324703 - protein, 337 aa, unidentified
MERQRQYVGIDLHRRRSVIVRRDANGEVLDTRRIENDPAELEAVIAQAGREPEVVLEACYGWYWAADLLADAGARVHLAHPLGNNWGHRRVKNDERDATDLVDLLRLGRLAEAWIAPPATRELRELVRYRAKLVNLRSGLKAQVHAVLAKEGVAVPMTDLFGVAGQALLDECRLGEAYAVRVESLRDIVGVVGREVSMLDRRIAAALADDAGYRAVQTIHGVGPVLAAVFVAEIGDVSRFAGPRQLCSWAGLTPRHRESDTTVHRGHITKQGSRLVRWAAVEAVARQKGATPIRAHHHRVADRRGKAIGRVAAARKLLILVYYGLRDGEIRCLAEAG

SEQ ID NO: 324704 - protein, 359 aa, unidentified
MQTQSNKIDFTGQNIYVGLDVHLKTWKVTIMTEKLTHKTFCQPPKPEVLHNYLINNFPGGTFHSAYEAGFCGYWIHNKLLKFGIKSIVVNPADIPTTGKEKVMKTDPRDSNKIARSLRNGDLKPIHVPSLTTLEDRTLVRTRATLVQDLTRYKNRMKSFLYFHGIEIPEIFIKSQTHWSNRFVKWIEDVQMTESSGQGSLIALLDESKHLRSSILQVTKQIIELAKSDRYKESVEMLRTIPGIGLLTAMIILTEIETINRFANIDQLCGFIGLVPSTKSSGEKEIVGDITPRGHSKLRCAIIECAWIAARLDPALNKSYHDYCRRMESNKAIVRIARKLASRINFVLKNNQPYVYSVVK

SEQ ID NO: 324705 - protein, 355 aa, unidentified
MSEIKYIGMDVHRETISIAVLEGSGKLVMESIIETKAATILQLIHSLRGELHLTFEEGTWAAWLYDLLKPHVPKLVVCDPRRNALLKEGSKSDKVDARKLAELLRGGLLRPVYHGENGLRTLRELARSYSTLSKDMARVMNRVKALYRAWGIPCGGLQVYDPRYREQWLEKIPEAGVRRRAELFSEQLDGLRALRQEARRELLSESRKHNASKLLLQIPCIGPIRAALLVALMQTPHRFRTKRQLWTYSGLGIQTHDSAQYRYKGGQLQRSSKPQQLRGLNQNHNHQMKEIFKSTATSAARSAGPFQEFHARLLAKGMKPDMAKLTLARKIAAITLTIWRKGASFDANQLKAQAA

SEQ ID NO: 324706 - protein, 322 aa, unidentified
MSEVVVGVDIAKRKFDVALFINDKFKHKTCLNTMQGFEELSQWLKRQGVERVHACMEATGTYGDELATYMHDAGHRVSIVNPARIKGFAQSELLRTKNDRIDAALIARFCMAMNPEIWTPPPEEIRRLQLLVRRADALIVMRTQEQNRLGTADGSVEASIREHISYLDQEIDKLRRQIAGHINNDPNLRTKRDLLSSIPGIGEATIAVILSALHIFEGVAHVRKTVAFIGLAPREIVSGSSVKGKARICKMGQPRLRKALFMPALVSMRYNPVMVDFCNRLRRKGKNGKVIICAVMRKLVHVIYGILKSGKPFDPNYKLNVA

SEQ ID NO: 324707 - protein, 351 aa, unidentified
MKEYIAFDSHKHYTLMEREDRQTARTVQLRVAHQPGAIRTCLRNCESGTDVAVEATGNWYWIVSEIEQAGLKPQLVHPRKAKLMMGLINKTDKLDVHGLNRLQRNGTLPTVWIPPAELRDQRELTRTRLVLVAQRTRLKNRLQSTLAKYGLAVRDCSDAFGTVARSQWPELLAQLPEQTQWVSQQLLKQLDLLEEQIGQCEKRLNPLLKITPQIERLKSLPGVGLILGASIALEIGEVSRFASAEHLASYAGTTPRVHSSGDKLRFGRLRPDINRYLRWAFVEAANVVALHHQQRPERHVSYLYWRLKQRKGHAKAIGAVARHLAEATFHILSRQEDYVDPALRKGRSKPV

SEQ ID NO: 324708 - protein, 403 aa, unidentified
MNAVGIDVSKGKSMVTILRPFGEIVSSPFEIKHTSSDIHSLIKLIHSIEGESRVVMEHTGRYYEALAHQLSAADLFVSAVNPKLVKDFNNDSLRKIKSDKADSVKIARYALDKWQSLEPYSITDELRAQLKVMNRQFHFYVKQKTAMKNNLIGLIDQTYPNANTYFNSPTRSDGSQKWVDFVSTYWHVDCIRKMSLNAFVEHYQNWCKRKKYAFNKSKAEEIYTKTKELVPVFPKNEITKHIIRQAIDQLNSTSVTVETIRTLMNETASKLPEYSIVMQFKGIGPSLGPQLMAEIGDVTRFTHKESLTAFAGVDPGVNESGSYAQKSVPTSKRGSSNLRKTLFQVMDVLIKTMPQDDPVYQFMDRKRTQGKPYYVYMTAGANKFLRIYYGRVKEYLSVLPDPS

SEQ ID NO: 324709 - protein, 364 aa, unidentified
MASVQFVGLDVHKDTVDATVMSGKSGTPDFEKRYTNSPKVVQRLFKSLQQRGPVAAAYEAGCMGFELQRMLKGMGVECLVIAPGKMPRFTSDRIKTDRRDARTIAKLLKNGEVTPINVPTPEDEATRDFLRAREDLKQDSGRAKQRLMKFLLRHGYTYRGGSYWTMKFARWLSELQFALPLLKETFDSYRLKVLELKDQMRVLDERVVAIAVQKQYAQRVARLRCFRGIDHLIALALVVEVGDFRRFATAASFMAYLGLVPREMSSGGSRRQGGITKSGNGHLRKLLIEASWHYRRKPSVSKRLRERREGQPVELIAYADRAMNRLHQKYIKIVVRGKTKQTAVTAVARELAGFVWGTMTGKIS

SEQ ID NO: 324710 - protein, 339 aa, unidentified
MELKRISIDTSKHIFTIHGVDRQEHPVLRREIRRSQFESFFAKLEPTEVALEACAGSHHWGRLLSRLGHRVKLIPPQYVKPFVKRSKNDRNDAEAIGEAASRPAMRTVPLKTTVEQAATIIVKHREMLVAQRTQAINALRGHAAEFGIIAAKGCPNVTALLSVLASDEALPVSARAMFEAIGQHVADLDTKIEALDRRLLDQHKVNPVSRLLAAIPGVGPITAITMALTVNPGNFESARHLAAWLGLTPREHSTAGKHRPGKISKAGNERLRQLLVVGAMSVIRVAKPGRQSASGWLLQLLERKPRKLAAVALANKMARIIWAMMARGEAYRRQPVTTA

SEQ ID NO: 324711 - protein, 556 aa, unidentified
MLVLDTKNKFRKNFRTAIHENWGVPNPFFGGMSMATARSRKRSRSRPQQVLQKPRGVVHPRVQKVGPEHFGIVSVDCAKARSKWMLCDFYGNVLVRPTVVEHTRAGLDAALAQTRQACEKHGIQDLLVAVERTGRYHRPVQRAFAAAGFEVRIVHPFATKQFRQPSDPGYKTDDTDLAAIHRAAVNGFALIEMDLDETWKTLQLLIRHRRDLVFKMSLVCCQIREHLEAAFPGYAACFDKLWESGCAWHLVQRFAAPQDIAAAGLARLCRGLDEAGVRYQCPTIQRILDWARSAAAPDLAASQHRAIALALNDDRTRKTQEILGLERQIAARLVHTPYILLLSFPGINVVSAADYAGEAGPMEHYANHRCITGRAGLRPCRYQSDQVDRANGPLVKNCNRKLRAAILGIADNLICCNHHFNILGHHWKAAGKDPRDVRIRVAQRFCRISFHMVAGRQVFRHPCLQGRHYILDKLSAFHGEHETPGPELLRDLEAAVAQLPRKEYQAEARPLHEELAKIQAGRRRGPQLLGNILPIVLARLGVGAVQSTASGEEDPR

SEQ ID NO: 324712 - protein, 429 aa, unidentified
MSYRIAGIDVHKKMLAVVVCDVEIESEYEFERRKFSSSPEQLRSLAAWLLEQEAEEVVMESTAQYWKPVWEALERCWKPLCEKREGARRKSGTLHLAQALSNRGRRGRKRDFPDAERLVKRLVARELTLSFVPDAEQRLWRTVTRKKYQLRCDRIRLQNQLESLLEEAHIKLSSLVSDLLGLSARRMLKAIAEGATNPATLAALADERLRATPEQLCDALGACTELNAVYRRLLKMALEELRLIDEQIGRLDQEMASLLSEHQDAVQRLAEVPGLGVDSAQQIIAEVGATAATFPSEKCLSSWVGACPGDDETAGVNYSHRSPKGNRHMRRLLNQAANAAARTKGSIFELAYRRSVPRLGHNQAIGAIAHRQCRLIWLILHQGVRYEERGPAVGKRSKQLRTWRMIRQLRNLGYRIEPPNPQPSQASAQ

SEQ ID NO: 324713 - protein, 421 aa, unidentified
MRSVMHPIACGIDVHKKKLACTIIIAESMQVEPVYHHRKFSTHNYDLVKLVDWLDHYDCHCVCMESTGKYWIPVFNYLEDRDFNIVITHPKYVKSPKGKKTDFLDSIHIAELFQMGEVQPSYIPNKEFRQLRDLSRYRYKITNFISSEKNRVQNCQTVSNISLASVVSDPFGVSASAVFSELLTSSDVDEVHIRSLLRGSLKKKSEEILNSIRGFHLDDDQSYKSLLSLGHMQFLEDMKSALSSEIDKRTSKYHVYIDLATQLPGIGHLSATTLVSETGVDMSVFSGAEHFTSWIGLTPTNNPSADKKKSVRISHAGTYLKPMLIQCALAALKDKKCPYFKIKYDKIKKRRGHKRAIIAIARMMAVCLYHMFKDLKDFHPSDYEELMNPIPPKPRKQDIQDALELLQSVGEYKITPILVAS

SEQ ID NO: 324714 - protein, 403 aa, unidentified
MRARFGTCSTGGDLVALDKALRKLTSKGHRLHVVYEAGPCGFVIWRHLNAQGIECQVVAPSSIPKRAGDRIKTDRRDAMLLARLSRSGDLTPVRVPGAADEAVRDLVRAREDAVRECRNARHRLKALLLRNGIAYAGKSSWTAAHLRWLATLKLEHAAQQIGFQEYLHAITEATARIARLEQAMRDTLPEWSLKPLVQALQALRGVQLIAAMTLVGELQDFLRFESARKLMAFVGLVPGEHSSGPKRRQGSITKAGNSTARRMMVEIAWHYQHPARVTPIIATRQDQLPKAVTDIAWKAQLRLNAKFARLLARRVMKNKAVGRGARARRVRVGHRLRGAQLGLAGCRSPPPQRLIERPANTASNEKSQRRCRTQPTHQMPQGERGAAAPLGNPRQRYWWPCGR

SEQ ID NO: 324715 - protein, 355 aa, unidentified
MLYLGIDQHARQITISLRDENGDVIEARQVSTKPEKIHDFFQRLTAERLKAGEKFVAVLEVCGFNEWLIRMLRDYRCEKVILIQPEHTTKRKTDRRDAAALSELLWVNRKRLLEGKPIRGLRQVEIASTTDQENRRLTTLRKEAGQARTRIVNRIRQILRRHNLQWDMPTKLFPTLRAIAWLKKLVLPEIDRLDVQYLLADLEVIQQRLQELEKAITDHCGASQEARQLLSMPGVAGFTATALACRVGNVKRFPRSSSLANYWGLTPGCRNSGEKSQRLGKITKAGSNMARWLLAQVTINVLRKDARLREWFKRIKRKRGSKIARVAVMRKLATIIWHMLSKRKTYFECRAFGTA

SEQ ID NO: 324716 - protein, 404 aa, unidentified
MISVGIDVSKGKSTVCILKPYGEIVSKPFNITHTQKDLSELSSMLFRLNDEVKIVMEATGIYHLPVLTYLQEKGFFVSVINPYLMKSYRNESLRKAKTDKIDSRIIANYGIDHWFKMKEFQISGVIYEELKLLGQQYRHYMKLHLLSLAELTHLLDLTMPGIKNLLASWNETNRKDKRSDFVERFWHYDVITSMSEQEFTEKYILWAKEKKYVPSQEKAKVIYTLAQESIPTLPSETSSVKMLVTEAVRVLKEVDATLGLILSRMQEIAKTLPEYSVVREMGGVGNTLAPKLIAEIGDVRRFRNGKALVAFAGIDPPPYESGQFVGCNRKISKRGSASLRKVGYETMRSLKMRSRPEDPVYRYVVKKESEGKSKKSAKIAGLNKFLRIYYARVTELYKLSLIHI

SEQ ID NO: 324717 - protein, 349 aa, unidentified
MWSIGIDVHQRSFAVCILDEHGKTVKQMKLRGTLAKLVDTLRRIKEPFAVCYEASCGYGHLHDLFGELAERVVVAHPGHLRLIFRTKKKNDRVDAKKLATLLFLDQVPTIHVPSMDVRSWRSLIEFRHRLVAKRTRVKNALRAVLRSHGVEQPLGEKLWTRCGVAWLAVVELPTRPIALQRDVGIEELAHLETQVKRVEKELNAIAEAHAGVFLLRTIPGVGPRTAEAVVAYIDRADRFARNKQVGSYFGLVPSQDQTGDRNRLGHITREGPATVRKLLTEAAWQGIRRSSHIRAYFERVANGDKQRRKIALVATAHYLVRVMHSMLRSGELWRFDAEKAKPQADPQAA

SEQ ID NO: 324718 - protein, 457 aa, unidentified
MEKTGFLGIDVSKGYSDFILLDSAGYVMEASFQLTDNKQGRQTLKQIITGWQKEGLEELFCGVESTGGYENNWYAYLKTGFKDSKVYVCRINPRGVKAVGDASLKRTITDAVSAENIATYMISFSKKLDYGINTLPINQAFKEGRQHMTYVRMLQKQKVQLSNQLEKLLYQYFGEILVYCRHGAPLWLLTMLATYPTAAAVLKAGVNGLSAIKSISQEKAKSILSKANNNPQNASSQIARIITATAKEILHKDALIKEEKAYLTSIYQTAKEVILMSSIPCIGVDSAVAIMLEIEDVRRFETAKKMASFFGVHPTFKQSGDGLWGNHMSKKGRGEIRAILYMATLSAIRYNPILKQVYARFRAKGMKHHQAAGIVMHKLLRIIYGVLKNETPFNAETDELNQQKAKEKQQTKEQTDKTADKIKKQKKHRFQETSTDAPISRRAEQKIRKQIASQASD

SEQ ID NO: 324719 - protein, 386 aa, unidentified
MDLPVILLAQTQKYQTYHIQGGVIMASIIYVGMDVHTTNFTFCCYTADSDRGFAVAQTEPDYRQVIKYMERVQKQRGEECKFVCGYEAGYLGYSLYHQLTRCGVDCVILAPSTMHQEKGKRIKTDRRDAENIARCLAFSLYSPVYVPTTEEDAVKEYIRMRDDIKADLKRVKQQIIAFTTRHGFAFDGKSYWTQKHLKWLETLVFEHPLYKETLQEYLILYYMLDEKVAVYDTRIEEMSHLEHYEENVQKLCCFRGVAAHTALSLLVEVGDFQRFRSAKHFAAYLGLVPGEHSSSDKQIRNSITKAGNTHLRRLLVEAAQSYNRGAIGKKVQRSRPDRAAILPRSSLTRIKPMNACNANITASHLSPGTILPKPQLRANWPVLSGV

SEQ ID NO: 324720 - protein, 331 aa, unidentified
MTKQSHNKPSNAKPNHTKPSNDKLSSHLGIDVSKRQLDYSFGGGLHRASVANAPGGYAHIIEMCRLRPGVRVVCEATGGYEKKLVRALRKEGIETHVVMPLKVKCLALAMGLMAKTDLIDADKLALFSEKIELKANYVVSEHDELLRELVMCRKHLVERLVQLAGRRENAGERMLALLDKEQKQTQRHLEKIEKEIEQCVAGDEGCAGKIERMCQVKGIGRAVAACVLAHMPELGAIEDKTASALGGLAPYPNQSGPVEKPSRIRGGRHEVRLALYPAAMCAMRYNPVLRRFNQRLKERGKPGLVRVVAVMRKLLCLLNKICADPKFSPLT

SEQ ID NO: 324721 - protein, 408 aa, unidentified
MEVIHERCAGLDVHKETVVGCVRVSERGAVRHEVRRFATTTAGLLELGDWLRQAGCTHVAMEATGVYWKPVWHILEGEFELVLANPAHIRNVPGRKSDVNDATWIADLLAHGLIRASLVPPGPIQELRDLTRTRKQLMREVVQHKLRIQKVLEDANVKLASVVSDVFGQSGRRILKALIAGQTDARKLAALGSDQLSASRETLATALHGKVTAHHRFLLKQHLQMIEHLEQTAREFEAQIEAALEPFRAAVERLMTIPGVSATAASVIIAEIGLDMGRFATPGHLRSWAGLCPQLNESAGKVMSRRLRYGAPWLKTVLVQCAWAATRNKHNYLHAQFLRLRARRGPKKAILAVAASILTAAYYVLRAQVPYRDLGPLYFARLDQDRTVQRLARRITELGYEVQIRKAA

SEQ ID NO: 324722 - protein, 444 aa, unidentified
MLPRDGAVVGIDLAEDKQAIAVVGHDVRVLARKTVRVKAFRLGEALDWALAKAREKGFEKVTVACEPTGPRWLQVQRLCAERAVPLVWIQPLMSRIARGQQDDTRHKTGEADCVLIARLAVELHCYIPEELDEAWSHLRHLGRRREQLITLATASGQRIAGFLLVAWPAVTEACAQPLKSLTWLSAVQLVTCQCGADPARLAAMGLEEFTALVRDAVGGWGGKRAWGPVCAAIFAALTGTEGAVTWSRRGLFRRCADELGDLQHARAELRKAEADMAGALGELGLSRLGDIPGLTAAGAAAILAELGDPRRYDSSSSVVKHAGMSPSGNASGTFYGQAHISRRGRPGLRLAVWRAVWPMPRFNPVMAGKYQRLTADADAAAERAAGRDGAAPGQVTGAAAAAAARRAKARVACAAALDLLPRRPRRILGPAASGRTADSPAEAA

SEQ ID NO: 324723 - protein, 466 aa, unidentified
MSRHHHRRSSPTPRKSPAALERINPNAAGIDCGAAEHVVAVPPDRDATPVRTFSTFTEDLYRLADWLQACGITSVALESTGVYWIPVFEILEARGFAVSLVNARHVKNVPGRKSDVLDCEWLRDLHIMGLLRGSFRPADHIVALRAYLRHRASLLASASTHVLRMQKALAQMNLQLAHVVSDITGVTGLRILRDIVAGERTPTRLAQHRDYRCKASEAEIVAALTGNYRPEHLFVLQQNLELFDVFQQQLAACDRAIEAYLATCTQALPLPATPLPEPRRRQTRSDNEPHFDLRTPLHQLSGADLTQIDGIGPYNAVRLIAEIGTDMTRWPSEQHFTSWLTLAPQNKISGGRLLSARTSPSANRAAALLRMVAMSLSRTQTALGAFYRRLAYRVGKAKAITATARKLAVLVYRTLKGNFVYHDSGADAYTAQHRTRVLRNIRHRAATLGFALVDLNSGEVLPAAVS

SEQ ID NO: 324724 - protein, 351 aa, unidentified
MGEYIAFDSHKRYTWVDRQDRLTGEVQQHRLEHAAGAIRGYLNGCEPGTGVAVEATGNWYWIVDEIEQAGLQPLLVHPRKAKLMMGLTNKTDKLDAQGLNRLQRNGTLPTVWIPPGWLRDLRELTRTRLVLVAQRTRLKNRLSATLAKYGVPARECSDPYGKQGRKELEKHLERLPEQTSWVSGQLLRQLDFVSTQVRELEQRLEELVEVTPEMPWLMSMPGVGVILAATIALEIGEVQRFPDAEHLASYAGTTPRVHASGGKVRYGNLRVDVNHYLKWAFAEAANSVAVNHARCPQRHVSELYRRLRQRKGHAKAIGAVARHLAEAAFHVLQQKQRYRDPAFGRGRASEV

SEQ ID NO: 324725 - protein, 402 aa, unidentified
MNISNKEVFILIFIGIDIAMDKHDIIIINDLGEIIYDHFIIQNNHSGFKKLHTVIQSCTKSVNDIRIGMEATGIYHNNLRDYLISKGYTVYCTNPMLVSLSRKSASPRMTKTDKIDAIAVCRHLMYNLNRLHPYTPPLYHLVELKQLSRDYNSNNQIITKTKGELKRLLQMFFPEFLKHFKPFSKWTLDLLYDFPLPSDYKGLHIESLAQRIRSRSNHVEQAKLIKYIAKNSIGNPNNLNAYLIKFCVSNIIHFNSQNEILKKLISQHMTLYPKILSVPGIGPINGATILGETGDISRFTDKHKYTSLFGIEPIVHESGKYKRKRTRISKRGSKYLRTAIYSAARVACVSPKTRDNKFKRKYIHMMTKGNKHHSTIIFAIAKNMVHSIYKILKTDTFYNDLL

SEQ ID NO: 324726 - protein, 349 aa, unidentified
MHTHQKSSDPVATIGLDIGKNTFHLVGLDKRGSIAMRIKVSRNQLARRLANLSPCLVGLEAGSGSHHIARQIQALGHDVRLLPAQYVKPFLKGHKNDYRDAEAVQRPTMNFVAIKTPEQSDLLSLHRVRSRLVRQRTAVINQIRGLLIERGITVRQAPGPLRKVLPEVLSSPPEALSPRILRLIAELDQDWRRLDQRLEALSAEIASLSEDDCACQRLMSVPGIGPIISSAVVAAIGTGSGFKQGRDFAAWLGLVPKQESTGDRTKLGRISKRGNKYLRTLFVQAAHVVLERRPAAATRALLPWIDQAARRLAHRNLLAVALANKLARIAWAVLARGRDYEPRITSNAA

SEQ ID NO: 324727 - protein, 400 aa, unidentified
MEEAQQFGGFLGIDISKETFDASCIDTKGEKLFSLSTSMSREGFEKLIQQLRSLSVPAESVLMGMESTACYHVNLYSFLVSLGYSVLVMNPLLISNFVKLQLRKTKTDKKDANVIAQFLLLHRDSLSQTFISSGVSELRDLSRQRESLVEQMSSVKSEIKRLLTITFPELEQIAGVFTKSMLRLLCQYPSAASMKQAKRSKIAKILIPGSYGKQTPASIERILKAAQGSVGTSSATKEIILRQKASLLMQLEEHLRELTEMLLELCLAKMRQDMDILTSMRGIGKKSATNFLIEMGGDIKQFQTHQKLIAMAGLDPALYQSGKIDRKGKISKRGNRHLRRVIWLMATKVIQFNERFKQYYLKRIKDGLPYKMAVLATAHKLIRVIFAMLKHKTLFDATMN

SEQ ID NO: 324728 - protein, 349 aa, unidentified
MDRTTYGLDIAKNVMQLHWIDGETGEIGRRKLGRAKLSEFFAQLQPARVAMEACGSAHHWARELGALGHQVELLPAQQVRAFVRSNKDDAADARAIWLAAQHSDIRRAPIKSVEQQAVMSLHRARSHWVSVRTATTNMLRGLLYEFGVVLPGGKKAGLKTIAAKRAEIDDRLPPLMRGLVDLELEALKGIECSIDQLEAEIAGQQRQLDKARTLREVPGIGVLGATALAATLGDASAWRSGREFSASLGLVPAHSGTGGKTRIGHLSKRGDPYLRTLLIHGARAVIANARIKPAWLEELLRRRPLNVAVVALANKMARTAWALIAHGRAYRSEWKSTPPSGCGAQAQAA

SEQ ID NO: 324729 - protein, 402 aa, unidentified
MNAVGIDVSKGKSMVAIMRPFGEIVSAPFEIKHTASDIHSLVELINSVEGESRIVMEHTGRYYEVLAHQLSEANLFVSAINPKLIKDFDNDSLRKVKSDKADAVKIARYALDKWQNLKQYSVMDELRNQLKTMNRQFDFYMKHKTAMKNNLIGILDQTYPGVNTYFDSPARSDGSQKWVDFASTYWHVDCVRKMSLNAFIDHYQNWCKRKKYNFSQSKAEEIYGKAKELVPVLPKDDITKLIIKQAVNQLNSASTTIESLRTLMNETASQLPEYPVVMAMKGVGTSLGPQLMAEIGDVSRFTHKGAITAFAGVDPGVNESGSYEQKSVPTSKRGSSDLRKTLFQVMDVLIKTHPQDDPVYQFIDKKRAQGKPYYVYMTAGANKFLRIYYGRVKEYLSSLPES

SEQ ID NO: 324730 - protein, 353 aa, unidentified
MSPITPDEAQIEVVGGVDTHQDTHTAAVIDLVGRVLGTEQFPATASGYAILLAWMHGHGRLSRVGVEGTGAYGAGLVRLLRDEQVQVIEVDRPDRKTRRFQGKSDPIDAVQAARAALAGERTGTPKQRNGQVEALRNLRVARRSAVNQRAETQRQMKARIVTAPDELRGQLRGLNITNLIATCANLQPDQADAAIPAVAVALRSLARRHQNLSTEIANLDELVEPLVAAINPALLAANGVGPDVAGQLLVSAGENHDRLASEAAFAMLCGAAPIPASSGKTTRHRLNRGGDRQANAALYRVVLVRLRWTHTPVTTCSDAPRKACPRKRSSAASSATSPASSTAHHSNDLQLAA

SEQ ID NO: 324731 - protein, 474 aa, unidentified
MIPFGRMLSLLTTWAVHRFSVNTTKENSMSPRSTESIVPHSALINPNAAGIDVGATELYVAVPTDRCEKPVRCFSTFTQDVHALAEWLKSCKVSTVAMESTGVYWIPVFQILADHGLTVCLVNARHVKNVPGRKTDVTDCQWLQFLHSVGLLRGSFRPPQQVCALRTILRHRDAMIKLTNVHIQHMQKAMTQMNIQLHNVISDITGTTGLAIIDAILAGERDPETLAAFRDARVKSSCEIIAKSLVGDYRPELLFTLRQSLESYRHLRKQIVESDETIKSLLANFDSCVDVEEKPLPDTQKKRRKKDDPHQMRQELYRITGVDLTEIPGLQTTSAYTILAEIGHDVSSFSSAKHFASWMGLCPNNRVSGGRVLSSHTKPVASRAAAALRMAATTLLRSQTALGHYYRRMRTRLGAPQAITATAHKLARIIYQMLKTKTPFNQTLQSEYEQQNIRRRQIRLETQAKSLGFALVPL

SEQ ID NO: 324732 - protein, 407 aa, unidentified
MNAVGIDVSKGKSTVAVLRPFGEIVVSPFDVSHSPKELSKLVTLLKTLNGDTKVVMEYTGNYYLPIALFLRNNGFFVSVVNPILVKDYSTKSLTVRKVKTDKKDALKIASFALDRWNELSPFSAQSEARLLLKSYNRQYNQYNKLKIILKNNLIALLDQTFPGANTLFSTPTRKSDGHEKWVDFVLKFSHSECISKKSFSFFLKSYLSWCKKFGYKFSKSKAQAVYDFACNCSPSLSFSDSSALLVSNAIIQLNSINETLASLASEMNKIAATLPEYDSVMSMFGVGSVLGSQLIAEIGDVSRFPNKKALVGFARLDASPFQSGNFNPQSRSISKRGSAALRKTLFQVMSVVLQRAPTNNVIFQFMDKKRSEGKHFYVYMTAAANKFLRIYYARVTEHLNLFTTTTA

SEQ ID NO: 324733 - protein, 343 aa, unidentified
MQTITTIGLDIAKSVFQVHGVDNDGKVVIRRQLKRRYVLAFFEKLQPCLVGIEACASSHHWSRELQALGHTVRLMPPAYVKPYVKRQKNDAADAEAICEAVTRTNMRFVPIKTPEQQSGLMLHRTRHLFIRQQTSVINAIRAHLAEFGVTAAVGRKGIDELLRVIADPSDKRVPDVVRTCLAALGSQLLSLKKQILDFDRMIMAWHRSNQTSKRLNCIPGVGPLLATALVASVADPKTFRSGRNFSAWIGLVPKQHSSGGRDRLGSISKQGDRYLRSLFVAGALAVIRHAKIHGTKYRPWVAALLARRPTKVAAIALANKLARMAWAMMARGERYNYPASLRV

SEQ ID NO: 324734 - protein, 338 aa, unidentified
MQPFGCMAVSSHLQGRVTNPNLSYQPHLITMSDPVVYLGVDVAKATLEIDGLRSVRQLPNTPAGHLRLRTALPAHAHVILEATGGYERALVAALHAAGIALSVFNPRQIRDFARAKGLLAKTDRLDASVLTLYGQCFEPEADPAPAPAQCELAELVSRRSQLQQWKISELNRIDHHQAARVRAQARRLLARIEKEIGQLDLWIAQIVTADEALRAKSDRMQQVCGVGRTVAAIMLADLPELGTLSRTQAAALAGLAPFNRDSGPYRGQRSIRGGRSTARSTLYMASLSAVTYNPILRTFYRRLRARNKPAKVALTAVMRKLVVLLNLLLKNPNITLAT

SEQ ID NO: 324735 - protein, 356 aa, unidentified
MLNKFNKIPDFTGHDVFVGLDVHKGSWAVNIIVDDIEHRNFAQPPDPIILSNYLTGNFPGANYFSAYESGFCGYHHHRKLLELGIQNIVINPADLPTTDKEKNSKRDPLDSRRISSYLQKGLLSAIHVFDPSHEQFRSLCRMRWTAAKENRRIKNRIRAFLNYYGINPPAYLKPRFWSNRLLHWIEELKLSYDSGTLALKYLISDYLKNRELLLEVTKNLRRQVKLLYPDVYTLLLSVPGVGPLTAMCLIAEIGDISRFRSYKQLASFVGLVPRSHQSGEKDYPGELTYRSNKYLRSALVESAWTAVRHDPALLLYFKERLPGHKSQHIIIKVAHKLLNRIRNVWISHIKYCKGLS

SEQ ID NO: 324736 - protein, 364 aa, unidentified
MKIVGCDLHARQQSIAMVDTETGEFTEKRLLHEGNAVRDFYTSLKGPVVVGIEATGAMQWFLELLEELGIECRVGHPAKIRAAETRKQKHDRRDAEVILDLLVMKDRFPDIWMPSTEQRDLRTLLRDRHQWVKMRTRLQHTLQAIALNHALREGRALWTAAGQRALQGLGLPPYTDQRRDELLGLYTQLDQRILQLDKQVEREAQQRPHARRLLTHPGVGPVTALATEVFLGDPNRFATANQVASYIGMIPCEHSSGKRQRLGKLTKEGNSLLRYLWIEATLHAVVKDAELKRFYRRKLIQKGMGKARVAAGRKLGIRLWIMLRDEIDYEEFCRRGKSRQKGEAHAGMPDYNSGPARAVTGSTE

SEQ ID NO: 324737 - protein, 431 aa, unidentified
MEKIREKAAGIDIGAQKVFVAVEGQEVKSFYTFTEDFEKLCEYLLKSGIETVAMEATGVYWNILYEMLEETGIDVWLVDGRQTKQVPGRKTDVKDCQWIQQLHSHGLLKRCFVAEADIKELRIYQRLREDHIRSASMHINHMQKALTEMNIRLKEVLSQVHGVSGLAIIKAILNGERDKDTLLNLCHQSILKTKKEEVLKALNGRYTKSGLFALRQAFDSYCFYQQQIEQCDHMLQETLKRISGGKEQKVKNQRKPIRHNRPDIDNLGGMMMKIFDGKDATTLSGITDYSWMQLLSETGTDLSRWPTEKHYTSWLGLAPCKDTSGKMKRRKRKMGRPKAGQIFRQIAHSLLNSKRIALGAFGRRLNARKGPYIAIKAVARKLAETYWRIMVKGMEYVELGVKKYEEQILQQKQRSLQRLAKELKVQIIYNE

SEQ ID NO: 324738 - protein, 347 aa, unidentified
MEVTTVGIDLAKNVFQLHGCDARGRGVLRKQLGRRQLLAFVARLPRSVVAMEACASAHYWAREIEKLGHQVRLINPRFVKPYVKANKNDTADAEAICEAAARPAMRFVAVKTAAQQDVQAVHRARQQLVKSHTALMNQVRGLLAEQGLVIPQGSSHLRRTLPRILADGDNGLSGVMRELVSEISERLKYLEERMRQYELRIQQLFRLDERCRRLAEVEGVGPLTATALVAAVGNATEFKSGRELAAYLGLVPRHRASGGRTTLLGISKRGDRYLRTLLIHGARAALRVNQHRHTIRSAWVERLKLKRGSNIAAVALANKNARVLWALLRTGESYRPAPFSARVPQAG

SEQ ID NO: 324739 - protein, 432 aa, unidentified
MTEGTVMEFAAWIGIDWADKKHRWAMRIHGEARVQQGDLESTPEAVEQFFLGLAARFPDRRVAVALEQSRGALLFMLGKYEHLVLYPIHPNTLDHYRKGFYPSGAKSDPGDAALILDLLLKHPERLRPFNPDTVETRTLQFLVEARREGVDDRTRYVNRLTAQLKMFFPQLLEWFDDVDSVIVNQLLRKWPTLEHLQQAKPSRVAEFLRKHRVPDARVEILQQAIVTSIPATKDGAVVEVSVLIVRRLVLQLEALREAIKEHDERIAARTASHPDVCIFSSLPGAVPVMVPRLIAAFGTQRQRYATASEIQCYSGIAPVTESSGKQKWIHWRWACPKFLRQTFHEWAWLSTRKSGWARAYYEGQREKGKSHHGAVRALAFKWLRILFRCWKEHLPYDEARYTQAVQRRASSNPVEIRLKNVSGFTKLDGLSY

SEQ ID NO: 324740 - protein, 389 aa, unidentified
MPTVADRAEAPTAIQTNLAAIFTSLELSRSIWLITSLSPGCGEKMSKHSVPAGDIAALLARFSELKQKALARTGKSFPIVAVQEAGLDGFWLHRVLEKEGIESHVVDPASIATSRRRRRAKTDRIDGETLLRALLAYKRGEPRVCAMVRTPTPEEEDRRRLCRERKVLIAERVEHVNRIKGLLFAQGISGYEPLRRNRRQRLDELMTGDGRPLPTHLKTQISRELDRLELLLDQIKAAEAERDALLAAQQAAAPAPVGKMLLELKGIGAEFAANLWLEALFRHFDNRRQLASYAGLAPTPWQSGSVDREQGVSKAGNPRLRATLVELAWLWLRHQPQSALALWFKERVSRNGGRMKKTFIVALARKLLVALWKYVTAGVVIEGAVMKAA

SEQ ID NO: 324741 - protein, 350 aa, unidentified
MTMVGGLDVHRAQITFDYVDDDGLVHWGQIRPATRKTLRGWLAEHCPDGDAEFALEGCTGWRYVSEELAGAGVGVHLGDPAEIAVLRGPKKRAKTDRADARLLRTLLLQGRFPESWIAPAHVLEIRTLGRLYCTLMDERRAWQQRIHAQLFHQGCPPVRALLSVTGRAALAGAELSAVGGQYVDTALGRIDELSTEIEPLRAQLVNFARHQTGCQALPRHYGIGWLCAAIIWAEIGDARRFSSSDQLVRFAGLDVTVYSSDGKRSPGHLSRQGSPELRWAAFEAAKCAARRGSPDYGYYRKLAAKRDGHNGKNPTLAVERKILRRCHHTLRELGDAAVALPVAEPQEVAA

SEQ ID NO: 324742 - protein, 351 aa, unidentified
MPRTSTVHAVTTIGIDMGKNTLHMVGLDKRGAIVLREKVSRGRIASRLANLPSCLIGIEAGLATHYVARELAALGHAVKQVPPTYAKPFRQGHKNDFRDAHSVAEAVQRPTTRFVPAKTGEQLDLQALHRVRSRLVSERTAVINQIRGFLLERGIIVRQGLRFLRQALPDILAKRTDVLSPRMVRIVADLAGDWRQLDERIEPVTDEIETLAKSDDGCRRVMTVPGIGPIISSAMVAAIGNGATFARGRDFSAWIGLVPKQMSTGDRTILGRITKRGNGYLRTLFVQAARVILLRPASWPKHSFGVWLARAAQRLHRNVLAAALANKLARIAWTVLAQGRGYEARITKPAV

SEQ ID NO: 324743 - protein, 408 aa, unidentified
MQHDTPTSTAGVDWATDTNELCIVDAAGRVVTRRNLVHDTAGIRQLVDALVTHDVARVAIERPDGPVVDALLAADLDVVVITPRQVRQLRARYRAAGGKDDRFDAYVLADTLRTDSHRLVSLTPDSAQTLALRSVVRARTDLVQTRVAVCNQLRAHLRVAFPAAVGMFAALDSPINLTFLTRFPTVDKAAWLSHRRLGSWLAAHGYCGRTPTRVLLDRLQAGPDGLHGDAGAAAAHTTGAYVATLLALHAQIRALEAQIREQLALHPDGHIFTSLPRAGRVRAAKLLVEIGDARGRFPTDAALAALAGTAPSTKQSGRHHVVVFRWACDLKLRDAVIDFAADSRHASPWAAAIYNRHRAAGKTHQHATRILARAWLRVIWRCWQDHTAYDPLTHGGNQPFLDRTDQAA

SEQ ID NO: 324744 - protein, 317 aa, unidentified
MTIISERYAYVGIDVAKDKLDVAVLGQKAISEAFNTQKGITSLVKKMCQLKPRLIVVEATGGYEEEVVLKLFEAGLPVALVSPQRVRQYAKARGLLAKTDKLDAQNLAEYGKNIQPRLFVAKSEAGRRLSAIIGRRRQLADMQKAEKNRLRTAFLEMRGSIQTVIDCLEAEIDHLDSEMRTFMKEHADFGEQEKLLRSAKSIGPVTAATLLADLPELGKLDRKQIAALVGVAPMNHDSGRKRGYRKTKGGRPEVRSVLYMSALSAIRYNSVIKVQYEQLVKRGKEKKVAITACMRKMLTILNAMMRDQLPFREINMA

SEQ ID NO: 324745 - protein, 428 aa, unidentified
MSNTNLAKLAAIDPTTLIVGVDIAKGLHWARFTDYRGLELGEAIKITNDRQGFENILASIATTCKLKGLKKALVGMEPTGHYWKPLANYLGMHGLKVVMINPYHTKRAKELDDNSPTKSDRKDSLTIARLVRDGRYYEVYLPRDVYAELRVLSNTRFGLIKRQNALRNKVTAVMDEYFPEIKAVFKNPLTGKASLQILKSCPFPELILALGLEGVLAEIKKAVKRSVGRKKACELVEAAKSSIGVNYGLTAAHLKVRQLIEELELLRQQLGQIEKAMSIALDETGYKDLILSIPGVGIVSAAIFLGEIGDPLRFEHPNQISRMAGYNLVENSSGQNQSRTVISKRGRKNLRSILYQMALTMVARNSEMKELYQYLKKRPNNPLKKKQALVVISKKAATIIYNLVKKQARYEAELVFNQFRKNQIKEVA

SEQ ID NO: 324746 - protein, 415 aa, unidentified
MALKIVYKICCGIDVHKTFVVACIASTNDKGVTSYESHRFSTYTSGLKTLLQWLLDRNCKDVCMESTGKYWIPVYNILESDCSIVLAHPKYVKAIRGKKTDKKDAKWIADLFKHDLVAGSFMPPADIRQLRDLMRYRFKLTCFKSSEKNRLQNCLTVSNIQLGNVVSDTFGKSAQAILDKILENPADTSFDLEPLVYKSLKKKLPELRDAIDGYITPEQAGKLKVIKAHYENLESRKAELEELILALAAPYQQELTILQTAPGISSDFTAIGIISEIGTNMEAFPSAKHLCSWAGLTPTNNESAGKKKSVRVSKAGCYIKPLLVQCANAVVTSKKHPEIRNRYLRLKKRRGHKKAIIAIARMLLTALYHMLKNGENYNAELYRKSDLPPVNREITVEQALMIARNQGYKIKSATA

SEQ ID NO: 324747 - protein, 355 aa, unidentified
MSDVKFIGLDVHKTSISAAVLDESGKLIMQAVLMTNAAAVLGFVRGLRGTLRVTFEEGTHAAWLHRVLQSEVAEVVVCNPRKNALLKSGNKSDQIDARKLADLLRANLLKAVYHDDSRTLTLKELGRTYRSLTDDTTRVMRRLKALYRSLAIETGGQKLFTRRHREQWLSQLKQPGQRYRAERMFEQFDQMKALRRQVRGDLIEEGHKHTATPILSSIPYVGPIRSALLIARVQTPFRFRTKRQFWAYCGLALETRSSADHQVIAGELKRKTKPVFIRGLNLNHNPDLKNIFKSAATTASASPGPFRDFYENLLTKGMKPEMARLTLARKIAAISLSVWKKGERFDPEQLKTQAA

SEQ ID NO: 324748 - protein, 317 aa, unidentified
MAEVTFPQLIQRACGIDVHLKVVVATIDGAGIQRETRSFKTFTSSLNELKEWLLSNGVTHVGMESTGVYWKPVYKVLEDSIPNVWIVNARHIKNVPGHKTDKMDSEWICKLLLAGLLKPSYIPPKEQRQLRDLTRYRNKLIQQIASEKNRMMRILEDCNIKLSSVVSNTSGTTATSLIDMLCEGKVLTLDDINSVYHGKLSASPEELLEACTGFVEEHHIYLLQMIRKDIDQTQTLVDDLSERIKKLLSKYENVLELLREIPGFSTKVVEDLVSEIGLDMSHFPSEKHLSSWAGLSPGNNESAGKKKAHESLTETNR

SEQ ID NO: 324749 - protein, 313 aa, unidentified
MDAIAPIVGIDVSKDRLDVHVRGLDERFDVPRDTEGIVALVARLRTVAPKAIALEATGGLEAVVVASLAAASLPVLVVNPAQVRAFAGALGKRAKTDAIDAAVIAHFVEATAPEIRPLQDAETRLLADLVARRRQIVAMMTSERQRRAPAPERVRKSIDRLLKALARELDSLDGDIDGAVRHSPVWREKENLLTSVPGVGPVIARTLIAEMPELGSLDRRQIAALAGLAPWTRQSGRWRGKSFIGGGRASVRTALYMGALVASRRNPALKAFRDKLVAQGKPKMVALVATARKLLTILNAIIRDQTPWQPQNA

SEQ ID NO: 324750 - protein, 482 aa, unidentified
MKKRNIYQNQSQELLSLFEAAGNSAQVMCVPMDYAKKDHLVMFCNGHGDILRKPFSVKNSPEGVEYLIDQVTRSCRRRGIKKQHVFFGGEDANSFAENFVSTLRFKGWLIAGVNARDAKKQRTNLQASTDRIDLMGIATMLLNCRANCCPAQSGIYRNLRTLVRHRRKLVVMLTEVKNRVHGIVDRLFPGFLNENKSGIVPFTQSSLYLMEDRFSPKQVRRRKREKLIEILKRFGTSKAEYTADKLQQYAAQVLHTPVEYVDTLQLSLAQHVKHIRCLQESIAQLEKEIALNLTQTQGAFLTSVRGIGIVLAAGVTAEIGDPNEQKPLNNLVSYSGIIPRVKQTGGPDGKTYTYSVAKRCNRILKDYVVKSALHLGLHGPEDLMIDYKRRDASGQHANFSIGRRYLRMGMSLMRTSQIYIPPRLRKTDSTLEERAGYYLMNWPYFREKWKKYGALEAAFAKDRPLGLWRRIVQELYDIKLKL

SEQ ID NO: 324751 - protein, 312 aa, unidentified
MDGIFVGLDISKDAVDVHVQPTGECFVAGTDEAALATVVQRVQAMAPTLVVLEATGGYEIPVAAALATAGLPVAVVNPRQIRDFARATGHLAKTDALDARVIARFAEAVQPAVRPLPTAQAQLLSDLVARRRQVVDRLGAELNRHRQARAAQLQHRIAGHVAWLRQALGELDRDIAQLIRSSPVWRAQETRLTSMPGIGDVTAQALIADLPELGQLDRRRIAALVGLAPFNRDSGQWRGRRMIGGGRPAVRRALYMATIVAIQYNPAIAAGYPRLVSGGRPKKVALVAAMRKLLTTLNAMLRDQRPWEARIA

SEQ ID NO: 324752 - protein, 342 aa, unidentified
MREKRSVGIDLHRRRFTCCVRLEKGRNYLSEWSLEQLPQFIRKLRATDEIAVEVTGNTRLFYEAVAPYVARVVVVDPHQFRVISHSVKKTDPHDARNLALYLAKGLLPEVRMKAKRQAEVASLTQTRDRLVKLRTALKNKVNNLLSARGIELDKESLSSEKGLAWVLEQKLEELAHLELEVIVEQIRSLNRSIARLERVIEEASQKLPGYRNLTSIKGIGSLGAGILLSVIGEVSDFAHEGKLAAYFGIVPRVQDSNETEHRGRITKRGSKLGRTTLVQCALIAKRHSPYLDRYYERIRARRGTGKAIIALARKFLSIVYYTLKNNWIFEDFPNFVLAEAKT

SEQ ID NO: 324753 - protein, 352 aa, unidentified
MPKHTRIVIGGVDTHSRTHHAAVLDPQGRLLGDREFPADRDGYRQLLSWLGRHGQVEVVGVEGTGSYGAGLTRYLGDQRVRVVEVDRPDRRTRRQRGKSDPIDAEAAARAVLAGTATAVPKRRDGIVEAIRVLRTARRGASKARTAAINQLKALLVTAPAPVREALEDLSASVLIATCVRFRPDQTLLADPAHATKAALQAIARRIQLLEAELGLADQQLATLVGRAAPRLLALLAIGNDHAGQLLVTAGQHPERLRGEAAFAHLCGVAPIPASSGKTRRHRLHRGGDRDANKALHLAVVVRMRFCPRTRAYVERRTKEGLSKPEIMRCIKRYLAREVYHALVADFEALHAT

SEQ ID NO: 324754 - protein, 319 aa, unidentified
MAQNDRIVVGIDVAKDKVDACIRRFTLRQTFPNTAQGHRKLVAWLRKYKVGKAVMEASGGYEREWRNVLHKAGIEVRIVDPRRVRSFAQSAGRLAKNDPIDAEMIAWFAETFSQAPGQIPDAAREELAALAKARKALVDVKIRLQAQDEHAAPEPARKAYARVLKSLAAEIDKLEAAISAKVKATPEFAERAEIIESVPGLAQATSAILVAGMPELGQVSDKVAAALIGVAPYDDDSGKRRGERYIKGGRRWVRNGIYMPCLGAATQCNPVLKAHYQRLLAKGKEPKVALVACMRKLIIILNTMLARRQKWNPGRHAMG

SEQ ID NO: 324755 - protein, 345 aa, unidentified
MKNTMIGVDLAKEVIQVCIYINKKVHSNKEMTHDEFLHWLFTTNPSIIIFEACGTSNYWKQRAIEAGHDARLISAKLVATVRQNQKTDKNDALAIVQAAQLPEIRFIDGKNEKQQQLQSVLRLRELSIKQKTALNNQLKALLLEFNIRVSAKNGGLKGVVESVLEDAENGFSCEFRRALDNAWKQFSQLLESIRVYDECLESSINEHKDCKRLLKLEGVGTLNAINLYIALGCAELGAFKKGKDASACIGLTPIQYSSGGKTKLGSIGGHVKNSMLRSQLITGAMAAVSQVIKREAKTKKEAWIQSLVERRGKKCAAVALANKTVRTAYAMLTQGSEYKAEPLAA

SEQ ID NO: 324756 - protein, 412 aa, unidentified
MTETQKRYVGLDTHKQYVMVGAVNAAQEVVLPPRKVSLSEFEAWAKKHLRPTDAVVLEATTNAWYFYDLLEPLVARVGVGHPPHIKLIAAAVVKTDKKDTMTLAKLLSVNMIPPVWVPPQEVRELRALISHRQRLIGQQTRTKNRLRSLLQRLHIGPTGGELFSQANRAWWLKLDLSWSEKLRMRQDLLMLDQLSPLIQEVEAEIERLSIAEPWGEQVPYLLQLPGIGLLTAMTILSAIGDIRRFPSAKKLVGYAGLGAKIHASGQTHRTGGITKRGRKELRAILVEAAWIAIRYNQRWPEQFEALAFRIGRQKAIVAIARKLLVVIWHVLSAKVSDRNADSEQVARFFIRWGRQLRVKTTQGLKASDFARKQLDRLGLGQELERVPYGTLTYCLPPAAQAQPPAEPTTVQA

SEQ ID NO: 324757 - protein, 348 aa, unidentified
MKIVGCDLHARQQSIAMLDTETGELTEKTLRHEGNAVREFYAALEGLVVVGIEATGAMQWFLKLLEELRIEYRVGHPAKIRAAETRKQKHDRRDARLILDLLERDRFPAIWMPTTEQRDLRTLLRDRHQWVKMRARLQHTLQAIALNHALRQGSALWSQAGQAAMQALPLPLYTSQRRNELLLLYVQLQKRIQELDKEVEAQAQQRPQARRLLTHPGVGPVTALATEVFLGDPSRFTTGNQVASYIGMIPSEHTSGKRQRLGKMSKQGNSLLRYLWTEAVMHAAGKDPELKRFYRRKLIQKGMGKARIAAARKLGIRLWIMMRDEIDYEEFCRRGKLRQCGESPCGNA

SEQ ID NO: 324758 - protein, 453 aa, unidentified
MGVDIGKFRHVAGFLSRTLLTRHEHFEGCPTFVFEQSREGFRSFVERLGEYVPLEQTIVLLEHTGHYHRLLEQYLLDLDITVYRVHVQKRVEGMLKTDKRDALSLANALYTQLELGAQVQDKMQLVRRIEPPTSAAAQLQGVMRHRYELGHMSTQYRNKLTAICDQLFPELVQVFRDPNLPTALAFRSAFPTPHAIGVASLGDLRAARQRTFPSDAQLLELQRLADTTIGVTDLDRQRGLVLEQGLLIKELQLVQQHLEDLRTAIVDIVQNCREGQILLSIPPIGPVQAATIIATIGNIANFAKACELKSYFGWAPRKKQTGVTMDRTNLSTRGVRPMKQMLFLMAARATTLDCEWARIYRRLLPRLCTYDEKTKEYRGKKKVLGRIAGQMASMIYALLKTDQETLSQVPPGETPPPPMLYDREAHRKHQEGSYCSLKPNTLPRKILQLPGKL

SEQ ID NO: 324759 - protein, 412 aa, unidentified
MEVVYPCCCGLDVHKKSITACVLWAEAKGKSRKEKRSFGTFTQDLLRLADWLQECGVTHVALESTGVYWKPVWNILAEQFEVLLVNAQHIKAVPGRKTDQKDSEWIADLLQHGLLRSSFVPPRPTRELRDLTRYRVSLAQEINRIANRVQKVLEDANIKLASVATDSLGASGRAMLEAMLAGEQDSTRLAEMSKGLLRNKIPELKLALEGRVTEHHRFLLRQLYDHLRFTESKLVEIEQEIARRVGPFQDEVTRLCTIPGVDRVTAWGLLAEIGLDMKQFPSSAHLASWACLCPGNFESAGKRLSGKMRKGNVSLRRCLSQAAWAISMMKNNYLSALYRRIAARRGAKRAVMAVAHALLVIAYHLLKRKESYRELGADHFDRIDVNRIRRSLVRRLEHLGHRVTLEPVAQNA

SEQ ID NO: 324760 - protein, 311 aa, unidentified
MELGPFVGIDVSQEYLDMAVSGEKRVLRVANDETGLQSLMRQLQEKEPERIVMEASGGYERQAAAVLLAAGLPVAVVNPRQARDFARSLGQLAKTDAIDARVLARFAEVLKPAPARLGEEATEQLRELELRRRQIVEMIVAERNRLRTAPRTADRIQEHLRWLEDEVRRTEKEIEGLIQSDPGLEAKAAILKSVPGVGRTVSATLLGSLPELGLLNRKEIAALVGVAPLNWDSGKLRGKRAIWGGRAHVRSTLYMAALVASRRNPVIRALYERLCAAGKPKKLALVAAMRKLLIILNSMLRTRTFWNAITL

SEQ ID NO: 324761 - protein, 344 aa, unidentified
MEITTIGLDLAKNVFQVHAINNASEVVVKKTFRRVQMRRFFEQLDPCLVGIEACGTSHYWAREITKLGHEVRLMPPAYVKPYVKRGKSDAGDAEAICEAVRRPTMRYVAIKSPEQQAALALHRTRDLFVKQRTQLVNMIRSLLAEFGIEIRRGIEQALMLAKRIAAGEVADIPPLAAKVIAGLAGQVLDLQARLGEIERDLLAWHRSNDTAKRLATIPGIGTVCATALAASVTDPHQFRSGRQFAAWLGLTPLQHSSGGKERLGRISKMGDKYLRRLLVVGMTSLIRRARYRPEAVDPWLADLLSRKPARLVTVALANKAARVVWAIMVRGGVYCRPAGVATPA

SEQ ID NO: 324762 - protein, 401 aa, unidentified
MSKKNTRNALDTSLSYAVIGLDLAKADCAVAAVPCSDDDLGLIDRMDYESLFEQAEKLKPTLFAMEPCCGYSQISLRLQNMGHEVKVISGHAVKNWIATHKSNQKTDLNDATALAKLALYDHDLQPIRVKNVEECRIASVQAIRIQLRTQATKSLVCFKSLCQCWGIVIRRGSLNTKKMAEAVAAVEKLLGAEVASSLMILRDAYKFTMKQINALDKLLDALVEANEQARTMKTVLGIGTQTAARLAVTTGDIKRFPMPRSYAAYFGLAPRNIITGHSGTPSPSKRGALKPVSSRGQGKVSRRGDRVARSFIIQGAATIYMLYCKDMLPECQLRRWLHEQIKRGKPYGKIIVSLAAKLLRIVWALLTYGEKFDSHKAGVPRSVLAAMEKPLKHDAAAESAA

SEQ ID NO: 324763 - protein, 340 aa, unidentified
MESFAGADLHKRVTQLAVLRDGQPPSQFRFSNDPKTVDGVLKKLPRGTKIAVEATGSWWWFVEKARELGHEVSLSHPKQTKAIAHARLKTDKVDAVMLARLLKADFLPTVWIPGEKERYVRELLAHRVRLVRTRTAVINELHAVYAKRNVEVPGMIWHRIRPVPWRAEELSGYAPRIVSENAELLKLINQQIQNLDKELVKAGQEDPQAKRLMTIPGVGVATAVAVSCWIGDIRRFPSAKKLVSYFGMAPKVRQSANRETHGHISKEGSGMVRWLILQAALVGIRMSKGPARGHYIGVSRRRGKKIARIAVARKLLGTIFHMMKEEIDYEEFLRRGSNAQ

SEQ ID NO: 324764 - protein, 355 aa, unidentified
MHNNNNYFNGSSQDFFVGLDVHKKNWTVCIRNSGLFLRKFSMNPSPEQLYNYLKRNYPDGTYYSVYEAGYCGYWIDRELKKFGINNIIVSPSDIPTSSRDKYEKTDPRDARNLAMHLQNRTIKGIYIPDDFHLHLRSLSRLRCQLIKQQTRLKNQIKAYLYFYGIRLPDNSVMLHWTGKFIEHLRHLEFSHPSGKLQLEIYITSLLEVRKQILNTVILLRKTLKENHLNEPILMLCSIPGIGFTTAAALYTELMDIKRFSSFDKLVSFVGLSPSKRSSAETEKILGISFHYNKYLRSLLVESSWIAVRKDPSLTSLFAKYTRRMSKQEAIIRIAKKLLSRIRYVWLNNKDYQEQQ

SEQ ID NO: 324765 - protein, 436 aa, unidentified
MSSLHQIIFTGGKSLNIVYPICCGVDIHKNFFVATLITTEGIQPKYQKRRFSTFNNQILAFKTWLVENNCRDICMESTGKYWVPVFNLLEDSINVTVANPKWVKTIKGNKDDAKDSKWIGDLFRIGLVPGSFIPTKDIRILREYTRYRFKLVSCKSSEKNRYQNVFTVCNVALDAVVSDMFGKSASSITDYIVNSDTFDPEHCVSLLKSSLKKKADEVVESIEGFQMATPQKHRAKMVKEHYDYLSEHIQKLDSMIDALVESFEPAINLLCTNPGIKRNSAITVLSEIGTDMSQFSSSKRLCRWAGLTPGNNESAGKKKSVRTTRAGVYLKPALVEIAHAAVKSQTSPYYRLKYERICKRRGKKRAIIAIARMILTAVFHMLSTGEVWNPVDLNQIDMPPELREKEVQKSLRRALKLLVTHGIIPDTIQIPETVPA

SEQ ID NO: 324766 - protein, 411 aa, unidentified
MQRRENYLYVGMDLHKESHTAVLVNCWNEKLDVIVIENKPSEFIKLEKRVNKKASQLSLSPIYGLENAYGYGRALAVWLIEKGYVVKDINPALAYDQRKSNPTFQKNDEYDAFAVATVLINQLHNLPDAKPEDNHWTLSQLVNRRDILVKDGIRLKNGLHEQVSIAYPSYHKFFCEIDTKTALYFWKTYPSPTCLQNKTVDDLYSEFREIATQTSKSKAELILDCIRNDGDTLRDYQESRDFITQSLARCLEQQKDEIALVEAEIKRMLQFFDYKLTTIPGVNIATASKLIAEIGDIRRFPNADKLARFAGAAPIKFSSAGKGKEQSSKQGNRQLHGLFYFLAVSMVTVPKSGKPNQPIFYSYYQRKISEGKTKLQALVCIMRRLVNIIYGMMKNKTEYRPFVVEEQATEE

SEQ ID NO: 324767 - protein, 367 aa, unidentified
MIVNEVAKNVEKIISIDTAKNSFQVLVVNQKTGKKKNTKVQRSKFVEYILKQGPCLIFMESCSASQHWARLFESFGFTVKLIAAQHVKAFLRNRRVKNDERDAEAIYTCGIQPDTKFVRIKTVEEQTVALLHTLRKAAVSQRVELSNRIRGILAEFGIVVARGKGSFNSEIEALFNECEKIHDVYLRSAISSLFEDYHRLEQREKELSEKIESLNKDNELVKIALTCPGVGPLTASAIVAEVGDASQFRNGREMAAWNGVVPSQHSTGGRSTLGGITKTGNRYLRTLLAQCACAVIQKASRHLEQGKDTHLDRFALRLKLNGKPAKKIMIAVANKIIRILWAMLTQRKAFENKAEETSDTSAELQLA

SEQ ID NO: 324768 - protein, 371 aa, unidentified
MRKVALDLGARKTSYCEVRDGAVIRRATVTSVETLEAELGLQQPPAEVAIEACREAWHVHDLLSSWGNHVVLVDTTRSRRLGIGQHGRKTDRIDAEVLALALERGGIPVAHVLSPHRRELRRQLSVRRALIECRAQLITTARGLAREQGAPVASCAVHHFARHARKLEGNVRQLIEPLLNLLDTINAQLETADVQLEKLCKTEPVVELLASAPGVGPIIAACFVSVVDDAKRFRSPHHVESYVGLVPTEDSSGGKRRLGAISKKGNCYLRALLVQGAWSILRGKDRQDPLRLWADAVAARRGKKIAVIALARRMVGVLWAMWRDGSPYNKARLASASGRGTRQSASALEAHAKTMTSLGSMRPATEAMLQT

SEQ ID NO: 324769 - protein, 310 aa, unidentified
MADIVITAGIDVSKDRLDLALWPEPGANGSFTPGEIEPLISWLGAHRVSRIGLEASGGYEREVVRRLSAAGFVVVVANPLRVRRFAQAKGRLAKNDRADAATIAEFTATLAPPRQLREAALDRLGEYLMVRRQLQQAVTDTVNQLEHLREAELRRLVAAQRAGLKRRIQQLDRRIAARVAEQPHWQALAKQLRSVPGVGPVLAHTLIALLPELGRLTRRQVASLVGVAPFDDDSGRRNGARQIAGGRTAVRGALYMAALVAKRCNPTIAAFARRLAGKKPKVILVACMRKLIAILNAMQRDGKPWQPVAA

SEQ ID NO: 324770 - protein, 426 aa, unidentified
MIAPLVKCCAGLDVHRATVVCTIIREDKRGKINNETREYSSYREGLLELSKWLCSKKVELAVMESTSVYWKPVFEAMEGKVAKLYLVNSRHVKNVPGRKTDVKDSQWLAELARCGLLRPSFIPPRDFREVRFLTRYHMKLGGYIAGEKNRLHKTLDDCGIKLGCVVTNMGGLTAKEIIDALIEGNMTPEEMANLARTHLRKKHEQLRMSLHQDLSDRHRYLLRSIQNHLRWLENQRQLIECQVVKAMESYKKEWELIQTIPGFDELSAAVLLAEVGIDMSCFRKSKCITSWAGVCPGSNESAGKSKSSRTRKGNKYVRQILCEVSNSARKTESQFKYLYQGLVIRRGHNRAIMAIGRKLLEIVFVILSRKEPYKDPKADYEKLLVMRNAPRWISKLRKHGYIPVYLEKNPACTMELSEDNAPLLNV

SEQ ID NO: 324771 - protein, 355 aa, unidentified
MPMLADCIDAVIGVDTHRDTHEAEIARPTGAPIDICSVGNDSNGYAELLAWIVEHAPGPRIVVAIEGTRSYGAGLARAITAAGLTVVECEQPTRTARRGKGKSDAIDAHLAVLSVLQLDANRLPSPRADGDREALRVLRTAREELTTTGTAQTNRLKALLLTGDDTDRRLARGRLFDASLATIARRRAPRDATREQAVRHAEVRRLAVALRAGQRELKANRAQLQAIVNDLAPGLTDRRGIGPMSAAQAIVSFSHPGRCRSDAAYAALGGISPLEASSGQHKRHRVNRGGDRALNKAIHTIAVTRMRRCPDTRAYVERRIAEGKNPKEIRRCLKRYIARQLYRTLTASMPPAVAS

SEQ ID NO: 324772 - protein, 359 aa, unidentified
MSEVTRGFIARVGVDLAKRVIQVHAVDAAGRVVAAKALPRDGFMPWCAQLPPGTLIAMEACSGAHHWTRKLRALGLDARMMAPHFVTPYRMQGKGGKNDANDAAAVCEAASRPSMRFVPLKTPAQQAMLAIHRLREGYKEERNACINRIRGLLTEFGLVFAQRPEVLRRELSDVLEDATNELPALLRMALRQAHLHWLELECHMAWCDERIEAHVRTDEQAKAAAQLCGVGPVTASALVAMVGDFKQFRSGNQFGAWLGLVPRQNSSGGKNSLGQITKRGDGYLRTLLIQGAKAAMVHAKKRTDRISLWMVSLIDRIGWQKAVVAMANKNARILWAVLSKGTAYDPNHVSINPGLPATA

SEQ ID NO: 324773 - protein, 348 aa, unidentified
MIIIGVDFHPEFQQIASVDTDSGEFLEKRLAHREEAEKFYRALAGQKVRVGMEASGHARWFERLLGELQFELGIGDAAEIRTKRVRKQKTDRQDAQLILRLLLEDRFPRIWVPSWENRDLRQLLWHRHRMVQARTRIMNQLQAVALNEGLCCKKRLWRERGRQQLESFRLAPWASRRRRDLLELMDRLNPTIAELSQAIEQEVEKCPAAQRLATHPGVGPLTALAFVLILGTAERFQCGKQVASYLGLVPLEESSGNRRRLGHITKQGSSMLRFLLVEAAQVTVRSLPDWRSKYLHLMMRRGRKTAKVAMARRLAVRLYWMMRQGWDYQQWVKFGSHAGQPGNRDGVR

SEQ ID NO: 324774 - protein, 359 aa, unidentified
MVLIGSDFHPSWQQVAVFDPESGEWMERKLMNGDGEAERFYRELEAPALIGIEACGNSQWFIELAEGLGHVVWVGDAAQIRASYVRRQKTDRRDAGHILKLLMEDRFPRLWTPTSEQRDMRQLLIHRHKLVEIRTRVKNGLQHLALNKGLQKKNALWSVRGRAELEKLPLAGWTLRRREDLFGLLKELNRTLEQLDEAVERTAQDHPQARLLMTQPGVGPITSLAFVLTIGDVSRFRHSKQVSSYLGLIPREHSSGGKQRLGAISKQGNSFMRQLLVEAAQTANRLDEGYRRQYQARCHHKAKGVAKVATARKLAVRLYWMLRQNVGYPEIALIESSPRVPLIGASQIVTLNERSRIQQ

SEQ ID NO: 324775 - protein, 343 aa, unidentified
MRKYAALDVSMEQTAICVVDESGKKIIEGKVQTDPDTVTTWLAEKAGSLEKVGMETGPLAVWLWNELRARGLSIVCLDARHASAALAMMPNKTDRHDAAGLAQIVRTGWYKEVRIKSHAAYVVRALLSARDALVGIRGKIENEIRGLLKTFGVMFGRKVGGFTRRAEEIVAGELAASPEIKRIIEALLEARRAILDRIKLLDSRVRSVAKANATARLFMTAPGVGAVTALSVASAYDDPARFSRSSSAGAYLGLTPRRYESGEISRNGRISKRGSKLTRKHLFEAANALLTRVGKFSSLKAWGLRLAKIAGFKKAKVAVARKLAVILHAMWKARTPFRWSVAV

SEQ ID NO: 324776 - protein, 356 aa, unidentified
MQTQVTKKINFKGKDLYIGLDVHKKSWSVTILVEGMEHRTFTQPPDPLALYTYLQRMFPGGTYHSAYEAGFCGYGIHRELNALGIKNIVINAADIPSSQKDQLQKRDPVDSRKIARALEKGLLRAIHIFDRDMEELRSLNRTRFYLMRDFRRSKNRIKSFLQYYSIFIPPEFDNNQWPLKFIDWLKQIKMKTSSGQDAFSNLIRSFEYHREQILILSRQIRIRVREYDKELYNLLKTISGIGPLTSSALITEIGDINRFPHINHLSSFVGLVPRVKQSGETSYNAGMTFRCNEYLRTLLIESSWQAIRQDPALMQYYQQHVINNKGQKVIIKVARKLLNRIRYVMKNRQPYVTGVA

SEQ ID NO: 324777 - protein, 344 aa, unidentified
MTSIDYIGLDIHKKTISFCAKAQDGTILDQGTIVARRDTLLAWAKARPRPWIGAMEATLFTGWIYDLLKPLAQELKVAHPAMLKAIAASKKKNDQVDARTIADLLRCNLLPECYMAPSAIRDLRRVLRYRNLVVRQATRMKNRIAGLLMETGTPYNKERLHGRAYFSELLESLREVPRSVVELLQLSRGQLEFFATIQRRLLKGLCQNPDLSERVARLQTIPGVGEIMALSWALEVGEVKRLPSIAQAASYCGLTSAQHNSAGKEQRGPISKQRNKHLQTILIEAAKLAPRHNPQLAVVHERELKRGDRNQATLAVARKLVAYLMAVDKSGKPFAMRASGEEAA

SEQ ID NO: 324778 - protein, 413 aa, unidentified
MEKVYDICCGIDVHKKLIVACLRTGRKSELREFGATTKELLMLADWLNESGCEMAAMESTGSYWKPLYNVLEASEIKAMVVNAQHMKAVPGRKTDAKDAEWIADLLQHGLLKASYIPAKEQRELRELTRYRKSLVEERSRELNRLQKMLEGGNIKLSGTVSTISGLSSRNILNFIVEGGVFSEDVFKEMLKKKEISYHLKADPKQLVEDLNGVLSPIQKRMIKELLKHVDELDIHIRNLDDEIDNFMNPEEKEAVKAICEIPGIGETSAKTIISIIGTDMERFPSDRHISKWAGVCPGNNESAKKRKSGRTSKGNPVLRSTLVQCALAAAKRKDSYFSAQYTRISAHRGKKRAAVAVAHSLLIAIYHILKEKTTFCDLGSNYYNQFNKERKANAMVKKLMLLGYTVTLEQAIA

SEQ ID NO: 324779 - protein, 433 aa, unidentified
MRHHGRGQERSTLAEEQFELFVGIDWASESHEICVLDAERRVIDRKTIEHSGAGMTQLCELLLKLSSRQPSRVAVAIETPRGAVVETLVERQFKVFAINPKQMDRFRDRHTVAGAKDDRKDAFVLADSLRTDLHLFHPIQLDEARVIRIRELSRTEEDIVQEQTRAGNQLRELLRRYYPQMLQLCPGMDEGWFLELIELAPTPEAAQKLTRSKVEQLLKEHRIRRLSAEEILTELKAPPLQLAPGAVEAASEHVLLQLPRIRLLQQQRSDVAGRIQSILDEMSQPGQNGEHRDVAIILSLPGVGRVVAATMLAEASQALAQRDYHALRSYAGAAPITRQSGKKKIVLMRQSCNLRMRNALYHWSRVSVQRDDQSREHYTQLRKVGHKHGRALRGVVDRLLPVLMAMLKSGTLYDPQRRANRRTPTIGSPTDQS

SEQ ID NO: 324780 - protein, 423 aa, unidentified
MAYRIAGIDVHKKMLAVVVADVEVHSEYEFKRRRYGSNPEQLRLLAEWLMEQQVEEVVMESTAQYWAPVWGALERYWKPTCQKREGAGPMSGTLHLAQAQSNRGRRGRKKDFPDAERLVKRLVANELILSFVPDAEQRLWRTITRRKYQLTRDKVRLQNQLEALLEEVHIKLSSLVSDLLGVSARRMLKALAEGETSPEALAAMADKQLRATQAQLCDALGACAELKPIYRRLLKMCLEQLQMIEQQISQLDQEMANLLSPHQDAVKRLAEVPGLGVDSAQQIIAEVGAQAATFPSAKQLASWVGACPGDEESAGVSKGHRSPKGNRQMRRILNQAGNAAARSKGTIFEIVYRRLVSRLGHNQTIGAIAHRLCQLIWIILHRNVRYEERAPSVNAKSRQRRTNKMIRELRNLGYRIEPVAIPA

SEQ ID NO: 324781 - protein, 417 aa, unidentified
MKSASNTLPDEPINGVTAGVDWARDDHAVSIVDDRGREIGRHTVEHSAAGLRELLSLLSRHQVGEVAIERPDGPVVDTLLEAGITVVVISPNQVKNLRGRYGSAGNKDDRFDAFMLADTLRTDRARLVALTPDSDATVALRRACRAPKDLVNHRVAVANQLRAHLRNTFPGAVGLFAEIDSPISLAFLARFDSQDRADWLSPKRLAAWLASVGYCGRVDPTELHARLVAAPRGATGDHGNTQAHITHALLAVLTALVDQINALSAHIAEQLALHTDAHIFTSLPRSGTVRAARLLAEIGDCRGRFPTPEALACLAGVAPSTRQSGKIRAVGFRWACDKNLRDAVTDFAGDSRRANPWAADLYRRARSRGHDHPHATRILARAWLYVIWHCWQDRTAYNPDQHGALRQLLNQDHQAAA

SEQ ID NO: 324782 - protein, 459 aa, unidentified
MSPRYKGKKKIPSVSKTPPSLPVLHPHAAGIDIGAREIYVAVPPGGDPQPVRAFATFTEDLHALRDWLQACGVTSVAMESTGVYWIPLFQILEAAGLEVCLVNARHCKNLPGRKTDVQDCQWLQYLHSVGLLRGSFRPPETVCAVRSLLRHRDGLVRAAATCVHRLHKALTQMNLQLQHVIADVTGVTGLAILEAVLAGERDPVALAKLKDGRIRASTDTIAKSLCGDWRAEHLFTLRQCLDTWKHYQGQITACDEEIARLLQGFAAKVDVTAQPLPPRTSTHKTPQKNEPRFEARAEPYRACGVDLTQVPGLQSGTALVLVAELGPGFAERFPTAKHFGSWLGLCPDNRITGGKIMSSATRDVKSRAATALRLAAQALNKAQNYFGDLYRRWKARLGTPKAITAMAHKLARILWHLFKYRQAFNPEVFRKEEEKMQRKKLARLHNTAATLGLKLVPAQ

SEQ ID NO: 324783 - protein, 385 aa, unidentified
MDEEANPTTKNGDKHMKATDKYVGLDVHQDTTVIATADGGRLGEVRSYGTIPSDLQALGKVLGKLGADGARLHVVYEAGPTGFVVYRRLQQMGIECIVVAPSKTPQPKGVRQKTDRRDALQLARLHRAGELTGINVPDEVDESIRDLTRARADAVHDLTRAKQRLKAFLLRQGYRYPGKSNWSEAHQRYLRKLTLPLPALRSVLEEQLLAIDQVTERVKRLDELIEVQVPQWRYYPAVQAVMCLRGFQLNAATVIVAELGDVRRFAHPKNVMAFLGLVPKEDTTGNTRRLGSITKAGNAQARWCLIEAIQKALTPPKVSARLSLRQEGQPAVYKELAWKIQVRLHKRGWHLLHRGVMKAKVNVALARELAGFIWDLLRQVPAPEA

SEQ ID NO: 324784 - protein, 351 aa, unidentified
MDATTVGVDLAKNIFVACVADCAGRIVERREFNRTGFLTWLGTLPAGTVIGMEACGSAHHWGRTAQRLGLAPRLMAAEFVRPYRKRQSVKNDRADAEAILIALRSPGMRFIPVKTEAQQQRLAWHSLRVGWVEERTALLNRVRGLLAEFGLIVDPGPKHLRALLAEREFDTALSPALRGVIQSVRDQLDALDARIGECDRQITAQQADDPLAKRARDLPGVGLITADAVTASVGDASMFKNGRQFAAWLGLTPSQSGSGGKTKLGRITRRGDDYLRTLLVQGARSVLAATMRKQRRESPDQLTRLQQWIVALNGRIGYHKTLIAIANKHARQLWAVLAKGEAYNAQAWQRA

SEQ ID NO: 324785 - protein, 369 aa, unidentified
MEQFIGCDAHKKYSVFVAVNERGEASPAVRVGHDREQYRQFLERLPAGSQIALEASGHYYWIVDEMEAARHHPRLAHPLEAKKRMGKTGKKTDKVDANGLGILLRNGTLPEVWIPPAELRDQRELLRLRMFMVQQRTRLKNRIQGALARYNIQIEVQDVFGVEGRRRLGMRLGELPEHTRQSVGLELVTLDFVEIQIEEIEKRLEAIMQVTAEADLLKTLPYVGRILSMVMTLEIGRVERFPSAAHLASYAGLVPRVHSSGGHTRLGQICGDVNHYLKWAFIEAGNLVVIHQKRLAGQHVVRLYQRVKRKRNHQKAVVAVARHLAEAAYWILKKQEVYREPKLKVPAKAQAVKHSFVDARVSAEPAIAL

SEQ ID NO: 324786 - protein, 363 aa, unidentified
MLPTDVPTNVAAMDEEIILGVDTHNDAHVAAVITVLGALVDTQAFPTTAAGYTALVSWARGHGRLRRAGVEGTSSHGTALTRHLHRQGVQVIEVNRPDRAVRRRRGKTDAVDAENAARAVLSGQATGLAKSGDGAVEMIRMFKIAKDSAVKARTQAINQLKAVLVRADPTLRESLSGLGRVALIRACAALPSTTDHSTHAATTTVLRSLARRVLALTDETRTLQQQMRSAIAACAPQLLDQYGVGPDTAAALLITAGDNPDRLTNQAAFAALCGVNPVEASSGKTTRRRLNRGGDRRANSALYTIVLTRLGRDPRTRDYAIKRASEGKSTKEIIRCLKRYVAREVFPLITAALPPATTPNPAT

SEQ ID NO: 324787 - protein, 401 aa, unidentified
MIDTRDVAVFLGLDVGKGEHHATGLTPDGKNVIDKPLPNSEPKMRAMLDKLTAKYGRVLVVVDQPASIGALPLAVARAAGCEVAYLPGLTMRRIADLYPGEGKTDARDAAIIADAARTMPHTLRSIELDDETIAELHMIVGFDDDLAGEVTRVANRLRGLLTQIHPHLERVIGPRIQHPAVLTLLEQFGSPKAIRKAGRRRLVTLLRPKAPRMAERLVENIFAALDEQTVVVPGTDAAAVIVPKLAKNLAALLDQRKQLAADIEELLTSHPLSELLTSMPGIGVRTGARILIDVGDGSAFPTAGHLAAYAGLAPVTRRSGSSIRGESPSRRGNKHLKRAFFLAAFASLADPASRAYYERKKTEGKRHKQALMCLARRRVDVLFAMLRDGTFFQPHTAPQAT

SEQ ID NO: 324788 - protein, 362 aa, unidentified
MIQLFQWALSLPYGGDICMDRVYVGLDLGSSCFHQVVINSDGAVTINRSFSTSESNLRRAFSDLQGEVHVHLEAGELAPWASAVSASLAARVVCSHPRDNAWIARDGDKCDRVDAFKLAELLRLHRFKEVHYPQLPARRDFKTLVQHYDELTAQQARLKTKLKARLRMQGVIVSGARVFSVTGRQPVLARVASPNVRTALTQLFSILDQSVTAQTEARLLMLRAAQTLPEIKLLRTAPGVGPIGACRFSAYIHTPQRFSSKRKLWKYCRLSVSHRSSNGKPLRRPRLDRSGCGRLKDVSRKAFDVAIRARTDNAFKRAYKRALETTHDATHARLTVQRKIVATLRAMWLTNTPYTEPERPRS

SEQ ID NO: 324789 - protein, 412 aa, unidentified
MRRVIGIDTHRTFGEVVIWEEGRLRHVGRVDMTRTALEGFGKKLLATDEVVIEATGNCMAVSRVLTPFVKRVVIANPLQVKAIAHAHVKTDKVDAGTLASLYAAGYLPEIWTPDAATERRRRLVARRYQVVRHRTRIKNEVHSILYAHLIPRCPHADLFGRLGRTWLTSQPLPDDERAAIERHLRELDRLGDDLRVLDQEIAQSALDDAAIKRLITITGVNLAVAAGLVAAIGDIGRFSSPQKLVSYFGLNPRVRQSGLGAAHHGRISKVGRSHARAMLVEAAWATAKAPGPLHAFFVRIRARRGHQIAAVAVARKLAVLCWHMLTKQTDYHWARPALIANKRRAMELQAGRPQKKGNKRGSTYAYNVKALRDQEMRLAQQAEQSYENLVAHWQPRPAKKQARGRLKPAGLE

SEQ ID NO: 324790 - protein, 323 aa, unidentified
MQGQSLLEARSAQPVYVGIDVCKGYLDVYLHPLTDRWRARNDRDGIRRLKRQLSKHEVTLVVMEATATYHRLAHRSLSQSGLAVAIVNPLRSRLFAEANGTLAKTDRVDAKMLAMFGQAIGPQARPPAPEVIEALQELVHARNAATAERTALANRLAASQAAFLRKELRGRLKSLEGHIERLETEIAARITADPALARRYEILLSIPGVGPGVAANLLIDLAELGSLNRHAIATLAGVAPFADDSGEATGQRHIRGGRASPRRALYWAALSASRYNPNLSAFYKRLVESGKKPKLALTAVMRKLVILANTLLKENRLWVDHCA

SEQ ID NO: 324791 - protein, 369 aa, unidentified
MEDRITYVGLDVHKEGIVVAVAEGGLRGEVREYGRIANTAAALDRLMRKLGSTGVRLRFCYEAGPCGYGIQRHLSARGHDCVVVAPSLIPKRAGDRVKTDRRDAAGLARLHRAGELTAVWVPDAEHEAMRDLVRARLDAVHALRRARQQLSGFLLRQGCHYGRPAWTKLHRRWLAGLKFEQAVHHIVLEDYIAAVEAAEARRGRLTAQIEAMLPDWTLAPVVAALQTMRGMALVNAATLIAELGDLSRFANPRQLMAYLGLVPCEHSSGASVRRGGLTKAGNSAARRLLIEAAWCYRFPARVSRELLLRQEEQPKPIREIAWKAQLRLCARYRRLARSGKPANVVTAAIARELAGFIWAIARRVPLAAG

SEQ ID NO: 324792 - protein, 429 aa, unidentified
MTVNNGTPQRVTLVAVDIAKNWHDVLIESPARGRRRRLRLANNLEDFEQLAGYLRSLKSPVLIGFEATGNYHRPLAYFLHRQGFELRLIPTLALARTREAMHNSWDKNDPKDAQVILHLLKFGLAQTWHDPVVNGINDIQELSKTHFQVTLARVRVWHTLRNHYFALYFPEIDRFIRSDHSVWLVQLLASFPTPASITALSEGEFQTRAWNLVGRKVSKRALLAEIYAAAGRSIGVPVPLDSAAVAMFRLVLGEYLDLHRLREQIAERAAIMLGDNPDSRRLMTVPGIGPANALTILAEAGDLRRFRHHRQFLNFCGLNLSTLQSGKSRGQSHISKYGNARLRTALWMAAQTAIRMRENSFRRKFDNYVRGNPLDADLRRKAYTAIAAKLARVIFGLIKGGADYRPFFEHEFQVEEPSRASAVGATSTP

SEQ ID NO: 324793 - protein, 386 aa, unidentified
MPQLNDLSRSLVILEQDATLIAVIEMGQSSWLVAGIVPGVERSPLKKLAVDESALLKLLNRWREEAEKAGHRVERIAIAFEAGRDGFWLARWLRARDIEAHVIHASSVAVSREHRRAKTDRLDTELLKRAFLGWLRGERDHCKMVAIPTLAQEDAKRPNRERESLVGEQSRIVNRMKAALARLGIRGFNPKLKKAVERLDGLRTPEGEPIPPNTLAELKHDMERRRLVRSQIRDIEGTRLERLVQGHGEGPHVMVRLLARVIGVGVETADMLVQEVLSRNLRDRRAVARYGGLTGSPDESGKKRREKGLARSGNARVRRGMIQLAWRFLMFQKDSALAHWYYARTKNAPQTRKTMIVALARKLLIALWRLVREGAIPEGIVLRPAL

SEQ ID NO: 324794 - protein, 368 aa, unidentified
MNTVKFIGLDVHKKTITIAIADPGRQNKPRVYGAIANDLDAVDKFCRKMVSTASRLYFVYEAGPCGYGLYRHLTAKGFDCMVAAPSLIPKKSGDCVKTDRRDAAKLAQLHRAGELTAVYVPHPQDEAMRDLSRARHDAVNATQRAKQRLKTFLLRNRIVYSGRCAWSKAYFRWLADITMAYPAQQVTLQEYIDAVHEGLQRVQRLTDQIRHLVLDWRLAPIVSALQSARGVSLVVAVTLLAELGDLNRFQKPSQLMANLGPVPSEHSSGERTQRGAITKTGNRHVRKALVEAAWAYRMPARVSRLLLKRQQGVPEQVCRIAWKAQLRLCTRFRKLAARGKPRQKVAVAIARELSAFLWAMAKQLQPVA

SEQ ID NO: 324795 - protein, 313 aa, unidentified
MSQHNLNILYAGLDVAKSSLQLHLAGRFHVVTNDAKGHAQLLKRLRVYPIAHIVCEATGGYEQPFVRVLHTARIPVSIVEAGRVRYFARAQGQRAKTDPIDAAVLSEYGATFQPAATAPASPQQEQLAGLTQRRRQLIQMLAMERNHAEHYTDAFRLRQTRQLRKTLEKQIDQCDAAIATIIAQDTELARKAKRLEAIPGVGPVVAATMLAEMPELGKLTTQTAAALAGVAPYNRDSGGQNGIRRINGGRGAVRCALYMATLSAVRHDRILKEFYLRLRAAGKKPLVAMTACMRKLVILMNRLLKNNDFQLAN

SEQ ID NO: 324796 - protein, 311 aa, unidentified
MNDTIGVDISKDKLDAHWLSKREHRQFCNDRKGVKALSLWAREAGIARVIFESTGVYHRLVETGLAEHGISFARVNPRQARRFCEGAGQMAKTDRVDAAMLAKMGALLELKADSPKSEALYDLKQLATARQALIKDRTAAKARLAATTHKLLSRQIKRRLKHIESDLCQVSEMIDAIVAADEDLSARVETLTSIPGIAKVTACAILTDMPELGQMNGKQAAKLAGLAPISRQSGKWQGKERIQGGRGSVRRAIYLPAVVATRFNPDMKAKYEQLISSGKCKKLAITAIMRKLIVTANALLRDNRKWAQDSA

SEQ ID NO: 324797 - protein, 248 aa, unidentified
MTYVGIDVSKVTFVVAYSSVKTNKTRTFKNTVNGVHEFVQTISASEHNCVLEATGNYSALLVYLLSEAGITISLENPLKIKNFARVMLTVTKTDEIDARLIALYGEKMQPAPYKLRSDAILVLKQKRTVLRQLKKQLVATRNLKGSMEVLPFFDPKCKKTIEKTITFLEKQIKEMEEELASLAQGEYKKQMDLLTSIKGIGVTLAAALIVATGRFSYFDNAKQLTRYLGLSPTYQQSGTSVNVKGHIN

SEQ ID NO: 324798 - protein, 371 aa, unidentified
MEHTRFIGLDIHKERISISVAESGRSGAVEYLGEISNDPVAIGKLCDRLGRPGKTLAFCYEAGPCGYGVHRQLTSLGHRCDVVAPSLIPTKPGDRVKTNRRDATMLARLHRAGELTPVWVPNADHEAMRDLIRLRSVVRQIVTRARQHLQGFLLRHGRKHGRGTAWRMAYRRWLSTLAFEHPAQQIAFQDYTDAVMDAERRLKRVEEQISGLLPEWNLRPVVDALQAMRGIALINAVVLVAEVGDFTRFSNPRQLMAYFGLVPGERSSGETIRRGGITKTGNTRARRALVEAAWAYRMKARIGRHKVDRIEALPKIIRDIGWKAQVRLCTRYRRLRARGKTANVVNVAIAREMVGFIWSIACTIQSAPKTA

SEQ ID NO: 324799 - protein, 326 aa, unidentified
MEHELHYIGIDTAKEKLDVDVLRPDGRHRTKKFANTTKGHDELVSWLKGHKIDHAHICIEATGTYMEPVAECLYDAGYIVSVINPALGKAFAQSEGLRNKTDTVDARMLAEFCRQKRPAAWEAPHPLERALRALVVRHQALTDMHTQELNRTETAREVQRPSIDAHLLWLEAELKRLEKQIKDLTDDDPDMKHRRKLLESIPGIGEKTSAVLLAYIGLKDRFAHARQFAAFAGLTPRRYESGSSVRGASRMSKAGHVSLRRALYMPAMVATSKTEWGRAFRDRLAANGKKGKVILGAMMRKLAQVAYGVLKAGVPFDASRHNPVAA

SEQ ID NO: 324800 - protein, 342 aa, unidentified
MSQGRVGIVVVERGRPGSMETTQGACFAGIDVAKAKLDVAWTTEPTASWQTTNDAAGWSVLVSRLLLLAPTLIVLDATGGYEAGAASALALAGLPVAIVNPRQVRDFAKAMGILAKTDALDAHVLATFAARIQPACRPIADELQADLRALVARRQQLIEMLLAERNRFELARPAVRSSIRTHVRWLEARLRDVDRDTRDRIQQSPIWRAHDRLLRSVPGVGPASSARLISSLPELGHLTAREIGKLVGVAPLNDDSGRRSGPRRIWGGRAGVRHTLYMATVSAISCNPVIGAFYRRLRGQGKPGKVALIAAMHKLVTILNAIMRTHQPWTLTPAHLTDGASA

SEQ ID NO: 324801 - protein, 354 aa, unidentified
MWIVCALDVHRGQITYLTLDVGSGEVSRGRISPATRQSVRAWLAQFDGVDDLHFALEGTVGWRFVVEEIERAGHRAHLADPAETAARRGRKRRAKTDRTDCELQLRLLLAAELPESWIAPAQILELRTRVRLRKTLIDERTAWQQRLQAQLFHQGAPAGLKPRTRAGRDALASVELSPAGGELVGLALRMIEAIDRELVPLDRTLALYGRRQPGCRALIGRLYGVGPVTATAIVAELGDARRFGRSDDAVRHCGLDVTVHQSDRKRAPGHLSHEGPELLRWALFEAALQACRPASPDYEYYRQVARRIDHNRACLSVARKLCRRGYHILRELDDEALAPIEPAPIVEEVVAAAA

SEQ ID NO: 324802 - protein, 443 aa, unidentified
MRAVPEEIPDADSEQVLARVCAIDVAKEFGTVCTRLPSTAGRRSSRVWQVAATTNAVTDLAAQLVAAEVQKVTVESTSDYWRIWFYLLEAAGLDVQLVNARDVKNVPGRPKTDKLDAVWLAKLTEKGLLRPSFVPPASIRALRDYTRMRVDLIRDRTRNLQRMEKLLEDALIKVTTVASSLRTLSTRDMIEALIRGEHDPNTLAELARGRMRGKRTALIEALTGRFKEHHGELARILLDQIDRLDTQIAHLSDRIDAVLAEIDPPQPSGDAKPAQDEITVSTAWQRLCEIPGISTESAQMIIAEIGLDMSRFATPAHLVSWARLCPRTIQSGTSLSAGKAGKGNPYLKGALGMAAAAAARGGDTFLAERYRRLVKRRGKSKALVAVARSMLVIVWHLLANPDARFHDLGADFYQRRVDTGRKTASLVRQLEALGLAVTLQPAA

SEQ ID NO: 324803 - protein, 463 aa, unidentified
MRKKVENKNSGRRDKPKVDWKALDIVHPNAAGVDIGGSEHWVAINPELDEKPVRCFQCFTEDLQQMADWLIERGVRSVAMQSTGVYWIPVFEILQQRGLEVYLVNARHTKNLPGRKSDIAECQWLLKLHTFGLLNNSFQPSDEVRRARTLWRHRGGLVAQASSTIQRMQKALTEMNIQLSNVLSDLSGVSGMRIVRAILDGQRDPKALAALADPQVKASKQVIAKSLEGNWRQELLFVLGQEVEMYGMYQDRIAACDRELQQQLRVRASKVDLQAQPLGPRPKGKRARGNAPKFDLRSELYRISGVDWTQVDGIDVQVAQSVIAEVGVDLEAFPSERNFASWLGLCPTNDSSGGRVLNRRTPKVVNRAKVAFRQAASSLIRSQSYLGAQYRRLRTRLGPPKAITAMARKLACLFYRLLKQGKQYVDKGAEYYEQRHREQQVRFLIKRAKQLGLQVVAPATPNA

SEQ ID NO: 324804 - protein, 355 aa, unidentified
MKYYTSTTEFNCGVDLHARQMYVCVMDRQGKKLVHTYIKNNDFNFFLKLIEPYKHDLTVCCECMFGWYWLADACQAAGLKFVLAHALYVHLIHGGKNKNDRIDSEKLTHLLRSNLIPQAFVYPADMRPVRALLRQRIFFVWQRSELLARVHSHQLAHNRTPPKQTRRVRDTWEEQVLAAEEHPLRLFALKNELAMIRHFDQQIPQLESELLRQTKQIAGQQFALLQTVPGIGEILALTILYEMGTIERFPTVKDFLSYCRLVKGTVASAGKIKGLRGAKLGNPYLRWAFGEAAVIAKRDHFRIGPLAQRLEAKMNGNKFKANTVVAIKLARAVYFMLKNKTVFDPDRLVAALAKN

SEQ ID NO: 324805 - protein, 352 aa, unidentified
MIGADSHKRTHTLVALDEVGRRLAETTVAATETGHLQLIQWAGRWDEVSFALEDCRHLTRRLERDLLDAGQRIVRVPTRLMAGARRGGRQPGKSDPIDAEAVALAALRHDGLPVAELDGPTRQVKLLVDHRRDLVAERTRIQNRLRWHLHELDPGLAVPSRGLRRYCVLDTLAEQLHHFDGVVARLARDQVGRCRELTEQINALERELRDLVREQAPSLLALPGCGVLGAAVILGETAGVHRFRSRDAYARFTGTAPIPVWSGDSRGKVRLNRGGNRVLNCALHMIAVTQARGVGPGHAYVAKLLARGKTRTEALRLLRRRLSDAVFAAMRCDANFRNELSSTVQPYLRAAA

SEQ ID NO: 324806 - protein, 399 aa, unidentified
MRKVAGIDVHKEFLEVAYRLPSGRIETKQVEYTPKGISRLIKLLRRHGITDVYMESTGDYYLPLYYALKGAGIRPHVMNAYKIRRPEPNKTDKKDAIWLLEIGESEFFSDSYVPDEDIQALRFLIRKRMKLVDRISDIKREINSILWRLGLQVAHYAKKLRSKKKRMLLLALLEGRLRPDSINDSDVRHLYDILSKPEFRAYVFVLRSRLVDLAHLESQLEEFDREIVALARKFEDTIRILMSVPGISFILAVGILAEIGDINRFPSPAHLASYAGLVPTARNSGGKRRSGRPSKKSNKYLRHYMFLAGMAATRSNSRVVREFFTRLLGRGKHYKVAVVAVARKLLCVIWYLLRRDKFWCEDGYFKHPRRLPRGRRIRISVREAIAILVRAGYEVRRKV

SEQ ID NO: 324807 - protein, 348 aa, unidentified
MEAYDGPQIVGMDLHRRRSVLVRMAEDGHKLSTARIANSPARLAAEIKRAGLHPKVVLEACYGWYWAADTLTAAGAEVHLAHPLGVKEFSHRRVKNDELDARDLADLLRMGRLAEAQLAPAEIRELREITRYRGKLVQLRTSCKDQVHGVLAKLGIEVTCSDIFGAWGTQWLDELPLPQPYSWKVASLRQLTGWLSAEITVLEQVTADLLAGHDAYRAVQALPGIGPVPVAVDGIGDITRFRHPARLCSWAGLTPRHYESDTKVVRGRITKQGSRPLRWALIEAVQRTPAGTPIHQARDAIIARRGPQARNIAKVAAARKLLTYVFYAMRDGHVRALDTPGAAAPETA

SEQ ID NO: 324808 - protein, 345 aa, unidentified
MDTIGLDLHKRESQLCIIAADGTIAERRIVTSRERFSAVFGERPPARVLLEASTESEWVAQHLESLGHTVVVADPNYAPMYATRRRRVKTDKRDARTLAEALRLGAYRVAHRVSAERRHVRAELAVREALVRTRTRYIALAKALVRRDGLRVASSEAEHVPARIAALELSPRLADELAPLFVVLGPITEQIAAADRRITAIMHADPAVTLLATTPSIGALTASAIVATIDDVTRFASAHQFAAFLGLVPSERSSGEQRRVGRITKTGNARARYLLVEAAWRILRSKSADTAALRAWALGIAARRGKRIAVVALARRLAGILYAMWRDGHAYDATKLRMPRPRVAA

SEQ ID NO: 324809 - protein, 389 aa, unidentified
MKIYVGIDIAKLNHFAAAISSDGEIIIEPFKFTNDADGFQLLVSKLESFDMNSIIIGLESTAHYGDNLVRYLVAEFYQVCVLNPIKTCQMRKNNILKTKTDKVDTFVIAKTLMMQDDLRFVSFYDLDIMDLKSLRRFRQKTIKQRTRLKIQLTTYVDQVFPEIQYFFKSGLHQNAVRALLKEAHSPKEIASMHMTHLANLLKVNSHGHFTKEQTKELRVLTQKSVGANDSAISIQITQTIQQIELLDSQLEKIEAEMTDIMKFNDSVIMTIPGIGYINGGMILGEIGDIHRFSNPNKLLAFAGLDPSVYQSGNFQAKTTRMSKRGSRVLRYALVNAAWNVVRNNATFKAYYDAKRAEGRSHYNALGHCSGKLVRVIWKMLTDNVEFNLK

SEQ ID NO: 324810 - protein, 404 aa, unidentified
MKGPIVSIDVSKGKSDYQAFKNLNVKYAGSRSIKHTKEGFDEIVNLVREMEKKLETEVCVVYEATGVYHRVLKKVLEDNNIKQFIINPLLSAKTRKNDSLRCPKTDKLDPKSIAKTYYSHSLHNSHKQETIYHELRELSRYYEDILVHIRKDKVAFRAQLDIVFPGYDALYDDLYGPVALAVIEKYPHPEMLQKKKINTVSKVIQSKTCHRQAVSDTMADKAIEYSKTIYSGCDKDDIEVLILQRFIKKLKEDMAEAERTIGEMIKLAQELPDFSIIKSIPGIGDNLATRIIAELGDMTRFKKKNELVAFAGLDPRISESGQNDGDHMHITKKGNKRLRCLLYLAVTCSIRLKRDDNSIKDFYIKKKQQSNPMCSKAAKTACASKLVRIIYSMCKTGELYQYNK

SEQ ID NO: 324811 - protein, 339 aa, unidentified
MELYAGIDLHARNSYFAVVDAAGARVLLKRVANDSESVFSVLEPYREQLRGVVVESTFNWYWLVDGLRDGGFTVHLANPSRMQKYSGLKHADDKSDAVWLADMLRLGILPEGYIYPHQDRPVRDLLRKRMHLVRLRTSLINSLQNILARNGPARLGASKIKQVTQDHISPLLEGDDDLAMSGRVSKQIIDYFTAQIGTIEKFVEARVEVKQEYDLLRTIPGVGMILSLTIMLETGPIGRFAKVGNYASYCRKVPVCWTSDGKKKGDPNKRNGNKYLAWAFSEAAELARRFDATVKAYYNRKASKTNFMVAHSALAHKLARAAYYIMRDQVPFDKERLFA

SEQ ID NO: 324812 - protein, 361 aa, unidentified
MTKNPRVVIGGVDTHKDTLAACVLDAGTGTVIGVGEFTANPAGYRQVLTWMLGLGAVEKVGVEGTSSYGAGLSRHLSSAGVEVVEVDRPDRKTRRHQGKSDPIDAEAAARAVLAGRATGAPKDNDGDIESIRILRIARTSAIKARTQAANQIHALVVTAPEPLRAHLRDLSLTRLVNTAATWRPGPTPTDTMTTTKIAVQTLARRHLALTREIKELDQMLAGLVQATNPALLQAKGVGTDVAGQLLATAGDNPGRLRSESSFAHLCGVAPLPASSGRTTGRHRLNRGGDRQANRALYIIALSRMRHDPRTRGYVQRRTTQGLNKKEIIRCLKRAIAREIYHLLTAPTAVAAPTTNSPQPAA

SEQ ID NO: 324813 - protein, 352 aa, unidentified
MKKYSAVGIDVSDKDMKLIGLDDAGEVCLRRVVAATHDAIGEAFGEMEHTVIALETGGHTGWIARILLQLGHEVVVANTRKVRAISCNEVKTDWRDAEILARLVRSDRKLLHPVILRSEQTQCDMNVLKARDALVRSRTLLVCTTRSLVKNVGERVKACSAESFARHCREEVSEKTRQTLLGVLDALDTLNRQIAWYDGCIERVAESRYWEPIQKMRQIVGVGPITSLAFTLCVENPNRFKPRRQIGPYLGMTPRRDQSGEIDKQLGITPAGPEMARRLLVSAAHYIMGPFGPDTDLKRFGEHLMQRGGKNAKKRAIVAVARKLAVLMLTLWQKNEVYEPLRNERMKGTVAA

SEQ ID NO: 324814 - protein, 397 aa, unidentified
MYIVGIDIAKRKHEAAVIDGEGTVIIKPFSFTNNCSGYNRLLAMLTKAKLPLDEVSFAMEATGHYWLALFTRLQKEGFRVQVINPVQTNSIRSFYIRQAKTDPRDALLIAEVIRFGHFSESTLHPENIYELRELCRGRHAIVSMQADVKRKVVALLDQVFPEYETAFTNLFGDTSMAILQTCPTPKELSEMPLEELCHLIEVSSHKRFRMAKAQELQALARNSFGFAMAGDVFSTMIRLYAKHLDFLKQQVREMDRKIAEIMETLDTPITTITGIGLTLGAYILSEIGDISRFSSAAKLAAYAGIDPTMRQSGEYNGVRNRMSKRGSPYLRHAIWLAASSAVLHDPALKLYFQKKRDEGKPYMASVGHACRKMVSIIYAVMRDNKAYTPYIPNEISA

SEQ ID NO: 324815 - protein, 354 aa, unidentified
MLIIGCDYHPSFQQIAFVDTETGEVKEQRLVHREEAEQFYRDLAAQGRQVRVGMEASGHARWFERLLAELQFELWMGDATEIQRKRGRKQKTDRQDAQHILSLLLKNDFPPIWVPSWENRDLRQLLWHRHRMVQARTRIMNQLQAVALNEGLLCRKKLWRERGRQQLEAFQLAPWASRRRHDLLELLDRLNPTITELSQAIEREVEKCPAAQRLRTHPGVGPLTALAFVLIIGDASRFQCGKQVASYLGLVPLEDSSGNRRRLGHITKQGSSMLRFLLVEAAQVTVRSLPEWRRKYAHLMMRRGRKTAKVAMARKLAIRLYWMMRQGWDYQQWNKFGSHAGQLGNRDGVRSNIE

SEQ ID NO: 324816 - protein, 408 aa, unidentified
MLFVGDDWAEDHHDVEVMDASGRRLAKARLPEGMAGMTRLHAMIGQALGDDIEDDAAQVKIGIETDRGPWVQALIAAGYTVYAVNPLQAARYRERLAVSGAKSDAADAHMLADMVRTDAHQLRPIAGDSAEAEAVKVVTRMHKTLIWERTRAGQRLRHALREYFPAALAAFEDLDAADTLELLAKAPDPASAARLSLAQISAALKRARRRDIPAKAAAIQAVLRGEHLGQPPVVTAAYAVSVRALVALLITLNEQVKALQGQVEAHFGRHPDAEIILSQPGLGAVLGARVLAEFGDDHARYASAKARKNYAATSPITRASGKKKTVTARFVHNDRLIDALMTQAFTSLQNSPGARAYYDQQRARGASYNAALRQLANRLVGILHGCLKTGTPYNETTAWSHHLNEAAA

SEQ ID NO: 324817 - protein, 416 aa, unidentified
MLFIGDDWAEDHHDVELEDEGGRRLARARLPEGLEGITRLHALVAEHAPPGWAELPPGEAAGQVIVGIETDRGPWVTALRAAGYQVFAINPLSSARYRERHSTSGAKSDAGDAHVLAEIVRLDRDHHRPIAGDSELADAVKLLARAHQTAIWERTRHVLRLRSGLLEFFPAAVEAFGDLAAADALSLLGRAPDPARAAKLTRAQITAALRAARRHHAAARADAMLTVLRAPGLRQPPVTEGAYAAVAAGQIRIITALNEQIAGLQEVMAGHFGRHPAADIYLSQPGFGMVLAARALGEFGDDSHRFTDARARKNYSGQSPVTRASGKKTVVLARFATNRRLGAALHLQAFAALGASPGARAYYDALRGRNIGHHAALRQLANRLVGILHGCLKTGTCYDEDTAWQHHQDAMQTAAA

SEQ ID NO: 324818 - protein, 344 aa, unidentified
MHIASIGIDLGKNTFHLVALGEHNKVLIHKKFSRTQLLAYTANLPSSLIGLEACAGAHFMGTSLQEQGHKVRLIPAQFVKPYRKSNKNDFIDAEAIAEAVTKENMRFVQIKTEEQLDVQAMHRVRDRLVQRRTALINEIRGFLLERGITFAPQPKHLSKNLPAVIEDAEQKLTPRLRWLLDRLWQEWKQMELDINAVTDEIERISKENSLCRRLQQIPGFGPLVSTATVAAIGNGSAFRRGRDFAAWVGIVPRQYSTGGKQKLFGISKRGNHYLRRMLIHGARAVLLRVKYDTGGFGQWVHRLAQRAPRNKVVVAIANKLARIAWAVLSSGKDYQHQPLQVTAA

SEQ ID NO: 324819 - protein, 320 aa, unidentified
MSKKKSKSFIGIDVCKQQLEVAVHESDYQFRCPNKASAFGELIAELIALRPALIVLEATGGLEIPVVNALHAVGLPVVVVNPRQVRDFAKALGQLAKTDRLDARVLAHFAAAIKPPLRPIKSKEEQELDALTGRRGQLIEMLTDEKNRRGSAASDNVRDEIKEHINWLEERIAELDEQLKALLQSSPSWQAKDEILQSVPGIGPVVSFSMIADLPELGTLNRQKISKLVGVAPLNRDSGKQRGTRHIYGGRARLRSVLYMAALTASRHNPAIKEFYERLCAKEKPFKVAITACMRKLLTIINVMVRDSTCWKSKEETVSA

SEQ ID NO: 324820 - protein, 245 aa, unidentified
MNKDIKYFGIDISHLVFDVTDSQGNYYQFKNSISGFKKFVKLLSINSHCVMEATGYYHYQLAYYLLECGMKVSVENPLAVKRFIQMKLSKIKTDKSDSKLICEYGKQVELKLWKGTSKHQTECLQITRLLAVYTKQSTMLKNKLHGEAVLGNPSKIVVSSLKRSLKQVQKEIKTLEDKLLILVKEVHQDLLTRMKTIPGIVAKTSLMLVVLTDGFKRFKSGSELCSYAGLTPVIRKSGSSVNGRS

SEQ ID NO: 324821 - protein, 363 aa, unidentified
MFTERTSVGLDVHARSVAAAAIDGVTGEVWRTRLTPSYDHIRSWISALPGPVAVAYEAGPTGFGLYRALTDAGVRCEVVAPSKLQKPCGDRVKTDARDALHLSRLLRLDEITAVSVPSADQEAARDLVRAREDCRGDLMRARHRLSKLLLRHGIVYSGGAAWTGAHDRWLRTVAAPQLRAPATQMAFDADYDHVLTMQARRGRLDAAIEHMATACEFTPIVRRVSCLRGVNTLTSFALAVEIGDWKRFTGNTIGSFVGLVPSEFSSGLARVQGSITKTGNTHVRRLLVEAAWHHRARYHVGAVMRARWDQAPAAARARGDQGNRRLHGRWIGFLERRKRPTVANVAIARELAGWCWSLAVMDD

SEQ ID NO: 324822 - protein, 457 aa, unidentified
MSKHWLKMKQKSNCKRVKQSTKSRPLSVLNQQVAGIDVGASVHYVCVGSLSDESVRRFGTFTQDLEELADWLVSLGVTSVAMESTGIYWVNLYDVLESRGLELCLANARYVRNVPGRKSDVSDSQWIQQLHSYGLLSGSFIAKGKIRELRAYVRQRENLEQQKGIQIALMGKALQLLNIKLHQIASGTELKTSMNIIRAIVKGERSTKELAKFRHPQMKVSAEDFEKGLQGNWRTEHLFSLKQALTMYDFIKDQMLECEKEIERTLGEINGGSGYESRNKTKAIRQNDYSFDAKSYLQEIVGVDLTQISGVDEKTILTILSETGTDLSKWKTAQNFTSWLGLAPKPKITGEKIVGHFKHSVANRANQAFRMTAWALNKSKCYLGSFYRKLAVRKGSSVAVKATARKIAVIIWNMMTKKVEFETRTQAEYEIKYQDRQLKNLEKMAKRLGMTLQKSNI

SEQ ID NO: 324823 - protein, 367 aa, unidentified
MELSVGVDLHKGQFTVYWLSADRDVGEFERYRTNEHEYGLFEDKLRGYREAGYEVKVAVESTGNTRYFKTRVERVGVVVTVINTMKFKVVNESVKKTDRHDARTIAEFLEKDMLPEARLCSEESEQLRRLLKSRRVLVRTVVSLKNQVHGLLLGYGIDTRKGQLQSKKERRRILDVLAEQGLTGQAVEPLLETIDRLEAEVKKLEELLKGQVAGDRVVELLMSIPGTGILTATTVRAYMDDITRFRSYKQFSAYAGLAPWVQSSNERERYGSITKRGPEPLRTALVQMVLGMVRNQRQTGSYRLMLGYQAMKPHKGTGKTIIATARKLSKIVWYMLRNDEPFDSTRMTDPEIRRVAFEMRAAVSAVA

SEQ ID NO: 324824 - protein, 373 aa, unidentified
MAEFIMVGCDLHDQTMVLKVAAGRGSAEMVSVRNTRSGRSRMIANLRERSRLAGGARVIFVYEASGQGFGLHDELRDAGIECHVLAPTKIARSTQQKRAKTDEKDAEQLLQLLRAHVLAGNALPSVWIPDPQTRDDREAVRARLDAAEKVAAVKAQIQGLLKRHRQVPPEGVKGRWSKSYGAWLRALATDPVQGPGMRATLGSLLRQLAFLEEEIGRLEEALEALAGSPRYAGAIRELLKLQGVGLLTALVFLTEVGDLRRFANRRQISAYLGLVPRSYESGAQQDRKGHITRQGPSRVRRVLCQAAWSRIPEDRVDHAAYQRIATKNPKHKKIAVVAIMRRLAVQMWHRGQQAPPEAKPSGACRRTVATAPV

SEQ ID NO: 324825 - protein, 346 aa, unidentified
MTQYKRIGIDTSKAVFTLHGIDQRDQPTLRINLRRAQMITFFRKLPPTEVAMEACCGAHHWARELTALGHTVLLIPPQYVKPYVKRGKNDRNDAEAICEAAGRPGMHFVPAKSLSQQAQAMVLKVRDTLIGQRTLLVNTLRGHASEFGVVAGKGVGRVGSLLAAIEQDATIPAEARDMIALLGQQIEHLDIKIKALEARLNAAHKANEVSQRLATIPGLGPVTALTLATEIDAAAFASGRHMAAWIGLTPKEHSTGGKQRLVGISRAGNERLRSLLVVCATSVIKAATMPASKQMTGWLRGLLQRKPRKVAAVALANKIARVAWAVMTYGTVYRRSPTNVEVSYAA

SEQ ID NO: 324826 - protein, 365 aa, unidentified
MKKIAYVGIDYHTNSLSIAIMIEGQKKIYEMIRLKNDDKIIRKYLKKLSCNFEIKSCYEASTSGYAFQRKMTSWGYHCDVIAPSLIPKKAGDRRKNDFRNARDLAQNYAAGMLSIVHPPSEEEEAVRSLVRCRTSFKDTQKRIKFQINSFLLGQGLRWPRSKWTFAHRKWLKNLQLSSPHLQHVLEEHLSHLHYMESRLDNLDRQIEEIARSEVYAPSVKKLRAFKGIGTLGAMILIAEITDFQRFANPRALMAFLGLIPSENSSGDKRVDGAITKAGNRRCRTQLIESVQHYVKSPYISLQMKCDLSQVDASTANTAIRCLKRLHKRYWALTMKGKIRPVAITAIARELVGFIWSVMQPEPLPV

SEQ ID NO: 324827 - protein, 326 aa, unidentified
MKKNYFGVDVGSKELVLAYFPSGSSGKVRTYKNTVAGIKKILKLVGKFENAHIILEATGTYSKRLVYGCLQADVPLSMLTPSQGKSIGMVLGKSNKTDAEDARSLARYGEMVEPPAYEHPSEQDEHNRQLLNYISYLNKQKTRISNKLHALSFEQHPCNYVIKELEEELVKIEAKIKKAMQELEQLQEGQLEQAVAKAETVVGIGRKTALCLMLLTGGLSHFETAKQLANFIGICPALYESGSSINRRATISKKGNKMIRSLLYMCARSAKQHNPSCKALYDRLRKKGKAHKVAMVAVGHKLIRQVFAVVKNNVDFDKQYKNEKFA

SEQ ID NO: 324828 - protein, 355 aa, unidentified
MDDKKYIGLDVHQATISVAVLDASGKLVMECVIATQAATILEFVGGLRGSLCLTLEEGTWAAWLYDLLRPHVAQLVVCNPRKNALLKEGNKSDRVDARKLAELLRAGLLSPVYHGENGVRRLKELARSYLALSKDLTRVMNRIKALYRSWAIPCSGQTVYTPRQRAAWLAKLPESGIRRRAERLYEQLDQLRQLRLQARQELVAEGQKQEAAKWLRQVPYIGPLRTALLIALLQTPQRFRTKRQLWAYCGLALRTRSSADYRLKAGQLQRSQKPPALRGLNENHNHELKNLFKATATVAVGGSGPFHEFYAALIAAGKKPAMARLTLARKIAAITLSVWKKGARFDPGQLKRQAT

SEQ ID NO: 324829 - protein, 390 aa, unidentified
MNAVGIDVSKGKSMMAALRPMGEVALRAKEYPHTKAGLEQMALAILALGEDTRAVMEATGRYHEPVAAALHEYGIRVTVMNPLFIKQSGGGSIRKVKTDKADAMKIAKYALDNWVKLREYTPMEAIREQLKLCSRQYNLYMKNVVALTNNLISLTDKVFPGVNELFSSPERADGSVKWVDFVMTFWHCECINLASEATFTERYRKWCKWKGYHFSPQKAAELHMDSAGHITTLPRNSNTRLLITTAAKELASAKSTLAVLRAEMDRLARQLPEYDTVRAMYGVGEKTAPPLIAEIGDVRRFPQRSSISAFAGVDPAVDDSGKHISLRGPSEPPTFLCPFAYQASFGIQPFLMKNFCSFVIAPETDAAAQLPLIPSSTAISRNFFFRAYRA

SEQ ID NO: 324830 - protein, 351 aa, unidentified
MWIIGVDYHPSVQQIAFVNTDTGECGERRLSHSDGEAEKFYRERKAAGCKVRVGMEATGHGRWFERLLAELGFELWIGDPAKIKAKRVRKQKTDRLDAELLLQLLLEDRFPRVWVPSPENRDLRQLLWHRHRLVQMRTRIMNQLQAVAMNEGVRRKQALWSKSGRAQLESLPLAPWAARRRHDLLELLDRLSPTIEELSAVVEQEAKQRPEVLRLMTHPGVGPTTALAFVLIIDSAERFACGKQIASYVGLIPCEDSSAERRRLGHITKQGNSLLRFLLVEAAQAAVQRDPDWRRRYIHLAMRRERRIAKVAMARKLAVSLYWMWRTQRDYQQTVKFSSHAGESDYVHGVQ

SEQ ID NO: 324831 - protein, 340 aa, unidentified
MSIVTVGIDLGKNSCSVVGLDANGTVIVRRRMRRDRVIAFAAKLASCTMAMEACCGAHHMGRSLAALGHRVRLMSPEYVRPYVKAQKNDERDAEAIAEAATRPTMRFVELKSEEQLDVHTLHRVRDGLVGERTSLTNQIRSLLLERGYTVAQGHPKLRLLLAELLTSEDALSPRMKFLLADMRARWEGLDHRIAAFDAEFAAMARTDDRARRLTSIPGIGALNATALVAAVGNAATFDKGRDLAAWLGLVPRQVTTGGKPKLVGITKRGSKYLCKMLIQGARSAMPSLAKSETATGLWLRALLARAHPNVAVVALAAKMVRTVWALLRYNRTYQAKAISA

SEQ ID NO: 324832 - protein, 375 aa, unidentified
MTADLQVQAYETETVLYMAMELSDKQWRLAFGDGTRQRQVVIAAGEVAALVEQIDKAKAKWDLPPDTALVSCYEAGRDGFWLHRQLAELGIANRVVDAASIEVSRRARRAKTDRLDARALLEKPMRYEGGERGVWRLVRVPDPVWEDRRQLERERGQLLGERNRHRNRLIGKLVAQGIRLLIDKDFVARLEEVELFDGSALPVHLKAGLIREFERLQAVNAQLRAVEQEIGALVESEEELHAVRTLMLLSGVGPVGAWVLVLEILGWREMANRRQLASLAGLVPAPYNSGGMVRDQGISKAGNRRVRALLIQLAWLWLRYQPTSKHSLWFQERFGGGSKRQRRIGIVALARRLLIDLWRFVETGAVPEGARLKVA

SEQ ID NO: 324833 - protein, 345 aa, unidentified
MPIVGGLDIHRKQITFDYVDTVTGQVCRGHVSPADREHLSAWLARFNGCEDVAFAVEGCTGWRYVAEELAAAGVTAHLAEPADTAFARGRKRHAKTDKTDCRHLRMLLSEGRLPECWIPPGRILECRAMLETYHDLRREHTAWVQRIHAVLFHHGAPALGGGTLRTGPGLAALREVSAACLSPAGQLQVATALEVLEALEARMSELRHQLLAEARHLAGAKVLAARLYGVGPFAALALTCWLGGAGRFSSSRQAVRFAGLDVTVWSSDRKGPPGRLSRQGPPVLRWALYEAGKTHARASAPDHAYYAQVKDRCNGKRAALSEARKILRQACHILAELGDDALAPA

SEQ ID NO: 324834 - protein, 394 aa, unidentified
MKLVGIDVGKNSHHFCVMDKETGEFNVTPTSFSNNKEGFDFLINSLKPYSKKSILIGMEDTGHYHVALLKFLLSNGYTVALINPKTTDLTRKMEGGITKNDKLDTITICDVLDTPERKKQYRITKVDRFDLYEQRQLTRHHHNLKEELNVYCNRLQKSIDLVFPEFNTLFSSKYSIVYMNLLKTFGSAEAIASTDIRTIRKCFEIKGRGNRISLTPEKLKECAKNSIGISSEVETIQIKHLVSQITLIKEQIAEIDKKIEEFSITNNSPILSIPGISHFSGTSILAELGDIGNYSKPSQIIKFAGVAPYHYESSQYNAQHTGITKKGSKYLRKTLYQIILPIINNNPVFKKYYRLKISQGKGHRCAQGHCIRKLLRIIYHLLETGQSFDPALLR

SEQ ID NO: 324835 - protein, 321 aa, unidentified
MTYVGIDVSKATFVVAYSSAKNSKTKAFKNTTKGVHEFIQTLSADEHHCVLEATGNYSSLLVYLLSQAGITVSLENPLKIKNFARVMLSVTKTDETDARLIALYGEKMQPAPYKLRSDAILTLKQKRTVIRQLKKQLIATRNLKGSMEALTFFDPKCKKTIEKTIAFLEKQIKNLEEELAVLAQSEYKKQMDLLTSIKGIGVTLAAALIMATGGFTYFDNAKQLTRYLGLSPTYQQSGTSVNVKGHINRNGDSSLRGLLYIAAMASLRCNTECKECFDRLRSNGKPGKVAVIAVANKLVRQAFAVVTQEKTYVDGFKSAKP

SEQ ID NO: 324836 - protein, 411 aa, unidentified
MTKEDFIYVGIDLHKETHTAVMIDCYNNKLGEITFPNRPADFPKLVTKVKKCNTDAKEVVYGLENAYGYGRALAVWLIDKGYFVKDVNTAISHRQAKHRGAMYRKSDSDDAEAIALATLNMLDKLPDACPNDAYWSLGQLVHRRDNIMKQRTRLVNQLHEQLCIAYPSYKQFFNDISRPTALYFWEHYPSRKYLKGKSVEDLRAELVPVSHNKCSTRTCEKILDAIAGDKVKNNAYQDARDMVTLSIVSDLQHYDKQLAEVDKMLEQMYKMLGCTLTTIPGVNVITAVKILAEIGDIKRLSNANKLAQFAGIAPLHLSSSGKGKDLATKQGNRRLQATIYFLAIQMVHISSKGTPRNPVVRAYYEKRKAEGKTSQQALICISRRLISIIYGMLKSGTEYRMPVVENAGENR

SEQ ID NO: 324837 - protein, 412 aa, unidentified
MKRIRDRVAGLDVHRDTVVACCRVVGPDGSVEVTKQRFSTTRKGLGELAAFLSDAAVSTVAMEATGVYWKSPYYALEGLFEELWLCNAQHVKNVPGRKTDLSDAEWLADVAAHGMVRPSFVPAPEIRELRELTRYRKTQVDARAREIQRLEKVLQDAGIKLTSVASTVWSASSREIIEALIKGERDPMVLAEMAKSRLRAKIPQLTEALAGHFGPHHAVVCRQIIDHIDFLDGSIAALTDEITTRLVPFEAAVTIICSVTAVNRRTAEVIIAETGADMNRFPTPEQLCAWAGVAPASHESAGKRRPVGTRHGADWLRRALIEAARSSARSKNSYYSAQYSRIARRRGPNKAAVAVAHSMLFTIWHLLSDGALYEDPGADYFERRHDPVVEAKRLARRIEALGYNVSLTEKAA

SEQ ID NO: 324838 - protein, 389 aa, unidentified
MKIYVGIDIAKLNHFAAAISSDGEIILEPFKFTNDADGFQLLVSKLESFDKNSIIIGLESTAHYGDNLVRYLVAEFYQVCVLNPIKTCQMRKNNVRKTKTDKVDTFVIAKTLMMQDDLRFITFFDLDMMDLKALGRFRQKTIKQRTRLKIQLTTYVDQVFPEIQYFFKSGLHQNAVYALLKEAPSPKEIASMHMTHLANLLKVNSHGHFTKEQAKELRVLAQKSVGANDSAISIQITQTIQQIELLDSQLEKIEAEMTDIMKFNDSVIMTIPGIGYINGGMNLGEIGDIHRFSNPNKLLAFAGLDPSVYQSGNFQAKTTRMSKRGSRVLRYALVNAAWNVVRNNATFKAYYDAKRAEDRSHYNALGHCAGKLVRVIWKMLTDEVEFNLE

SEQ ID NO: 324839 - protein, 400 aa, unidentified
MNEFKPEASRIDTVAARLELPGQECYSAYVGLDVHKDTIAVAVAEPGRQEPRSEGEVANRPKSIEKLVRRLSERFGGGVLQFVYEAGPCGYGLYHQLAGTGHICEVVAPSRIPKAPAERIKTDRRDALKLARLARSGDLAPVWVPGPEQEAMRDLTRARGDMKAQERKARQQLGAFVLRHGHAWPAGKKRWTEAHYSWLESLKFAHDWQQVVLQEYVDAVKAATQRVADLRAQMERALAQWSLAPVVEALVALRGIDTLAAMVLLAELGDISRFDSPRQLMAFLGLVPSEHSSGGRRRQGGITLTGNGHARRMLVESAWSYRFPARQTKHLKRKAAQASGAAKGIAWQAQKRLCGRYRDLIQAGKNSKLVCVAIARELAGFIWAIVREEMPKVRGAANAG

SEQ ID NO: 324840 - protein, 346 aa, unidentified
MLIIGCDFHPSVQQIAYLDAETGEYREQRLSHSNGEAERFYRELHQKADSIRVGIEATGHARWFERLLGELGCELWIGDPAQIRAMRVRRQKTDRQDAQLLLKLMLDGRFPRIWSPSPKNRDLRQLLWHRHHRLVQMRTRIMNQLQAVAMNEGVRRRQGLWSKAGQAQLKALSLDPWATRRREDLMRLLDQLSLNIDELTKALEKEASDRSEVRYLMSHPGVGSLTALAFVLVIGSPDRFHCGKQISSYLGLIPCEESSADRQRLGHITKQGNSLMRFFLGEAAQTIVRCDPGWRRQYLHLMMRRSRQIAKVAMARKLAVHLYWMWRKEMEHQRTLKIGPHARLPV

SEQ ID NO: 324841 - protein, 324 aa, unidentified
MIDAVLGIDVSKNTFDTNLGAGTKARSKSFANSPDGWHHLIAWLGEYKIGQVHACLEATGRHGLGIALALHEAGHVVSIVNPAQIRDFARTKLGRNKTDQVDAVHIREYAELFKPRPWTPPSPAMRRLCELQTIRAGTVAGLTEWKNRRGSGITDDLARSLTETTIQHFTSQLEAVDQAIAETIDNDVELSAKRDLLVSINGVGKALAGIVLAELPGPDILGSSAAAAAYAGLNPQQHQSGISVNRPVRISKIGNAVLRTALYMPALSAMRYNPAVAALVDRLKAQGRLKGKHIVIAAMRKLLVLCFGVLKTGKEFDPAMAMGK

SEQ ID NO: 324842 - protein, 346 aa, unidentified
MAAFAALDVSKKSTSIHIVDEKGVCLWRGKTLTNPDALAEALSPFSDDLTLVGLETGSWTTWLWHELTERGFPMVCMDARQAHAALSVTINKTDANDAQGLAHLLRTGLFREVRVKGWEDMQKRTLLRARSTMLRCVLDLANAIRGALRTFGISPPAGTGNGGAKTFERRVVACLAARADLAIIIGPLLEAWRAGRTQVARHERAIRAIVRSDPRCQLMMTVPGVGYLTAVGFVGAIGDPETFRSGRTAAAWIGLTPRRYQSGTINQQGRISRQGDKLLRAYLYEAAAHILTRSSKDSALRRWGLKLRDRIGFKRANVAVARKLAVVLHAMWRSGRPFEAEGCATG

SEQ ID NO: 324843 - protein, 382 aa, unidentified
MDSTCSWSRIIGLDLSKATFKGCILYGEGFVNRKNFSGEMKQDESGYVLINNTIQDGDIVLMEAGSSTFNLARYLLKNSRAKDVVVLNPANLRIIWDSQKKNDKADAMKIACIARDMRPEAWPRVTVPSEQEQSERSVIMHWIFLKKQETMLCNRFFALFNSLGHPEIDKSLLKKDADFRVQTINDLLSFNELAFTDAIMLEQQISVVQSQLGLMEDRLRSICLNHPQQALAWLSIPGIGLVNAATLIAYIGDGSRFSKPDQLMNYAGMVPKQNQSGTVDIKGKITKRGCTAIRRSIVQGAQVVMLLPPSCDITKYAYRKKKECPFNGKVAVAVANRMLRTGLALLHHNDLYRPMVEDGFDRLERKLAGNKLQALVPYLTSR

SEQ ID NO: 324844 - protein, 387 aa, unidentified
MVFAGVDVGKHNHEACMIGQDGREVRKPLRFSNTVAGVSLLIDALHSLGQPAIIALEASGHYWLGLHRKLVESGFQVVVVNPLQTNAYRSTSVRKVKTDRRDAFVIADFLRIGRIMANYVPDETILKLRELTRYRFDLVDQIGEAKHKALATLDRVFPEYAGFFSDVFIKSSRELLKNAVAAADFASFDISELTALLKTASRGRFGDSKAKEIKLVASNSLGLPCMSEVSLLKLRSFLAQIELLESQVAQVEEAIEEMMEGMDQHLTDIRGIGLVLAAIILAEIGDISRFRSFKAIVAYSGIDPSVFQSGNFTGTQRHMSKRGSPYLRRALWLAAHTTRIYNSDLNQYFHDKLSQGKAYNVAMGALCHKLLARIYVVLKEGKSYEVR

SEQ ID NO: 324845 - protein, 339 aa, unidentified
MKYTPVGVDIAKHVIQIHFINEHTGEVVDKQLRRQDFLTFFGNREPCMIGMEACGGSQHWARELTKLGHKVRLLQARFVKAFVMGNKNDVMDARAIWMAVQQPGKEIALKTEEQQSVLVLHRSRMQLVKFRTAQINALHGTLLEFGESIHKGRAAMEREFPEALERMKERLPPYLIMVLENQYNRLNELDSLIEDIEKQLTSVTRQNETCKRLLDIPGVGPLIATAAVATMGEASAFKSGREFAAYVGLVPKQTGSGGKVRLLGISKRGDTYLRTLFIHGARALALVAKEPGPWITELKKRRPASVAIVAMANKLARTVWAITAHGRKYDRNHVSIRPY

SEQ ID NO: 324846 - protein, 391 aa, unidentified
MTKRKTETVNDLSRCLDPLDMDATLIAVIDMSQSSWLVAGIVPGVERQPLKKIAIDEHALLKLLSRWREEAEKKGHKITRVTVAFEAGHDGFWLARRLATLGIEVHVIHASSVAVTREHRRAKTDRLDTELLKRGFLGWLRGERGHCKMVVVPTLAEEDAKRPSRERETLVGEASRIITRLKAAFVRLGIRSFNPKLKAATERLGTLRTPEGEPIPPNTLAALKRDLERHQIIKRQIREIEQTRLDRLAQAPAKGPHAMVLLLARVVGIGVETADMLVQEVLSRNMRDRRAVARYAGLTGSPDESGAKRREKGLARSGNARVRRGMIQLAWRFLMFQKDSALAEWYRQRTANALSMRKTFVVALARKLLIALWRLARDGVVPEGVRLRPAA

SEQ ID NO: 324847 - protein, 400 aa, unidentified
MDRNRTVAGLDVHKDSIYLCIMGHDEVIIFEKKYGVLTPDLRQMCNDMVERGVTEAAMESTAVYWVPVWNELCESMELKLVNPYFIKQLPGRKSDVKDAQWIAECLLKNLIKGSFVPEPIVQDMRKLNRRIMDLNEDMTYNCNKLDAAMQRSGYRLSNYVTTIKSKSYQKVLHAIIDGTTDPDELVKMVHGRTVNKHGRDTIRAAVTGLFSRIDITIFRQTKEVIDTIERQIEVCQKELTTLCEQYFPEQYRRLQTIPGVKERAATAIIAETGVDMKMFATAACLVGWCGLKPRNDVSNGRYKSRKVTHGNKYLRQILIEIAWVASRTRNCFFFNFSYIQTTVKKKSKMKIQVAIARKILVAVWHMLTKEQDFIDIYLKRLEEQKKMEEQMKRLGSTVIR

SEQ ID NO: 324848 - protein, 350 aa, unidentified
MIIIGVDFHPEYQEIASVNTDTGEYQEKRLAHPKEAEEFYRCLSCVGQVVRVGMEASGHGRWFERLLEGLGVELWRGDAEVIRAKRGRKQKTDREDARHILKLLQKDDFPRIWVPNWENRDLRQLLWHRHRMVQARTRVMNQLQAVALNEGLRCKKRLFRADGRQQLESFQLAPWASRRRRELLELLDRLNPTIAELSQAVEREAEKCPEAQRLMTHPGVGALTALAFVLIIGETERFQCGKQIAAYLGLVPLEKSSGNRRRLGHITKQGSSIVRFLLVEAAQVTVRSLPEWRSKYIHLMMRRGRKTAKVAMARKLAVRLYWMWRKEWDYEQWKKFGSYVGQPVHRDGVQ

SEQ ID NO: 324849 - protein, 326 aa, unidentified
MPYTTQVCIVNETGRKIASMKVESSPDMIASALREVGGVERAVIETGRMSPAICHGLRALDIPIVCIDARQAHQSLKALKANKTDPHDAAGLAQLARTGFYKEVHVKSPEAHGVRSIITTRNHLVESRVRLDNMIRGLCATFGFKPGPGQGKAFIDRVMEAAKTPGLAQSITALLAVRTGLTAQIKEMDRVLRELAHRSQSCRQLMTIPGVGVQTSAAFVAAVDEVGRFRQSRTAGAYFGLVPRRHQSGEIDWTGRIAKQGDSMVRKLLYEAANSILTRSRGSFALKGWAMKIAKRRGLRKARVALARRLAVIMHAMLRDGTLFET

SEQ ID NO: 324850 - protein, 343 aa, unidentified
MKHYAGLDVSLEETSVCILDETRKICREVKVTSHPEDLLQILQDPTWHLDRIGLEAGQLSLWLFDGLADAGLPVVWIETRHAKAFLKAQINKSDRHDARGIAQMMRVHLFRPVHVKTLTSQKRRVLLTARKLLQEKAIAIENDIRGLLLNFGLKVGVVGAVKFEERIHELIRDMPDLAEILERLLDARRRVREHFAALHRKLLDLARGDDVCRRLMTIPGVGPVVSLAFVATIDTPARFRKSKAVGPVLGLTPVRSQSGNTDRVGRISLCGDGMMRTLLFEAAQTMLRQTTRWPWLKAWALRVAQRRGSGKAVVALARRLAVIIHRMWCDGTEFRWTREAPVA

SEQ ID NO: 324851 - protein, 431 aa, unidentified
MKEMERQIRAWIGVDWADQKHDVSLYEEGTGKTEQYEIQHSPEALQEWLGQLRSRYGDDGYVAVALEQGRGALLTALMNCEFLVLYIINPKSVSRYREALYGSGANSDPVDAELIREMVRHNPTRFRAWRPDDVLTRSLRLLTEGRRHLVDQCTALTNQLTSLLKGYYPQGLHWVGQLDTAWACDFLEQWPTLQHLQRSSRRQIIGFYERHPRPSIDLEQQLLEFRQAQPLTQDAAVLEYSALMIQALVPQLRALMASIGDFDRKIAEVFRKHPDRLIFESLPGAGAALAPRLLAAFGTDRDRFGAATEMQELSGIAPVTEQSGTKRWVHWRLACPKFVRQTFQEFAAHSRRWCGWAKAYYQLKIQHGKTHQGAVRALAYKWIRILFRCWKDRTPYRDEIYSKSLVKHQSPIAPMMVAVVDKRVRVAAPTT

SEQ ID NO: 324852 - protein, 904 aa, unidentified
MTHGRGESDSAIVAGKPTNKAERSAAEPVEPRAEAEGNASQQSTGRAQSRGTVSQALARIRQAARQRKKEKFTALLHHISIALLDEAFFELKEDAAAGVDGLSWADYEQNLERNLEDLHARVHRGAYRALPSRRVSIPKADGRQRPLAIAALEDKIVQRATVAVLNAIYEEDFLGFSYGFRPGRSTHDALDALVVGIESTKVNWILDADIRSFFDEISQDWLVRFLEHRIGDRRIIRLIQKWLKAGILEDGVVTVSKRGTGQGAVISPLLANVYLHYVFDLWAERWRRREATGDMIIVRYADDFIVGFQHEADARRFLDAMRERLQEFALTLHPEKTRLIEFGRLAAENRKRRGLGKPETFTFLGFIFICSKTRRGKFQIKRKSRRDRMRVKLQAIKQELRRRMHQPIPEQGKWLKQVVTGYFNYHAVPTNGPTLTAFRFHVTNLWRRTLRRRSQKDWTTRERIARLANDWLPKPRILHPWPDARFAVRHPRWEKLWGGAAEVVAPSSSIRTDGGCPVPQVNDLSRSLAAFDPISTLVVVVEMSKMSWLVSGVVPGVERQPLKKLEPDATALLRLIERWRIEAVRAGRPIRRIALGYEAGRDGFWLARWLIAHGIEAHVIHSASVAVSRERKRAKTDRLDAAMLMRVFLGWLRGERGHCGMVAIPTMEEEDARRPSRERESLVNERSRIVNRMKSALARLGIRGFKPHLRRAPERLACLRTAEGTGLPANIIEELRRDMARLALVREQISSIEKTRAERLERAPDTGPHAMVRLLSRVIGIGIETADMLVREILSRKLRDRRAVARYAGLTGSPDESGLKSREKGLAKAGNARVRRGLIQLAWRFLMFQKDSALARWYRTRTEGPSGARKTTMIVALARKLLIALWRLVTTGEVPDGVELRPAA

SEQ ID NO: 324853 - protein, 409 aa, unidentified
MNTWTSLLWKQQRKKTDRGGNQLYFVGIDISKFKHDCAIVDELGDVITPSWSFQNDREGFSLLKELLDALDGEKKIGLEATGHYGQNLKLFLENNDFSFMEFNPLLINRFVHSKSLRKTKTDSIDALMIAQYLMTVEYKPYPPSFYTLEKLKSLTRFRDSLIRQRSKQLVELTNILDKVFPEFKSFFKGRFSATALYILFHYASPEKISNMNSKSYEPLRRLSRGRFSMVDFVELKTLARNTVGSTCDYLLQEMEITINIHNQLQSKVEEIELQIHNCVLGLAPPMLTIPGIGVASAAVILSEFGDLSKFNSPSKLLSFAGMELGYFQSGTSESTGKMVKHGSSHLRYAMMNCAQTVINNEPTFAAYYAKKRAEGKEHRVALTHVAKKLLRVIYTLQTKELSYNPDLVR

SEQ ID NO: 324854 - protein, 388 aa, unidentified
MQTAADHPEAPTAIRHDLGAIFISLELSRSTWLITSLSPGGGEKMSKHSVRGGDVAGLLERFAQLQEKARARTGRTFPIIVIQEAGLDGFWIHRVLQNEGIESHVVDPASVATSRRRRRAKTDRIDGEALLRTLLAYKRGEPRVCAMVKAPTPEEEDRRRLCRERKVLTNERVQHVNRIKGLLFGQGVSGYEPLRRNRRQQLNELRTGDGRPLPKHLKTQISRELDRLELLLEQIKAVETERDALLAAQKVALPGPAAMLLDFNGIGAEFTAVLWSEGLFRHFDNRRQVASYAGLAPTPWQSGSVDHEQGVSKAGNPRLRTTLIQLAWLWLRHQPQSALALWFKERVARNGGRHKKTTIVALARKLLVALWKYVTAGVVIEGAVMKTA

SEQ ID NO: 324855 - protein, 377 aa, unidentified
MEKEIAHNRPGFMDLKKLIDDLIEGYDEQPHIVFESTGVYSRTLERFMQENNYSYCLLNPLEAKLQCDSLRIHKTDRSDAHQLALTHFTHERRIETDSNDVYRQLKRLSRHYSELDDELSVTRSRLHKVVQETFPELENIFTTKSELFLNVVQLYPHPDLVLNHSKTIIKNRILANTNKRMAVNKAEEKAVELIEAAKQSYPAASSTDVVCDQVRVYAKRFQELLLQKEQCISKMESIAERLEEYSIIRSIPAIGANSAVRIIAEIGNIQRFDNNRQLNAYTGIDIRRYQSGKFIAKDKINKRGNKHLRKIMYLTVQNMIRQRRFGGNHIVEYYDKLKTQPYNKCHKVASIACVNKLLKTIFFLVTHNQNYDYRLAP

SEQ ID NO: 324856 - protein, 343 aa, unidentified
MEHFAGLDVSVKQTSVCIVDGTGRLVREVRVASEPEALLPVLKNPLYRFKRIGLEAGPMSQWLFSALAEADLPVICVETRHMRAVLQAQINKTDRNDARGIAQMMRAGLYRPVHVKTLRSQKLRMLLTHRKLLQSKAIAIENDLRATLRNFGLKVGVVGTVKFEARIRELVETLPDLAELVEPLLIVRRTLREQIGILHGRLLAIVRHDDVCRRLMTVPGVGPVVALTYRATVDVPARFRNSKAVGAVFGLTPSRYQSGEVNRTGAISRCGDEMMRAMLYEAAHTMLLRLAKWSWLKAWAMKIARQRGIKKAVVALARRLAVILHRIWVDGTEFRWTRETAAA

SEQ ID NO: 324857 - protein, 343 aa, unidentified
MKLSRVGVDLAKNVFQLHGVDRHGKVVWRRRLTRKQWLSALMAQADPGCEIGMEACGGAHHWARELQSRGYTVKLIPPQFVKPYVKSNKNDANDAEAICEAMSRPNMRFVAVKSIAQQDIQATHRIRAELMGQRKAKANQIRGLVAEYGLIAPLTLRALRSAIPHWLEDAENGLTDYFRSLLNGLWSDLVLLDDRVLEMDREIERLANSNEVTRRLQQLRGVGPMVATALVATVGTAEQYPKGRQMAAALGLTPRQNSSGGKQRLLGISKRGDAYMRTLLIHGARAVVSQAKHREDRLSRWVTDIATRRHPNVAAVALANKTARMAWAMLRHGTDYDPDFVMS

SEQ ID NO: 324858 - protein, 449 aa, unidentified
MLEPLEIEDEEYEQVLERVAAVDVAKASGMVCTRVPHSSRPGKRRTMVREVAAATGAVLELAEQLAGERIEMVTLEATSDYWRIWFYVLEAAGLRVQLVNARDVKNAPGRPKTDKLDAVWLAKLTERGMLRPSFVPPAEIRRLRDYTRLRTGLTRERTRHWSRLEKLLEDALIKVTAVASKTGSKSVGAMVEALIAGQRDPQVLAGLARGKMRARHDRLAGALAGRFDAHHGELARMMLDQIDALTTHIGTITSRVGELIEAIPGAWGVDADGVTGPGAGLGPGAPVLPAVARLDEVTGIGAAAAQVIIAGVGLNMGVFPTPGHLVSWAKLSPRTIQSGPKNRSGPAGDGNPYLKGVLGEAAASAARTATFLGERYRRIARRRGKLRALVAVARSILVIVWHLLSDPAARFGELGAGYYASRIDTGRKTRNHVRQLEALGYTVTLAQVA

SEQ ID NO: 324859 - protein, 312 aa, unidentified
MNSIICGVDVSKDWLDAHIRPGASFARFANDAAGLGELLVFCRGHHVEFAVMEATGGYERLAFLWLWENGLPCGIVNPRSVRRFAEAMGTFEKTDRIDAAVIAHYASVKQIVPTVPPNAAQQRLKALVSRLSQVSGDITVNKQRKSATTDAETLASLSTVLTCLKREEKRLAGEVASLIDDDPLWAKLDKTFRFFKGLADRTIARLLAEVPEIGIVSNKAIAKLVGLSPFANDSGKREGPRNIRGGRAGPRGILFIIARHVARYDPHLHAFAERLQKAGKPKMVIRMALARKLLVILNAKARDARMEFANAT

SEQ ID NO: 324860 - protein, 319 aa, unidentified
MKAIDYEQVISVGCGIDVHKDVIVATVRSSSKDYQTRQFTAYTSSLTELRDWCREEGVTHVAMESTGVYWKPVFNILEEDFAIILVNARHVKNVPGHKTDKKDSVWLSKLLLSGLLKASFIPTREIRELRDLMRYKRKKVQFVASETNRIIKVLEDCNIKLSSVVSNVKGVSASKIIGDIIDGKDDVTGLLTHVHGRVKTPREEMAQALTGRITPHHRFMLKMIRETIEENEKLITKLDQQIDLIASQYEMELELLQTIDGVGKDTALVIISEVGVDMDAFPNQHHLASWSGLSPGSNESAGKKKAPASSTETNTSNPL

SEQ ID NO: 324861 - protein, 366 aa, unidentified
MLYLGIDQHGKQLTVNLRNEEGSAILKRQVSTEWKRVREFFDRLREEAREDGGFAAIVEVCGFNDWLLKMLAEYDCREIVLVQPDKTSKRKTDRRDAGKLSELLWVNRQRLLAGQKAQGMRRVLPPSAEDAEARQMTSLRKRLAEERTKTINKIHHILQKHNLQQECPTKGKKTKTARRWMAAMTLPSVDRLEMDQLLAQWDLWDEQLEAIEKRIDESQAKHPVARIVRSMPGAGTYSSLALASRIGPIDRFPRPSSLANYWGLAPGCRNSGDVTNRSGSITKEGSAIARHILGQMVLHVLRDDKYVKKWYMRIKKRRGSKIARVAVMRRLATVLWHMVKYDQPYMFGGPPQVKASREAYEAFRDV

SEQ ID NO: 324862 - protein, 387 aa, unidentified
MKKAYIGIDSHKAQNTVAIALAGREDPELYGKAPADLDGFERVLRRVLAKYGLEKADVAICYEAGPTGFVLCRRLRSLGFECEVVAPSKIPKAAGDRVKTDRRDARKLARMFRAGDLVFVNVPDVADEVIRDVCRGRTDAAEVRGRARQQLGALLLRNGYRYGDKTNWTEAHMRYLRELVLPDPAQKFVLEEYLQRVDASVAQVERIEAQMARLLPAWQRRKFVEALQGFRGFQLVAAMTLGSELGDLLRFDHPRRLMAYIGLVPGENTTGERRRQGPITKCGNSHVRWMLVEAAHHYHYPPKVSKELSKRQEGLSREVRAVSWRAQERLHRRFWRLLKRGVHRNKVVIAIARELTAFVWELAQVLERERAAADPRQPARPAARKAS

SEQ ID NO: 324863 - protein, 408 aa, unidentified
MIYCGIDWAEKTHDVALVNDAGELLAKRHITDDAAGYTLLLDLLAEYGDTEDNPIPIAIETSRGLLVAVLRTGKRKVYAINPMAAARYRDRTSVSRKKSDPGDALVLANILRTDMHAHRPLPNDSDLGRAIAVLARAQQDALWNRQQISNQLRSLLREYYPAALDAFTTWANGLCRREARELLKTAPTPSRAARLTRTQLQAALKRSGRKRGIDAEADRIREVFRADYAHQPALVEEALGKQMLALLIQLEAACTAADNLAQGVAESFPQHPDADVILSFPGLGVQLGARVLAEIGDDHTRFTDARGLKAYAGSSPITRASGKKSSITRRWVKNDRLNHAGYLWAFAALTASPGAKTHYQRRRKIGDWHASAQRNLFNRMLGQLYHCLQAGELFDEQTAYPTPAAAAA

SEQ ID NO: 324864 - protein, 412 aa, unidentified
MDVVNTRCCGLDVHLKTVVACVLMTQDDGTVVRKTHTFKTMTEELLALRDWLDRWGVTHVAMESTGVYWRPVYNVLEDEGRTLLLVNAQHIKAVPGRKTDVKDAEWLADLLRHGLLAPSFIPPQPIRELRELTRYRATLLRERTAEINRLQKTLEGANIKLGVVASDVLGASGRDMLQALVAGERDPEVLAELARGRLRAKLPELRQALTGRMQPHHATLLAHILAHIDFLEQTIAALQEEIAQRLGPYDEEIALAQTLPGIKATAAATILAEIGTDMTRFPTHRHFASWAGVCPGNKQSGGRRLSGKTTPGNAWLRAVLGEVAWAAIRTKDSYFRAHYYRLARRRGKNKALMAVAHSILVALYHVLREKRPFQDLGADYFDRLDTTRIERHHVRRLEQLGFKVDLTPVAAA

SEQ ID NO: 324865 - protein, 439 aa, unidentified
MSNLNKQKEATPFAAHIGLDWADQKHFWAMRTADGTQHCGPLINTPEAIQVWAGELAQRFGGQLIAVALEQSRGAVIAMLSKYAHLVLFPIHSTTVANYRKAFCPSGAKSDPGDGRLILELLWTHPDKFRGLYPDTVETRKLQFLTEERRQLVNQHTSEVQRLISWLKQIFPQIVTWFEKPSCEMVGDLLKRWPTLEALQKASPKVLRKFFHQHNCRSEERIEERIDQIGHAVVATTDEGLLQTGLLCIRHSVAMLEILRASIETFDQQIAEVYQNHPDRFIMESFPGAGPALEPRLIAAVGTMRDRFHSANTLASFSGIAPVTESSGKSVWIHWRWACSKFIRQTFHEWAGCSIRSCDWARAFYEKQRGKGKGHHAAIRSLAFKWIRIFFRCWRDRVPYSEELYLKALQRHAPKPTSAPVEITWKTAAGFAKLSALSS

SEQ ID NO: 324866 - protein, 370 aa, unidentified
MLDTTAFVGLDVHARSIKAVSLDVMTGEVRCATFGYDAGAVAEWVRSVDPKAKCVYESGVTGFDLQKRLSGLGVDCAVGAVSKMIKPSADRRRKNDRNDAEFLARMLSVGNVVEVWVPDDECEAARDLTRALEDARDDLSRSKQRLSKFLLRHGLAFDERTPTGRRKGNWTRAHWSWIESIRFAEGADNDVLAYYVDAVRRAAEEKARLEGLVEAEARKPRWRRRVDSLRCLKGVDTASAADLVFEAGEFSRFRNARSFAAWVGLTPSEHSSGESDRRGAITKAGNKHLRKALVEAAWHYLTCSGRPKDLAKGQAPDRVARRHAAKGVRRLAERREALLARGVHNNKANVATARELACWVWAVGLMAEEA

SEQ ID NO: 324867 - protein, 387 aa, unidentified
MYYIGIDISKFKHDCAVIDDVGDVVTPSWSFANDHEGFLQFKALLDSLGSETRIGLESTGHYGTNLKLFLESCSTTFMEFNPLLINRFIKSKSLRKTKTDSIDCEMIARYLMTVEYKPYPPSFYHTEKLKSLTRFRDSLIRQRSRQLVELTNILDKVFPEFKPFFKGKFSTTAFHILINYSSPERIANMNSKSYETLRKLSRGRFSLADFTTLKHLARNTVGHPDDFLLSEMAMVIDIFSQLDSKVDETETLIEECVLEINPPMLSIPGIGVESAAVILAEFGDFSKFQNPAQLLSFAGMEPGYFQSGTSESTGKMVKHGSSYLRYTLMNCAQSVVNYEPTFAEYYAKKRAEGKTYRVALSHVAKKLVRVIFTLQTKNLVYDSDSLR

SEQ ID NO: 324868 - protein, 334 aa, unidentified
MTFRKKKIDVAIIFAEGLTETSMRLFNEFKNSGSGYKQLGKWVEESSNETEPSLWLFCGENTGDYSKPLCNFLYGRGFDMWLENAKSIKDASGIRRLKSDRTDANMIAEYAMRNNDKAIVYEPLSESLSQLRELFLYRQMVVRHRCSFQVRRGEKRLNMEKSPVKTMISQSGRHIVTELNKEIEKIDKRIAELIDSDEELAQVFTIVTSIPGIGTQNAVCLMVYTDNFRRFNFDSRKIACYYGIAPFGRDSGTSVHTDPHVHYMANRQIKAMLSQAALSAAKFNPVIASYYSRLIERGKKRQIVLNNVKNKLVHIVTAMVRNKQLFDKDYKISA

SEQ ID NO: 324869 - protein, 314 aa, unidentified
MYYYIGIDVSKKVLNVFDGKKDLIFENKENLSSLKKHLKRRYPDLSSLVILFEATGIYSYHLKVFCATHMIKAYIINPQAGHNFAKSLGRRSKTDTTDARTIWAYHKLINDKDIRIPRVDQRLMTLSSYLASYRLTLKLRLSLANHLEGVKDKALQRLLKKEQERLQRLEQVLLTQMDTYIKQYLELKEDYQRLLGISGIGQKTAISLLLLFNTYPNTNRNQITALIGLDPMQRQSGTSVKGRSRISKHGNQMMRKSLYMPTLSCIRYNHKIKVFYERLVLQHKPKKVAVIAAMRKLLLIAHAVYTNKTVYVPE

SEQ ID NO: 324870 - protein, 316 aa, unidentified
MNETIVEKFVGIDVSKSTLDVCIEPAVDTLHIAYDEAGIKQIVVRLKEVNPTLIVMEATGGLEVRIATELAGKGLPVAVINPRQARDFAKATGQLAKTDEVDAAVLAAFAKAIRPQVRPLKDAETRALDDMVSRRRQLIDMRVQEILRLGTAASKPLEKSLNKHIVWLDKRITEIDTDLSNRLKDSDVWQAKNNLLRSIPGVGVVTILTMLAKCPELGKLNRREIAALTGVAPLAKDSGKHRGKRFIWGGRADIRAVLYMATVSAIKHNDAIKVFSDRLKKAGKPSKVVIVACMRKLLTIMNAMLKNNTPWNAETA

SEQ ID NO: 324871 - protein, 437 aa, unidentified
MKRSRIQVGFDISKKKLDMCILEPDGQVVVRHRSFANNVAGYQEVKQTLIPILGSETWEGMDLGGESTGYYWLPFFMQLREDTDLVNYDLNTYLLNSRQVRWFKKGYAEDDKTDEKDSFYVTEKLRTQRRKHAWQPDLDWLRLRFYTRYRFHLGQNLTRMKNYFWAHMFLMCNTYSKGKPFSDGLGACGRALVRTYPDWQELQELPIETLIEQLTSWSGGQLPDPAHDAHQLRNIIQQSFPLHPDVCIALHALLTMTIEHIAFIEKQILQVEKWMESEIRLHHPEVLHLIDIKGIGIVFAAGIAAEIGDLERFFHGQKWDCRKKRFRNKNLRDVEDAVAKFAGIWWPRHDSGNFQGQERRMNKNGNHYLRYYLVEAADKLRQYLPEYQAFYQRKYAETKKHQHKRALVLTARKSVGLFVGLLHRKEPYRPQEVHLTA

SEQ ID NO: 324872 - protein, 351 aa, unidentified
MLIIGCDLHTRYQVMAMLESETGETLTRRLQHENGEARAFYASLPAPARVGMEATGYTQWFERLMAELGHELWVGDAAAIRARAVRRQKTDTRDAEHLLELLSTQRFPRLWIPSPEQRDLRQLLKHRHKLVTMVTALKNQLHFLALSQGVCRKSKLWSERGRKELESLSLDPWASRRRQELLALLEQLQPQIAALDTAVEQAAAADPAALDLMTQKGVGPVTALAFVLTLGPVQRFQNSRQVVSYLGLNPSEYSSGGRQRLGSISKQGNSMMRWLLVEAAHTAARFDPELRRKYQRLKFRRGGSVAKVALARRLAVRLYWRLRQRAAEAQPVRMPGSSGSAVVPPPGGSRQ

SEQ ID NO: 324873 - protein, 488 aa, unidentified
MKIRKEQAKQKQKKPAHSARGPESAGWNQMNRKQRREMVRRIQAEDLNLEVVHPDAAGIDIGNEFHYVAVPSTRDEQPVRRFGCTTAELKAMAAWLTQCGIRTVALQSTGVYWIAVYEILEAAGLEVYLVNARETKNLPGRKPDVQESQWLMKLHTYGLLRNSFRPSQEIRTMRTYWRQRQDLLRSASRHIQRMQKALTQMNIQLANVLSDITGKSGQAIIHAILQGERDPYELAALCNYNVKVSEEEIARSLEGNWQQDLLFLLQQEQEGYEFCQKQMAECDAQLQHYLTQRKDRSAGVSLREEKRKRRQHKNKKNHPQFDLREQLFRTTGTDLTQIDGIDVLTAMTVISEAGWDMSKWPSEDHFVSWLRLSPDNRVSGDRVIGKGRLPTNNRLNLVLRMAAISLRQSDSYLGAQFRRLKRRLDAPVAIKAMAAKLARLIYRMLRFGMLFVDQGAEAYEAAYHQREIHHLKRKAASLGFQIIEAAAS

SEQ ID NO: 324874 - protein, 418 aa, unidentified
MQTELSQYTAVIGIDWADKKHDVCIQDMATGRRRASQVRHRAEDLDEWARSLHCRFGGPIAIAVELSKGPIINALQKYDFFVIFPIEPAGLASYRRTFTLSGAKDDPTDAEFALKLLLSHTEHFKPLQPQSVEMRSLMTLVEQRRQLMSDRVRITNRLRSTLKQYYPQALEWFDHIDTRLFCDFVRRWPSLAQARRARRATLERFFREHNMNRKALLERRIKAIKSAMPLTTDEAVIVPHRLRALTLVAQLEVTLECIKQYDAEIALLAPQHPDYELFDPLPGAGPVFTPRLMVAFGEQRERFNSAAEVQKCGGIAPVTQRSGQSTWIHWRWQCSTFLRQTFVEWAAQTINKSYWAGLYYHQQRAKGCSHQAAVRALAFKWIRILYRCWKTRTPYDEARYLKALQDRGSPLLKTAEAA

SEQ ID NO: 324875 - protein, 347 aa, unidentified
MNYIGADCHISSLDFAVVNEKGNITQKAKVETSALEFMKFVKSIPKPRKIYIEEGELADWLLETSLKFGEKLIITDPKINKWIGKAGKKDDKIDAEKLAQLARGKYIKEIYHPVNKRRRFKELVFAYHDTVKSQTRIKNKIKASFRREGIRCSGDTVYSDKYRKEWQKKLPTNMVVRLIVNQLWTQLDQIRAAKETLKRHIRIQGKQFSEIKKFIKVPGIGLIHASTISAIIETPHRFANKKKLWMYAGIGIAERKSGEKVYSKKLTREYNRLLKNAVKQATEAAISARDNQFRRQYLKLTIEKGIATHKAKLTVARSLLAAIYGMWKKGEAYDPQIDNKRFKENNK

SEQ ID NO: 324876 - protein, 349 aa, unidentified
MKHCAGLDVSVKETAICIVDETGKIVREAKVTTEPEAIVALLMEAGIEYARIGLEAGPMSQWLVTDLLEAGLPVVCVETRHMKAVLKAQQVNKSDRNDARGIAQMMRVGLYKPVHVKTLASQHERMLLTLRKLLRDKLQDVENDLRGTLRNFGLRVGVVSAGHFEARVRELVMGHPPLEAIVAPLLVVRRVLREQFAVLHKMVLEQVRRDRLCRRLMTVPGVGPVVALTFRATVDQPQRFARSKTVGAHFGLAPRRYQSGDTDYDGRVSKCGDAMMRTALYEAAQVLLTRTQKWSWLKAWGMQVARRRGSKKAIVALARRLAVICTGCGLTAANSVGARRSMPLPEQGH

SEQ ID NO: 324877 - protein, 392 aa, unidentified
MVISVGIDVSKDKHDCFIVSSEGEVLADVFTIPNNMDGFHCLLQRIQTCATPQDKIKVGLEATGHYSYNLLGFLLDNGLPTYVLNPLRTNLYRKSLSLRKTKTDRVDARTIASMLLSDAGLKPYTDTAYHNEELKSLTRYRFDKVKDRAKLKSSISRLVCILFPELEKLVPSLHIASVYALLAEFPGAKQIAAAHLTRLKALLETASKGHYKRDMALEIRDAARNSIGSWMPAKSLELQHTIRLIRELDDEIVEIEEQIQAIMDELHSPITTIPGLGFRMAAMIFAEVGDFTRFDSPDKLLAYAGMSPSTYQSGQLKNCYPHMEKRGSRYLRYALYNATKYVCHWDPTFAAYLAKKRAEGKHYNVALSHAAKKLVRLIFSMEKSKRPYCLAA

SEQ ID NO: 324878 - protein, 430 aa, unidentified
MASMHDSVRFKTTVYAAIELSKKSWVVAIARPDRDRPSIHRIAGGNLADLIGRLRKAAGEKQRIVVCYEAGYDGFWLARSLAKIGIDCRVLDPASIQVNRRARRVKTDRIDSLALLRALIAIDRGERHVCAVVRVPTVEEEDARRSHRERQRLVRERTGHINRIKGLLFAQGIRGIEPKRRRTRIDFGKLTTAEGRPLAERLRRELEREYQRLELVQSQLRIVEKERDTADAQDPAVERKRELLCALQGVGGASAAILAREVFARPFASRRQLGSYLGLTPSAYDSGSTTRCQGISKAGNSWARRVLIEVAWLWRKYQPGSPLSHWYARKTADQSPRIRRIMLIALARKLAISLWRYVETGLRYAGVIAARARSGSRLTPRPSYKSFSTFSCPICRYRTSTCPSLAVPSTAEPPPSKTLAAPSSSCFFQL

SEQ ID NO: 324879 - protein, 345 aa, unidentified
MPIVGGLDIHRKQITFDYLDTVTGEVKRGQIVPADRAHLRAWLARFAGWDDAAFAVEGCAGWRYVTEELAAAGIAAHLGEPADTAALRGRKRHAKTDKTDARHLRTLLAEGRLPECWIPPPQILEYRALLETYHDLRREHTAWVQRIHAVFFHQGAPALGEDALRTEQGLARLRAAAAGHLSPAGQLQVATALDMLAAVEARMGPLRQQLTQTARHLTGAKVLAERLYGVGPVTGLALTCWLAGQGRFSSSRKAVRFTGLDITVHSSDRKGPPGRLSRQGPPVLRWAVYEAGKTHARSSAPDHSYYATVKDRKNSKRAALSEARKIVRQACHILTELGDDALTAA

SEQ ID NO: 324880 - protein, 391 aa, unidentified
MINIGIDVGKFKHCASVMDDKTGEILLKPFFFNNDQKGFNLFYSKTKQYIHRKHAVGMEDTGHYMINLTDFLLDKKFTVKFINPRSTCLRRKELGMSAKNDRKDSILIAEMLSEKKFWRSVTRTTQETDKLREITHLYHQLQEQQNEDMNRLQRALDIVFPEVNKLSWTRYSKVYMQFLASYPTATSIASEDIRNLRNALKTDGRGRQCKLTAENIKEAAKCSVGEDNIAVALEVQSIIAIINTRKQQIENLENKIEEFSLKLNSPIISIPGISHITGMTIIAEIGDIHDFSDAAHLISYAGMEPLVHQSGKYDAAHMPISKHGSRYLRKALYQAVFTVCKYCPTFNAYYTKKRNQGKTYRCAQGHCVRKLLRVIYKLLANNIAFDENLVK

SEQ ID NO: 324881 - protein, 344 aa, unidentified
MTQVTVIGVDLAKNVFQLALVDAAGRVVAERRVRRAGLEAAVAACPGAVVGMEACGGAHHWARSFQAAGHPVRLMAPKRVKAYQDPGRKDDRRDARAIAEAATRPHVPGLRIKSPSEQDAQSRQRIHRKRVQLRTDKVNVLRGLLMESGIALPQGEAGLKRYAELADTPAWQAISPDMRAEFDELHAEIGRDGAAIAASKARLVRAAQDDARVQRLRTVPGIGPMIAAATVGAIGDGSDYADGRKFATSLGLTPRLNSSGERVRLGRISLIGDGQLRALYVNGAQALLMQAKRDRPTADGLILWARRLLKRKRWNEVVIALANKLARVAWAVLRSGDTYRPRAA

SEQ ID NO: 324882 - protein, 359 aa, unidentified
MSTQSKPFSFKGQKIFVGLDVHLRSWSVTILSEQAVLKKFTQAPSPAALNKFLTNTYPDAEYYSVYEAGFCGFWIHWELNNLGINNIVVNPADVPTMAGERLRKTDAVDSGKLARSLRSGELKGIYVPDSITTEIRSLIRLRDSLTKDQTRHKNRIKAHLRYLGIDIPEEFCRPGRTWTSRFVLWLKSLELETAYGKKTLDLLIAQYEDLRGQQLEMMKELRVLSRTERFDEPLRFLMSVPGIGQLAGLTILSEVDDISRFKDAAHFASFVGLVPMCYSSGEHEGTGNITVRRHAKLRWLIVEAAWIASRKDPVLSAAYVEYCRSMKPSKAIIKIARRLVNRIYFVMKHQQPYVNCYVS

SEQ ID NO: 324883 - protein, 328 aa, unidentified
MTPVSIGVDVSKRELAIAVHPTGEQWITATTPAAIATLVIRVRALRPQIVVVEATGGYERGLVAALAVAELPVAVVNPRQVRAFAQAIGRTAKTDVVDAAVLAAFGGRLEPAPRSVADAATQALGAMVARRRQLLEMIGMERARLEHAPPTGSLMRELRRHIRWLERRVADVDDEIGTSIAAHPTWRVQEELLRSVPGVGPTTARTLLGELPELGRLDRRAIAALVGVAPFNCDSGQHRGQRHIWGGRAPVRATIYMAALSAARYNPVLRVFYRRLRAAGKPAKVALVATMRKLLTILNAMIKHQSHWTTPVASTPASPTESARVATV

SEQ ID NO: 324884 - protein, 311 aa, unidentified
MTLPQDVIGVDVAKDWIDTFTLSTLKHQRVATTKQALARFARAAKGALVVYEASGGYERPLTDALNKAGTACARVNPRQAREFARATGRLAKTDRVDAEILARMGRALSPRPTEPVDPGRARLADLVARRDDLVASIGREKNRARTTRDPWIAKEIAGLLKVLQAHLKAVDEQIAAQVDACPALAEDGRRLTTVPGIGPALRAVLIARLPELGRLDHRRIASLAGLAPHARDSGTLRGKRHVWGGRADIRRTLYLAGFIASRYDPALRAFRQRLQNAGKPTKVAITACARKLLTVLNAMFRDSKDHRKQAA

SEQ ID NO: 324885 - protein, 429 aa, unidentified
MKRSIVKSEINLNKRMLVTADISKDWVDLYAEAPAGDSMVERLEAHLDNRCSCLERQLREYIREAEARGYEGLHVVCEPTGCYHRRLLSIAHRLHCTTSLVSGEAVSKLSVVQSNDASKSDRKDPRVMQIAVRTGKTLKHRILSGPYAELRELGRFYDDESDCVVQVRTRLHAAISELFGDLNADGDFFFKGAGLALLEVYGCNPYRIAADGLARFTSRMRRLGRFRESTLERIWTAVQSNLLHVIPESVQQLYEGRIRELHAQWQFHEKHREQYRARMAELFEQLPEARSLKKVPCVSAWRWGQLLGETGPLESFAAAAQLLRYAGLNLCPRASGKYVGKTKISKKGRAGLRRTLWNIVVFSGLIREDGPYGTYCRERKGQGRSAQNTVTIVMRKFLRVIFTLVKKDRTWALERLFRAENQVMPGKAA

SEQ ID NO: 324886 - protein, 338 aa, unidentified
MNTVTLLGIDIGKNTFHLHGQDARGYQVLRKKLNRNQLLPYLAQISACKIAMESCGGSQWLARKIMEQGHQVQLIAPQHVKAYVTGNKNDFIDAEAICEAASRPRTRSVQVKTVEQQVLCTEHRLRKSLVSRRTAVINQVHGFLLEFGVIFPAGYAALDRVPGLMQSRELPIRLINAIERMLEDIRQLTGEIKKLDVEIKQNLVQSDAGQRLQSIPGIGPLIASALVADVGDASVFKSSRDFAASLGLVPRQYSTGGETVLLGISKRGDKYLRSLLVQGAHTVLYRVDHRTDALGMWAKNLLARKPLNKVVCALANKMARIIWVLLTKGGTYNSQLLA

SEQ ID NO: 324887 - protein, 377 aa, unidentified
MITATTLQKQDTTGSAVLYMALELGNTKWKLGFSNGEKIRQVTTAARDLGELEDEIEKARKRFCLKDDVQIVSCYEAGRDGFWIHRYLTDRGIENLVVDSSSIEVNRRLRRAKTDRLDLRSLVRMLIRYCGGERGLWSVVQEPSVEDEDARRLHRELERLKKERTSHRSRIRSLLILHGIVLKEWRDFPEHLGLLKTGDGHLLPPGIGSEIEREFFRMKFLEQQIKELEAEQMERIQNPQTESDKKIKALVELCGIGVKSAWVFVMEFLGWRKFKNRRQLASLAGLSPTPYDSGGSCREQGISKAGNRRVRSMLIEISWIWLRYQPGSKLSLWFNKRFANGGKRMRRIGIVAVARKLLIAMWKMLEYGEIPEGAVVK

SEQ ID NO: 324888 - protein, 410 aa, unidentified
MDVLIPRCCGLDVHQKTVVASVRILGPTGEVTRDTRTFGTTTRELEALAAWLRPSQITHIAMEATGVLWKPVWHILEPEWQLLLVNPQHLKRVPGRKTDVLDAAWIAQLLQCGLLRGSYVPPAVIRELRDLTRTRTTLEDETTRVVNRIHKVLEDANIKLATVATDIMGASGRAMLRAIIAGETDPLRLADLARRRLRLKHGALAEALYGRVTPHHRFLLERLLAQVEFLETEIHRFDQRVTEMSAPFAAPLQRLDAIPGINRRLAENVLAEVGDDMAPFPSVPEMVSWAGICPGKRESAGVSHSARIRKGNRWLSRALVQAAWAARRKKNCYLATQFQRIARRRGAQRAVVAVAHSILTATFFILRDGVDYQDLGPEHFHRLSPDKVVRDLVKRLEKLGHRVTLEMIAA

SEQ ID NO: 324889 - protein, 398 aa, unidentified
MTESSDYESVQVFIGVDVGKDTHHAVAINRSGKRLFDKALPNDENKLRSLISDLKQHGQILLVVDQPATIGALPVAVARSEGVLVGYLPGLAMRRIADLHAGEAKTDARDAAIIAEAARTLPHALRTLKLADEQIAELSMLCGFDDDLAAQTTQASNRIRDLLTQIHPALERVLGPRLEHPAVLDLLQRYPSPEKLASLGEKKLAAQLCKLAPRLGKRLAADIAQALAEQTVVVPGTNAAAVVLPRLALQLITLRKQRDEVALEVEQRVLAHPLYPVLTSMPGVGVRTAARLLTEVACRAFASAAHLAAYAGLAPVTRRSGSSIRGEHPSRRGNKALKRALFLSAFAALRDPLSRAYYTRKMSQGKRHNQALIALARRRCDVLFAMMRDGTFYTPQGS

SEQ ID NO: 324890 - protein, 371 aa, unidentified
MVSIIYVGMDVHKDSYTLCCYSFDEDKLQYQQKIAPNYRLLLKYLEQVRKRYTDEVDFVCGYEAGCLGYSLYHQLTDRGVTCKILAPTTMGITNTNRVKTDKRDAGNIARCLAFRTYSEVSIPTAEDNAVKEYIRMRDDQKKMLKSTKQQILALVLRHGYRFEDGANYWTNKHVSWLKSLNMGGIIQESLNEYIVTYEYLMDKIERLDKRIEELASEERYQEKVKKLSCLIGVKTHTALSVVVEIGDFNRFVKPEKMAAFLGLVPGEDSSGNKQKQGSITKAGNSHLRKLLVESAQSYTRGAIGHKSKELKRRQSGNEPQVIAYADKANERLRRKFYRMTLKNGTKRNVAVTAIARELACFMWGLMTDNIG

SEQ ID NO: 324891 - protein, 366 aa, unidentified
MIKTKIKCKVMKKFLIGIDISKEKFDVTVIKSLGEGFECEQVHYDVYDNKVRGYSAMLKDMTTLGVRCGDSLFCMETTGAYELHLCDYLYGKGYDVWRESALQIKWSTGVAKSKNDKADSERIARYALRHQDAAVLYVPVNETLRTLKALSLYRERLVDERRAKEVSIKEIRATQKMNGDLHWIRTNSEQSVKRLKKDIMECEERIMAVIEGDEELKRTYGHITSIKGIGAVNAVAMIVSTGNFKTIPTARKAASYYGIAPFFAQSGSSVHHRKNVSNLSNRRLKGTLTQAAMCAKRFNEDMKAYYDRLLAAGKPRRVAVNDVRNKLVRIMYALVQNDCDYEPKHEVRRTERVLQTTERHIDKAVG

SEQ ID NO: 324892 - protein, 423 aa, unidentified
MTSMTLDPPLTNLLSPAAELVAGVDTHKNTHHVAILDLVGRPVADREFRADGRGYAQVIRFLHEHGDVTRVGVEGTGSYGAGLSRALNAAGLTVVEVARQDRQARRRRGKSDPLDAHQAAVAVLAGTDTAIPKSGDGAVESMRILLAERRSAAKARAQVMNQIHALLITAPELVRQAFRALSGQRLVNTLARTRPGSEASADPAVVARQTLRRFAVRQLTMQAEIDLIEQQLDLLVRQVNPTLLSLSGVGPVTAATLLVAAGDNPDRLGSRASFAALAGVAPIPASSGQRTRHRLSRGGNRHANAALHRIVLLRIRHREPRTMAYFERRRAEQLTDRDIMRCLKRHVANEVYAALLNPAADNPAGRELRAHRQAIGIPISVLAASLGVPYQRLRRLEIGTRADPELERRATIALDAISPPQTA

SEQ ID NO: 324893 - protein, 391 aa, unidentified
MFAGIDIASERHVLARLDEDGAPIGKAMTITEDREGYDALLKALGSPPVLVVMEATGHYWKNLFAVLTAAGHEVVLLNPFVARRFQDSSLERTKTDAIDAHGLARFGFEKRPAPTRLHDEVAESLRELVRHRDRLRQDFDDRVRQLHRLVDLVFPEFSRYVRSLDSMLATCLLAEYPSAQAFARANPRRLAKLRYDGRHMIGAELAEQLVEAARRSIGQHHGPAYALQARHICQDLDLWRRRLNEIERDIEDLLDTHEVGKLLTTIDGIGPQSAARIIAAVGDPARFRSADAFAAYVGVVPGLKHSGKRTAGRAAIAPLGNARLRTALWMPVLGAVRRNPWLRTFYERLRAAGKPPKLALVAAMRKLLHAVYSVAKNRKPFVIQATPARAA

SEQ ID NO: 324894 - protein, 448 aa, unidentified
MSNGNGVSRGDRNRNARLNRLRELVPVTHAIVGIDLADNKQMVVVTDHDSKVLARRTFRCRAWDLGLALDWAGQHASKAGFAGVTVACEPTGHRWRVLGQLAADRGMAFVCVQTLLTSWARRSEDLTFDKTDEKDAVVIARLTAQLRCYVPEPLDERWGRLRHLGARRERLLAETVSQVQQVRDLLECVWPAPLDTAKHPFRSRTWLAGMSVILARTGGDPTRLRRLGPARFEAAVRREIVDRQGKKPCLRIVRLLFAAAADLRGVTTHRPGALERVQLLLDDFRDTGRRQGETEARMVEVLDELQLTELVCSIVGLSALGAATILAETGDLTRFASARSVVKHSGLAPREKSSGTYTGRTKLTGQGRPGLRRAAWRAVWGAQKANPVYAAKFTHLTTRTENKLNRGQAHAAIAAAILRQLYAVVSTGQRWDAAIAAGGRCEVIEPAA

SEQ ID NO: 324895 - protein, 412 aa, unidentified
MTAINQFAAHIGLDWADKKHDVCVQFNNGERVFHVIEHTPEALDTWLKALHKKVKGRIAVAIELKKGPVVFALQKYPFITVFPVHALSLARYRQTFWPSGAKDDPQDAELALELMLRYPKKIRAIEPDNSDIRLLQQLVEQRRQLIEDKRRFVNRLINTLKQYYPQLLEWFSHRGSLLLCELIIRWPSLQQLKRARRDTVRNFLNAKGGRATALTGQRVASIDDAIPLTTDPSVIEANALMATALATQIKVVSEIIKTYDERIETLFNTLPDAGLFKSLPGMGPCMGPRMLAALGDNRDRFNSAEEIQNYAGIAPVTERSGQKSWVHWRWQCAKFVRQTFVKWAAKTVNSSYWAKLYYQSLREKGKSHQCAIRALSFKWIRIIYSCWKHRTCYDEAKYLLALKARNSPLLKP

SEQ ID NO: 324896 - protein, 344 aa, unidentified
MATYYIGADVHSNNTELAIEQRGRIVARYSVPTSIPAISAVLDSLQGRKILAMEEGPMAGWLYRNLHEKVDKLVVSEPRRNKLISSEGDRDDKIDSGKLAVLLRGNFLKAVHHTRDSHRAHLKHWINLYHDRVRDGVRDINKIRACCRMHGVRIPRRVVRNPVRRHAWLSELDNPVLKAQLHMLWIGYDATKEQVEIAKKQFSAYARKYPIIKSWCKIPGIGLIRATTIFAYLDTPWRFKNRAKLHRYCGVGLVRMTSGKDKKGRPKPARLKLPWAVNRRIKNAVLGAATSAIELRDNAFKEYYERMRSHGITPVNARHSVARKLVSTMSAMWKTGNEYDETLV

SEQ ID NO: 324897 - protein, 338 aa, unidentified
MKKLYIGLDTHKENIVIGIAFAGNKASEVYGKVSADLDRFIAALRKLLKKYDLKKEDVSICYEAGPTGFVLARRLIKLDFECHVVAPTSIPKNTGRIKTDRRDAKKMARLLRSGDLTFVHIPSPLDEVIRDVSRARTDIVNARKQAKQQLGGFLLRNGYHYTGKCRWSEGHMRYLRELVLTNPAQKLVLEESLQRIDMLVEQEKRISDKMGELAQGWYRKPLLSALMGFRGFQAISATSVISELGDLRRFLHPRQLMAYIGLVPSEDSSGNTRRQGGITKCGNTHVRWMLVEIIHSYRLPPKVSKELSKRQEGLSREVKGISWRAQIRLCKKYHHLVL

SEQ ID NO: 324898 - protein, 423 aa, unidentified
MTEQKAIPAGSSLSRPKRFIGLDVHKYYLIALGVDADLNVVLPAQRVELSRLDAWMQKTLRPDDALALEMTTNTWQLYDELAPRVLAVTVVHPPHVALITRSQVMNDKIAASILARLLAKGLLVGIWVPPQKVRDLRALVAQRKKMTRLATQAKNRLHAILQRHHLAPPEGNPFHASQDAWWNALPIGKLEQINQQSDLNTLRFAEAEQARLTALMNEIAAHDARVPRLIQLSGFAVTTSLEVLAAIGEIGRFPEPKKLVGYAGLGVRIHDSGMTTRTGRITKAGRKDLRAAMVEAAQTASNTHPHWIAELKRLEPRLGRNKAIVAIARKLLISVWYVLNGQPDRFAVPELLARKFFQHAYRIGKDNRPAGQSTAEYVREQLDQLGLGAELTRVPWGSKKKPLPLPPSKLAARKEVSGVPHTE

SEQ ID NO: 324899 - protein, 347 aa, unidentified
MTIVEAARGVTGGVDTHLDVNVAAAIDPIGGLFGTEAFPTTPAGYQALLSWLQSFGEVRKVGVEGTGSYGAGLSKFLARAGISVVEVNRPNREERRRSGKSDPLDAIEAARSTLAGKAKSIAKSKDGAVEAIRALVVAKRSARVARTAALTQMRHLIVSAPDQLRSRMRGLNVRTLTAEAARLRPSRHGEPVLAATKAALSSLAHRVQGLDDELAELDGRIEALLEALCPDLLGLFGVGPDTAAALVVCAGDNPERLRSEPAWAHLCGVAPIKTGSGQTSGRVRFDPAGDRQANAALWRIVMVRIAHDPETTAYFLRKVKEGRSKPEIIRLLKRYVAREVYRYLPRR

SEQ ID NO: 324900 - protein, 341 aa, unidentified
MSIVGAFDVHRRQLTFEYLNTSTGELKRGRIMPADRPHLRAWLSRFAGQADVHFALEGCTGWRYVAEELLAAGITPHLAEPADTAALRGRKRHAKTDKTDARHLRVHLMAGDLPECWIPPEHLLEARATARLYKDLVDERGGWHQRVAATLFHQGVPAAVSVARPEGRAAAEQAFLSPAGRQAVETGLRQIDRLTAELEPLRRQLDMLSRRQPGCRALRAAHFGIGAVTSVAIWAELGDVRRFGNSDDVVRHTGLDITVYSSDGKRSAGHLSRQGPPLLRWALYEAAKCAARPTAPDYGYYTEARNDRGGGRATLSVARKLARRCCHTLRELGEDALAPAA

SEQ ID NO: 324901 - protein, 379 aa, unidentified
MTTTDASAETRETVYAAIELSKKTWVLGIAHPDRDRPSIHRVSGGNIAELVSRLRVAARNNRRILVCYEAGYDGFWLARALAKMGIECRVLDPASIQVNRRARRVKTDRIDVLALLRALIATDRGERHVCAIVRVPSVEEEDARRSHRERQRLVRERTGHINRIKGLLFAQGIRDIKPKLRRTRIDFAALETAEGHPLPDRLRRELEREYARLSLIATQLREVEKERDTADAQDPVVEQKRQLLVALHGVGATSAAILAREVFARSFASRRQLGSYLGLTPSAYDSGSTTRCQGISKAGNSWARRILIEVAWLWQKYQPASPLSHWYIQRTAGQSSRIRRIMLIALARKLAISLWRYVETGLVPEGVAIAKTTLRCAPA

SEQ ID NO: 324902 - protein, 404 aa, unidentified
MNERTAGIDLASEEHRLVVIEGDGRSVAEQRVAHSEEGVAELLRRLLELEVARVAIERPNGLVVDRLLDADIAVVAVHPNQLAAARERYRSGGGKSDGFDAYVLAELARTDMHRLRLLEPDSDETRALRTLTRAREDLVEQKVALCNQLRAQLEAFWPGAACVFADLDSPICLAFLERYPSPEDARGLGEKRLAAFLARNGYCGRRSAGELLARLRSAPGGRAGLLESEARRQVVLALVAALRPLVEQIRLLTSEIRGLLGAHPDGEIFRSLFRDPKSVITAAELLAEIGDRRDRHPTSSSLEAIAGQAPVAVESGKKKVACFRWACNKTLRSAVSVLADSSRKHNPWANDIYRRARARGHDHPHALRILGRAWLRVIWRLWQDGVPYDPTRHGGLNRLLAAEG

SEQ ID NO: 324903 - protein, 400 aa, unidentified
MIDINDIGVFLGLDVGKSNHHGHGLTPAGKKVFDKALPNGEPQLRAVFDKLKAKFGTVLVIVDQPASIGALPLTVARNADCKVAYLPGLAMRRIADLYPGEAKTDARDAAVIADAARTIPHTLRSLELADEIIAELTMLVGFDQDLAGEANRTSNRIRGLLTQFHPSLERVLGPRLDHPAITWLLERYGSPAALRKTGRRKLAEVIRPKAPRMAARLVDDIFDALDEQTVIVPGTGTLDVIVPSLAKSLAAVHEQRRALEAQIETLLEAHPLSQVLTSMPGIGVRTAAVLLTTVGDGTSFPSAAHLASYAGLAPTTKSSGTSIHGEHAPRGGNRQLKRAMFLSAFAALHDPASRSYYDRCRARGKTHTQALLRLARQRINVLFAMLRDGTFYEPRTPRHA

SEQ ID NO: 324904 - protein, 345 aa, unidentified
MNNLKVLGIDLAKDIFQLHGTDAKGHRVLTKRLSRVKLIEYMAHVTPCLVGIEACGGAHYWARVFEGQGHTVKMMSPQFVKPYVKSNKNDARDAEAIAEAVTRPNMRFVPKKTMQQQDVLLLHRARELAMKQRTAHGNQIRGLLAEYGIVVAKGLSPLNQLPEILEKEEQKLSLNSKEIFLQLYEQLKIYAEQVAYYEKKIHSDAANSPRCVAVQEIEGVGPITASAIVATIGDANAFKSGREVSAWLGLIPKQQSSGNKVSLGSITKRGDRYVRKLLVHGARTVVKNCDNKTDRKNQWVADKKRRCGYNKAAVALANKNARVIWALLATGECYRKASSIETRVA

SEQ ID NO: 324905 - protein, 376 aa, unidentified
MTAATRPELSVSEPTVYVAFELSAKQWKLAMTSGFGVAPWLRTVPAGDLAAVARAIAQARKRLALPPSAPALSCYEAGRDGFWIHRALTAQGIASRIVDSASIEVNRRARRAKTDRLDALKLVAMLVRVCQGECGVWREVRVPSVAEEAARHVSRERTALTQEQTRLINQLRGWLTTWGCTLPARRRDGWWTTARDWAGAPLPAPLQARLERAHGRWVALEAQIAAVDAQQTAATAAAAPASALGRLVQVKGVGTTSAAVLLDEGLVWRAFRTRRELGGILGFAPTPYQSGDRRHEQGISRAGNHRLQGVSVQLAWQWVRWQPDSPITQWYQARFAAGSSRLRRIGIVAVARRLLIALWRYATTGVMPAGAILKRV

SEQ ID NO: 324906 - protein, 427 aa, unidentified
MISAAIERCAGIDVGKKFLAVCVMVGPLEGEPRVEIRKFGTFRAELEGLRDWLKQQAITHVVMESTGSYWKPVFNVLEDAVKVYLANPQEVKNRKGHKTDNKDGWWLAHLLRHAMIRPSFIPPRAIRELRDLTRRRKRLLGAGTSERNRVQKILEDANVKLGSVLTDLFGVSGQLMLEALLRGQAQAEEIAQFAKGRAKKKIPEMIAALEGHQMSDHHRRMIRYSVDHMRFLEEQIEQLDKDIAATIRESGLEPQWQLVQSVPGVQETSAAAILAETGADMTQFPSEKHISSWAGICPGNNRSAGKNRSSHTTGGNRWLRGTLTECAWAAAAKKNCFLKDKFWRITTTSGGKKAAAVVAIAHTLLILTYQVLTTGQAYQDKQTPALDQRQKQRMIRHHIRRLGKLGIAVCASRPGVPAIADSPPPGN

SEQ ID NO: 324907 - protein, 450 aa, unidentified
MSLDCCCEHVGLYPGRGTSERPLARSSGRAEGRMVRELIGMEVVFDRVAGLDVGKASVTVCVRTPGARRGRQAETRTFKTTTRSLEVMRDWLLEQGVTIAAMESTSTYWKPPFYCLEEVMEVWLLNAAHMKAVPGRKTDVRDAEWIAQLLEHGLLTPSFVPPPAIRRLRMLTRYRVQLYGDRTRETVRLELMLEDASIKLSTVASSLTTVSARAMLAAMIDGETNARVLAEMAKGRMRSKIPDLAQALEGHFDAHHAQLARSILDRLDRVEQALAELDEAIAAACEPWAHQIELLQTIPGVGLRVAQVIVAETGADMSRFPTAAHLASWAGLAPAMYESAGKRSPAGRRRGNKWLTAMLVESAGSVGRMKGKNYLAVQHTRITRRRGMSRAQIAVAHSILVAAYYMLKRDEPYRDLGPEWLTKRNEEAHTRRLVAQLEKLGHTVVIDPAA

SEQ ID NO: 324908 - protein, 367 aa, unidentified
MWKGITYVGLDAHQGTIHSAILLPDSQESVLDSFANSPDGIGRFVRRLRKRPSDQIRTCYEAGPLGYGLQRSLIALGLECAVIAPSLIPKKPGDRIKTDRRDARKLADLLRAGLLTEVHTPTPEQEAVRDLCRAREAVKEDQKRVRHRLSKFLLRRSIRWTPGRKAWTVAHRQWLRGLRLEHPADQLILDDHLFALEQLEGRLAAFDEQIEAFASQEPYAESVGWLRCFRGIDTLTALSIMAELHDLRRFASPRALMAYVGMVPSERSSGGQERRGALTKAGNRRLRRLLIEAAWHYRHRPAVGYRLKKRREGQPAHAIAVADRAQQRLHRRYRRLVERGKPHNKAVAAVGRELVGFVWAALQPQAS

SEQ ID NO: 324909 - protein, 345 aa, unidentified
MNKVTPAFVRLAVDLAKQVFQVAGEDAYGRVVYEERIKSRPAFSKLLAGLGAKVEVLLETGPGAQAWARQVQEAGAKVRILPAQRVAEHRSGAKNDRNDCLTILRAGRDEAIHGVPVKTVHALEMQAEHRVRTGYIRRQTSISNQVRGILLEHGIAIAKSNSALALWVTRIQQDTSFPIPEMLREIIADLWAEWEHLGQRRKRLDSQLEQIAQNDEVARRLMTIRGFGPIMTTALLAKQTQPERFPNARQFAAYFGLVPDQHSSGSTVRLGRMTRRGDGYIRSLAVTGAQSVLHRVRADATGADDKRLQRWCRQHGKKGAAIRLANRNLRIAWILMTTQAEYQPQ

SEQ ID NO: 324910 - protein, 342 aa, unidentified
MKDTMTGVDLAKRVFQPHGASMAGQVKFRKKLTREQFHRFMSDQPACVVVFEACGSASYWAREMEKPGHEARLIAAQYVKPFVERQKNDAADAEAIVIAARRPEMRFVSPKSEDQQARAVLFRSRERLVHQRTELVNALRAVLYEYGHVFPVGIAQLKRIEALVGDPACGLPALVIAECQDLLAQIAEKSERIGARMKTLKAIATETETARRLQSMPGAGPLTALAVEAFAPDMGQFSCGRDFAAWLGLVPRQHSSGGKDRLGRLSKAGQADIRRLLIIGAMSRIIGRARAKVPADSWIGRMLTSKPKMLACIALANKMARQVWAMLVKSEDYRDPALATTA

SEQ ID NO: 324911 - protein, 344 aa, unidentified
MEHFAGLDVSVKETSICIVDDTGGIVREVKVASEPDALLQVLKNNAYHFKRIGLEAGPLSQWLYSAFAEVNLPVICVETRHMRAVLKAQINKTDRNDARGIAQMMRAGLYRPVHVKTLRSQKLRMLLTHRKLLQSKAIAIENDLRGTLRNFGLKVGIVGKLKFETRIRELVENLPDLAVLVEPLLVVCRVLREQIAVLHRRLLVIVRDDDVCRRLMTVPGVGPVVALTFRATLDVPARFRNSRAVGAALGLTPGKYQSGESDHTGGISRCGDEMMRVMLYEAAQVMLVRSTRWSWLKAWAMQVARRRGMKKAIVALARRLAVIMHRIWVDGTEFSWSRQEAAEA

SEQ ID NO: 324912 - protein, 413 aa, unidentified
MTNESWTLSVGVDCGSRHHEVCVLNQSGQTVATRRIEHSGADLHALTEWLLTLGESQPARILIGIEVPHGPVVETLLERGYVVYAINPKQLERFRDRYSAAGAKDDGRDAWVLASAVQSDRKAFRRVEVGDPQIIQLRELSRLDGELSEELTRTTNRLRDQLQRYFPQLLQLCPAADEPWLWELLARAATPAEARQCDVTALEQLLKRARIRRFTAAELHHVLGTRPLVVAPGTVEAASLHVRVLLPRVQLLHAQRTESAKQLKQALKRLTHDSPGKGREHHNVTILLSLPGVGIRIASTMLAEAAQPLKTRDYHGIRLLSGVAPVTRASGKRRIVTMRYACNERLRTACHHWANVATQHDATARRHYRILRQGGHTHPRALRGVADRLLAVLFGMLKSDTLYDRQRPRRSAA

SEQ ID NO: 324913 - protein, 339 aa, unidentified
MRLYAAFDLHGNNNFLAVIDRDGKRIFGKRLLNDPERIVDALKPYKKDLTGIVVESTYNWYWMVDTLMEKGYAVHLANPSAIQQYGGLKHTDDEYDSFWLAELLRLGILPEGYIYPKEERPIRDLLRKRGHLVKLRTSLIISLQNIISRNCGMKLNVNEVKVLKEDRVHPLLQDNADLALAGKVSKEAIDFLTRQIRTIERVVEGRIELKGSYGYLLTLPGVGKILALTIMLETGPVSRFAKVGNYVSYCRKVSSHWSSNGKVKGGGNKKNGNRYLAWAFSEAAELARRYEGGARTYYQRKMQKTNFMVAHSALAHKLARAAYYVMRDQVPFRPEKLFS

SEQ ID NO: 324914 - protein, 343 aa, unidentified
MQAITTIGLDIAKSVFQAHGVDAGGQPVIRRQLKRRHVLSFFQKLPPCLVGIEACASSHHWSRELQALGHTVRLMPPAYVKPYVKRHKNDATDAEAICEAVTRANMRFVATKTPEQQSCLMLHRTRHLFIRQQTAVINAIRAHLAEFGIVAPVGRNGVEQLLGIVADPNDKRLPEVARVCIAALGTQLRVLKAQVLNFDRQIMAWHRSNETSKRLDEIPGVGPVLATALVASVADPKAFRSGRDFSAWIGLVPKQYSSGGKDKLGSISKQGDRYLRGLFTAGALAVIRYAKIHGTKHRPWLTALLARRPTKVVAIALANKLARMAWAMMAKGERYKQPVALAA

SEQ ID NO: 324915 - protein, 366 aa, unidentified
MDHFAGLDVSVKETSVCIVDDTGKIVREVKVASEPKALLAVLKNPAYRFKRIGLEAGPLSQWLFSALAEAELAVVCVETRHMQAVLKAQINKTDRNDARGIAQMMRVGLYRPVHVKTLRSQKLRMLLTHRKLLQSKAIAIENDLRGTLRNFGLKVGMIGKVKFEARINELVESLPDLAGLVEPLLVVRRALREQIVVLHRRLLAIVRDDEVCRRLMTTPGVGPVVALTYRATVDVPARFHKSKAVGAVFGLTCSKYQSGEIDRSGRISRCGDQMMRVMLYEAAQSMLRSKKWCWLKAWAMQIARRRGMKKAIVALARRLAVIMHRIYGPAVCCKGIRTEWSFWSALIYPASRRSSCSGPSWLSAHT

SEQ ID NO: 324916 - protein, 429 aa, unidentified
MTRISAGVDVSKNRSTVCIMDQDGKFIMRPFLVWHSTEELDFLADTLKRLNGEVRVIMESTSIYQYPIAFHLKERGLFISIVNAYEMKQFANIDFRGGKTDKKDSRTIASYGISYWYKLVEWQIPKDTYFNLDLLNRTYMNAKKHRQIILQELQHYIDCAMPGMDKELHSLNLNTKKDFMLDFVEKFWHRDEIVNMTEAEFTEVFTAWAKKKGYRPVEGKAAKIYAIAKSCIPYYPANPTVKTILQCIVDKLSGVNRTLVTIVTQMIEEAKKLPEYQIVREMPGVGDPLAARFFGSAGDIRRFKNSKALVAYAGIDSPPDESGDFSSTHRHITKKGSKVFRDTGYEIMMALRAQKRTWEKVRKNPEVYDYMLKKEAEEKPRKVAKIAALNKSLRIVYARIKELYDNMALAERAKAKTKSKTKAKTKATA

SEQ ID NO: 324917 - protein, 412 aa, unidentified
MEILYAICCGLDVHKDSITACLRRLGGRGPVTQELRPFGTTTGELLTLLDWLVAAGCTHVAMESTGVYWKPVFNILEGHFQQVLVVNAQHIKALPGRKKDTLDAEWIAQLLQHGLLRGSFIPPAPIRDLREATRYRKQLIRLRADETNRLQKLLEGGNLKLGSVASDILGVSGRAMLAALVHGETDAAALAGLAKGRLRKKQPQLVAALTGRLTPVQRALLGQQLAHVEYLDKAIATLDALIATLMAPYQAEAERLRSIPGIDTRGTENLIAELGVDMAVFPSDGHCASWAGMCPGHNESAGKRKSGKTRKGSKWLRAALTEAAWAASHTRSYLGAQYHRFARRRGKKKAVVAVGHSILVIAYHILKHGTTYREFGQDYFDRRDTTRIQARLVARLQALGLHVTVEPMATAA

SEQ ID NO: 324918 - protein, 424 aa, unidentified
MASHEFAAFVGIDWGDQKHAVCLRADGVEVECELSQKAAEIDAWASELRTRFGGRPVAVCLEQSRGPLIYALLKYEFLVLFPLNPLQATRYREALYPSGSKDDPLDARLLCRFVETHHGQLRAWQADDEATRLLRFLAEDRRRFVDQRTAHKNQLRQRLKEFFPLVLELLRGGDLEDEWFLQLLIKFPSHAELRRASPRTLERMLPKHHRLSDDEPLDPRVAQIRAAVPLVTDGAVVKAGRLQVMELARLILRLNTSITEYDRELAVELARHPEAELFRSFPGAGAALLPRLAAAFGTNRERYVDAQELQQLSGIAPVQIRSGKSCSVRRRRACPKFLRQTFHEYADHSRKRSLWAKAYYRMLRGRGLRHNAAVRALAFKWMRILFRCWQTHTPYDEHRHLAQLRLKQSPLLQFLDLPIPAEQT

SEQ ID NO: 324919 - protein, 352 aa, unidentified
MAKLWAGLDIGAETTSICVIDDAGNVVRERDCATDLQCVRREIAAFKRRRSLSIGMEAGVGIHLARGLRDLGYSVDIYEARQLSKFLRLRRNKTDAGDANGIAQAGRLAAPMVAKVFLKSLDCQELASKLAIRRHVIRARVAGFRVLCSQVELFGGRLPRRIRTASFHSQVEQQVRKLFGRRPTLLSAELLRLQTHCELLVEWQHALDLELKQRAEADPVCRRLMEIPGVGPICALTFTAAIGDPYRFRHAADVGSYLGLTPRLKQSGFSRKTGRISRMGHRYARNVLVQASLHFMRSADPQLALHAWTSAIALRRGRGKSRVALARKLTTIMLAMWKKGEPFRPELLEAVA

SEQ ID NO: 324920 - protein, 399 aa, unidentified
MLNPVSSQLRVGVDVGSRCHSVAIGLSDGSLLEEFEIPHTAEGFREFFARVEACGRRHAVPIAVAMEGYNGHVRPLDSLVRARGWQLFNVNNLKLARFKEIFPAAAKSDRIDSRKTLELFQLGDHLPMAGEVLQEVMATPEENNVLKRLSRRRRRLVNERARVINSMQADLQAVAPGLLEITQDVGNLWFLNFLTCRKDILKLARLRRSSLLKVPAIGPTYADRIQAWQQGACFGPDARLVGDMIRQDAERILELKQQIKALEDQMAHVAERSSMACQLASIPGYGAVCTAELAGEIGTIGRFRNEASLALYLGMATLDNSSGKFRGSKVPKHVNARAKAAMMAAVDHHRKRVPQSQRYYEKKRAEGKKHNQAIRALGRHLCRVIFKMLSQERLYRIDH

SEQ ID NO: 324921 - protein, 363 aa, unidentified
MKIMVGIDLHSNNALCGLMDESGRRLVHKKLPCDLTAILQLLEPYKASIATVAVESTFNWYWLVDGLQDHGYHVVLANPARMQPYSGMKYTDDVSDAYFLAELLRLNLLPTGHIHDRKTRPVRDLLRRRLLLVRQRTRLILSFKSLNERTLGQRVSLARVKSMKVEEAQARFTAPADQLLSGTEIELMGHLTAAITKLEQHLLGVAGKGPVYQRLQEMPGIGKILGLTIALETGDAQRFAAAGNFASYSRCVKSLRTSNGKKKGENNRKCGNKYLAWAFVEAAHFACRYDDQCRRFYDRKKQQTNPIIATKALACKLAKAAWHVMSQDVPYDAARVFGPARKSDFGETGREPAKGSGHPSQQD

SEQ ID NO: 324922 - protein, 397 aa, unidentified
MYIVGIDIAKRKHEAAVIDGEGTVIIKPFSFTNNCSGYNRLLAMLTKAKLPLDEVSFAMEATGHYWLALFTRLQKEGFRVQVINPVQTNSIRSFYIRQAKTDPRDALLIAEVIRFGHFSESTLHPENIYELRELCRGRHAIVSMQADVKRKVVALLDQVFPEYETAFTNLFGDTSMAILQTCPTPKELSEMPFEELCHLIEVSSHKRFRMAKAQELQELARNSFGFAMAGDVFSMMIRLYAKHLDFLKQQVREMDRKIAEIMDTLDTPITTITGIGPTLGAYILSEIGDINRFSSAAKLAAYAGIDPTMRQSGEYNGVRNRMSKRGSPYLRHAIWLAASSAVLHDPALKLYFQKKRDEGKPYMASVGHACRKMVSIIYAVMRDNKAYTPCIPNEISA

SEQ ID NO: 324923 - protein, 404 aa, unidentified
MELTPIYRSVVAIDVHQSKLTVCALFEGEQGEVQVQIEEFGGFKRDRRAMAEWVASFEPEVVVMESTGIYWKSPYAALEKVGIQALVVNAYHVKQVPGRKTDIADAQWLAILARSGLLKGGFVPPSNFRHLRLLSRQLQKLTGILAGEKNRLHKVLSDGGIRLSAVVSDIHGKSARQMVKGLLAGESPQQVLVYASKRLKATEEELLDALEGELSATHRFVLSQILEHIEYLEERIGCFQQQLLKELEPQRGILHALQTIPGLDEIGAAMLLVEIGDDMQAFGCAEKLAAWAGVCPGNNESAGKRKAGKRRKGNPYVRHILCEAANAASRTRSALAEKFKALLIRRGRKRAIFALAHKILKIVFVLISRGDYYRDATVDYEAISVERNAPRWIRMLRKYGYIAA

SEQ ID NO: 324924 - protein, 311 aa, unidentified
MSPLTYIGIDVSKEQLEAYLSSTGEHQTVANTEAGIKSLIPRLQSSNPELIILEATGGLEKPAVEVLTAAGFPVAVVNPRQVRDFAKAKGILAKSDRIDARVLADFGEAIRPEARLPKTPEVQELEALTTRRRQLVNMITEEKNRLGSAPKRTRLQIQEHLHYLEKALKAINQEIDKSIKKHPQFGTKSRIIRSVPGAGPVLAVTLLSDLPELGSIDRKEIAVLVGVAPLNRDSGRYRGRRRVWGGRARIRAVLYMATLAATRCNPVIRTFYNRLVNAGKEHKVALTACMHKLIGILNAMIKNHTIWQCTS

SEQ ID NO: 324925 - protein, 418 aa, unidentified
MLFAGIDWGDKALDYHLRTPAGDVLAQGRVKPDPEGLADLFAALEASATPGQIGIAIETSHGAWMQALLDRGYEIYPVNPKAVDRFREAMSANGDKSDKIDRRVLAMFLATFHHRLRPLQPDDPEIVSLRIACQDRVRLVEERSAKLNELRSILKLHYPAVLTLFADLDTLIALNFLQKYPTQNRMRKLTERRLRSWLSRHHYTCPARLDKMVACLKQPALPIADHLQQAKASLIQYLAKSLITLKAEIAQREKAITQSFHQLPESDWAESLPGAGANLAPAILACIGRDTERFETAADARAFMGTAPVTKTSGKSRSVRFRRGCWKFARRTLQLFAKESRRQCAWADRFYQKQRESGHKHHQALRALAHKWLKIILAMQRNGACYVEAVFVQSQQRYLSKQRPAPTPHTTFIARTLT

SEQ ID NO: 324926 - protein, 350 aa, unidentified
MTDPIVVERAGVVTGGIDTHKDVHVAAVIDHLGAVIDTRSFPTTTAGYEALRCWMSWHGQLGRVGIEGTGSWGAGIARHLKAHGISVVEINRPNRQIRRRNGKTDLIDAIGAARSCLAGLDAGTPKTADGPVEAIRMLLIARRSAISTRTKVMNQIRSLIDTAPEQLRDRYQAMSGPDIVATAAKHRPGTTVADPVTAARQALRSLARHHQLCTDQITELDSQLEHLVTATAPTLIDLHCVGIQTAATLIVTAGDNPNRLTSEAAFAALCGVNPIPASSGRITRHRLNRGGDRKANSALWTIVLARMAHDPATRAYVQRRTTEGLTKREIMRCLKRYVARQTYRAIKADL

SEQ ID NO: 324927 - protein, 406 aa, unidentified
MSAYRFYVGLDWATEAHRVVVQDAERQGVAERTVPHEGGALEAFAAWLSELAAGVPRDVAVALESPRGAVVDILLANGFHVFALNPKQLDRFRDRYTVAGAKDDRRDATVLATALATDQPAFRRLAPEHPLVIELRELSRLEDELQQELQRLTNRLREQLHRYFPQLLQLVPAANEPWLWALLERAPTPSAAQHLSRAALRTLLTRHRIRRVDADAVRALLQHPALPVAPGTVQAAQRHLAVLLPRLRLAHQQRAECATLIEDILERLGEQQEHRDVPILRSLPGVGRVVAATMLAEASRLLAARDYHGLRTHTGVAPVTKQSGKHCVVIRRSACNRRLRDAAHYWGQSVVRHDPRSRAHYDRLRARGHSHGRALRGVVDRLLRVLIAMLTTQTLYDSNRRLPIAA

SEQ ID NO: 324928 - protein, 314 aa, unidentified
MTDLSTFVGIDVSKKSLDVATLPAGNPRTFSHDAKGRRQLLEQLPQPGTCLIVVEATGGYERLLVAELVTAAHLVAVVNPRQVRDFAKGLGILAKTDRIDAVVIAKFGQHVKPRPLAEVREKQGELDQLVTRRRQLVNLRTAEKNRQGMAHSQPVKHSLQLVIDLLNKEIKRIEKMILALVESDDEWKGKADVISSVPGVGPVTTSTLIAEFPELGQVNRNQAAALAGLAPFNHDSGTFKGKRVIKGGRRSVRNVLYMAALSAKTHNPVIRKFAERLENEGKLPKVVLTACMRKLLVILNAMLKTNTRWNPRIA

SEQ ID NO: 324929 - protein, 355 aa, unidentified
MNSEKYIGLDVHQATISVAVMDSRGKVVMESILETKASTILEFFAGLRGTLSVTFEEGTWAVWLYDLLKPHVAKVVVCNPRKNALLKDGNKSDRIDARKLAELLRLDNLKPVYHGETGVRMLRELARSYLTIVKDLTRVMNRLKAMYRSWAIPCAGRDVYYTRHRTEWLGKIREAGVRRRAEQLYQQLDMLQHLRQQARRELLAESRKHPITAKLRKIPSLGPIRSALAVALIQTPHRFRTKRQLWAYSGLALETRTSGEHRYVRGQLRRSKKQVSIRGLNKDHNHDLKGLFKAAATRASVQPGPFQDFYQRSLAKGIKPTMVRLTLARKIAAITLTLWKKGENFDAEKLKSQTA

SEQ ID NO: 324930 - protein, 505 aa, unidentified
MILRPDHGNISYPKTRQRLQAAKMEEVKKRQAAPEKKPKKRSRKSKARGSLPLSAPAMPAELKQVNINAAGIDVGATAHFVCVPQGRDPQPVRSFGTFTADLEAIADWLAECGVTTVAMEATGVYWIPLFELLEQRGFEAKLVEPSRLKHVPGRKSDVLDCQWIQQLHTFGLLCGSFRPEDSICVLRSFLRQRQTLVRSAARCVQHMQKALTQMNVKLQHVISDITGVTGTAILDAILAGERDPRKLAELRDGRCHNDEATIALSLQGNWREDHLFALKQAVDTYRFFHERLAEVDQKIETQLKTFEDKSQGKPLEHPTRMRKYRGNEPAFDVRKYLYTITGMDLTVVHGLDANTILTVISEIGLDMSCWPTEKHFTSWLTLCPSVNKTGGRSQSSSGRTRPSSNRAATALRMAAWTLLRADCALGAYARRMRARLGSPKAITATARKLAIIIYKMLKYGKAYVDRGAEYYEQQYRAAMVKNLKRRARQLGFELVEATDTPVAEP

SEQ ID NO: 324931 - protein, 357 aa, unidentified
MEKRLKQSLGIDVSKLNLSLSLGFLSERLVKEFKSHPDVSNDVSGYKELLKWLGKSVDSTVELLVVMEATGVYHQGIAYYLHKQGYAVSVMQSGRVKRYAQSLDQRSKTDALDSRMLSMLGLERSIRLWRPPSKELQQLKALSRERSSLLKDRTIENNRQGAIESSVYSNSKALKRHKNRLKLFNSQIELIEQEMQELTSKNEVLKRKIGFMTSIPGISYISAATVIGETLGFESIVNAKQLTSYAGYDVVLRESGNFKGKTRISKKGNSHIRAALHMPSMTCVRCNPTLKQFYNRLKPKKAKPLVALIAVQRKLLILMYTLWKNEEVYDADFETKKQQKHKALAARDNKLITQPVS

SEQ ID NO: 324932 - protein, 354 aa, unidentified
MDIKYIGMDVHKETISIAVMKDDGRLVMESIIETKASTILQFIHGVSGDLHVTFEEGTWAAWLYDLLKPHVTELVVCDPRKNAVMKQGNKSDKIDAHKLADLLRCGYLRSVYHGENGLRILKELARSYLTISKDLTRVMNRVKALYRSWGIPCGGQQVYAPRHRAEWLNKIGEAGVRRRAEFFYQQLDALRALHQEVRRDLLAESRKHGATKLLRQIPYIGPIWAALLIALIQTPYRFRTKRQLWTYSGLAIETRDSAQHRYVAGQLQRSKKPQQVRGLNQNHNHDMKTIFKSAATMASSREGPFHDFYQGLLTKGMDPAMARLTLARKIAAITLILWKKGAHFDAEQLKPQAA

SEQ ID NO: 324933 - protein, 365 aa, unidentified
MTWTPPADGIDVPAWGVNPPRTRETSVTTPTIIGLDIAKSSFQVHGIAASGRPTLRKKLRRGNMLEFFANLPACLIGMEACGGAHHWARELTKLGHEVRLMPPQYVKPYVKTNKHDAADAEGCCEAVQRPSMRFVPVKSETQQSLLMLHRIRDRLVAERTGTISAVRGHMAEFGLVAARRGLGMKELFAIISDVDDARLPPIARELLVLQVEHLRVIETRIADLDGRLQHQARSDEAARRLTAIPGVGPVIATAMVATVVDAQIFPSGRSFAAWLGLTPRQHATGGRERLLGISKRGDGYLRRQLMHGARSLVRLAAGRKGRFWTWIDGLVARRPFNVVVAAVANKLARVIWAMLGRDETYRALA

SEQ ID NO: 324934 - protein, 318 aa, unidentified
MEVAGRYVGIDVAKARLDVGVWPGAESFSVANDSRGIAELVERVMALTPRAVVLESSGGLEALAASELHTAGLTVAVVNPRQVREFARSLGAIGKTDRLDALVLAQFAQSSHSNQRLVPMRLAEAAEAELKALVVRRRQLIGRLVAESNRRERAPKVVRKSIVQTIKGLKRAVAEVEQQLKQTLASAPAQQAKAKLLTAVPGVGPQLGFTLIAELPELGQLGRRQIASLVGVAPHPHESGKFKGRRMIWGGRARVRTMLYMASLSAVRHNPQLRAHYRALLDRGKAKKLALVACMRKLLITLNAILRGLHSLESQLCR

SEQ ID NO: 324935 - protein, 344 aa, unidentified
MEHIGIDVHKNQSQICILTSDGELIEKRLRTTRERFRAMLGKRAPAQILIESATESEWVARCLEALGHEVIVADPNYAPMYAQRTRKIKTDRRDARALAEACQQGNYRRAHRTSDGQRHIRGHLTVRESLVQTRTKWICVVRSLLRREGLRIRSGGAPSFVERVAELDLPRPLRQEIAPMLRLMLHLNRQLKRADEGLKKIVRQNPVVRRLCTAPGVGPVTATSFVATLDTAERFAGAHQVQSYLGLVPREHSSGERQRRGRITKAGNRRTRSLLVEAAWAVVRRGKRPEWQPLRAWVERLAARRGKCIAVVALARKLAGYLYAMMRDGTEFDPRHCGYVAVGA

SEQ ID NO: 324936 - protein, 485 aa, unidentified
MPRRTWTGPLLSAERIFVELILGIDLACRAAHQASLAGPDGTFVWTGRKFFTRPAELEKLWKQIGLGEHDTLRVVMEPTRNAWAAVASWFRRRGARISMVPTTQSADLRAYYSKHTKNDHLDSKLLARLPLLHPEGLREHTGDGPAEPLRRVVKIRSSIVKRRTAVFQRLDALLELLGPAWYDALGSNYGKAALALLARYADPHSLIRLGHARLTRFLIRHSRGAWREQHATMLLAAAQESLQLWGSGAEAAIDFAELAADIGVEAQQAQMLTEQIEDLDERCANLYAEADPTGIIASAPGVGPVTCAVIAGRIGDPHRFHSLAAIRAYSGLVPKVNQSGQAQHQHGLTKAGDPVLREALFAAADQARKTDPQLAAKYKRLMATERHHDSAICHIATTLLTRIATCWRTGEHYNLRDTDGRTITPEQGRQIVRTHHAVDKQTRIKAANTRQSQRRKGRTGREQKESPSAPVLRPDNTSINTVEVA

SEQ ID NO: 324937 - protein, 373 aa, unidentified
MSQYSTLYVGLDVHKDTIVIAAIGNGDEQAVVDLGTISTRHYAIDKLLKKLQGMGSELRLVYEAGPTGYWLQRLIETKGHRCQIISPSLLPKAAGDRVKTDRRDARSLAMALKMGAVDGIHIPTVGDEAIRDVSRAWQQARVDARKTKQRIKMFLLRHDVRYTGQARWSAPHRRWLSEQRMSNPVSQIVLQELIETLGQHERRSERLEKTLKDIVHDWRFGPVVQALQAFRGIQFLTALTMIAELGDLNRFDHPKKLMAYVGLVPGERSSGQTRKLGPITRCGNSHVRTLLVESAWSYHYSPKVSRQISQRQEGIDPDIIEIAWEAQTRLHRRYMKLKSRGMHQNKVITAVARELIGFIWAAAQQVPLAPEAA

SEQ ID NO: 324938 - protein, 424 aa, unidentified
MNFKMQNKQNQLIERITDQHLVVGVDIAQHVHVARAVNYRGIVIGKPLSFENSEEGFTRLLNWIKELKHMKNLDTTIVGMEPTGHYWINLSKWLVKQNIDVVTVNPHHVKRNKENRDNTQSKSDKKDALVIADMVKNGYYAFVRSTSESFEKLRVLIANRDVIVKRLVSSINQINRWVDVVFPELRQVFKDVSCKGAIATLRLFPTPAEICSLQPQDIVNGWKSCMKRHSGHKKARSLITLAKRSIGTKQALDAYKLHLEQLLEEYDLASSQLERVTQEVTNVLEQIPFVKQILAIKGISEISLAGILGEAGDLSGFAHGNALLRHAGLHLAEASSGKWKGQIVLSKRGRSRLRRYLFLATMSLVMNNPEFKALHSNNVKVKKIKKMKSIMKLCGKLARVLVGIARNGSAYKPEMVFPLEQLAA

SEQ ID NO: 324939 - protein, 323 aa, unidentified
MSGFVGVDIAKNTFDIATHQPNGKHKTKAKLANDPKGFKEFEAWLEKNAERSALIVMEATSVYHLELAEFVYNKGFRVCVVNPATTKAYADSELRRIKTDKSDAKLIADFAREKDQKLHPWAPEPLKYRQLKAMVRRLDDLQEMEQMELNRLDVSDEKVKDSINSVLRHIEKEIVETHKAIKKHIDDDPDMRQMRDLIVTIDGIGQKTLERLLAELGDLRKYSDPRQLVAAAGLNPKLQESGKLKGHTLISRVGSARLRAGLYMPGMVALKHNKAIKAMKERLEANGKAPKQIICAAMRKLLHFVYGVLKSGLPYDPKLALAR

SEQ ID NO: 324940 - protein, 400 aa, unidentified
MRVVFGIDVSKASSEVAILVNGEKVHGYTISNDAIGFARLLGDLRTVHKPEIIFEATGVYSRRLQTFLDDNGYAYTRLNPLEAKKQLDSLRVRKTDQIDAEKLAQSQFVLNRKPTYVQEEVYQNLRDLSRFYQNLTEDIVRAKNRLHKVLQVTFPELENILSTPSGEQYWNLVIAFPCKDCVLELSNDELSKSIRLSTSKRISDKRVAYLAEKLIALANQSYCAVKKTSPILEEVRYYTKELLRLSEQRQAVLDEMVELAQPLPEYDILLSIPGIAETTATSIIGELGDIRRFQSANQINAFIGIDLRHYESGNFLAKEHITKRGNPYARKILFKCIHNIASASHTNPCHIADFYEKRKRQSQTTSTKSHTIASIHRLIRTMYYLIMHNKLYDYASTQNR

SEQ ID NO: 324941 - protein, 376 aa, unidentified
MGEISTFVGLDVHKATIAVAIAEGGLREAASFFGTIENTPEALAKLLAKLGRKHKRLSFCYEAGPCGYGVHRQLTKAGHACAVVAPALIPRRAGDRVKTDRRDALSLAQLHRAGELSAIWVPDAAHEAMRDLVRARQTAVHAVRRARQHLSGFLLRHARVYSGKKAWTRSYRVWLASLRFEHPAQQIVLQDYIASVSDAERRRDALGEQIRVLLPQWSMAPVVTALQALRGVALIVAATLVAEVGDLTRFDNPRQLMAHLGLVPSEHSSGGSIRRGAITKTGNSAARRAMTEAAWTYRLPARVGRALLDRNEGLDKPVREIAWKAQVRLCARYRRLVKAGKPSQTVVTAIARELAGFAWAIARHVQPKHAQPQIPA

SEQ ID NO: 324942 - protein, 426 aa, unidentified
MRDIALDVHLDFCEVAIAEAGEVRSAGRISTKPEELELFAQSLDPRDRVALEVTGNAWAIKRIIEPQVAEVVVVSPTDTGIRGARAKTDRFDARTLARLLAAGELDGVWMPDRETQVMRRRIGRRAQLVRSRARAKNEIHATLMRCLVGRAPFREPFGPKGRCWLAGLDLPAEERESVDAGLRQIDFLDTEIEAVERLICTEALESEEIRRLMTVPGVNVICAATFMAAIGDVGRFSSPRKLVGYLGVDPRVIQSGSSPATHGRISKQGSVAARHALVEASWSVVRQPGPLHAFYARVRSRRGHSVAIVATARKLACLFWCLLTRGQDYAYQQPSLTAKKRRLLEIRAGAPTSRGIPSGTWPTRQRMRAAEQELAAQAESAYQRMVAEWQRTQAKRKGAGATPGRASSGPSSGQAARQNKAPSPAL

SEQ ID NO: 324943 - protein, 426 aa, unidentified
MIQAEIERCAGIDVSKDRLAVCVMIGALNGEPRVEMREYVTTTAGLEQLRDWLSAEGVTHAVMESTGSYWKPVFNVLENSVAVYLANSQDVKNRKGHKTDKKDSWWLAHLLRHAMIRPSFIPPRGQRELRDLTRRRRKLLGVSTGERNRVEKVLQEANVKLSSALSDIFGVSGQLMLEALLEGKATPEQIAALAQRKAKQKIPHIIQSLEGHRLRDHHRMLIRFSLEHLAFLEKQILALDEIIAAKIVELGYAPAMDLLCSVPGLQPTSAANVLAEVGPNVDAFESEKRLASWAGVCPGNNRSAGRDKGRKTPRGNRWLRGALTECAWGASAKKGCFLKEKFWKVTTKKQSKAPAAMAIAHTLLTLVYQVLKTGQPYHERGQPVLDENRKQRIIRHHVRRLGKLGIRVSTAPIPRRCRKAQAAQHP

SEQ ID NO: 324944 - protein, 354 aa, unidentified
MKYFAGMDVSLEETAICVVDETGRVIKEARAASEPEALHALLCSFSLPFERVGLEACSLTAWLHSELTSAGWPAICIESRHAKAAMGAMPNKTDRNDARAIAQIMRTGWFRAVHVKTPICRSFRSLLVARRTILNEMRTIENVVRAILRETGLKLGTPARKDFIFRARELATGEEALARMIEPLLEILATMLREFTKLTKQVLIIVRNEPVCRRLMSAPGVGPLTALAFRATIDQPERFSKSRDVGAHLGLTPRRYQSGETDIQGRVSRCGDELARTALYEAAHSLLVRSKKWSALRAWGMKIAKRRGMARARVAVARKLATILHRMWIDKADFRFGREQLAGPAIKAITIVAA

SEQ ID NO: 324945 - protein, 339 aa, unidentified
MNKEGAAGVDVSQHTLDVAMRAHNGTERTGQFDNTASGHRQLISWLTKGGKAVRVVLEATGVYSFDVALALHAARRIAVMVVNPRAARKFAEACLQRSSTDATMAVALREYAARMEFVPWVPPAPQVRELRAIARRIATLTLERASELNRAHAAVASADTSTVVINDINVNVRHLQRRVDELQRQALMVIQGNAQIQTAYRHLISVRGIAETSAIQLLGELLVLPTDMTVRQWVAHSGLDVRHVTSGTSVHKTPRISRHGNAHLRRLLYMPAMVAAHHDLHVRTFYEQLLARGKKPLQALVAVMRKLLHAIYGMLKSDTDFDGSKFRKLPLVAAQDGLT

SEQ ID NO: 324946 - protein, 341 aa, unidentified
MTIIGCDYHPGFQQIAFVDTETGDYGEQRLAHSEGAEKFYRDLAAQGKKVGVGMEASGHARWFERLLAELNFELWIGDATEIARKRERKQKTDRQDAQHILQLLMENRFPKIWIPSGGNRDLRQLLWHRHRMVQARTRIMNQLQAVALNEGLRCKKKLWREKGRQQLEAFRLAPWASRRREDLLQLLDRLNPTISDLTQAIEQEVQKCPEARRLRTHPGVGALTALAFVLIIGRAERFQCGKQIAAYLGLVPLEDSSGNRRRLGHITKQGSSILRFLLVEAAQVTARSIPEWRNKYVHLTMRRGRKIAKVAMARRLAIALYWMWRKGWDYEQLRKFGSHAG

SEQ ID NO: 324947 - protein, 415 aa, unidentified
MALKIVYKICCGIDVHKTFVVACIASTNDKGVTSYESHRFSTYTSGLKTLLQWLLDRNCKDVCMESTGKYWIPVYNILEKDCSIVLAHPKYVKAIRGKKTDKKDAKWIADLFKHDLVAGSFMPPAGIRQLRDLMRYRFKLTCFKSSEKNRLQNCLTVSNIQLGNVVSDTFGKSAQAILDKILENPADTSFDLEPLVFKSLKKKLPELRDAIDGYITPEQAGKLKIIKAHYESLESRKAELEELILALATPYQQELAILQTAPGISSDFTAIGIISEIGTNMEAFPSAKHLCSWAGLTPTNNESAGKKKSVRVSKAGCYIKPLLVQCANAVVKSNKHPEIRNRYLRIKKRRGHKKAIIAIARMLLTALYYMLKNGENYNAELYRKSDLPPVDREITVEQALMIARNQGYKIKSATA

SEQ ID NO: 324948 - protein, 354 aa, unidentified
MLIIGCDFHTRYQQIAMAREETAEMLVERRLDHESGEAHAFYRSLQNLQEPVRVGIEATGPIHWFERLLTELGHELWIGDSAKIRASEVRKQKTDERDARLILDLLLAKRFPRIWVPTPAERDVRQLLWHRHKLVSMRTMLGNQLHALAMSQGLCRKQKLFSKKGRAELGSLTLGPWAGRRREELLKLLEQLEPPITELDRAVQEEAQRREDAVLLMTHPGIGSVTSLAFVLAIGPVTRFQGSRKIASYLGLNPTEDSSAGRRRLGGISKQGNTMVRWLLIEAVYPAVRKDPALRQDYQRLKFRRGHAVAKVAIARKLAVRMYWMLRSGADYAQLVRRQGSPGATLMNASSSLG

SEQ ID NO: 324949 - protein, 418 aa, unidentified
MEDVVEYCAGLDVHRDTVVATVRYPEGDRKSSTTRTFGTDTAELVALGDWLVSLAVTRVGLESTGVYWKPVFYLLEERIPQVWLLNATHLKNVPGRKTDVADSAWIAQLVEHGLVRPSFVPPPRIRQLRDFSRHRRVLSEERTRMVQRLEKVLQDAGIKLTSVASTVLSKSGRAMLEAMLAGQTDPVALAELAKGRMRSKIPQLVDALHGNFRLDHHGVLVAQILAQVDFLDRQLADIDEHISALVADLEPIIERVQTIPGVARKCAIGMIAEIGVDMTVFPTAAHLASWAGICPGNNASGGKARSGHTRRGPIALKTVLTEAAQAAGRTKNTYLGARYHGIRGRRGTFKAVGAIRHDILIAYWHIVSGTSTDGTPVGYRDLGPDWITRRHSTEYQIAKLTKQMEKLGATVTVTLPAA

SEQ ID NO: 324950 - protein, 337 aa, unidentified
MVRFIGIDLHKTAFTVCFLEGEEKRLESYKIGEMDRFRSELRRDDKLALETTTNTRSFIKQIRDAVGSIHVINTMQFKVVSQSVKKTDANDAETMAFFLSKGMLPEVRMKDEHYAELESLANTRHKLVQLRTALKNKIHNILNAQGIVTKKESLSSRKGLEKVLNHPISAVAAIELEVIVEQIKGLDAGIARIDQELADKGKKLDGHENITSIKGVGDKGGAILLSVIGNIEDFEDEKKLAAYFGIVPRVSNSNETNRQGRITKRGSKLGRTTLVQCTLIAIRYSPYLKAFYEKLKAKKGSGKAIIATAKKLLGIIYLTLKNKWVFEDFPNFVLKES

SEQ ID NO: 324951 - protein, 346 aa, unidentified
MTNNIQFSSVCGIDIAKSVMQVYKVTSDGVVSNKAVKRADFLNEFRNIPPALIGMEACGGSQHWARELQSLGHTVHLMPPKLVKPYVTGLKNDKNDARGIYKALEMSVREVPVKSAAIRDLALLQTMRTKRQREKVAKINHIRGILTEYGLVMGKSINAFLAKAGSLIVQLKERADVSPFIVSELNALFPKVKEAMAKIKELETNIDSIAKTLKQYDLFRSAPGVGPITAATMLVLLCNPAVFKNGREFAAYIGLAPKSSGSDGKNFVTHIPKKYECNNEVRTLLVQCAHAICRSKHKSDWVSSILARKPKKVVIIAVANKLARQLWIMAKKGEKFERRFILAAAQ

SEQ ID NO: 324952 - protein, 370 aa, unidentified
MARKLWAGLDVGVETTSICVISDTGEVLQEATCPTHVKSVHSEIRWLRRRRFARVGLEGSCGLTLARGLRSLGYCVDLYETRQLSKFLRARRNKTDAGDANGIAQAGRIGASLVSRVYLKSLECQSLQSRLVVRRHLVRARAAAVSLLCRQVEAYGGRVRSATHSMQLGLKVNAELSKLFGRSANPLVSELRTLLVHCEQLISYQRSVDQDLRRVACDNEVCRRFMEIPGVGPLCALTFFAAIGDPKRFRRSVDVGSYLGLTPKIHQSGLSLRRGRISKMGNSEVRGLLVQAATAFMRWEKDGSRLRAWASNIEQRRGRGKSRVALGRKLAVVMLAMWKSGERFEARSSEQDQAPQGPAADSDPVKPQAS

SEQ ID NO: 324953 - protein, 416 aa, unidentified
MKSAPSTLPEEPPNSVTSGIDWARDDHAVAVVDGRGRLVARETVEHSNTGLRTLLGLLAEHGAAEVAIERPDGPAIDALLEAGLTVVVISPNQVKNLRGRYGSAGNKDDRFDAFVLADTLRTDRVRLRPLTPDDETTLALRRACRARKDLVAHRVGLANQLREHLKRVFPGAVGLFADIDSPISLAFLTRFDCQDRADWLSPRRLAAWLASAGYCGRVDPAVLHQRLTAAPRGAAGDHGTAEARITRALLAVLTSLVQQIKTISAQIAEQLALHADAHIFTSLPRAGQVRAARLLAEIGDCRARFPTPESLACLAGVAPSTRQSGKIRAVGFRWACDKQLRDAVTDFAGDSRRANPWAADLYNRARARGHDHPHAVRILARAWLYIIWHCWQNNTTYNPANHRALQRLIKDQQQAP

SEQ ID NO: 324954 - protein, 425 aa, unidentified
MSSKTSDVDDLMVLYPCCAGLDVHKKTVVACIITTGERGKVNRQVRTFATTTVHLLELSDWLAEHEVSHVAMESTGVYWRPIFNILEATFEVILVNAQHMKAIPGRKTDILDSQWIATLLRHGLLRASFIPPRPIRDLRDLVRYRKSLVYARNQEVNRLHKLLETANIKLGSVASDILGKSGRDMLASLREGVTDQTMLAELARGKLRGKLPDLREALEGRVEAHHRLLLGHLLDHIAFLEQRVQTLEKELEPYLNPYQAEIALLVSIPGIGETTAATILGEIGADMSIFPSAKHLASWAGVAPGNRQSGGKRLKAHTTKGNARLRAALAEVVWVISHTKDNYLSAQYHRLARRIGKAKAIVAVSHSVLVIIYHVLRDNKEYSDLGSSYFETLDQDRVRTRAVRQLQALGYTVTLQTATPKEESA

SEQ ID NO: 324955 - protein, 347 aa, unidentified
MNKSLDSDPCGIEVSARTLLVERRRPGQSDAVREFANTAAGHQALLGWLQSAGRALRVCLEATGLYGLDLALGLHQAGVAVMVANPRAVRHFAQAMMKRSKTDRLDAAVLTEYAARLPFQPWRPPSPAALKLLAVARRLEDLSEMHAAEKNRLHAASLSAALPAILRRDVQRSLETLERAIERLTRAAQEFILDDPDLARRYELLLSIPGLGPTSALHVLAELLLLAPDLEVRQWVAYAGLDPRHYTSGSSVHKKARISKAGNKHLRRALYMPALVASQHDPHLGGFYQHLLARGKTKMQALVAVMRKLLHAIFGMFKHDQLFDGTKVFAHRPVAALSPLAQEVLCV

SEQ ID NO: 324956 - protein, 371 aa, unidentified
MKSILSVGMDVHKNSFSLCAYDGYTGEIVSESTFASDVKLVIKFIETLKSRYENDVEIKCGYEAGCLGYSLYKSLTARGVDCVILAPTTMQVSAKNKMVKNDRMDALNIAKNLASGSYKSVYVPDEEDVEIKEYIRMIHDFKKELKRVKQEICAFVLRHGYQYDGKSKWTIRYMNWIRELEMSEIQRETLNEYIAEMENLNDKINRFMNRIDEMYQSERYHEKVSKLRCFKGIETFAAMTIQVETADFERFPSAKAYASYTGLTTGEHSSGDKNNRIGITKQGNTVIRKTLVECAQSLVKGNVYAKKSQGLKSRQKGMDVNIIAYADKATERLKKKYQKLIERNVPRNKAIVAIARELACFIWGMETGNIH

SEQ ID NO: 324957 - protein, 411 aa, unidentified
MTTLFCGIDWGESRHDVAIIDEAGNVLARGKITADAAGFTDLLSLLAEAGDTHDDQIPVAIETDRGLLVAALRSTGRAVYPLNPLAASRYRARHQVSGAKADATDAVLLANILRTDMAAHRPLPADTELAQAIRVLARAQQDAVWARQRMGNQIRSLLKDFYPAALDAFAGLAKGGLARPEARTILAAAPTPAKAARFTRARLRALLTKAGRQRRVDDETTRLLAVFRGQYLQQPTVVEDAMGIQLAALLVQFDAACRAADDLETATRDHFEQHPDAMVISSFPGMGTLLGARMLAEIGDDRTRFAEARGLKAFAGSAPVTRASGKKTVITYRRIKNNRLAAAGSIWALSALKASPGAKRHYQTRRERGDWNRQAQRHLFNKFLGQLHHCLHTGASYDENHAFPPPLGLAA

SEQ ID NO: 324958 - protein, 336 aa, unidentified
MTAQHNALPAQAIQAAQETFPANPKLYGVDVAKAELVLANGGQITTIANQSRAVKAWLSQLKAPALIAMESTSTYHQLLADLAFAAGHRVFVLNPKQLKHYRTATQGRAKTDLCDAQLIARYLAKEHADLHPYRPLTKEGGRLSSLLRRRAAVVKAMTQLRLSLQPQAEALELEVELKNALEALSQIIQSIDVQIEKLLAHAQHQPRAARLLSIVGVGPLNAAALLVALERGDFPDADAFVAFLGLDPTPRDSGQCRGRRRLSKHGDSESRRLLFNAARSASLTSVWKPIYERYRKRGLGDVQTLCIIARKIARTAWSICKHGTTFCPKRLTQALT

SEQ ID NO: 324959 - protein, 322 aa, unidentified
MEIVYERVAGIDVHKRQITVAVRSPGQGIKRRTQVRRFATFYAALREMTAWLVDEGVSHVAMESTGVYRMPVFHALAEPDAVEIVLCNAQHVKNVPGRKTDVKDAQWLAQLMEVGLLRGSFIPPPQIAVIRQLCRYRRTLVEERTREGQRLRKVLEDGGIKLDSVACDVLGVSARSMIRALIAGERDPAVLVDLAQRTLRRKIPDLTLALAGRFTAHHGVLCELHLDHIDHLDTMLARLDARIGTAVAPFADACQRLTSIPGVGDHAARAIIGEIGVDMSRFPTAAHLASWAGLCPGNHESAASVPRPEGRSNHHLLPPWTF

SEQ ID NO: 324960 - protein, 384 aa, unidentified
MRKDTRFVGLDVHAETIAVAVAEPGGEVRSLGVIPNRAESLRKLMKRLGPATGLRVCYEAGPTGYTVYWELTKLGIHCDVIAPTLVPVKAGDRVKTDRRDAEKLARCYRAGDLTPVWVPDPAHEALRDLVRAREAAKADQLRARHRLQKFLLRRGVRAPAGIRAWTERYLAWVRKEVRFAALAQQAVLSDYLAEVDHARERIRRLEQAIDEAVGAAPPAMREVIAALQALRGIAKVSAVTIVAEVGQLSRFARPGQLMGYSGTVSREDSSGDRVRRGPITKTGNAHLRRIIVEAAWAYRHRPAVTGALQVRQRGLDAEVREIAWKAQHRLHDRYRKLVGKGKNKQRVVTAIARELLGFIWAIGVHVEGQAQPTHTSVVKTRRVA

SEQ ID NO: 324961 - protein, 433 aa, unidentified
MIPERGPLCGKEVDVIPAVLERCAGVDIGKRFSIVCLMVGAADKEPSVEIRRFETTNAELEKLRDWLAANGCTHAVMESTGSYWKPIFNVLEPMLAVVLANPQQVKNLPGQKTDRRDGKRLAHLLRHGLIQASFIPPKPIRELRDLTRRRRQLLGAGSSERNRIQKVLEDANVKLASVLTDLFGVSGQAMLEALLEGTSSPESIAEFARGRLKRKVPDIIIALQGHQMSDHHRFLVRQALRHMEFLEKEVEELDTEILQKLEPYAEQFQRLQTIPGIKKDAAASILAEIGADMNTFASAGRLSSWAGVCPGNNESAGKHKSGRTRKGNVWLRSTLMESAWAASNKKDSYFKAKFCRLAARRGNKRAVFAIAHSLLVTVWCVLESGLPYRELGGAYLDERRRNQLIRHHTRRLKELGAISTPTHTPSQPAQSGA

SEQ ID NO: 324962 - protein, 345 aa, unidentified
MTHHPTTVAVDLSMTVFEVGIADRQWRLVERRRLNRKQFGRFLEDQPPSHVVMEACGTAHYWGRVAQGHGHHVTLLPVRHVKPFLRGNKTDRTDVDALVDAVRTGAIAPVHVKTVAQQEIVALHRIRDQWMATRTARLNALRGFFREHGIPLPAGPRAALVAVPALAEQLPPQLALAVTSVYEDVRALETRISAIDRQLGAMAKDNATVQRLLEIPGIGVLTATALVGSVGRITAFRRARQFASWLGLTPREHSSGPRRRLGSITKRGDVYPRCLLTHGARAVLLTAQRQAAARKPLTGLQSWAVQLAARKGHNKTTIAVANKLARIVWAVWARDTSYAATEAAA

SEQ ID NO: 324963 - protein, 397 aa, unidentified
MYIVGIDIAKRKHEAAVIDGEGAVIIKPFSFANNCSGYNRLLAMLAKAKLPLDEVSFAMEATGHYWLALFTRLQKEGFRVQVINPVQTNSIRSFYICQAKTDPRDALLIAEVIRFGHFSESTLHPENIYELRELCRGRHAIVSMQADVKRKVVALLDQVFPEYETAFTNLFGDTSMAILQTCPTPKELSEMPLEELCHLIEVSSHKRFRMAKAQELQELARNSFGFVMAGGVFSTMIRLYAKHLDFLKQQVREMDRKIAEIMEALDTPITTITGIGPTLGAYILSEIGDISRFSSAAKLAAYAGIDPTMRQSGEYNGVRNRMSKRGSPYLRHAIWLAASSAVLHDPALKLYFQKKRDEGKPYMASVGHACRKMVSIIYAVMRDNKAYTPCIPNEISA

SEQ ID NO: 324964 - protein, 412 aa, unidentified
MQVLHPICAGMDVHKKDVKVCLVTRDSQGQRQEEVCTFRTMTRDLLAMRAWLQGQGCTIIAIESTGVYWKPIFNLFEGDFTVLLVNPSHIKQVPGRKTDVKDCRWIAELLEHGLLRGSFIPPVEMRDLRDLTRYRRQLVNTHSAEVNRLQKVLEDANIKLASVATDVMGVSGRAILRALLAGVVSPEALADLAKGRLRKKKPDLQAALQGRFRPHHTQLLTHILAHIEFLEESIAECEAQIEALCRPFAEVIALLDTIPGVSQRTAQDLIAEIGVEMAWFPSAKHLCSWAKLSPGNNESAGKRKSGRTGKGNKWLRALLVECAHAAGHTKGTYLGTKFRRFASRKGKQRAAVMVAHRILEAAYFIIRDKVPYRELGDQYLDAQHREHVIRHHVRRLESLGLHIDMRELPLTG

SEQ ID NO: 324965 - protein, 367 aa, unidentified
MNTTIVHDERAATLPAADQNPTIQPATIKLGVDVHQARYVAVAQYDHATPKPARGLRPEEFGPFVERLLARGHRVFVVYEACGFGFGLYRRLAALGVTCYVIAPCKLDEQGKRVKTDALDAGALCQRLSRYVDGNKKELAIIRVPTEQEEQLRQIHRQRTTLVRARTKLQAQGRSMLLNYGQPTLARWWRKTGWRALEQVLPTWLLERLAVYRPLLEVLDTQIATLTAHLEAAAPPALPPGLGKLTTVSVSREICDWRRFRNRRQVSSYTGLCPGEYSSGYKRVPGAVTKHGNPRLRAALVELAWRLVRFQPSYPPIHKRISILAKGAQATGAARKKAIVAVARQLAVDLWRFHTGQCSAEKLGFQP

SEQ ID NO: 324966 - protein, 350 aa, unidentified
MVVVGADVHKRTHTFVVVDEVGRKLGEKVVKATTEGHRQAVQWVRSQFGVEVVWAIEDCRHLSARLERDLLTADQKVVRVPPKLMAYARASARTRGKSDPIDALAVARAYLREPDLPIASHDEVSRELKLLVDRREDLVGQRTSMINRLLWRVHELDPSRAPKPGSLDLAKHRTLLGDWLATVPGLVAELARDELADITRLTEQIDALAKRIGERVRVIAPVLLAMPGCGELTAAKIVGETAGVTRFKSEAAFARHSGVAPIPVWSGNTAGRVRMTRTGNRQLNAALHRIAVTQIRLDGLGQAYYRHRLAQGDSSTEALRCLKRRLARVVFSHLRTDHQNQLTPCQTAAA

SEQ ID NO: 324967 - protein, 349 aa, unidentified
MVTLGVDAHKRTHTIVAVDENGAEVGQRTVAATSAGHLEGLRWASQWPERRWAIEDCRHLSRRLTTELLVAGEAVLRVPTKLMAAARRGARTRGKSDPIDALAAARAALREPDLPVAQLDGPARDLRLLVDHREDLVAERTRIENRLRWHLHELQPGEEPPTRSLNRHATLRALEATLAGQPGVVARLARELVVRCRDLTVAINALEREICERVSGMAPRVLALLGCGALSAAKIVGEVGRISRFRSRNAFAMHNGTAPIPVWSGNHERFRLNRGGNRQINCALHRIAITQMQRPGPAQDYLTRRRAAGDTKTEAIRALRRRISDEIYRRLRADEAAANTQLRDFLAAA

SEQ ID NO: 324968 - protein, 375 aa, unidentified
MQEKLRFLGLDVHAETIAAAIAEPDGEVRSLGTIPNRVESLRKLIRKLGPAETMKVCYEAGPTGYVVYWQLAELGVQCEVVAPTLVPVKAGDRVKTDRRDAEKLARCYRSGDLTAVWVPDEGSEALRDLVRAREAAKQDQMRARHRLSKFLLRSGHRPPSGVRPWTRPYLIWVAQLCFPQIAQEATRQDYLHEVEHMRERVARLEQAITEAVKLASPALQQVIHDLQALRGIADISAVTIAAELGKASRFESARQLMGYCGAVPSEDSSGKRIRRGGITKTGNAHLRRIVVEAAWSYRRPPGIWYGLRRRQESISEEVKEIAWKAQHRLHKRYMKLGAAGKDQRKIVTAVARELLGFIWAIGTRAETVASQQLAA

SEQ ID NO: 324969 - protein, 430 aa, unidentified
MKSNTQNAKIEAITEKTLILGIDVGSETHYARAFDYRGIEYSRKPFKFSNTEEGFVTFKEWILDLKDRYEKDKVVPGMEPTGHYWFNLGKFLQDNEMKPVLVNPHHVKKSKELDDNHPTKNDRKDPKVIAGLVREGRYMIPYLPDGVYADLRTASNIRFQLQAELTRIQNRISRWFNIYFPEYKTVYGKPDAKSGMLILKAAPLPEDILTLGVDGVNQIWRDAKLRAVGKARAKTLIEAAEHSVGSKEGAVSARMEIRMLLEDYESRNTRLQEVMVLIEELVKGIPMAEKLLEIKGVGIRTVSGFLAEVGDISRFNNPKELQKLAGLALVENSSGKHKGETTISRRGRKRLRYLLFEGAMSLVAKNPEFRELHNYYTTRRLNPLKKMQSLMAVAAKLIRVFYAMLTKGVDYDPKKMVSDIRRPAAYLQAA

SEQ ID NO: 324970 - protein, 350 aa, unidentified
MASTKISYFGKKVYIGTDVHKATYSVTCICEGVVAKKVASVPASPAEFAQSLLHWFKGAEIYSAYEAGFSGFNLHRELEKAGIKNIVVNAASIPVSANDRVKTDLRDSKKIAEQLYTNQLKAIYVPSKDEEARRTLTRTREQVVEARATTSRQIKSKLHYHGLMTKDDKRSISNRYLKEIEKLELAAEVQYSFKIFIEQWRFLTSQLIDLRKALQKQADNDKKTEEVYRSVPGIGLITSRTLANELGDLSRFKSAEALYSYTGLTPSEYSSGEKVRRGHISRQGSARVRGLLVEAAWRVIDKDQALKEAFERIAKTRGKKRAIVAIARKLIGRIRACFRTGNTYAVGTYA

SEQ ID NO: 324971 - protein, 424 aa, unidentified
MGKTIPICCGVDVHKKFLVATILTGDYLIPQCKQKHFGTSFRNLLAFKQWLLDNNCKDVCMESTGKYWVPVWNILEGVVNVVIANPKWVSAVKGNKDDKKDSKWIGNLFRMGLVPSSYIPGKDIRILREFTRYRSKLVSMRASEKNRYQNAFTVCNLTLDAVVSDMFGKSAMAIENYLLDTDVVDPEFCVSLLQKKLKKKSAEIIEAVEGFNMTQEQKERVRIIQGHFADIDKRISQIDEIIGRLTAEYEGTISLLCTIPGIDRRLAITIISEIGTDMSEFGSSRRLCSWAGLVPGNNQSAGKKKSVRITRAGVYLKPALVEAAHAAVKATEKSPYFRIKYEKIMKRRGKKRAIIAIARMILTSIYAMVSTGEVFNPSDLQRFDMPEELQKKRTIAEAKDAVKLLVSLGVVPEGSISLEALLAS

SEQ ID NO: 324972 - protein, 408 aa, unidentified
MKALHRRCAGLDVHQQEIVACRRIVGGRKVQTEVGRFPTTTRGLLELADWLEDGKVTHVAMEATGVYWKPVWHVLDGRFTLILANAAHIRNVPGRKSDVNDATWIAELLAHGLIRASFVPPQPIQELRDLTRTRKELTREIVRHTQRIHAVLEEANIKLASVITDIVGFSGRRMLKAIVAGETDARRLAELGSSRLAAPREALVAALDGRIRDHHRFLIGQHLKTIEQIETTIGEFDARIEAALAPFRDAVERLKGVPGISWTAAQIVIAEIGVDMSQFPSADHLISWAGLCPRLDESAGKRRSTRLRKGATWLKPVLVQSALAAGRKKNSSFKTRYHALKGRVGPKKAAVAVAANLLRVVYHMLKHGTCYHDLGEGYRRPHNPARAAANLANRIRALGYQVDISRAA

SEQ ID NO: 324973 - protein, 341 aa, unidentified
MLIIGCDYHPSVQQIAWADTGTGECGERRLTHCAEAEQFYRDLKQKGFRVRVGLEATGHSRWFERLLAELNFEVWIGDPAQIRAKQVRKQKNDRRDAEHMLKLMLENHFPQLWVPTPEDRDVRQLVWHRHRLVQMRTRVMNQLQAIAMNEGVRRKRGLWTRQGRAQLEALALPPWTSRRRMELLALLDRFDPSVDELRKAIEQQAQRRPEVERLQTHPGVGPITALTYVLVVGTPERFACGKQVASYLGLIPCEDSSADHWRLGHISKQGNALLRYLLVQSALSAAHVEEEWRRKYVHLAMRRNHAIAKIAIARKLAVRLFWMWRREWDYEQLKKFGAHAG

SEQ ID NO: 324974 - protein, 341 aa, unidentified
MNGSKNVVGIDIAKRVFQLHSIDMETGEIVSLQLKREKFLEHFANRQTCLIGMEACGGAQPWARKLTAMGHQVKLLPGKAVKGFVTGNKNDRQDARAIWTAVQQPHVKAVAIKTEEQQAILALHRMRSQLVKFRTAQINGLRGLLTEYGEVMPQGKAGVRKGITEALARLSDRLPAMVIDTLREQWARIGKMDEEIATIEQRIKRWLKNDDACRRIAEIPGVGPLTATAAVAIMGDAKTFKSGREFAAFAGLVPRQTGTGGRIKLLGISKRGDTYLRTLLIHGARSVLTHAKDPGPWVTELRQRRPLNVAVVALANKMARTIWAMLAHERTYQKEFVSQPA

SEQ ID NO: 324975 - protein, 413 aa, unidentified
MIVGIDVGSEKHYFRAFNWRGIELTRKPVAFSNSMEGFNSFYNTIVELMQKRELEETLVGIEPTGHYWFDLGQFMGEKNIKFVMVNPHHVHKTKELDDNSPSKNDRKDPRVIAGLVRDGRYFYSYMPTGVYAELRNASNRRFVLVEEQTRAKNRLQKWIAVYFPEYKGIYTHIDAKGGLLVLKQAPTPEEIVRLGVEGIIKIWKDAKLRGNGHKKAMLILNAAMKSIGLKSGLTEARMEIQDLIEDYELQTKRLERVNDLIKELCQQVRYADKLLEIKGIGITTVAGFIAEVGDITRFDSTKELQKLAGLELVSDSSGKHNGKTKISKRGRKRLRYLLFEAAISVVGKNEEFKEIHSYYTTREKNPLKKMQSLIAVACKLIRVFHVILTKGISYDASKMLKDIRHQGEQLKAA

SEQ ID NO: 324976 - protein, 362 aa, unidentified
MDSMTHEAPGRHITVGVDTHKDIHVAVALDGLGARLGELHLPTTPAGYARLEHWAADLGPVEAFGIEGTGCYGAGLARFLDGLGHRVVEVNRPDRTTRYRLGKSDPIDAEMAARSVLSGVATGTPKAADGSTEMIRMLKVVRDSAVKARTQSLNQIKALLVTGPAELRETLRGLSTPRLLDRCAAFRPGVLDSPTAAAKHTLRSLARRNLALRMEAKELDTEILRLVSGTAPELLAAFGVGPDSAATFLVSAGDNPGRMRSEAAFASLCGSSPIPASSGKTQRHRLNRGGDRQANAALHRVVVVRLRWHAPTRAYMARRTAEGKTTAEVMRCLKRYLAREIFGLLRPAPPTARSLTHDPDRA

SEQ ID NO: 324977 - protein, 428 aa, unidentified
MHGKHYNKQLAKCQRITSKTLVVGLDIGNEFNAMCLMSKEGEVLSRYPRIYNTRKGFNFFLKVIEDIKKKNGFNDVFIGMEPTGHYWRKIAYFGQEQGYEVRFVRTTALRHQRELDESSSAKSDVRDAVTIANITREGKYIDTVIEDGVLRQLRTLAHVRERIQRYNTGSKNALKAVLDDYFPELKGIFWSMKSKGLWAILEEAPFPEQVIDMGLKRLTELIAKSTRRKETAVKKASELYKAAKETVGLKQIGVADCYRVAVYLKEVKRSEAQLKEIEQEMGKLLEGVPCAKNILSIPGVGVLSCAVFLGELGDFSNFKHPRQIIKYAGYDPQENDSGQSIGRKRISKKGRWMLRKYLYFMSMRAIYRSEFFRGYYDRKLGSCNRFGQPLKKKEAICAVAIKLIKVIFALLRDDRTFTAKAPELALAA

SEQ ID NO: 324978 - protein, 520 aa, unidentified
MSYPRTGRVAKSSKSFFLQKPTGTITPRVQAVGPEHFGILAIDCAKARSRYLLADYYGRTLLPPTSLPHTQGDFQAAVQRLRQAMTQHDLRDLVVAIERTGEYHRPVQRAFRQAGFEIRLVHPFTSKQYRLPADPHNKTDDTDLAAIFRATTQGFGLCEPTWPDDYLRLQLLRRHRADLVGKTSILRCQIREVLHAAMPGYAECFGELWEVPVALVLARHTTSAPAVRQAGLEGLHAIAVQAQIVCRRATLHKVLLWADQAPAGHPLTVELRRLLEALDDDRLEKTRQIQAIESTLAHYVVRTPYLLLLAIPGINIVTCADLAGELGPMYFYGNANGITGRAGLMPSRYQSDQVDQANGPLRRRGHRRLRAVLMQTADNLVLCNHYFQAHAALWARKGRGAQWIRVKVAKVLSRLVFAVVGGRQLLSHPCCQPRHYILSKLLAFHSAHRTDPTQLRQDLETAVQQLPAPARAAEAQGLQEQLAELANRRGPQPLANIIPLVLARLQGSVLESTKDESAGP

SEQ ID NO: 324979 - protein, 427 aa, unidentified
MNESVADQPIGTPQVAAYVGIDWADQKHDVVLRSVDNPAKAEHQVIKSELNALNDWIAQMHERFGAKGKVLVCLEQSRGALIYQLMAYELFELYPINPSQLANYRKTFFSSGAKDDGPDADLLSELLMCHRDRLKAWKPDDQLTRELATLNEGRRNAVDRRTELANEIKSQLKLYFPLALQILENDITTALAANLLVQWPTLAELQKVSPSKLRKFFYGHNSRQEKKILERLALIKEAKPLTTDAAIIRPTALRVKLLAQQLKSLLPFIAEYEKRIAELFGSHPDSFLFDNLPGAGPALAPRLLTAFGTDRDRFEVASDVSTLNGIAPVRIASGKRSSVHFRWACPKFQRQSFHEFATHSIRFCPWAQAYYQTQIARGKDHHVAVRALAFKWIRILFACWKNRVPYDPDRYLKALQSRGSEYAQTVA

SEQ ID NO: 324980 - protein, 369 aa, unidentified
MNATTGNGSRASIVGVDLAKSVFQLAIANSQWKVFETHRLTRSQFERWFVNRDVSLVVMEACGSAHHFARWLNGLGIEVLLLPARYVRAYVKRNKTDAADAAALVEAARGADISPVRVKSVEQQGLQGLHRIRSLWMGTRTSRINALRGFCREFGIAIAQGSRLGVEQISRVLADPHSGVPELVRGTMQLLIEEIRLLEARIAQLERQLTVLARQSPACTTLLSVPGVGLLTATAMIASTSGNVSHFKSARHFASWLGLTPREYSSGNARYLGRISKQGDRYLRMLLTHGARSVLRAATVAQQTGKTLDELRSWAIAVQGRTNHNKATCALANKLARICYATLRDNHSYGNPALRQRHKLERTAFAVAH

SEQ ID NO: 324981 - protein, 350 aa, unidentified
MIVLGADTHKSSHTIAAVDTSTGQVLADKTVAVGARGFAALVLWARGLDGERVWALEDCRHVSGALERFLICRGERVVRVSTRLMAGTRRSSRERGKSDQIDAVSVARAALAAGIETLPTAALAGPELDIRLLVDHRERLVRTRVALNNTLQWNLHDLWPELTLPGGALFSKKWTTKIARRLARAEQTMRVRIARDELRRMRELTQAIKALQAEITVLVTEIAPQLVAEPGCGPLTAAKLVGEIAGAERFTSDAKLARAAGIAPIPASSGRTDRHRLDRGGNRQINAAIHRMAVTRARCDPETQDYIARKKTEGKTQRDAIRCLKRHLARRIWHLLQPPTPSETSLNLLT

SEQ ID NO: 324982 - protein, 349 aa, unidentified
MAVTIVEAAPGITGGVDTHLDKHVAAALDPLGRLVGTESFNADAAGYKALLTWLEEFGQVTKVGVEGTGSYGVGLARFLRRRGVEVVEVNRPNRQSRRNQGKSDPLDAVEAARATISGRASGAGKTKDGPVEAIRVLVVAKRSARQARVKAIVQMRHLGITAPDQLHSRMKGLSVTALVAEGAKLRSTASPDPVTAATKASLSSLAHRVQALDRELTELDEKIESLLLATAPDLMALFGVGPDTAASLLVAAGDNPERLHSEAAWAHLCGVSPVPADSGKNAGHFRRHQGGDRQANSALWRIAMVRIAHDPETTHYFDRRVKEGRTKRDVIRILQRYIAREVYRYLPRG

SEQ ID NO: 324983 - protein, 428 aa, unidentified
MNVDELTRIKEFRQIRKEVRGSDKYLLVGIDVGKEKHYAFYGTATGKTLKRRLVFGNDFSGIEMLMDIAKGLKSDNNLEKIVYGIEPTANYHKPLAEYLIKCGCNVVQLSGVSVARNRELLDGRWDKHDGKCSANAADLISQGKCQYYDYPPVGMRDLRELLSLKRMLKKQEHRMRVRIRNNLIAQYFPEFDSQFAKGCSESLAVVKWCIRPKEINLMEHEEFEDLVAPRVRTRAQGDRIKSIWLDANESIGCEAGEVLQFGARLMVEDLQNIRDSIKAVDEQIANICMEFSEYHYLLTIPGFGPDISSKVLGAIGNPLRFDNGKQVIKLVGYDLSAIRSGKPSGRAIPRISKRGNAHLRYALYQAAFIASTSNRYFKRYYINQLCGREREKGIKTKMKVKLAAKMLIIAWTLMKKKEPFDPAYLNIE

SEQ ID NO: 324984 - protein, 346 aa, unidentified
MKTNLERTTIINNDYLTNLDKYEHYIALDWSQNNMAIARMTKVSRSAQVTDVPSDTQGLKAYLCNLRGRKILTIEETNTSHWLYIELLDYVDKIVICDPYRNRLLSEGPKNDKIDAEKLCRLLRAGLLKEVYHSLDKTYDLRKLVSSYEDLIKAGVRLQNQKSAIYRSEGKEKEEDLNNNMLKFILKNINEGIEDYGRRKKEFEKFIAGESQKDNLIKNQISLPGIGTKGAIKIAATVIDAGRFKCAGKYLSYSGLVRHKKISGNRSYGQKRPRYSRKLKSVYRTAAMAAVGGNNPINEYYEYLLRKGLSEDKARNQIARYIARISYGMLKNGEKYDPYRWRKHRA

SEQ ID NO: 324985 - protein, 413 aa, unidentified
MGDKIAGIDIHKKVLMVVVMGVQAAGVEWKTGRRRFGTTTPELAQLAAWLQARGVQEAVMESTAQYWKPVWCELEGKIPTLHLAQAFSNRARRGRKDDFRDAERLVRRLVADELVLSFVPPPEQRNLRTMTRMQVHLTHDRGRLHNQVECLLEEMRIKLSSVLSDLFGVTGRRILGAIAKGETDPQKLAALAEHRLKCTAKELLAALTGKVQPMHQRLLGLYLERLQLIDDQIDELKRMIAEALQQHQDAVQRLAEVPGFGANSAQQMIAEVGPEAATFPSAGEMASWVGTCPGKNESAEENHSSRSAKGNRYARRVLTEAANAVVKTKGSHWQAVFRRLLPRLGYQQAVWAVAHRLCRVVWKILHDQVRYVEQGVNRDPKARANRARTLARALRHLGYKVELTPLTPTPAQA

SEQ ID NO: 324986 - protein, 361 aa, unidentified
METIIKQCVGLDCSKDELATCFGQLLLPLQEKHKATSLFINSPKGFKGLLKWSDKLSEQGVEVEFVIEATGVYHEKVTNFLFDAGRKISVILPNHARHFAQTLKTRTVNDKESSKMLASFGLQKQLDGWQKPDAVYARLKGLTREYSQLKDELTMIKNQYHAEEHSAFPINETLTRIKKRIAFMDNQIEQILKDINSIIKANPELAKKIKKICSIPGVALLTTVKIIGETNGFNLIRNKKQLTAFAGYDVITKDSGTSVKGKPRISGKGNKHIRKAMHFPALTSVKYEKHNQDLYIRLEAKSGIKMKAYTAVQRKLLVLIYTLWKKDEYFDPDYQTKETNNNKLLEQPITAALNELDLVRS

SEQ ID NO: 324987 - protein, 348 aa, unidentified
MRGAVHMQITAIGLDIAKNVFQVHGIDAAEKVVVRKRLGRSQMLAFFKALPPCLVGMEACATAHYWARELTKLGHRVRLMPAKDVKAYVKRNKNDAADAEAICEAVRRPTMRFVAAKSAEQQGQLMQHRTRDLLMRQRTQVINALRAHLAELGIVAAQGDKGVKELLTIVTDKKDERLPIDARASVIVLAAQLEAVQTLIGSIERRIKTQHRANEASKRLETIPGIGVIGATAIAATVADPTIFRSGRDFAAWIGLVPRQDSTGGKQKLGPISKQGDRYLRRILVVGAHSVLRRAMQNPEKYLWLTRLLARRPFKVVAVALANKMARMAWALLAHGGTYRAPEPAAAA

SEQ ID NO: 324988 - protein, 405 aa, unidentified
MVVQVVPVTPSTVVVAVDVGKTEFAFSVTDSARSLLLKPRTGCPMTGPSLSRVVADIVEVLPVDAVVKVGIEAAGHYHRPLLHASWPIGWEVLELNPGHVTEQRRVLGKRTVKTDVIDLQAMTELLLAGRGQPVRDRSLLLGELTAWSAHRTSRVLVRTATKNQLLGHLDRSFPGLTLALPDVLATKVGRLVATEFADPARLASLGTSRFIRFGRSRGLHIREPLAERVVQAARDALPNADAAVARMVLAADLALLRDLDAQVDQATDQLARLLPLTPFAPLLTVPGWAAVRAGNYGGALGDPARFDHHRQVYRTAGLNPIQYESAGKRRDSVISREGSVELRRALIDLGIGLWLNDPAAKVYGSALRARGKKGLVIGCAMAHRANRIAFALVRDQSSYDPRRWS

SEQ ID NO: 324989 - protein, 403 aa, unidentified
MGAVAGLDWAAEKHDVLIADGRGALLDARVVEHSEHGVRELVCLLVDHRVQRVALERPDGLLVARLLDAGIEVLAIHPNQVKAARERFRPAGGKSDPFDAFVLCELARTDHHRLPRLAPSGDETVALRALSRSREDLVAMRVELANRLRAELDAFWPGARAIFADVDSKIALAFLERYPSPLEAKALGPKRLGGFLARNGYCGRRSAQELLERLRRAPVGCAGEAELEARRAIVLALVAALRPLVEQIGLLTSQIRGALAAHPDAAIFGALFCDPKSAVTAAGLVAEIGDNRARYPSADALAADAGMSPVAVESGKRRSAAFRRGCDHRLRSHFACLADSTRHWHPWAGEVYRRARARGCDHPHAIRVLGRSWARVLWRCWQDEAPYDPARHGNLRRLQTQGG

SEQ ID NO: 324990 - protein, 342 aa, unidentified
MEQIKVIGLDIAKNVFQVHGVDGDGEVVVRRQLKRARVLPFFASIEPCRIGIEACATSHFWARELGALGHDVKLMPPAYVKPYVKRQKNDAGDAEAICEAVTRPTMRFVPVKTVEQQGVMVLHRARELLMGQRVRLSNAIRGHMAEFGLIAPIGRNGLQRLIETIDDETDERVPTGARLCIKMLVDQLLLVNVQVLENDRQIRSSARSSEIGRRLMEIPGIGPVIASALIATVPDPKAFRCGRNLSAWIGLVPRQNSSGGKERLGGITKQGNRYLRKMLFIGAMAVIRYAQRNGTRRPWLVQLMARRTPKIAAVALANKTVRIVWAIMMSGERYREPVAQAA

SEQ ID NO: 324991 - protein, 350 aa, unidentified
MLHAGLDFSRKRLDVCLIGDDGQVAGRLAVPPDRDGLHGLVRRLAPSGEPVQAVIESMTGARFVHDTLEGLGWEVMIADAQRVKGLAPLACKTDKIDSQVLAVLSHRDLVPEIWLPDPRVRREREQARFRLHLVKHKSSLKNRIHSTMITFGHPCPVSDLFGAAGRELLDRLEVPDPWRGTINASLQLIDDLERRIGEINKELKLSGVDHPYVPLLLTVPGIGWVLAYTIAAEIGDITRFPSAKKLCGYTGLCPLVYQSGERDRRGPLTKHGPKYLRWAMLEATMHACRHEAYRERYQRNKQRLGKQRGAKVAQVDIARKLTTAVWHMLTRNEPFNPTAAAGGASYRLAA

SEQ ID NO: 324992 - protein, 325 aa, unidentified
MVAVVGIDVAKHTFDIATLQPNGKYRTRSRLANDPSGFAQLCEWLEKHAGPDAWIVMEATGIYHEALATGLFERGYRVSVVNPAQTAAYAKTQLSRGKTDKTDAKLIAGFGQDQLAKSRLRLWQPEPPAQKRLRALVRRLADLREMEQMERNRLESADANIQDSIHTVLRHIEEEIRRTLKAIEDHIDNDPGLRQRKELLTSIKGFGDQTAALLLGELGDPLAFRSAKAVAAFAGLTPRPDQSGEHQGPTPISRIGSGFLRSRLYMPAISAMQHNPAIKALAERLRSRGKRGKQIVCAAMRKLLHIAYGVLKSGQPFDPKLALAR

SEQ ID NO: 324993 - protein, 343 aa, unidentified
MQTITTIGLDIAKSVFQVHGVDAAGQVVIRRQLKRRQVLAFFEKLSPCLVGIEACASSHHWSRELQAFGHSVRLMPPAYVKPYVKRQKNDMADAEAICEAVTRANMRFVPTKTPEQQSCLMLHRTRHMFIRQQTAVINSIRAHLAEFGIVAPVGRKGVTELLHVVADPNDKRVSEVARACLAALGAQLLSLKQQILKFDRMILAWHRSNQTSKRLHYIPGVGPMLATALVASVVDPSTFRSGRNFSAWIGLVPKQHSSGGRERLGSISKQGDRYLRSLFVAGALSVIRYAKIHGTGHRPWLTALLSRRPTKVAAIALANKIARMAWAMMAKGERYKQPAALAR

SEQ ID NO: 324994 - protein, 352 aa, unidentified
MERYVGVDAHAASCTLAVVGASGKRIKSIVVETNGRALVEAVKGIGGQLHICLEEGTQSAWLYELLEPHAAEVVVIVAPETKGPKSDVRDAWTRAEELRVGAIRTRAYNEAPQHFAALHNAVRAQLMAVRDLTRAKNRLKAVWRSRGVMPDRSIYNADGREKWLKSLPAPYRLLAQWLGRQIEALEPVRDEAEEWLVREAKTHPIIRKLSTTPGLGTVRTAQVVAIVADPHRFRTRQQFWSYCGLGIVTRSSSDWVRDKRGQWLRAEVQQTRGLSRKRNGVLKAVFKGAATTVITQMVDHPLHAGYQRMLEAGIKPNLARLTLARRIAAIVLSMWKHKEVYDPQRQAMVVKA

SEQ ID NO: 324995 - protein, 410 aa, unidentified
MEVKYRRCCGLDVHKDTVVACARIVSDGEVVSEVRTFQTTTVSLIALSEWLAENGCTHVAMEATGVYWKPVWHILAGGDFQLVLANASHVKNVPGRKTDVNDATWLADLLAHGLIRASFVPDTQTQELRNLLRTRKQLVREKASHILRVQKTLEDANIKLDSVITDVMGMSGRAMIEALIGGESDPAKLARLANYRLKTSQEKLREALRGRVTNHHRFLLHLHLNQIDGLDASIASIDLQVEAGIAPFRAAVELVTSVPGVGVLGAQVIVSEIGTDMSRFPSDGHLISWAGICPRNDESAGKRRSNRLRKGAPWLKTTLVQCAWAAVRKKDSYLQAQFHRIKSRRGPKKAIMAVAASILTAIYHMLKDGTLYQDLGANHFQSRSKGQQTKRLVKRLADLGYDVALTPVTN

SEQ ID NO: 324996 - protein, 425 aa, unidentified
MRSIALDVHRDFCEVAIKDQSGLRLAGRIKTSLAELERFAHSLAPDDQVALEASGPARAIARVLEPHVGRVVIANTRKLSAIAESKVKTDKVDAQTLCELLAAGFLPAVFSPDEFTRALRRRLQRRSKLVRSRTRAKNECHAVLARNLKGRPPMTDVFGKAGREWLAALALPADERETVEGCLREVDFLDSEVGLIERELAAQGLSSQQIRRLMTVPGVSLVSAAAFVAAIGEIQRFSSPKKLVSYVGLDPRVRQSGAAPARHGRISKQGPAEARHMLCEAAWVLIRTPGPLRAFHERVRARRGAQIALVATARKLSVLFWHLLTKEEDYAFQRPTLTRRKLRGLELKAKDGRRSWPSGHALSTKQDRAREAEFALQVETAYRRLVADWQPSGPRSGAGATRGRASSRPTSGKQRGKASVPNPAL

SEQ ID NO: 324997 - protein, 322 aa, unidentified
MNKYIGVDISKKDFYACFEEAEEPILFGNNKIGIKTFEKYINAHDFKKDETIIGVESTGVYYLPMSFNMSKAGFCVNVINPLIVKKQNQISLRRVKNDKKDAGLIRYCTANRAGYKFIDTSETLTIKSLVRQRDSLAMMKNTLNRKQDSVSYKETNLGISISKSNERLINAVDLEIKQLEKELKEFRKDEQKLLQSIIGVGPITAISFISEINDVSRFSHPKRMVAYIGLDSRVHLSGTSIHGKGYISKRGNKILRTRLYNACSVAVLHDNVFRDFFQKKRSEGKAYKVALCATMNKMAHVIYAVWKSGVPFEDKRKSTQAV

SEQ ID NO: 324998 - protein, 413 aa, unidentified
METLVERCAGLDVHKDSVTACVRVPDGHGGRHAQTRRFTTTTAGLGLLAEWLGSFGVTRVGMESTGCYWKPVWQLLEGQVECWLLNAAHLHNVPGRKTDVADAAWIAQLVEHGLVRPSFVPPRPVRELRELTRYRKTQIQERSREVQRLDKVLQDAGIKLSSVATDVLGVSGRAMLEALVAGTHDPEVLAALAKGRLRAKLPALREALAGRFRTDHHGLLVGQILAHIDYLDEAIALLSERIEQVIAPFAEQVALLDTIPGIDRRAAEVIVAEIGPDMGQFPTAAHLASWAGVCPGNNESAGKHRSGQTRKGSKWLGGCLSEVAKAASRTKGTYLNAQYHRLRGRRGPGKATMAVAHSVLVIAYHVLDQGVPYQELGDDYFQQRHSAEHYQRQLVRQLERLGHKVTLEPIEAA

SEQ ID NO: 324999 - protein, 383 aa, unidentified
MKKTQETLRKDVSTKAAVLHVAFELSNSKWKLGFSDGNKMRFKSIDARNLEQLEEEIEKAKNRFRLDNDVRIVSCYEAGRDGFWLDRYLLSHGIENVVVDSSSIEVNRRKRRAKTDRIDARKLLRMLMRYHGGERKLWSVVRVPSVEAEDGRQLSRELESLNKERTSHRSRIRGLLIREGLEVKNPSGKKFLEELDSLCTWDGKGLPGDFKARIVREYERLRMVEEQMGILRKEREKRVGSAETLSMRKVAQLRTLYGIGVTSSWDFVMEMFGWREFRNRREVGAFAGLTPTPYDSGGSQREQGISKAGRGRIRALNIQIAWGWLRFQPQSKLSQWYQERFAGGGSRMRRIGIVAVARKLLIDLWRYLEYGVVPEGARLRPVK

SEQ ID NO: 325000 - protein, 359 aa, unidentified
MRRMQDFIVKGKRIFIGLEDSKRTWKLCVRSEGAIVAETSMPAKYDNLRNYLRGNYPGCDIVVMYEAGFGGFWLHDVLRGDGIECFVTSVGSWRPAHTVTQAKVNRVKTDRGDARRLALNLENNDYVSCHVPDKEHREDRQVSRTLSQIQNKITATKNQIRKFLDWHGLNGDLPSGAWRAADYRKLKSLKLSSPLQTCLDAYFRAIECLEQISLGLLEQLKKVSEKGNYRESVASKQSCPGVGWLSAIRFTLEWGDLTRFPSGRHFASYVGLTSSEHSTGETVHRGHITGQGSGKVRGWLIQCAWRAVKLDPVLLDKYLRVWRNSGSKKKAIVAVARKLVVRMRAIEISKQPYVVAVIE

SEQ ID NO: 325001 - protein, 309 aa, unidentified
MKKSSTAKAASNKNFERKLTIGFDLGDRSSWYCMLDEAGEVVGEKKLGTTPKAIKEVFAAMPRSRIALETGMHSPWVSRLLSELGHEVIVAHARNVRLIGESRRKDDRLDARTLARLARIDPQLLSPVKHRSAQAQADLTVIGARASLVRARTALVNTARGLAKSYGERLRGCNPRNMEAEKAQTLSSELQVALGPLLHALESLSERITEYNQRIEAIAQQSYPQTALLKQIKGVGTLIALTYMLTLEDPQRFRKSRDAGCYLAETRGRANRRCTSAKRVIPICEPCWCRERTTYSARLELIAICDAGV

SEQ ID NO: 325002 - protein, 392 aa, unidentified
MNAQGLGWDIHRKFSKVSVMGQTPDGESHAVERARLEHDDRQAMRAWLSHLDPEMPVALEATFGWPWVADLLEELGHPVHLAHPPVVRALAKHEAKTDRCDSDRLGKFLLRGILPESYLAPPEVRQRRERTRYRMALSALRTGVKNRAQAVLHRHGILHDFSDLFGKAGRAFLDDLELPDGSRQALRGCLQLLDSLTLLIGEVEQWMVENLEEDELVRLLMTIPGIGLILAHVIRAEIGEIERFPTFRHLASYSGLAPVSNDTAGREGPRHCSSACNHVLRWAFIEAVHGVQRTKGAHGFRLRQLYARLCGQGRPKGRKSSAVVAVAHELSKVVHVVWTKRVPYTDTPPPRPGSRQRRPESKETPTAKTTLRSDQPRHPMVRRRATVGQTRL

SEQ ID NO: 325003 - protein, 403 aa, unidentified
MDKPSANSFSGGAFMYYVGIDVSKYKHDCFIVTSDGEIIRDAFSFGNNHNGFQTLLSALSSLGDPANIRIGFEATAHYTLNLKLFLENAHYSFMEFNPVLLSKFNKSQTLRRTKTDAIDCAAIARWLMTVEYKPYPIGFYHAYSLKSLTRLRDSLVRQRSFYLVKITNVLDHTFPEFKPFFGNRFSKTALFLLETYGSADKISRMNSQSYENLRRISRGKFSPKKFIELKALATGTVGESNEMFESQLSSLLSLYKLSVKEIDSLEQQITDLICQINPHSLSIPGVGPLSAAVIYAEFGDISRFASPQKMLAFAGLDPGYYQSGISAHAGHMVKRGSSHLRFTLMNLCMPLMQYNVVFAEYYAKKRAEGKPHRVACTHMVKKLIRIIYTLETRDIDFDPEKLR

SEQ ID NO: 325004 - protein, 407 aa, unidentified
MDVLHPKCAGLDVHQQTVVACARTGAGKAVTYDVRTFGTTTAEVLALSDWLTAHGCTHVAMESSGVYWKPVWHVLEGHFELVLANARHIRNIPGRKSDVNDAPWIADLLAHGLIRGSFVPPEPIQELRDLTRTRQQLVREIAQHTLRIQKTLENANINLTAVLADVLGSSGRAILRALARGERDPERLAELASDRVKASRAELVAALHGRVPPHHRFMLTLHLTQIEALEAAVREVEARLGDALAPFRAALDRLITMPGVSETVARVIVAEIGFDMTRFPSAGHLVSWAGLCPRLHESAGKRLSNRTRSSNPWLKTTLVQAAWAAARKKDSYCRAQFLRIKSRRGPKKAVLAVAASMLTAAYYMLKHGVHYRDLGADHFDRRDKAKLAKRLIARLHDLGLTVEVRAA

SEQ ID NO: 325005 - protein, 336 aa, unidentified
MVVGIDVHKHTHAAALIDDRGGQVAALSITNSPKGYRQLIDWLVDHDAASAVVGVESPGSYGRCLVTALCGAGFEVLQVPAWRTHRERHHRGPGKTDPGDALSIAHVVLRHRDELGPAQEPELVRALGMLELQRRRFVRDRTQAIQRLRSDWTQHDPVAEAAVLRCDRQRELRQLKRIRLGDSLTQRTAARCIRELANDIEELNHKIAALDAEIADLLAEHDNPFEDLLGAGTNLAATIIAQAGDVRRFRNASAFARFCGAAPIPCGSGQTSGRHRLHRGGNRQLNAALYRIAIVQQRHHPQAKAYLDRKIAEGKTAREHDAPSSATSPTSSTAAS

SEQ ID NO: 325006 - protein, 439 aa, unidentified
MLGVQSMPYLPIIFMNSPVQKGVPMALKIVYKVCCGIDVHKTFVVACIASTNKQGVTTYKSHRFSTYTKGLKELLQWLLESNCKDVCMESTGKYWIPVYNVLEKDCSIVLAHPKYVKAIRGKKTDKKDAKWIADLFKHDLVAGSFMPPSDIRQLRDLMRYRYKLTCFMSSEKNRLQNCLTVSNIQLGNVVSDTLGKSSKKILDKILENPLDTSFDIEPLIHGSMKDKIPELELAIDGYITPQQAGKLKIIKKHFEDLESRKTELEKLILALAGPYQQELDLILTAPSFKNIFSAIGIISEIGVNMESFPSAKHLCSWAGLTPTNNESAGKKKSVRVSKAGCYIKPLLVQCANSVVKSEKHPEIRNRYLRLRKRRGHKKAIIAIARMLLTALYNMLKKKEPYNAELYRKSDVLPADREITVEQAILIAKHQGYRIKSATE

SEQ ID NO: 325007 - protein, 400 aa, unidentified
MNNASFNSFVGIDISKDKFDAYCINMKGEKQFYLSCSMDRTGFEKLVSCLESLSIVKDNLLIGMESTACYHMNLFSFLLANGYVAIIINPLLISNFVKMQLRKTKTDKKDSLVIAQFLLMHRDTLSQRSISPHISDLRDLSRQRESLLSQMTALKCDMKRLLTITFPELEKLTGVFTKSILKLLCRFPSAHAIIQADQAEITQLLIDHSMGRNSSKAAEIIIKAANSSIGTTSPAREVILKQKAEVLIHLDGHLKELTTVMVELCRSDMGDDVDIMTSLRGIGEKTATNFLVEMGGDIRRFKDHKKLIATAGIDPAIYQSGKHDGQGRITKRGNRHLRRVIWLMTIRVIQFNDCFRQHYLRRRQDGLPFKKAVLSTAHKLLRTIFAMLTQRTFFTYEVNS

SEQ ID NO: 325008 - protein, 345 aa, unidentified
MEHYAGLDVSLELTSVCLVDASGQVVREAKVESKPDALIHFLRSQDLSIARVALEAGPLSQWLHAGLMAAGFEAVLLETRHVKAALSAMTVKTDRRDARGIAQLLRLGWFRPVHAKSASAQEVRALLTARKLIQGKCLDIESGIRSLLRGFGLKVGPVSKGRFEARVVELIGGHAMLEAVIGSMLKARSALQAEFARLHRTMLGLVRADPVCRQLMSVPGVGAVVAITFKSGVDDPARFRRSRDVGAHFGLTPRKYQSGEIDVTGSISKVGDKMVRTALYEAAGTMLTRTVRLSALKSWALGVAKRRGGKKARVALARKLGVILHRMWVDGTTFRWSNEPAAMTA

SEQ ID NO: 325009 - protein, 310 aa, unidentified
MGEHVGIDVSKEHLDWAVGIEGSSDRVPNTSTGVRRLIASLRKIELDSIIVESTGGYERRLTEALTKAQLPVILVNPWRVRRFGEGLGVLAKTDPLDARILALFGERARPERRPLPDPRQREMADLVRRRRQLISIIVAEKNRLDTASKAIRRDIQAVVQLLERRVCKLDEKIDAAIDGDDEKAEIRTRLQTVPSVGPGVARTLIVDLPELGHLGRRQICSLVGLAPFAKDSGKKAGVRRIKAGRAAPRSALYLAAMNGARFNPVLKAMYERMLEQGKPKKVALIALARKLLTILNAMVRDGKDWQQMSA

SEQ ID NO: 325010 - protein, 436 aa, unidentified
MTLINFVAANQKYYAFNLLSVFIMVFWSVQYLLQHLLVQTQVSHQLLQPLILILQLPQTPQFRHARPGKFFLPVNGMDYFLPLRLTVRNVLTRRITMNIVFLGIDLAKNVFQLCGLNQAGKPVYTKRTGRKELLQTLANIPACLIGIEASTGAFYWQREFEKLGHKVKVISPQYVRPFVRGQKNDGNDAQAIAVALMQPTMQFVPPKSPEQQDIQALHRARQRIANHRTATVCQIRGLLLDRGIPIGSAVSRARRAIPLILEDAENGLSSRMRRTIAELYDLFNDLGRRIHFFDKEIETVFRQSEACPRIAKVKGIGPKTATAVVAAIGKGTEFKNGRHFAAWLGLVPRQHSSGDRQVLMNMTKKGDKHLRTLFIHGARAVVRVATNNNDGHMNQWVNQLKERRGFNKTTVAVANKNARIIWSMLRNDTGYQVVCN

SEQ ID NO: 325011 - protein, 362 aa, unidentified
MAQVRSWVGLDVHRASVVAAVMDRDTGQLRVRRLTGETREVVAFCAALPGPTRVAYEAGPTGFALARALLAAGVQCVIAAPGKIERPCSDRVKTDQRDAERLLRLLMIDGLHAVRVPSIEEEALRDLVRAREDIRGDLMRARHRMSKLLLRHDVRFDGTAAAWTTHHRAWLGKVDLGDRGAQAALLDYLGAVDALIIRRGTLEQTIGELVPGSPWAQTVARLRCLRGIDTLSAVGLCAEIGDWARFPRPGHLMSYLGLVPSEHSSGQTRRQGSITKTGSGHGRRLLVEAAWHYRRPPRKGDALKRRQAGQPAHVLAISWAAQQRLHRTWQRLDHQRGKRRTLVAVAVARELSGFCWAAANAD

SEQ ID NO: 325012 - protein, 320 aa, unidentified
MKTSDNVSVTVGIDVSKLNLDLHVSSGLYDSFRNDGSGFSDIKKLLSKFTVSLILLESTGGYENGIVCYLQRLGYDVVVINPRFVRDFARSLGRLAKTDKVDAELLSQFATVINSRGDRARFVRPLTDETRRYLGDMVSRRRQLVDLITVERQRKSVSSQYASESIEAVISYLRSQLERVDADISAHVSLYYSDLSDLLTSFKGVGSATVGVLLGEVPELGKLNRRQISALIGVAPFNRDSGQMRGRRRISGGRSLVRNSLYMPTLSAIRFNPVIREFYERLVKSGKSRKVAQVACMRRMVCILNAMLRDGTRFEMVYEV

SEQ ID NO: 325013 - protein, 352 aa, unidentified
MTMTTLARQITGGVDTHLDVHVAAALDERGALLGVESFETTPAGYDKLLTWLRSFGTVELLGVEGTGSYGAGLTRHLHAESIRVVEVHRPNRQHRRRHGKSDPEDAISVARAAQGDDATGEAKSRDGYVEAMRALRVARASARKARTQALNQMRSLISTSPDCVRVDLRHPNVYRMLERAASYRPGTKRDLASINKLTLRMLAKSAIELEVEVTEIDAILKALVNDTAPALAALSGVGTDVASALLVAAGDNPERLCNEASFAHLCGTSPIDASSGKNQRHRLNRSGDRQANSALWHVVITRMVSDPRTCEYIARRTTEGQTKKEAIRCLKRYVEREVFNNLPMEHLALDSP

SEQ ID NO: 325014 - protein, 339 aa, unidentified
MHVTTICLDLAKNVFQIHGICEDGEVAFNRALRRAQVLTFFESLEPCLVGIEACGTSHHWAREISKLGHKVKLIPPVYVKPYVKRGKSDAVDAAAICEAVTRPTMRFVEVKTPEQQAILAVHRTRDLIIRQRTQTINMLRAQLAEFGIVLAKGIYHALQFAKQCLNGEQPDLPEVAGDVIFELCDQLRFLHSKILRCTRQMNKIARCEKRVALLRTIPGVGPITASAIVATVGSGKQFNNGREFAAWLGLTPLNRSSGGKERLGHISKMGDQYIRRLLVLGMTSRIRSIRTEPEKFDPWFADILERKPSRVAAVAMANKTARIMWAVLTRNEPYKVRSI

SEQ ID NO: 325015 - protein, 332 aa, unidentified
MNMHPQVRVANGEQRPNAGVDVSKQHLDACWCEHELRVGNDAAGWSELIAKFKASQIDLIVIEATGGYERGLVCALQEAQLSVARVNPRQARDFAKSMGTLAKTDRVDARCLRDLADVLARHRERHKYITPLADSRREELAVLITRRRQLVEMRVAEINRLDQAVKRTKRSITRVLRVLDKQLEEIDREIQRHIDDHFEPQSKLLDSVKGVGPVTTMTLMAALPELGRLDRRAIAKMIGVAPLSRDSGPRKGQRHIWGGRGDVRAVVYMAALSAAKHNRVIREHYERLLAAGKPKKVALVACMRKLLTILNAMLRDGAAWDESKHRQPHANA

SEQ ID NO: 325016 - protein, 346 aa, unidentified
MLYAGLDLSRKRLDFHLLDADGATVDVGASPPDADGLQHLSERVALHGEPVRAAIESMNGARFVHDRLELHGWQVEIADAQKVKGLGPLACKTDRIDAWVLAELARRDLVPAIWLPDPQVRAERERARWRLHLVRHRSSLKQRVHAVLLTHGKPCPVSDLFGVRGRQLLAQLGLPEPWQGTIEASLRLIDELDHEIGECERELRRLGADHRYVPLLCTVPGISWVLAYTIAAELGDIERFASPRKLAGYSGLCPRVYQSGGRDLRGPLSKQGPRYLRWALVEAATHACTSAAYRDRYQQTKARLGKQRGAKVAQIDLARRLSEAIWHMLSRNEAFAPKGATDPLAA

SEQ ID NO: 325017 - protein, 352 aa, unidentified
MKIVALDLGKFNSVACIYQAEDGVHEFRTIKSDPAAIHDVLLASEAKRVVIEVGATSGWVKDLAEAMGLEVEVANVNAESWQWKKRKRKTDRDDALKLAVLSARGELPKVYVPCRQVRQWRSLIGYRQDLVVRRTAIKNRIRALLTQEARVQPGGKKGWTDQAVEKLKGEARGIAQCSTDELWRGILQMELVQFDAVEGLIGEVEKKLEALSKERAEVKLLETIPGVGPRLAEVVVAVIDDPRRFNNRKQVGCYAGLTPRQFESGTMIRQGRISCQGNRLLRALLVEVSWLMRRWNDQFWKIFQTVSKGSKQRRKAAIVAVARRLLVTCWAMLRDNKPWRPAAGLTGEALAA

SEQ ID NO: 325018 - protein, 418 aa, unidentified
MKVVYPICCGVDVHKRFLVATIIKTDGITPKYIKKRFSTFNNAILQFKQWLIENDCYDVCMESTGKYWVPIYNLLEDKIRVTVASPKWVAAVKGNKDDAKDSKWIGDLFRLGVVRASHIPEKPVRILREYTRYRVKLVGARSSEKNRFQNSFTVCNVALDSVVSDMFGKSATLITDYLIQTDSFDPEHCKSLLQRSLKKKGEAVVESIEGYSITPAQRDRMVIVRSHLDFIDKTISTLDAAIDELVQPYENHIALLCTIPGVDRRSAISIISEVGVDMSMFDSSRRLCAWAGLAPSNNQSAGKKKSVHISRAGVYLKPALVQAAHAAVKMNDTPYYKRKYERISKRRGKKRAIIAIARMILTAAYNMLKTGEVWNPSDLFKVDMPPVLIEKQKQKAFNNAIKLLVSQGLIEPGTIPAA

SEQ ID NO: 325019 - protein, 420 aa, unidentified
MAKKGTKVRIEDLQDVYQFCAGIDVHKAAVTVCAIRGKGPEVEAELVEYGTTTGELRQLAEWLREQGVTHVAMESTGVYWRPVWQILESAGLQLLLANAKKVRNVPGRKTDQSDAIWLATLLRKGLIEGSFIPPEGIRALRDLCRSRASLVRDRTRVIQRIEKVLEEGNVKLDVVASDLVGVSGLRMLERLAEGETDTTAMAELALGRLRSKIPQLTEALEGSFRKHQLFLLKELLEQYDYLCKKIERFEIQIEDSARPIEEQVQRLDAIPGVNRLTAIAVLSEIGIDMSRFPTPQQLCKWATICPGNRESAGKRKSGVTGRGNRWLRGTLTQCAWAATHDKNSYLAVQYRRLLHRGKQRALVAVAHSVLNIIWHLLRNQIDYQDLGVDYFERQNLEGQKRAYVKKLEKLGFTVKLEPAA

SEQ ID NO: 325020 - protein, 338 aa, unidentified
MTCYSGIDLHSTNSVVVVSDEADRVLYERRLPNDLLKIRAALEPYRGELAGVVVESTYNWYWLIDGLQAAGYAVHLANPAAMKRYEGIKHSGDETDAAYLAHLLRLGILPTGYICPPQERAVRDLARKRSQLVRTRTAQVLAVENVFARETGGRMSANVIKRLEVAGLGEYGLGEDVTCSLAANVAVIQALTAEIEKLEARLRQRVRPRPQYRLLKTAPGIGEVLATTIMLETGPIERFAAVGNFASYARCVDSKHLSNGKKKGEGNVKNGNKYLAWAFIEAANFARRYCPEAKRFHDRKRAQTNTIVATKALAHKLARACYHMLKEGQPFDVKRCFA

SEQ ID NO: 325021 - protein, 351 aa, unidentified
MLYIGLDVHKEFCQACVIDEHGRVLSNEKFSSTRDELDRFLAGFKDAKFVLESTGIWEFIYEGIEKKGFEAQLAHPLRVRAIAEAKVKTDKVDAETLAQLLRADLIPRSWVPSRDIRDLRQLVRQRAYLVQQSTSFKNRIHAELLRRGVRRPQNFVMPFSKKSIDWMRSLEIPTVISCLNCLESVQVQIEEMNIKLLDEFNRRPDAQLIATVPGIGFYGALLIHAEIDDIKRFSHPEKLCAYAGLVPTVRQSASSVHYGAISKDGSSYLRWMLTEAVHTHVHCEPGSRLSRFHAKVARRRGKQKATIATARKLLLIIYWMLVRHEPYHSQGLDPGFPPARNECDIGIGAGP

SEQ ID NO: 325022 - protein, 395 aa, unidentified
MFIVGIDVAKRSHEVCMITSDGQTVQRPFSIRNNCTGYNLMLEKIRKHTNIKSQIVFAMESTAHYWLALFTRLRKDGYHVILLNPIQTSAMRDMFIRKIKTDAKDSFIIAELIRFGRYAESNVAQDRLLALKELCRNRFYLVDMAGDLKRKLIALIDRVFPEYEAQFDTIFCKSSVALLKKYPTPQKLSTAHLDKLTELLWNSSNGHFGEWKARELKDLARNSFGVEDCDGAYSTLILLMLDQIQSLSGKADALEKEISRLFQSFDTTVTTIPGVGPIIGAVILSEVGDISRFSSADKLAAYIGVDPSVNQSGEFQAAHAHMSKRGSPYLRRCIWMASQVAVQRDPMFRAYYEKKAAEGLKYMTIIGHVTRKMTAVVFAILRDHKVYEPVLPTAA

SEQ ID NO: 325023 - protein, 343 aa, unidentified
MYYIGIDVAKYKHTCFIASETGEVIKSAFDFDNSSLGFAFFKSVISSLDSNQLKIGFESTGHYTANLKQFLSMNGFSFTLLNPYLVKRFSFSLSTRKTKTDKIDAAIIARFLMAVDSKSNTSSSYHINYLLSLSRHKFRLTKSISKAKIELVNLIDQAFPEFPKFFSSIYGKTPLSILAHANSLNSIRNISLSRFNSLHKLSRGRFTFAKLSKLKTAAKSSIGVKSDYLWSLIHLIVKRISFLQNEKDSILFSLSRFQPLLLSPVMSIPGMSFSLAASIVSELGFVSRFPNFRSVIAFAGLDNAVYQSGTDIKYGKISKRGSKLLRTFLFQASQSVIIHSPYF

SEQ ID NO: 325024 - protein, 431 aa, unidentified
MGHVVIGMDPHKRSATIEIIDDRGKVLCQGRFGTDRDGYKAMLAAGRKFADRTWAVEGCNGIGRHVAQRLVADGEPVVDVPAKLSARARLFSTGQGRKTDPVDAHSVALAGLFSPGLRVITADDATVALRLLADRRDELGATRTQTINRLHRLLLELLPGGAKKFLSAAQARDLLATVRPRDIAGKTRRRLAAELVTELTRIDKRIKTADAELKELVTATSSSLLTLHGIGPSGAARLLGDVGDIARFADKGRFASWNGTAPLDASSGDQNRHRLSRSGNRRINRVLHIMAVVALRNDTEGRAYYRRRLAAGKTTMEAMRCLKRRLSDIVYRQMTHDTRRARATGPGGHMGTATGSSVAGSDPCTGSSEKSLPGPAANHPTPAPASSPIHSPACSRRPSSTAGPQPLSSDVCLTTARTGAHSRGGNDTLLT

SEQ ID NO: 325025 - protein, 338 aa, unidentified
MYYTGIDLHKFTSYLTTVDSSGAIVKQENLKNVAHNFVQYFKSIPGQHTTTVESTMTWYWLNDLLTSMNIPLVLAHAKYVKAIAYAKVKTDKVDSHTLAQLLRMNFIPVAHKISNEKRLLRDALRARLKIVQRHTSVTNSMQLLLAKYNFDSPTQLSGIPLFQYEQLTEVEALLNEQMLDLEKQLYPYLIPNDDIQRLLWIPGIGKMNAFTILLEVDDINRFPDVKNFFSYCRLVPSARNSGGKSKQRSSKDGNKYLKVAFSDAAVHAVHYYPVIKNYNNSLIRKKNKQIAKTIIAKEIAQTVYFVLKNKTDFNNKFKGKELEHKKSLQWPRITNPYA

SEQ ID NO: 325026 - protein, 376 aa, unidentified
MVNLRYHKTIYHRKEEAHMRFYTKQHKFYCGIDLHTKKMYVCILDDEGQIRLHQNINTDPAAFLNLIHPYRQDIAVAVECMFTWYWIADLCTQQNIPFVLGHALYMKAIHGGKAKNDKIDSHKIAILLRGGMLPQAYVYPAKMRATRDLLRRRNHFMRKRAELFAHIQNTRSQYNLPDPLGCIAKPKNREGIVERFDDPSVQKSIAVNLEMIEAYDRLLTQLEQDIIASAKEHDLRSYALLQTIPGVGRILALVILYEIESIERFPTVQNFVSYSRLIKSIKESNGKKYGSSGKKIGNSHLKWAFSEAAVLFLKGNEQGKRYLQRLARKHGKAKALSILAHKLGRAAYFMLKNKEAFNQKKFLGLSTLEGMDQLAA

SEQ ID NO: 325027 - protein, 351 aa, unidentified
MNARSDAACFVGVDLHKDTLVACTIAAKDREVSYRKIACVAREQVREFLADLPRPSVVAIESVGFYRWLWTEAEPIVDQVVLADARGCRALAGRRIKTDREDAFNVAELLMTGRLPTAWAPPNHIQRLRDLTRHRNGLSRDHAKTLHRVKSIMNRLNRPGPARMDAAGLQRYLLGSVERIEADDLMMLWQHQRRLVEVEQDRSAIERRIIDVMRAEEFRRLREILESIPGVGLITAATAIAEIGDFSRFPDAKAIGRYAGLTPTGYSSADKHRLGRICKTGSPDLRWVLQQAAWTAIRCEPAMKKVATKISKGSKTRKKAAAVAVARKLLVLMWTLARKDELYKAREPLAA

SEQ ID NO: 325028 - protein, 355 aa, unidentified
MDSAKNIGLDVHKESISIAVLNAAGKIVLECVIETNATLILQFFRGLRGESHVTFEEGTSAAWLYDLIQPHVTEVVVCNPRQNALLNHGNKSDRIDARKLANLLRGDQLKPVYHGEHGVRTLKELVRSYLTISKDTARVMTRVKALYRSWAIPCTGKQVYAPGHRAEWLAKITVPGVHRRAEFYFQQLDALRSLRQQVRRELLAESQKHPKWKLLCQIPSMGPIRAAVLIGIIQTPHRFRTKRQLWTFSGFGIETHSSGDYRYVEGQLRRTNRPVSVRGLNTNHNHDLKNLFKAAAIVAAHKPGPFQEFYAALLAKGIHPEMARLTLARKIAAITLHIWKKGARFDAQYLKPQAA

SEQ ID NO: 325029 - protein, 455 aa, unidentified
MPKKTTSDRPELKTVNVSAAAIDIGSKMHMAAVNPACTEVPVRSFSTFTQDLHELADWFTACGVTSVAMESTGVYWIPVYEILEQRGFEVILVNARYAKNVPGRKTDVSDAAWLRQLHSYGLLRGSFRPDAEIATLRAYLRQRERLVEYAAAHIQHMQKALMEMNLQLHHVVTDITGATGMRIIRAIVAGERNPDVLATYRDVRCHSSTETIHAALVGNDRHEHVFALTQSLELYDVYQAKMLDCDRKLEVLIAALNNKGEKPVGKLSKPRIKTKQVNAPTFDVRTALYGVLGVDLTEIHGLGPSLALKLVGECGTDLRAWPSAKHFTSWLCLAPGNKVTGGKVLSSRTRRSSSRAAALLRLAATTVGRSDTALGAFYRRLSSRAGKSKAVTATARKIAVLFYNTLRHGMSYRDPGAEHYEQQYRSRVLANLQRRAKSLGFVLQAIPSDANPAVS

SEQ ID NO: 325030 - protein, 342 aa, unidentified
MHTTTLGIDIGKRWFHVIGLDTAGIVVRREKLNRAQLYELFATHSPCLIGMETCCGAQHLARLAASHGHDVRLLPAQHVRPFVKSQKNDFNDATAIAEVVRLPSMRAVPLRSLEQIDIQALHRARQRLVEQRTGMTNQIRGLLLDRGLPIPQGLNPLRTAVPEILEDATNGLTPLFRSLLARLLNMWQQTDSAIEELTDEIQSVARASDQCRRLQSIPGVGPLVATALVSAVGNAGTFRSSRDLAAWVGLVPRQHTTGGKPKLLGLSKRGNSHLRRLFVQGARALWVWKEKRNDPLHQWMRRLAQRMHPHKAVCALANKLIRICWALLRNDQMIFRNAAAAA

SEQ ID NO: 325031 - protein, 362 aa, unidentified
MHLRVREGDGPRMRRNRRIGSAARSDVVPLHAFRTPEDSMTATPDHYLGIDVHKRQAQVAVLDDEGEVTEEVRVANADLDEIAQKYAGSSAALEAGSNYFTIYDRLDEELDVTLANPAKADWLTDQKQKNDRKDAKNLGRYLRLGEVPESYVPPEEYRRYRALARGRKKLVDKRSDFKNEVNSLLDQNGVTYDGSLWSDQGREFLRELTLDDASELLVEQWLEAIDEFTVKIKRMQRRIEEVAAEVDELDTLMSAPGIAAFSGLMIHGEVGEVERFDRAAEVVSYAGLDSVIRESGDSRREGQISKEGNGYLRWILVQCTNTAVHNAKDPYLSQFYWRLQKKRNKPHKVAIVATARRLFAIF

SEQ ID NO: 325032 - protein, 424 aa, unidentified
MKGSSPSIYDDFELLIGVDWADKKHDICEYDACSQQYKFSVIPHTPDAIQAWLLSLQERYPGKRFAIACELTKGPLINALQACEDVVIYPLNPSMVARYRKAFASSGSKSDPVDAKIQVEILQYHRDKLTPLKPQSDSIRQLNQLVLFRRKLVQDRVSLSNKITGILKQYFPQSLLWFKEKDTVIFCDFLMRWTTLEQAQAARKTTFLAFFSKHNSHYPDVNEARFTQLKAAKPLTRDEAIIKPNSLMISLLVPQLKQLLLAIRTLDEEIKELYIQHDDHIIFDSLPGAGPCYAPRLLAAFGEDRARYQSASDIQKYAGIAPVIEASGQKAWIHWRYHCPKFLRQSLVEWAGQTVRYSYWAKAFYEQQIGKGKSHNVAIRALTFKWIRIVWRCWQDRKVYDESTYLNALRVKGCERPVIPTFNS

SEQ ID NO: 325033 - protein, 359 aa, unidentified
MREYIAFDSHKHYTLAVHEDTRSGSTRQRRINHSPGAIREHLRGCEPGTDVAVEATGNWYWILDEIEQAGMHGVLVHPRKAKLMMGMINKTDKLDADGLNRLQRNGTLPTVWVPPGELRDLRELTRGRLVLTRERTRLKNRIHATLARYGLTITEASDIFGVGVRPTLLERIGRLPQETRYMTGLLLGRLDDLASQIAEVEKRLKSLAKKTPAMRRLMTAPGIAEILATTILLEVGDVARFPSAEHLASYAGTTPRVKASGDKVRYGKLRPDVNRYLKWAYLEAANSVALNHAKKPGRFVSRQYQRLSVRRGSPKAKGAVARHLAEATWHMLTRGEDYRDRGAAAAGEKLVARRKVSGK

SEQ ID NO: 325034 - protein, 389 aa, unidentified
MKIYVGIDIAKLNHFAAAISSDGEIIIEPFKFTNDADGFQLLVSKLESFDKNSLIIGLESTAHYGDNLVRYLVTELYQVCVLNPIKTCQMRKNNVRKTKTDKVDTYVIAKTLMMQDNLRFVSFFDLDMMDLKALGRFRPKTIKQRTRLKIQLTTYVDQVFPEIQYFFKSGLHQHAVYALLKEAPSPKEIASMHMTHLANLLKVNSHGHFTKEQAKELRVLAQKSVGANDSAISIQITQTIQQIELLDSQLEKIEAEMTDIMKFNDSVIMTIPGIGYINGGMILGEIGDIHRFSNPNKLLAFAGLDPSVYQSGNFQAKTTRMSKRGSRVLRYALVNAAWNVVRNNATFKAYYDAKRAEGRSHYNALGHCSGKLVRVIWKMLTDNVEFNLK

SEQ ID NO: 325035 - protein, 410 aa, unidentified
MNLNVGIDVAKAKLDYCGMDSAKHIIFQDEVVNAPAGTEKIIKLILDWADSRDDAEKVVIGMEATSVYNIHPTLYFEQSSALQALDTEIVTLNPKMTHRYSQLFDDDKTDTLDAFHIADFLRMGRYQVPVTRDEKHIALQRLTRERYFVVSQITDCKNHFLNNLYFRLNTLEAELPTSVFGNTMMTVLSGEKYTLDEIAQMPLETLTQDLNQLSHGRFGEPEEVAKALKKAIRSSYRLNKTVADSVDQILAMYIREIRMFQKQLKELDKSIAALCAVIDGAKSLNSMPGLGPVYSAGLLAEIGQIERFPDEASMASYAGLSWRRSQSGGSERQLTPRTHNGDQYLRYYLVEAANSIRVHDPVFAKYYDKKYGEVPKYQHRRACIMTARKLVRVIYKLLSDHELYVPAKVV

SEQ ID NO: 325036 - protein, 364 aa, unidentified
MTVTSMPQPTLPAQRAAQPAEDVILGVDTHKDVHVAAVITVLGALLAHQEFPTTAAGYRQLLAWARSFGILHRAGVECTGSYGAALARFLRQENIHVIEVNQPDRATRRKRGKTDAVDADAAARAVLSGRATTTPKTGEGPAADLRVLRLAKESAVKARTQAMNQLKAVLLGIDPVLRESLSGLRNPALIARCADGLADSDDAAAFTLRLLARRIQHLTCEVKDLARRVTQAVRAHRPQLLEIVGIGPDSAAALLIAAGDNPDRIATEASFAALCGVSPVEQSSGKTQRRRLNRGGNRQANAALYRIVMTRIRWDERTRSYLERRTEQGLSKREIIRCLKRYVAREIYRHIQPKTVTPTPSPAT

SEQ ID NO: 325037 - protein, 376 aa, unidentified
MQTLIHVGLDVHSTSISACALRRGYNRNDVYFCETKFGSSASKVRDYVDQLSSFLKDKNPDEQFEIVCGYEAGCLGYTLKRELDALGVTCKILAPSTMPHPKGGKKVKTDRRDAREIAQCLANHTASMVYVPDTHDEDVRDFIRMRDDHLIQLKQLKQKIGACCLRWGHKYERTKWTGAHLKWLKELPLRDGQKKVLEEYLATYHWLEDKLKSLDQDIENLAQDKRYAENTAKLRCFHGIDTSTALALQCEIGDFKRFDDPAKFASYLGLTPGENSSGMKQHHTAITRAGNGHCRRLLIEAAHTYGRAQLKKSARVKKRQDGQTDEVIAYADKGAERLKRRFRRMLYNHKPWNVCSAATARELACFIWGMMTGNLK

SEQ ID NO: 325038 - protein, 429 aa, unidentified
MRTESTPGARGPVFCGVDTHADSHWLCVLDWRGRRVLSRRFPADAAGYEALAGAIAAAGEPACVAMEGTSSYGAGLTRHLASLGMPVREALSPARTQRRRPGQGKCDEADAERAARAAMSGSKLGTPKSQDGWVDGVRCMLAARSGAVKARTSAINTARSLLTTAPEGLRSRFRGMGGPRLMGELPSVRAEGALGAALGALADLWAAARDAALDMELAIEASLEENCPALLAMYGCGPVSAAKLAVAAGDNPGRLRSEASFAAICGACPIPASSGKTVRHRLNRGGDRQANSALHEIARQRVMRDPETAEYAERARARGKSDREVMRCLKRYVAREAYRALMRPHEIRRPEDASELVAARRAAKVSQVRAASILGTSEKYISMLERGQRELKPIRRAYEAWVEAGLPLDWDRQAFEAERKMDSKKHLAK

SEQ ID NO: 325039 - protein, 343 aa, unidentified
MEHFAGLDVSVKETSICIVTDTGRIVREVKAASEPLALLKVLGNPTYRFKRIGLEAGPLSQWLFSGLAEAGLPVVCVETRHMQAVLKAQINKTDRNDARGIAQMMRAGLYRPVHVKTLRSQKLRMLLTHRKLLQSKAIAIENDLRGTLRNFGLKVGMVGKMRFEARIKELVESLPDLAELVEPLLIVRRTLRGQIVILHRRLLAIVRDDEVCQRLMTTPGVGPVVALTYRATVDVPARFRKSKAVGAVFGLTCARYQSGEIDWSGRISRCGDEMMRVMLYEAAQSMMRSKKWSWLKAWAMQIARRRGMKKAIVALARRLAVIMHRIWVDGTEFRWTREHAAAA

SEQ ID NO: 325040 - protein, 355 aa, unidentified
MDSKKYIGMDVHKESISIAVMNAAGKIVMECVIETKASMILQFINGLRGDLQVTFEEGTSAAWLYDLLKPHVTKLVVCDPRKNRSMREGNQNDKIDARRLAELLRLNHLNPVYHGEHGLRSLKELVRSYLTITKDVGRVMSRVKAIYRSWAIPCTGKQVYAPRYRTEWLGKITEPGVLRRAEFYYQQLDALRTVRQQVRRDLLAESKKHQAWKRLCQIPSIGPIRSAVLLGILQTPHRFRTKRQLWTYSGFGIETQSSADHRRVHGQLQRAKKQVSIRGLNRNCNHDLKNLFKGAAIVASNKPGPFQEFYTALLTKGIRPEMARLTLARKIATIVLIVWKRGACFDAQHLKPQTA

SEQ ID NO: 325041 - protein, 441 aa, unidentified
MAMRKREEDEVFPNAAGIDVGGSSHWVAVPRQADDEPVREFGAMTDDLNAMADWLLSCGVDTVALESTGVYWIPVYEVLERRGLVVWLVDARQMKYVPGRKSDVQDCQWLQKLMSLGLLRAAWRPGDEVCVVRAVVRQREVLLTEQADWVQRMQKALVQMNLQLTEVLTDVMGMTGQAIVRAIVAGERDPKVLARHRNGRVKASERDIERALTGNWREEHLFVLGQALAMVDSLAQRVLECDAKIEALLAPLGCHEVELSGPGKRRGKNTPQFDARTALARWAGVDLTRINGLAVTTVMTILSEIGPDLSRFANVKHFYSWLGLCPGTKVSGGKVLSARTRRSTNRVRQALKLAAMSLSRNDSALGAFYRRLCSRMDKPRANTAVAHKLARMVYFMLTRGEAFVDQGQQHYEEQQRQRSIDALRRRATALGFQITPAAQTP

SEQ ID NO: 325042 - protein, 418 aa, unidentified
MIDDVQWFVGIDWATQSHRVCLLDVEGQHVNERDFAHDGAGLTELRDWLLEETKAAPGQIGAAIETPHGPVVEMLLDHSFQVFAINPKQLDRFRDRFTVAGAKDDSRDARVLGSALRTDRQAFRRLVIDDPVMIELREWSRMADELQQERTRLANRVRQQLWRYYPQPIELTDDVADDWFLALWQQVPTPATAAKVSEKTISRLLKDHRIRRLDAATVLQTLRKTPLFVAPGTTEAACAHIRSLAARLRLVNQQIKEAHRSLDGLCAKLEAATESPSGQIREQCDVTILRSWPGIGRIVLATLLTEATEPLRERDYHALRALAGTAPVTRRSGKQCFVTRRLACNKRLQNAVHHWSRVAIQHDAAARRRYDALRRRGHGHGRALRSVGDRLLYALCTTLKRQTPYDPNCQTAQVTAGL

SEQ ID NO: 325043 - protein, 312 aa, unidentified
MDERFVGIDVSKAWLDCATEPASAARRFANDGAGIAALVQALVVEAPQLVVLEATGGWETAAASALVAAGVTTVVVNPKQVREFAKAMRMLAKTDRLDAHVLALFGARIRPELRAWPSSDQRELAELLDRRSQLVAMRAQERTRLATALPVARPSLQEHIHWLDARIDALEIALTARLRSSPTWQVKADLLQGVPGIGQVTRFTLLARLPELGQLNRASIAALVGVAPFADDSGKRCGPRFIQGGRAEVRNVLYMATLTAVRHNPPIKAFFDRLTAAGKPFKVAMTACMRKLLTILNAMLKTNQPWQPAARP

SEQ ID NO: 325044 - protein, 431 aa, unidentified
MTTVPITPKHSFEEFAAYVGIDWADGEHQVYLVQPDGHTQQWKLRAREEPITQWVQQLYERYGGRPVAVCVEHTRTSLLYLLSAWPWMVVFAINPRSLARYRESLYPSGGKDDPTDAQLLAWFVQRHWRQLRAWRPEDPATQLLRMLLENRDKLVDDRTRLTNRLRALVKLYYPEALEWLGDLTRPVSWASLLRWPSLGEVKKTPLGRWVKWWYAHGVRRGDRVVQWWHQAQAAPDSRMSAAVVESTMLMVCTLCEQLQRLERWIQEHDRKIAAIYREHPERELYRSLPGAGEVLEPRLLVAMGTDRDRYPRAEDLQRYSGIAPVVERSGRSQWVHWRWASPKFLRQTFHEFAEQTIRWSRWARVYYQVQRRRGKGHHAAVRALAYKWIRILYRCWKDRECYDEERYLRGLIERGSPLAQELKLSTETTCA

SEQ ID NO: 325045 - protein, 414 aa, unidentified
MERMFDVAAGIDVHRDTVVVTVRRRLSARDEQETKTFETYRDSLVAMTSWLASEGVQVVGLESTGVYWQPVVRALKEHLTTAQVWLLNAAHVKQMPGRKSDVTDSQWLSRLVMYGHVSPSFLPAADLCELRKLTRHRTKVVADQTRYKNRIIKELEASGVKLATVCSDPLGQTARAILDALIEGEDVSPERVAVLARGTLRRKVDLLARAVRDTLTPSTAAILRQMLVRLDSLSGDIQALDVEITRLVQPYREHVARLCEIPGIDCVAAGSILAETGPDLASFPTPRHLASWSGISPGSNESAGKAKAAPTRKGNKYLRTILVQCATSAKKTKGSFWQRRFRQLVRLGLKKATVALARRLLHTVYAVLRFSQPYRDPDLAPLPPQRLQRTVQNLTARLENLGFQVTLQPRSSVS

SEQ ID NO: 325046 - protein, 353 aa, unidentified
MKTYYVGMDVHRASIVIVVLNGAGKVVMQYVTETSAVRVRDFLKQLRGKVYVTFEEGTQANWLHDLVRPLVTEVVVCDPRQNKLLQSGNKSDRIDAQKLAELLRNGALKAVYHGDNGMRMLKELVRSYDCLVSDTTRVRNRLKAIYRGRAIGCGGHDIYRPDRRKQWLEKLKEPGARQRASFLYQQLAALKPLRHEAKRLMVKEAGRQTAYPWLMSVPRLGVVSVAQLLAIVGTPHRFRNKRQFWPYVGLAVVTRTTADHEVVNGVLQRSRRPLATRGLNRNHNHVLKRVFKNAATTACHSGPFKAAYEARVAQGMDPSLARLTIARQLAAITLALWKHKEKFNQERMKKQAV

SEQ ID NO: 325047 - protein, 425 aa, unidentified
MNKDVLSTLFVGIDVSSASNYFCAINFEGKHILDFSITNDLPSSEIAVERIFNALRDNDLKFVTIVLESTNVFSFHIANFLASNNSLFNFNSKVFVINPKESSNFRKTYSDMDKTDPQDAFVLADMARCGRIKQQPYKASQLFALQRLTRQRFHLVKTIMREKAYMMSNIYLKFSSLYISKKEDEPFSNMFGNTSKSIIADFTPDDIVNMSDEDMINFIMEKGKSRFSNPQENVKLLKKIARDSYRLDKLAYDPINVAISSSFNTINALEDNLKVIDKAIEKNVKGLCDNEFTILKSIPGIGDVYAAGIISEIGSIDFFKDNNALAKYAGLTWRKNQSGYFEAETTRMTKTGNKYLRYYLIEAVSSVKNHSKEFNDFYTRKYNEVSRGAHKRALALSARKLVRLIFGLLHHNQLYSATKLDNRSN

SEQ ID NO: 325048 - protein, 429 aa, unidentified
MRTESTPGARGPVFCGVDTHADSHWLCVLDWRGRKVLSRQFPADAAGYEALAGAIAAAGEPACVAMEGTSSYGAGLTRHLASLGMPVREALSPARMQRRRPGQGKCDEADAERAARAAMSGSGLGTPKSQDGWVDGVRCMLAARSGAVKARTSAINTARSLLTTAPEGLRSRFRGMGGPRLMEELPSVRAEGALGAALGALADLWEAARDAALDMERAIEASLEENCPALLAMYGCGPVSAAKLAVAAGDNPGRLRSEASFAAICGACPIPASSGKTVRHRLNRGGDRQANSALHEIARQRVMRDPETAEYAERARGRGKSDREVMRCLKRYVAREAYRALMHPHEIRRPGDASELVAARRAAKVSQARAASILGTSEKYISMLERGQRELKPIRRAYEAWVEAGLPLDWDRQAFEAERKMDSNKHLAK

SEQ ID NO: 325049 - protein, 321 aa, unidentified
MSAPSLWIGMDVAASHLDVAVRPSGEHWQVAYTDEALATLTARLQALGPTLVVLEATGGLELRVAGALAAAGLPVAIVNPRQVRDFAKATGRLAKTDALDAHVLAHFAAAVQPAVRPLPDACTQELQALLARRRQLVEMLTAERNRLLRASGRIRAQVHEHIRWLEHRLQDVDRDLDQAVRARPAWRSQEDLLRSVPGVGPGLSRTLLAQLPELGQLDRKRLAALVGVAPLNRDSGTGRGKRSIWGGRAPVRAVLYMGVLSATRCNPVIRAFYARLCAAGKPRKVALTACMHKLLGILNAILRHQTAWQAPPAAVAEPTRA

SEQ ID NO: 325050 - protein, 373 aa, unidentified
MMLWTAPTLRHRCAKGGLPKANHYEGSRPWGEVSTIGLDIAKSVFQVHGVDVDGAVVIRKRVSRAKVLEFFESLPPCLIGIEACPSAHHWCRELQALGHTVKLMPPSYVKAYLKRSKNDANDAAAICEAVTRPSMRFVPTKTEQQQSGLMLHRSRQLLVRQRTMLSNAIRGHMAELGMISAKGRNGTAELLKVIAGNEDGRIPVVARFSLDVLARQYAAITTEIGAIEKRIHAWHRSCEESRRLEGIPGVGPIVATALIAEVGDWKGFSSGRNLAAWIGLVPKQHSTGGKDRLGGISKQGNRYLRWLLVTGAMAVIRYARLRGTKRLWLTRIMERRPVKVAAVALANKIARMAWAMMVRGEKFKEPRLLPAAA

SEQ ID NO: 325051 - protein, 459 aa, unidentified
MTQRKRKSPEEATPLEVLQQLNLNAAGVDIGAEEIYVCVPADRAEQPARMFPTFTVDLHALADWLAACSIETVAMESTGVYWIPLYEILEERGFKVHLVNARQLKNVPGRKTDVLDCQWIQQLHTYGLLRASFRPDDEVCPLRAVARHRDNLIRCQSAHIQHMQKALHLMNVKLTQVVSDITGVTGLSILRAIVAGERDPHTLARLRNKQCAHGEADIAKALHGNYKAEHVFVLKQALAQYDFYQQQIRECDVEMEAMYARLSSADTDERSSPPPKPRGGKPRKNQPSFDLRTALYRMAGVDLTAIDGIDALTAHAILTEVGTDMTRWPTVKHFTSWLGVSPHNDKSGGRVLRSRTKKTQNRANTALRLAAQSLSRSDSALGAFYRRMRAKHGPEKANTATAHKLARIVYHMLKHRNAYVDPGQNQYEQQCRERAVRNLKRRAASLGLQLVAVPAPAVS

SEQ ID NO: 325052 - protein, 434 aa, unidentified
MGKCPYEGLTSAYIRPGYNMAEQRNKVCGVDIHKKFLIATILSRDRTKIQMRFGTDVDDLLNFRDWVINENCDCVAIESTGVYWYPVHAILENKVELILANAHQIKHTPGRKTDALDSEWIAEVALNNLIDPSRILPKEDRDLRRFTRARESLVKTRSQMKNQVHQGLESCSIKLSSVLSDNFGKSGRHILDGLIKGKSIEEIIDGIPSKRVRKNADQIRKAIRTGLDQTQIFLIKSNLDTIDCLTQKLDEIHLEIKQRVSGRKEDLKIAMSVPGIGFTAATTILAEIGNYRDFRSPDKLAAWCGIVPSVYQSADKLLTGSITKQGSKHIRWILVQVAQAAAKKKGSKLRKFFLRVKARKGHNVAVVALARKILCILYHLLMNQEMYQEDVVEKSRTSRLDWFSSTTDKMSLETMIQIIAKAGYEVKKIERDGG

SEQ ID NO: 325053 - protein, 353 aa, unidentified
MSQNLSSAVAVVGIDIGKNSFHVVGLDARGAIVLRQKWSRGQVEARFANTPPSLIGMEACVGAHHLSRKLKLLGHDARLMPAKYVRPYSKGQKNDFRDAEAIAEAVQRPTMKFVATKSADQLDLQALHRVRERLVSQRTGIINQIRAFLLERGVAVRQGLRFLRAELPRILATPPDVLSPRMVHVIEGLAGDWRRLDERIDYLSGEIAAVARQDTGCERLMSVPGIGPIISSAMVAAIGTGDGFSKGRDFAAWLGLVPKQISTGDRTILGKISKRGNRYLRVLFVQAAWVVLIKPKSWERHGLKPWIEAAKKRLHRNVLAIALANKLARIAWSVLAHGRNFEARKIDEAAQPV

SEQ ID NO: 325054 - protein, 348 aa, unidentified
MIRYVGIDVGKARCRAALMNEKGAIESEFFFENNNKGIANLTSALTSEDRVVMESTGNLWLNIYDTLDAKSIRVVLANPLKTKVIASAKVKTDKLDARILAHLLRADLIAESYVPQGNVREMRALVRHRLSLVKMRTMVKNKVHAIIDKYGYRCGYSDMFGKAGTQWLRAQQMSDLDQLFLENHLGLIESVNSQICRVDEVIRERACEDQDVRLLLSLTGIDVYTALLLRSEIGPIERFADYKKLVSWAGLAPSVHQSGNVEFHGRITKRGSSILRWALVEAAHIAVQRDERMKAFYLRVAARRGNQKAAVAVACKMLKIAWFMLIRREAYGNVNEKRYEEKLKRMNA

SEQ ID NO: 325055 - protein, 357 aa, unidentified
MRFYTKQHPFYCGIDLHARTMYVCILSQDGEVVLHRNMPASPDALLKAIAPYREDMVIAVECIFTWYWLADLCAQERLSFVLGHALYMKAIHGGKAKNDKIDSQKIAVLLRGGMLPQAYVYPAPMRATRDLLRRRMHLMRKRAELLAHIQKTNSQYNLPEIGKKLAYKGNRDGVAERFLDPAVQKSVEVDLALIDHYDRLLSDVELTIVQTAKQHNAQALYRRQSVPGIGKILRLVLLYEIHDITRFPRVQDFVSYCRLVKCAKESAGKRYGTSGKKIGNAYLKWAFSEAAVLFLRNNAQGQKFLARLEKKHGKGKALTILAHKLARAVYYMLTRDTVFEMDRFLNGYGSRVGEPAA

SEQ ID NO: 325056 - protein, 469 aa, unidentified
MNKKKCNTNPSGKSPNKQKEKRKTPGKLRRINPNAAGIDVGSKEHYVAVPEGRDEQSVRTFACFTPDLHKMARWLKACNVESVAMESTGVYWIPIFEVLEDYGFDVTLVDARQVKNVPGRKTDVSDCKWIQELHSFGLLSAAFRPEKEICTLRSYWRHRSSLAKSCAKQIHLMQKALEQMNVQLHKVLSDITGMTGMSIIRAIVSGERNPVVLAKMRHHSVKVSEETIANALTGNWREEHLFALGQALELYDIYQDKIAECDRRIDSYMQTLKTTKRKSNTETLKKTKQKRRKNQPYFDLASHLYRMTGVDLTRIDGIDTMTVQTVITECGIDMSRFPTEKHFCSWLAICPNNQITGGKIRKRQTRKVHNRAADALRLAAQSLHSSKTALGAFYRRMRARLGAPKAITATAHKLAKIIYNMLKYGHDFVDFGQDCYEKQYQDRVLKSLKKRAREMGLELINAQTGELVS

SEQ ID NO: 325057 - protein, 345 aa, unidentified
MKHTLIAVDLAKNVFEIGISTQPGAIAKRYRFTRGKVLPFFATQSPATVVMEACGSAHDWARRLEEQGHRVVLLPPHVIRPYVQRNKTDRTDVKGMLEAFRNDEIRPVPIKSVEQQGLTALHRLRSTWLADRTARINAIRGILREFGLVIPVGARHAVPKLWEFLEDADSPIPDFLRPALAEAGKEVRALEERIQTVELQLEQLAAQSSLIQRLLTIPGIGLITATALAGFVGSVDRFTTGRRFSSYFGLTPRESSTGQRRRLGRISKKGDNYLRMLLTHGGRTVLLSAARMKQPDRLRAWALRVKQRRGHNRAAIAVANKLARIVWAVWHRECTYQPQPKSQQA

SEQ ID NO: 325058 - protein, 360 aa, unidentified
MGVDLGDKWSNFCVLGLDGEKLTEGELRTGQEDFAEFFQSLAAARVVMEVGTHSAWARDVVARSGHEVLVANPRQMEGPKRRKRKNDRIDAHKLARVGRMDPQSLFPIEHRSVEVRQDLVAVRARDALVAVRKDLINTTRGLVKSMGARLPKCSTQSFAKKAEGALPAAVREVLLPLVRLAETLSSYIQEYDERIEKLATGKYAHTELLRQVKGVGPLTSLAYVLTLEDPQRFVKSRDVGPYLGLVPKQEDSGDRQPQLRITKMGDMMLRRLLVGSAHYILGPFGPDTDLRRYGLRLCERGGRNAKKRAVVAVARKLAVLLHRLWVSGEVYEPLHQALPKVTQEQAARPAPAEATEEEAA

SEQ ID NO: 325059 - protein, 343 aa, unidentified
MKLSRVGVDLAKNVYQLHGVDRHGKTVWKRRLRRGQWLQVLTDTVEPGCEIGMEACTGAHHWARELQSRGYTVRLIAPQFVKPFVKSNKNDANDAEAICEAMSRPHMRFVSVKTVEQQDIQATHRVREELKAHRNAKANQIRGLVAEYGLVAPKTLLALRRAIPEWLEDAENGLTDSFRSLLHGVWNDLLALEDRLKELDKQIELLARSNEVARRLQQLRGVGPLVATALVATVGDGKQYSKGRQMAAALGLTPRQNSSGDKYRLFGISKRGDVYLRTQMIHGARAVVSQAKHRDDPLSRWVTDIAKRRHPNVAAVALANKTARMAWAMLQNDTDYEPSLATS

SEQ ID NO: 325060 - protein, 393 aa, unidentified
MICVGIDVAKDKHDCFILSSEGEVLADAFTIQNNAEGFDMLLQTIRRCARPEDKIKVGLEATGHYSYNILGFLLDKGLDTYVINPLHTNLYRKSLSLRKTKTDRVDARTIAAMLMSDVDLKPYTDTAYHNEELKSLTRYRFDKVRERAKLKQSVSRLVTILFPELEKLVPSLHLASVYALLIEFPGAKQVAGAHLTHLKATLSDATKGRYGRDMAVTLRDAARCSVGSVMPAKSLELQHTIRLIRELDAEIEDIETAIQSMMDEMQSPITTIPGIGVRMGAMILAEIGDFSRFNSPDKILAYAGMSPSTYQSGQLSLSGPYSHMEKRGSRYLRYALYNATKYVCLWDPAFAAYLAKKRGEGKHYNVALSHAAKKLVRLICALEKSQQSYRNAA

SEQ ID NO: 325061 - protein, 353 aa, unidentified
MKQDKYMGLDVHQAMTVAVVLDAEGKVILETMVATEAPAVLRLVKSMSGPLRVTFEETTQAEWLYEVVRSHVTEVVVCDPRRNKLLSEGSKGDKVDARKLAELLRTGMLRSVYHGHEATRKLKELVRAYETLSVDTQRAMTRIKAIYRGRGIVTAGRGVYQAKQREQWLEKLAEPGVRQRAAWLYEQLDQVRVLRKKAKLAMLTESRAHRAVSLLRTIPQLGPIRAAFIVATVDTPHRFRTKRQFWSYVGLAVVTHMSAEYEMKEGKVVRRRKPVATRGLNHNCNRRLKEVFIGAATGGYRYEPYKPYLEKLKQTGMRAEMARLTLARKIAAAALIVWKKGKEFDPKKLNMTT

SEQ ID NO: 325062 - protein, 358 aa, unidentified
MNQIILQKLQEPKLYAGIDLHKKYAYITIMDQLGYVTHQGRFENSEKKLVPFLTERNTAAPVEAIIESTYGWYWLGEELESAKIAYVLAHPKKVHDLAKGRKTDKKDSQILADLYRTNLLPEAYIPTPEERNFRELLRFRFSLVQQKTGMQRRLRDILAKQNIECKYKDILGKQAKEWLREQPFRFPYKEEVGTILNLCEYLEKDIAVYTKKVTEQSTGNPASKLLESIPGIGELLALLLAVEIGDIKRFPNDRALASYAGLVPGVSSSGDKTHLGETSQKSNPYIRWALAEAVSHVVKKDPVYKAFYDKLEGKKGKSKARVAIMHKLIRAIFFMLTKKVKFKIQQLPMDSSDSRIQT

SEQ ID NO: 325063 - protein, 418 aa, unidentified
MEVEHDEQEIIQRVAALDIGKAELVCCVRVPGPGRRRMQEVRTFLTMTRSLLVLSDWLRSLGVTRVVMEATSDYWRPPFYLLEDSFETWLVNAGDVKHLPGRPKTDRLDAVWLCKVAERQMLQPSFVPPPPIRVLRDLTRYRVDLVTARTAEKQRVEKLLEDAQIKLSVVVSDIFGVSGREMMAALIAGERDSRVLAEMARGRMRSKTTRLVEAFIGRFSDHHGFLLTTMLARIDALSADIDAVQHRTEQELVPFASAVARLDEIPGIGATAAAVIIAEIGVDMTRFPTPAHLSSWAKFAPGVKESAGRKKGNGATGHGNRYLARVLGDAAVNAGRTDTFLGERYRRIARRRGKKRAIVAVGRSILVIAWHLLSDDNAQFRDLGPGYYDSRVNLNRKMRNHVRELQALGYKVTLEAAA

SEQ ID NO: 325064 - protein, 427 aa, unidentified
MREREKKLWMIREHHTLIVGVDVAKKKHHARMMDVRTGRECGHPFTFQNNITGFSRLLGRISQVKEEIGASNIIVAVEPSGHYWKPLAWHLSGMGITVVLVNPYHVKQSKELDDNTPTKSDRKDAWVIASLAAEGRFFRCYLPQGVWAELRGLSQARRRQRARLSAARVALVALLDEYFPEFVNVFKNPLGKGALCILERYPWPVDLRGLPVERVAHELKQATSGRVGEKRAVQLLAAAQGSVGVTEGLYAARLRLKQILAEIRFWQGMLTQTEEAMARLLEATGVGEYLLSIPGVGVVTAAVFLGEVGDMARYTDWRQLRRLAGYNLTENSSGQRKGQTRISKRGRPGLRSILYQAAITLVAKNKEFGALYRYLRTRRENPLAGPQALVAVACKLLRVIFTLVKKREVYDPQKVLGGYRSEQIEAA

SEQ ID NO: 325065 - protein, 345 aa, unidentified
MKIVGCDLHTRYQQIAMLDEETGELVERRLEHESGEARSFYTKLECPVRVGIEATGHTRWFERMLTELGHELWIGDAAQIRASVVRKQKTDARDAVHVLDLLLSGRFPRIWRPTAEERDLRQLVWHRQKLVWMRNAVGNQLHALAMGEGVCRKKKLFTHKGRVELEGLGLGVWTSYRRQELLRMLDELDTSLHELDHAVAEQAEHNAAALLLMTHPGVGPVTSLAFVLTMGPVERFGRSKQVVSYLGLNPREHSSGGRQRLGSISKQGNPMMRSLLVEAGHAAARLDGELRQDYQRLKLRRGSGVAKVAIARKLAVRMYWMLRSQSSYAQLVRMQGSPRGTLVPR

SEQ ID NO: 325066 - protein, 319 aa, unidentified
MKQLVNKIYIGIDVSKAKLDIKYDDENPTIVIENKKQAFKSLKQYFPKDKGQVLVLLEATGGYEKTVVKWLLSQNIPVAIINARRVRDFAKSSGQFAKNDTIDAEMIRRYGQIFSNNIHLEQEKSKLEEQIEDFNRRRSQLVSLCSTEKRHLASIQNIQGQQSVNRTIKYLKKELLRIEEKLQQALEKDETLLAKAQLFMTTKGVGLKTSYTLIGELPELGKVNNRKIAALAGVAPYCRDSGTLKGKRTTWGGREKVRSALYMATLSATKFNPAIKEFYDRLIAKGKPRKVAMVACMRKLLTILNAMVKNNEPWQEKLA

SEQ ID NO: 325067 - protein, 338 aa, unidentified
MYYAGIDLHKKTSYITTVDETGRIVSKANLVNHEDTIIKYFKDLKEKTKIVIESMSSWYWLYDLLTENGFGVVISNPLKTKAIASAKIKNDKLDSHMLAQLLRSGLISTVHVSSLETRKLKELLRHRNRLVRDATRVKNRIHVLLRKNNFQAPFSDLFGAQGLKYLLGVALPDYQRAQVDTYLALYGHLVQSIEPLTESIHALAKGDPMARLLMTIPGIGPIVAMFIIAEVEDISRFPSYRNLASYAGLVPSLDSSAGKDKRGRITKQGSVYLRTALIEAAQVIPRMKNCRLNLFFRKRIVRSGYQKAIVATAHKILQYAFYVLKNKTSYQEEYPICA

SEQ ID NO: 325068 - protein, 397 aa, unidentified
MQTTCGLDIASTSACACVRTVEGKIIKELNVPATREGEDQLMAVLPAGTRVFMESTGRYHLMWARRLAAAGYEVYVLNALLAKRLMGAGNALRQNKTDKIDARELAAMGHKHGRDLVNYRYQENAPKMGLRVLCQVRVNQRKMLTDSLKSASGLLATMLPEVELSLAQNRRLAAMFLKIDSLAKLRGLRPATLAEYACSKADELQAALKKPLSAVALFDALLPALQAQLRLIESLRDEQIKMAAQIREALIKAGRQDEVKLVETIPGYGPKTAPTVVACLPENLRSWGPKQKVARKIQAYFGFDPKLQESGAWKGRVRMSKRGVELARTALFQAATCALLHDPQMKAVYDRKRAEGKFYLICISHIMRLMLRRLVAVLYDRKPFVRITSLQPQIAQK

SEQ ID NO: 325069 - protein, 347 aa, unidentified
MLADQLDYIVGVDPHRDSHALAVVEVVSGVVVFESTVIANSDGYAEALKLVDRHASGRRAFAIEGTGSFGAGLTRFLTCRGERVLEVGRLRRERRSGGKTDALDAIRAARSVLSQRRPAIPRAGGDRQALQALVAAREGAVNAKRAGLCQLRDLLITTPEPLRSELRPLTRARLLQRLAATRPHGRQDAESRGSLLALRSIARRVLQLTAEERELAREIEALTRRLAPQLLDQPGVGPHAAAQLVLSWSHHGRISSEAAFARLAGTAPIPASSGQTIRYRLDRSGDRKLNRALHMILVTRKRTHPATIAYIERRLQEGKTRREANRCLKRYLARNLYRLLEHPPITT

SEQ ID NO: 325070 - protein, 346 aa, unidentified
MEHYVGLDVSLKQTSICVVNQTGSVVREGVVDSDPEAIAAFVRSNVPGVVRIGLETGPTSTWLWTELRRLSLPAICIDGRHAKAVLKMQINKSDRNDAAGIARIMQTGWFKEVCVKHLDSHAIKALLVSRALLVKIKRDIENQVRGLLKNLGLVIGRAKMNVFAMRAAELADARPELAAAVEPLLKAREAVGEQIADLDRKVMQLARNDAQVRRFMTAPGVGPITALCFLATIDDPTRFKKSRSVGAYVGLTTRRYASGEVDWTGRISKCGDKMLRSYLYEAANVLLTRVAKWSALKAWGVRLAKRSGLRKAKVAVARKLAVILHRMWIEGSEFKWSSKQAASQSA

SEQ ID NO: 325071 - protein, 354 aa, unidentified
MSVKYIGLDVHQATTVAAVRDHQGKLVMECILETTTASLLDFIRGLSGELHLTLEEGSWATWLHDVLEPHVHRLVVCDPRKNALLKQGNKSDKIDARRLSELLRADMLSPVYHGENGIRVLRELARSYLTLTEDTTRVMNRIRSVYRSRGIHCASMKIYHLRYRDEWLQQLREPGLRRRAQLLYQQLDQLQPLRLEARRQMLQESRRHPATRRLQQIPYVGSIRAALLIALMQTPHRFRTKRQLWAYSGLAVTTHSSADYRFVNGELQRTRNTTTVRGLNNNRNPQLKNLFKGMALSGSVRPGAWRDYYLTLLNKGMKPTLARLTLARKMAATTLTVWKRGERFDPKKLSLQVA

SEQ ID NO: 325072 - protein, 379 aa, unidentified
MYIVGIDIGKNHHEASIVSPEGKQIGRSLRFATTHKGADSLMSFIFKNIGNSPCVFGMEATGHYWYPIYSFLKAKGYTIYVINPIQSDSLRKMYIRQTKNDSIDSFLIAEVIRFGQFGTTSMADENILAMRQLCRYRDSVISSRTEIKLRIGTIMEQIFPEYEKQFSSLWVSTSMGILEKYLTPENIENTPIDELFEIIKDKSHNRLTRAKAISIKEAAADTFGIKIAQDAFSFQLKQLIDRMNFLDKQIEALDIEIMKYYEQFDCYLHTIPGIGIIGAATILAEIGDISRFKNSSALVAFAGIDPTVRQSGEFNSTHNHMSKRGSPYLRHAIFLAATTCSFHNSPLNAYYKKKRDQGKHHLTATGAVARKLTTIIYAV

SEQ ID NO: 325073 - protein, 341 aa, unidentified
MGEVITIGLDLAKSVFQAHGAGGSGEVVFRKKLRRGQVLTFFSGQPRCLVAMEACASAHYWAREIAALGHQTRLIAPAYVKPFVKRQKNDMADAEAICEAAQRPTMRFVTPKSAEAQAATTVFRARDLLVRQRTQMINALRGHLAEYGMVVLKGAENTPKLVELVRDTASDLPQEARSVLEVLAQMLQLVDERIAVLDTEIARRARTNPLIKRLMTIPGVGAISATALAALAPAPETFRRGRDFAAWIGLTPLQKSSGGKERLGKVSKKGERALRRLLIIGASSAAKAAARKGATTETWLGRMLLRKPRMLVSVALANKIARIAWALMAHGGTYRAPAAAV

SEQ ID NO: 325074 - protein, 401 aa, unidentified
MNAVGIDVSKGKSMVCVMRSFGEVVLEPFEVLHTAQNLNDLAGKLKDLDGETRVVLEATGNYHKPVAFVLHDAGLFVSVVNPVLIHDYDNNSLRRVKTDKKDAVKIANYTLDKWTRLRQYLPEDEARLALKNCYRQYQQAVAIRTMLKNNLISSLDLTFPDANKLFTSPAKNNGCEKWVDFIGDFWHSECVSSLSPDVFSKKYLKWCQKHGYYFTRSKSDEIYSCAVNATSLPKSPTSKLLIQQQVAQLKAVSKSVAAFQQEMLRLSQQLPEFDTVMEMYGVGPSLGPQLMAEIGDVRRFSSKKSLIAFAGIEPQPNDSGKVVGNDKGISKVGSAVLRRTLFLIMSVILQTQPQDEPVFQFMNKKRSEGKPYKVYMMASANKFLRIYYARVKAVMDSERSQ

SEQ ID NO: 325075 - protein, 343 aa, unidentified
MQAVTTIGLDIAKSVFQVHGVDAAGQVLIRRQLKRRAVLALFQKLPVCLVGIEACASSHYWSRELQALGHSVRLMPPAYVKPYVKRQKNDMADAEAICEAVARANMRFVPTKTPEQQSCLMLHRTRHLFIRQQTAVINSIRAHLAEFGIVAPVGRKGVTELLHIVADPSDKRVPEVARACLAALGNQLLSLKEQIVEFDRMIMVWHRSNETSKRLHYIPGVGPMLATALVASVADPRTFRSGRNFSAWIGLVPKQHSSGGKDRLGSISKQGDRYLRSLFVAGALAVIRYAKIHGTKHRPWLTALLARRPTKVAAIALANKLARMAWAMMAKGERYRQPVALAA

SEQ ID NO: 325076 - protein, 353 aa, unidentified
MKTYYVGMDVHRASIVIVVLNGAGKVVMQSVIETGAERVRGYLKQLRGKVYVTFEEGTQANWLHEVVRLLATEVVVCDPRHNKLLQSGNKNDRVDAQKLAELLRNGALKAVYHGDNGMRTLKEFVRSYDCLVSDTTRVMNRLKAIYRGRAIGCAGHDIYRQDLREQWLEKLTERGAKQRASCLYQQLAALKPLRHEAKRMMVKEARRQPAYPWLMSMPQFGSVSVAQLLAIVGTPHRFRSKRQFWTYIGLAVVTRTTADHEVVNGVLRRSKRPVSTRGLNRNHNHLLKRVFKNAAKGACHGGPFKTAYELRVAQGMVPSLARLTVARQLAATTLAVWKRGERFNPGRMKQQAA

SEQ ID NO: 325077 - protein, 397 aa, unidentified
MPAVWVGVDSGKRTHHCVVINQIGMVLLSRRVNNDEAELLELIGAVVDLADGDQVCWATDLNAGGAALLITLLAAHSQRLLYIPGRVVHHAAATYQGSGKTDAKDARIIADQARMRTDLQPVRDADQISVDLRMLTARRTDLVCDRVRAINRLRATLLEYFPALERAFDYSKNKAALTLLSEYQTPDRLRRLGATRLAAWLRKRGCRNSAAVAAAAVDAAHQQFTTLPAEPIGSTLVIRLAAEISAIDRDLVELDAQLTDRFRQHEAAEILLSVPGFGPVLAATFLANIGGNLNGFDTVDRLAAVAGLAPVPYDSGRISGNLHRPRRFNRRLLRTCYLAALSSLKNSPASRAFYDRKRREGKSHKQALIALARRRLNVIWALLRDRAHYQEPALAAA

SEQ ID NO: 325078 - protein, 357 aa, unidentified
MNYIGIDYHKRYSVVCIVNENDQILAEERIEHAFPERFAALFAEHAPCALAFEATMNWSWLYEVVERIPGVERIVMANPLYVRLIAAAQIKTDKIDARKLARLLRANLLPASHIPDRATRLRKEVLRQRTFWVRERTKVRNRIHRLLGRQHDLAMPQVSDLFGRKGIAALKKVVLESPEDLLLRQLLETHSFLESQIAELNKKIALEGKNDPATELLETIPGLGPILGNTIATEIDGIERFHGASEQLCAYAGTIPSTSSSGDKTYHGRLVQGCNKWLRWALVEASWVAIGCDPYFGGLYRQHRARGKKANTAIMIVARRMCQIVFRVLHEKRPFEVRTWRMISSGCSQLGRTERPA

SEQ ID NO: 325079 - protein, 346 aa, unidentified
MALAKDIDYVIGVDTHKDSHTAAVVNVTGGVISALDVTATEVGYRRLLALANRHAIGRRAWAVEGTGSYGSGLAAFLAARGERVLEVERPRRPRQKPGKSDQLDAIAAAREALADDKLAMPRMRGAREALRVLLATREGALKARTQALCQLHALVVGAPELLRSRLRRLSTEALVTRCAQLRRQPDQCLELQITTQALRSVARRAQALEIEAANCEKELGRLVDELAPALVNQPGIGPFCAAQIICAWSHHGRLRSEAAFAALAGVAPIPASSGQVIRHRLNRGGDRQLNRALHTVVMWRMNFHAESKAYTLRRRAEGKSDREIRRCLKRHLARRIFRLLKGLDTL

SEQ ID NO: 325080 - protein, 396 aa, unidentified
MISVGIDVSKGKSTVCILKPYGEIVSKPFNITHTQKDLSELSSMLFRLNDEVKIVMEATGIYHLPVLTYLQEKGFFVSVINPYLMKSYRNESLRKAKTDKIDSRIIANYGIDHWFKMKEFQTSGEIYEELKLLGQQYRHYMKLHLLSLAELTHLLDLTMPGIKNLLASWNETNRKDKRSDFVERFWHYDVITSMSEQEFTEEYILWAKEKKYVPSQEKAKVIYTLAQESIPTLPSETSSVKILVTEAVRVLKEVDATLGLILSRMQEIAKTLPEYSVVREMGGVGNTLAPKLIAEIGDVRRFRNGKALVAFAGIDPPPYESGQFVGCNRKISKRGSASLRKVGYETMRSLKMRSRPEDLVYRYVVKKESEGKSKKNIEISRKIYRACLKNHFCNTF

SEQ ID NO: 325081 - protein, 386 aa, unidentified
MSQPTNILLRAINYDHTLVLAIELSNKSWVLAAQVPGLPQTKAQRTIEPNKNALLAAIDGYRARAAAVGYAVDRVITTYEAGWSGFWLARWLVAQGMEVHVVQPSSVPVDRRLRRAKSDGIDAELLLRTLLAWLRGEPRVCSMAPIPDEADEDARRSVRERTELLSDRVGLTNRIGAVLATLGAGDYNPLLQSRRRRLTELRTGLGDPIPPNALAKIERLLARLELVLAQIAELERERDEVAAADAPDRAGKMIQQLASLRGIGVQSATVLVREAFVRHFSNGKALGSYAGLTSTPYSSGGIDREQGIGKAGNRRLRTVMIELAWLWQRYQPGAAQVAWFRDRVGSTGRRVRKVMVVALARKLLIALWRFVIDGVVPEGAVMKPSI

SEQ ID NO: 325082 - protein, 417 aa, unidentified
MSKIIERCAGIDIGKRFLLYCVVTGAAHEESRSQTLRFDTTVPALEQMSEWLRRERVTHVVMESTGSYWVPVFNILEGHFTVVLANPEEVKNRKGHKTDRKDAKHLADLLHHDHIRASYIPPKAVRELRDLTRRRVQLMQDCTRERNRVQKLLEHANVKIAGVLSDVFGVSGQRMLVALLEGESTPDAIAELALGQAKRKIPQLTEALVGHRMTEHERFLIRSCLGHLACLEEELEDLDAEIMRRMRMPPFQNAFALVQTLRGIGELSAAAILAETGTDVASFPTAEQMASWTGLCPGNRESAGIQKGSHTTHGNAYLRTALVQCAWSAARKQGSVFKAQFQRFVKRLGPKRAIVAVAHHMLIVLDCTLRAGVSFRGAEGAPHQRRRQRRAHHHLRCLRRLGVTVQVPSVDLSGKAP

SEQ ID NO: 325083 - protein, 345 aa, unidentified
MKITTVGIDLAKNVFQVHGTDERGRTVLRKQLRRAQVAIFFGNLPPCLIGMEACASAHYWGRTLQRFGHTVRLMASQFVKPYLKTNKNDEADAEAICEAVGRPSMRFVPIKSIEQQAILSVHRVRQGFVKARTAQANQIRGLLGEFGLVIPQGIWNVTKRVPELLEDASNELPVPFRHLIDRLTEHLKELDRQVKDFEKQIIAWHRSSELSRKLENIPGIGPLAASALVASIADANSFDNGRQVSAWLGLVPRQHSSGGKSTLLGMSKRGNPYLRTLLIHGARSAILAAQRKTENTNIWLANLLARRHPNIAAVALANKNVRTVWAMLAYGREFKADYVPVRMAA

SEQ ID NO: 325084 - protein, 368 aa, unidentified
MGESEFPNSKTGYLKLTKWVKNTSELGRSFDSSLVLFCGEHTGTCSIGLCEYLYAKGMKIWLESALKIKYGSGLKRIKDDKADAEMIAYYAKRFYEPGSCALFEPDSADLKTLRTLYQFRNRVVCDRVAIGNRISSGAFDCSTLVRNRMVKHHKEAQKDEKDIEKEMVRLMETSEELASNYQILISFKGIGPITAAALIIYTSNFKKFDNPRKFACYCGIAPFGKQSGTSINTKPHVSLFAHIGIKAAMVQACKSAMQHNAVIKAYAQRLYAKGKHEGIVMNNVKNKVMHIIFKMIQTQTLWEQEYQQKHMKECKAIPGKNGIGATEAAPIINATLKTSSSVVECTFLEEHSFQKNCKKTSSFSCVET

SEQ ID NO: 325085 - protein, 350 aa, unidentified
MSIYVGMDVHRKRSQVAMVDDAGVQQRNRNVPNDPAQLVPILGALPPGTPVAFEAAYGWGWLVELLEELELEPHLVHPSRCKAIASARLKDDKVDARTLAQLLRADLLPEAWIAPQQVRDLRALLRHRASLVRLSTAAKNRIHAVLADRGIQQQTGLWTGIGRVWLAGLELPPTPRAIVEDYLALLDGLAEPIAHLEHQIHALAKPDPRVQALMALPGVGRLTAMTLVAEIGDIARFPTARKLCAWAGLTPAVRNSDRKVRHGHITKQGSPWVRWILQEAAQTAKRSPMFAPAYAQLARRRGKQIATVAIAHRLLARSFHILNQLEAATTGEGQTAGCARNNRMRLQHGR

SEQ ID NO: 325086 - protein, 395 aa, unidentified
MFIVGIDVAKRSHEVCMITPDGQTVQRPFSIRNNCTGYNLMLEKIRKHTNIKSQIVFAMESTAHYWLALFTRLRKDGYHVILLNPIQTSAMRDMFIRKIKTDAKDSFIIAELIRFGRYAESNVAQDRLLALKELCRNRFYLVDMAGDLKRKLIALIDRVFPEYEAQFDTIFCKSSVALLKKYPTPQKLSNAHLDKLTELLWNSSNGHFGEWKARELKELARNSFGVEDCDGAYSTLILLMLDQIQSLSGKADALEKEISRLFQSFDTTVTTIPGVGPIIGAVILSEVGDISRFSSADKLAAYIGVDPSVNQSGEFQAVHAHMSKRGSPYLRRCIWMASQVAVQRDPMFRAYYEKKAAEWLKYMTIIGHVTRKMTAVVFAILRDHKVYEPVLPTAA

SEQ ID NO: 325087 - protein, 415 aa, unidentified
MCKVIMVGCDLHDATTVLKVADGPDATVRKGFATSNRLAMIEWIKDFASQRGASRIVFAYEASGQGFGLYDDLTDAGIECHVLAPTHLPHTTHSRKNKTDDKDALMILDEVRAHVLAGRTLPDVWVPNHQTRDDREIVRLRLEVATQRTRLKNQIRNLAKRSRLAFPDDFTSSGDWSKRSVAWLREVAAGTTGALREGVRTALASLMELYQAMSAQIQALDQAIKRLSRTERYARSSRKLKLLSGVGTLTAMVFLTELGDLARFANRRQLAAYLGLAPSAFESGERDDRKGHITKQGPPRVRHVLCQAAWAALRVSPEWKAKYDRIRRGSKSRSRIAIVAIMRQLGVEMWQTARSPELDAMLDERDALASQKTKKTTSARAPQKGAAPSTPPSPRPRRGEAEATATRKGLVRHPE

SEQ ID NO: 325088 - protein, 412 aa, unidentified
MEIVFPRCCGLDVHKETVVACLRLQVPGEEVHKEIRTFSTMTDELLVLYDWLYAHGVTHVAMESTGVYWKPIFNLLESQFEVLLVNAAHIKAVPGRKTDVKDCEWIADLLAHGLLRGSFIPPVPIRDLRDLTRLRKSLIDDRTRIINRLQKLLESANIKLASVVTDVMGASARAMLSALLEGVIEPEALADLARGRLRQKLPELRRALEGRFRSHHRFLLEQLLSHIDFLDESIARISEEVVQRIVPFQRQVELLCTIPGISRRTAEVLISEIGTDMTRFPTAANLASWAGMCPGNHESAGKRYSGRTRKGNSWLRRALLEAAWAAARSKNCYLFSQYSRLAARRGKKKAAIAVAHSLLVIAYHVLKNQTPYRDLGVDFLDNLNLKRLQRYHVRRLENLGFKVTIEPLQEAA

SEQ ID NO: 325089 - protein, 343 aa, unidentified
MAEVSTIGLDIAKSVFQVHGVDGTGAVVMRKRIGRSKVLEFFASLSPCLVGLEACPSAHYWSRELQALGHTVKLMPPSYVKAYLKRSKNDANDAAAICEAVTRPSMRFVPIKTQEQQTGLMLHRTRQLLVRQRTMLSNAIRGHMAELGIISAKGRNGTAELLQIVGDVADDRIPPVARFCLDLLARQYLTLNAEVYAVDKRIHAWHRACEESRRLEEIPGVGPIVATALVAEIGDWRAFRSGRNLAAWIGLVPKQHSTGGKERLGSITKQGNRYLRWLLVTGAMAVIRYARAHGTKRPWLTRIMDRRPAKVAAVALANKIARMAWAIMVRAERYKEPKLLLAA

SEQ ID NO: 325090 - protein, 386 aa, unidentified
MRVDDLSRCQIAFDQDSSLVVVVEMSESSWLAAGMLPGVGRQPLKKLEPDPAALLRLLERWRAEAIKTGRTIGRIALAYEAGRDGFWLARWLQARGIEVHVIHSTSVAVSREHRRAKTDRLDTAMLMRVFLGWLRGERGHCGMVAIPTLPDEDAKRPSRERESLVGERTRIVNRMKSALARLGIRGFKPGLRKAPKRLEALRTPEDSAIPPNMLDEIRRDMARLAVVRAQIDEIEQARLERLEQAPEVGPHAMVRLLARIVGVGVETADMLVQEVLSRNLRDRRAVARYAGLTGSPDESGSKRREKGLAKTGNARVRRGLIQLAWRFLMFQKNTALAQWYRARTEGAKGARKTTMIVALARKLLIALWRMVTTGILPEGIVLRPAA

SEQ ID NO: 325091 - protein, 384 aa, unidentified
MRKSTKVVALEQHMESITVAVAEAGRQPPELYGDIPSTAEAVRKLAHRLDEGGTRPLRFCYEAGPCGYGLYRQLAQMGYECAVVAPSLIPRRPGERIKTDRRDALTLARLHRSGDLVAVWVPDEEQEVIRDLVRCREDFKHAERRAKQRANAFLLRHGRVYPGRSRWTKTHATWLQGQAFDHPVQQLVFQEYVDAVGEAMRMVEALEKDMAQALETWSLAPVVRGEMALRGVDLVVAMTLVAELGDVTRFDSPVQLMAYVGEVPSEHSTGRSRRQGAITKTGNAHVRRVLTEAAWCYRLPARKTAHLQRRAQQTSPEVQAIAWKAQKRLCGRYRHLTARGKPSGKVITAVAREMLGFIWAIAQETMPRKAAESETGHTDNANLA

SEQ ID NO: 325092 - protein, 342 aa, unidentified
MSYLGVDLHTNSFTVCRRTKQGRNSIRTFQISRISDFRKTLRKRDLLAVEATGNTAWFVSHIRDRVKKVIAVNPFQFEVIRRSVKKTDKNDAKTLALFLSKDMLPEARMKTKENAQLYSLATTRDKLVKQRTALINKVHNILNSYGIKFKKESLGSEKGLKSVWAYDWDVIVRIELEVLVEQIRSLNKSIKTLDKEMIDHGQKLKGHESLTSIKGIAGRSATVLLSVIGDVNDFADENKLDAYFGIVPRVSDSNETVRHGRITKHGSKLGRTTLVQCTLVAKRYSPYLNRYYERIKRRRGSGKAIIATARKFLGIIYNTLKNDWVFEDFPNFVLASSCVKKQ

SEQ ID NO: 325093 - protein, 345 aa, unidentified
MTTMNYIGLDVHKKTISYCVKDVSGRIQQEGKIGSTRRELDCWMKTLPQPWTVAMEATIFSGWIYDHLLPHATQIKVAHPLMLRAIAAAKKKNDQIDASKLADCLRCDFLPECHMMPRAIRDRRRTLRYRHLLVRQMVQMKNRVSGLLMETGVEYNKQRLHKVSYFRELLSANGEVPPSIRPLLKLSRETIERCQKTEYALVSSLQRDPVLADRIKRLRTVPGVGPITALTWALEIGDVSRFGSIKQAISYCGLCGDERSSADKAMRMPLSKQRNKHIQRALVEAAKLAPRQNHEMAVIYDQERQKGNSNRATLAVARKMVAYLLAVDRQQRDFVPAEERRTTAA

SEQ ID NO: 325094 - protein, 338 aa, unidentified
MNQISRIGMDTSKHFFQLHGVNAAEIPVLRKKLRRKEMLAFFEKLAPTVIAIEACGSSHHWARLLQSLGHTVKLIAPQLVKPYVKRGKNDAADAEALCEAMSRPTMRFVPVKTAEQQAVLMLVSARDRLIRNRTQLANAIRGHAAEFGLTAAKGMAHLIPLLDRIRADESLPALSRELFATQAEECVQLQAQIDKIDAKLTVWYRADECSRRLVKIPGVGPIGAVLLRTKAPDPKLFQSGRQFAAWIGLTPKDHSTAGKVRLGVITRAGDEALRSVLVVGATAVIQHALRSGRVSPWLVELLKRKSPKLAAVALANKTARIAWKMMFTGEAYSAKVAA

SEQ ID NO: 325095 - protein, 398 aa, unidentified
MDSHLCVGIDIGYRNHRVGIADSHGQILEEFDIPHATEGFDHFFRRVEHHREKLDLPVAVAMEGFNGYGRPLDRLIQQKGYRLFNVNNLKLARYKEIFPGAAKTDPIDTRKILELFRLKDQLPMAKNALQEVAKVPAVNEKLKRLSRRRRHLVEEKIRVQNRFQADLQAVCPELLAITNGADNLWFLRLLTFRDDLRQLARLRRATVLQIPSVGQKYARVIQDWQRKATFSSEVEYVGPMIIQDAKRILELLKQIYVLDEAMAELAEQSGIARRLSSIPGFGKTCIAELAGEIGTLNRFAGEASLALYLGMSPLTFQSGQVCRTRSPRQVNRRAKAAMMTAVARHARYVLESTAYYDRKRAQGKTHNQAIRALGRHMVRIIWSMLQHQRDYELRGDIP

SEQ ID NO: 325096 - protein, 343 aa, unidentified
MNTSVIGIDTSKRVFHIWGVDERGARTFKRMEYRESFLEAMVQMPRCVVAMEACGGSHHWGRKLRKLGFTVKLIAPQYVKPYVKTNKNDWADAEAICEAAQRPGMRFTDVREVAQQELQHLHRLRELAIKQTTALGNNIRGTLLEYGIAIPQGKKGMNALHERLEKEVEFSSLMKELITRQLERYWQFVEEVDWYDKKLNAIAKTHPVCQRLMQIKAVGPIIATAVLGKVFDPARFKNGRAFAASLGIVPRQEGSGGKTKLLGISKRGDSYLRKQLIHGARSILYRCESQTDPMSRWGTELKKRRGWNRAAVAVANKTARIIWHILRYESDYDVSKAAVPLTA

SEQ ID NO: 325097 - protein, 399 aa, unidentified
MSAHAGFDIAKDFHWLAVTDDRGRQLSSRRVDNDPEAIDQAISDLTAVAAEHGGVTVGVDVMGGVAALVTAMLLAAGLRVVHVPGLAVNRARRGTRGGENKSDPRDAKVIAEQVMLRDDLRAVQVPDEISVELRLLVSHRTVLVKEATARINRLRDLLASIHPGLEKVTDPTNKSSLILLTHYVTPSEIRRAGTSRIADYLRKRGVKRPTAEALAQAAVTSARAQSTALAGECRTAELIRELAGDLLAGKNRLLALQAEIEELVGVHPDGALIRSLPGMGATLTAELIAAVGDIRRFPSGDALAAASGLAPVLTQSGKIRYSRSATGGDKALKRIFYQSAFCAMPNHPPSRAFYDRKRAEGKRHHQALIALARRRVNVLYAILRDRRPYQDRPQLRLVA

SEQ ID NO: 325098 - protein, 354 aa, unidentified
MSQNPNAAIAIVGIDIGKNAFHVIGLDQRGAIVLRQKWSRGQVETRFANMPPCLIGMEACVGAHHLSRKLKALGHDARLMPARYVRPYSKGQKNDFRDAEAIAEAVQRPTMKFVATKTADQLDLQALHRVRERLVSQRTGIINQIRAFLLERGVAVRQGLRFLRVELPRILATPPDVLSPRMVRIIEELAGDWRRLDERVESLSGEIEAVARQDAGCERLMSVPGVGPIISSAMVAAVGTGDVFSKGRDFAAWLGLVPKQISTGDRTILGKISKRGNRYLRVLFVQAAWVVLIKPKSWERHGLKSWIEAAKKRLHPNVLAIALANKLARIAWGVLARGRNFEARTNTNATVQAA

SEQ ID NO: 325099 - protein, 389 aa, unidentified
MSDRTSESDRIVIGVDPHKASWTAAAVGPGLRPLATIRVPVDPQGYRDLRRFAARWPAAVWAIEGAGGLGAPLATRLSADGIAAVDVPAKLATRVRLLSTGHGRKNDDADATSVAVAAQSADGLRTVTVDEAVTALRALVEHRDDVVKTRTQTVNRLHALLTQLLPAGAPRQLTADTATQLLRPVRPRSIAARTLRRLAAELITEIRHLDRRISVANTEITHAVQASRSTLTELRGIGHLNAGKILARVGDVHRFRSAAAFASYTGTAPIEVSSGDVVRHRLSRAGDRQLNCCLHTMAITQLQRDCPGRTYYLRKRADGKTHKEALRCLKRRLSDVVYRCLIRDADQQNGAGPGGHQGATTNSSAAGSTPTTGSSDKSLPEPATTDPTT

SEQ ID NO: 325100 - protein, 457 aa, unidentified
MRKPQVIPDEDHQVVYERVAAVDVAKASGVACLRVPDPDRPGRFVNQLWHDVPAVRARIAELGRELLAARVQMVTLESTSDYWRIWFYVLESIGLPVQLVSASQAKNLKGRPKTDRLDAMWLARLTQHGMLRPCFVPPAAIRRLRDFTRARTDLVRERTRCLQRLEKLLEDAMIKITSVISTGLTAQSAVAMVQALIGGERDPRVLADLAIGRLRGKRDQLAEALDGLFDSHHGVIARMLLDQAAFLDEQIQIMEQQAIAALAAIPQSWGVDATGETGPLAGTSADSPVLAAAHRLAEIPGVSLWQAVVIIAETGLDMSLFPDADHLVSWLGLCRTADQSGPRHGKGKKKKGNSYARAAAGQAAIGAAGTATFLGERYARIARRRGKAIAQVAVARSIMTIVWHLLADPQARYRDLGPGHYASRTDRNKKIRGHIRQLQALGLTITITSPAADHPAA

SEQ ID NO: 325101 - protein, 378 aa, unidentified
MNRIIKIGMDVHTTNYTLCIFEPSFEHDGTVHCITQVKPEVKNIIHVIETFKKKHENEELNIVCGYEAGCLGYSLYHELKEKGIECVILAPTTMKTEKGGRKLKNDYRDAKMIAECLAYGGYSAVHVPTELDNSVKEFIRMRDDIKENLKSIKQQIIAFLTRNGKQFNGKSYWTKKHIDWINTISFSEPLLQDTLKEYMIEYNHLCDRVETLDRQIEEISVKEEYVEKVQQLQCLIGIKTHTALSLIVETSDFNRFKKGNMYSAYLGLIPGDDSSGGHEDKLGITKAGNNHLRRLLVEAAQGYTRGRVGFKSKDLKSRQEKCSSEVVAYADRANERLRRKYYRMTLRGKKFNVAKTAIARELACFVWGIMTDHIDLCS

SEQ ID NO: 325102 - protein, 409 aa, unidentified
MKLFVGLDVSSQDAKVCFLNGDGDRLQAFTITNDLPGAITLKEKILDTVSRSTCKTIKIGLESTSIYSYHPAMFLHNDKELRTYGSQVFMINPKQIANFKKSYSEMDKTDAIDAFIIADYVRFGRHTMSIVKEEQYIALQQLTRSRYQLVHALTKEKQHFLQHLSMKCSQFSQDVNSSVFGNAMMELFLEQFSLEDLIQMPLQELALFLQEKGRNRFGNPEEVAKSIQKAVKGSYRLSKVVEDSIDLLLSTSIRIMRTYQTQIKEIEKGIESLMSTLPQTLESIPGIGPVFAAGIVAEIGQIERFTDETKIAKYAGLFWKKYQSGRFTAENTSLSRAGNQYLRYYLVEAANSVRRNVPEYRDSYAKKAAEVPKHKHKRALVLTARKLVRLVDALLHNNQIYAFGRSADR

SEQ ID NO: 325103 - protein, 409 aa, unidentified
MRYYVGVDWADQAHAVWVVDESGTKITGRTVPHTAAGFSEWGRELDEWRAQGIERWAAIERPDGRVVDFLLDHGVVVYPVNPKALDRARDRFRQSGAKSDPFDARVLADVLRTDHRHLQALQPSSDAAQELKLLTEDCERHIRQQTRLVNQLTATLKAYYPRALEVAELTTALAREFLQAYPTPEALTALTQRQWQRWTRGRRLSEARIGALWAVLQQPQLPVPAHVVRAKARLMQSLVEQLTPVVATVAQYRTAIDDFFAHMPAAQWARTLPIGKHGITAPTLWARLGDAPGRWESFRHLQAQAGAVPVTKRSGKQRVVHFRFACDKSLRHVVDQVAFLSLLSSEWARAYYDQQRARGHAHHQALRALGAKWLKIIFVMWHRQVPYDEQYHLATMTRQQLRQRQPQIA

SEQ ID NO: 325104 - protein, 497 aa, unidentified
MNNFAAAASKKTFSKPLRPGKVPPGRIAPRRSRSDVPKPARLQLRTPVGAAAVPPTSERTEPCEGPYTRMTPGRPTMPRKEPMKTYSELSHFGGLDWAKHHHDVCVLDPGGQIVERLRFEHSGPGWEKFRQQIQKYPALGIAIETSQGAVVEQLLGSGVTVYPIHPKAAKAYRQRQAPSGSKDDELDSWSLADALRMDGGHWRALSPQDPMIAELRLLCRDEEELIEQRTALVNQLQAALGEYYPAALEAFADWTVPYTWEFIARFPTPQALAGASAHRRRVFLHTHKLWRPGTAEARLEIFARADQFCGGAAVTRAKSRLALSLVKLLQALQKQLDEYRAAIERLFAEHPDHDVFGSLPGVGEKLGPRLLGSLGADRGQYPDVQGLQCVAGSAPVSFKSGQMRRVKIRWHCDRFLRHTVHLWANCSLKTCAWAAAYYKAKREAGMSHACALRCLAQRWLKILWKMWQTHTLYDPEYHARNQQRHGSWVLQLNPKKA

SEQ ID NO: 325105 - protein, 328 aa, unidentified
MVCATVCKEGITKMESIIQIAGIDVSKDKLDVHILASNLDFTVSRDRRGLRELGCRLRKAGVSDVALEASGDYERIVMEALEAAGFVVHQLNPARVRHFGKAMGILAKTDPIDARLTALYCRHFPETGLARRPEQARKIGEFLSVRAMVLRAIGEARNRLEHLREASLRALVEEDLARAKARLKTVEAGIAKVIAEDEALQRKADLVRSMIGAGPVLAATLLARVPELGSVDRQQAARLCGVAPADRKSGKSRRQARIDGGRDQLRPILHMVALTAMRSNPTIAAFAKRLTANGKSKRLVIAACSRKIITILNAMLRDQTPWQNPKLA

SEQ ID NO: 325106 - protein, 345 aa, unidentified
MHIASIGIDLGKTTFHLVALGEGSKVVVRKKFSRTQLLAYTANLPCSLIGLEACAGAHFMGAALREQGHEVRLIPAQLVKPYRKSNKNDFIDGEAIAEAVTKQNMRFVQIKTQEQLDVQAMHRVRDRLVQRRTALINEIRGFLLERGIPFPAQPIHLRKNLPTGVEDAEQNLSPRLRWLLDRLWQEWKQTGIDIQTVTDEIERISNEDERCQRLRQIPGFGPLVSTATVAAIGNGAAFRRGRDFAAWVGVVPRQYSTGGKQRLFGMSKRGNIYLRRMLIHGARAVLFRIKYDTAGLGQWVHRLSQRAPRNKVVVAIANKLARIAGAVLSSGRDYRHQPLPQRAAA

SEQ ID NO: 325107 - protein, 315 aa, unidentified
MTKQRPSVNVGIDVGKTTLDVYLLERDRMFNVPNEEHAIAALLNRLARYRLERIVIEATGRFEQPFVRAAIAKGLPVVVVSPLKIRRFAGAIGQLAKTDEIDARLIARFASTLKPAAHPTPDAKAQLIKDLVVRRRQLTSLRTMEKNRRQIMPEDLTPSIDRIIALLDEELSGLQQLIDHAVEQHAAWRHKRDLLISMPGIGLSVASTLIGDLPELGSLNRRQIAALTGVAPYNRDSGSLRGKRRIRGGRAHSRTALFLSAMAAIRFNPHIKRFYERLLSAGKHKKVALIACIRKIITALNAMLRDNTPWNAATT

SEQ ID NO: 325108 - protein, 317 aa, unidentified
MDVETKADRFVGIDVSKARVDVHVRPDGIAFGCATDPEGLGALGARLKPLLPCLVVLEASGGYEGAVAAALVEAGLPVAIVNPRQVRKFAGAIGRLAKTDAIDAAVIAHFAQAVRPPARPLPDDLSVRLAELMARRRQLVVMINAEKQRLAKARDPIAQSSFKAVLKRLEAERARIDKAIDRLIEVSPLWCAKQDLLKSVPGIGDVVARTLIAELPELGRVDRHQIAALAGVAPINRDSGRYRGKRKIQGGRVEVRAPLYMACLVAIQHNPVLKSFYRRLREAGKPARLALVAAMRKLLILLNAILRDQRPWAHAQT

SEQ ID NO: 325109 - protein, 438 aa, unidentified
MVKRSAWLERGAALISPGIRHARHGPLASEQGKGQVVAAVMIGVDPHKGSHTAVVIDKAEVVLGQIRVHASAVQAQRLLAWAAAWPERTWAVEGARGIGYLLAQQLVAAGEVVLDVQPKLGGRVRLLATGKTNKNDPNDALSVAIAALRSTAGTPVRPDDHATVLKVWSKRHRDLSRARNQVVCRLHAVLCDLIPGGAVKAIRAAAAARVLKQTRPSGAVQQARHELAGEFLADLRRIDAQLRETRKKLATAVRASGTTVTEVFGVGPAIAATVIGDVRDISRFPGKDHFAAYNGTAPVEVSSGNRVIYRLSLRGNRRLNHAVHMAAVTQIRYQHSPGRAYYDKKIAEGKTPKEACRALKRKISDAIYRHLKADAARAARSVGPGGHPGNGSSASVTGLHPEHRLFGQATPGPAPTLRSRPAASKAASRARRAKSAGI

SEQ ID NO: 325110 - protein, 350 aa, unidentified
MNKITTLGIDLAKTVFQLHGVDWAGNVVLCREVRRTQLMKTIAQLEPCLIGIEACGGANYWARRFAEFGHQVKMMSPQFVKPYRKSDKNDRNDAEAICEAVTRPSMRFVAVKSVEQQDMLTMHRVREGLMKERIALINRIRGSLTEYGIVIAKHVCNLRRTLPGILEDADNELTTIARRLFSDLYEELGAREQRLAQLEQSIRALGSQHDVVRRLETVPGIGYLSATALYGAVGDAKHYKNGRQLAAWMGLVPRQCSSGGKQRLLGITKRGDKYLRKLLVHGARSIATHAERTPKSRDRWLNELRERRGKPRSYVAQANKTARIAWAIMARGEVYRAPAATLDTRVAVAA

SEQ ID NO: 325111 - protein, 316 aa, unidentified
MVPSPLFVGIDVAKDTLDAAVRPTAETWTVTNDEAGIAALVAQVSALAPTLVVLEATGGLHGPLTAALATAGLPVVVVNPRQVRAFAHATGVLAKTDRIDARVLAHFADALRPTPRPLPDAATQELRAVLLRRRQLVEMLSAERTRLATAPRRIHAAIRQHLTWLERHLTALDAELTQLIQASPLWRAKDDILRSIPGVGPVLAQTMLAQVPELGTLGHKQIAALIGVAPFNRDSGTLRGRRMVCGGRAEVRAVLYMGTLVATRHNSVIKAFYARLCAAGKVKKVALTACMRKLLTIMNAMVRDLKPWQPREVAIA

SEQ ID NO: 325112 - protein, 341 aa, unidentified
MKQEISVLGIDIAKRVFHAVGMENRGPVVYRKRVSRHDLMPFRAKLPPVRIGIEACGGAHYWARRFWAYGHEVQLMAPQCVKPYVKSNKNDSRDAEAIAEAVTRPTRRFVPAKDVDQQDIQALHRVRERLIGERTALVNAVHGLMHEYGMVMPNGVAKFRQAVVGKLEAEKDKLTPLRQEMLWKLVEEFAALEKQLAYDQEQLEALATTHPECQRLMTIPGIGPLTATALVAAVSDASAFKNGRQFAAWLGLVPRQYSTGGQARLLGIRKRGDSYLRKRLIHGARATLRWVGRTTDRRSQWMRQLVERRGKNRTAVAIANKNARIVWALLTSHQVYEPAKG

SEQ ID NO: 325113 - protein, 324 aa, unidentified
MEQLPTSSRFVGIDVSKDRLDVHVRPSGRAFAVARNDKGLALLIGDLRDLAPDLIVLEATGGFEITVAAALAAAGLPLAVVNPRQIRDFARATGRLAKTDALDAEVIALFAERIRPEPRPIADADSQALGELVARRRQVVEMIGMESNRLRQARTPRVQRTISATLKTLQAQLAELDHEINDTVRGSPVWRGTDDLLTSVPGVGDVTARTLIADLPELGQLDRRRIAALVGLAPVNRDSGQMRQASHRRRPDRRSQCPLYGNPVRGPLEPRHQAALRKSRRTRTTQEGRSRRLHAPSPRHPQCHHPDENLMAKRLTGKTVAHFC

SEQ ID NO: 325114 - protein, 375 aa, unidentified
MTASLQMKEYESAVVLYMAMELSNKTWRLAFGDGSRMRQVSIEAGEIVALKEQVAKAKEKWGLAADVSVVSCYEAGRDGFWLHRQLAALGIENHVVDAASIEVSRRARRAKTDRLDAQALLEKLIRYARGERRVWRVVRVPPPEWEDLRQLSREREQLLSERTRHRNRLSSKLVAQGLRVPIGKAFLQRLEEVRLFNGRPLPAHLKAGLVREWERLQLVQEQVKALEGHMRALIEASGALNAVRALMLFRGVGWVGAWTLVVEILGWREIANRGELGGLSGLAPSPYNSGQSVREQGISKAGNRRVRKLNIQLAWLWLRYQPNSKHTLWFKERFGGGSKRQRRIGIVGLARRLLIDLWRFAESGVVPQGAQLKVG

SEQ ID NO: 325115 - protein, 310 aa, unidentified
MDAIVVGIDVSKDRLDIHVRPSGESFSVERKAEGLDALLARLSPLQPHAVAVEATGGFETVVAAALGAAGLPVIVVNPAQVRDFAKALGKRAKTDPIDAAVIAHFVEATAPEIRPLPDEATRLLADLIARRRQIIQMIVAERQRERRTSVPRLKKSITRLLKALEKELTAVDGDIDDAVRGSPVWREKEDLLKSVPGIGNTIARTLIAELPELGTLNRRQIASLAGLAPYTRQSGQWRGRSFIGGGRASVRSALFLGALVAARFNPLLKAFHQRLLAAGKPKKVALIAVARKLLTILNAMLRDKKQWQTP

SEQ ID NO: 325116 - protein, 382 aa, unidentified
MAGTEPHAWGTGLMDDITYVGLDVHKATVCVTVAESGRGGEIRQVGVFENRPEILCKMAARLGKGGRRLSFCYEGGPCGYGLHRLLTGCGHSCIVVAPSLIPIKSGDRVKTDRRDAMMLAKLHRAGELTAIWIPDAAHEAIRDLVRARATAGQVLSKARQHLQGFLLRHDRIYRGVRAWTLAYRRWLTTVRFEHPAQQIVLQDYIHAVEDAEARRDRLTRQIEEMLPSWSMAPVVTALQAMRGVALVVAVTVVAEVGDFRRFANARQLMAYLGLVPSEHSSGSTIRRGGITKAGNALARRVLIEGAWTYRMTARVSRKLHDRLEPLSAAIRDIAWKAQVRLCARYRRLAAAGKPKVVVTTAIAREMVGFIWAIARIAQPALA

SEQ ID NO: 325117 - protein, 345 aa, unidentified
MEAYAGIDLHSSSNFTAVIDETDRKIYGKQLPNKIDAVLSALRPFKENLKGVVVESTYNWYWLLDGLKEHGYRTHLANPSAIKQYEGLKHTDDRWDSFWLAHMLRLNILPEGYIYPKEERPVRDLLRRRLLFVRHRTAHILSLQSMITRNLGTKMSCRAIKRFSGEDAESLFDSPYLVLAAKNSISTIGFLTERIKKIEREVKLILDFKKEFKCLLTIPGIGLILGLTIMMEVGDIRRFAKVGDYSSYCRCVRSERLSSGKKKGENNKRNGNRYLAWAYVEAANFAVRFCPDAQRFYQRKMARSNRIVAIKALSNKLARASYYIIRDQVPYNGNKLFKQSARVQQ

SEQ ID NO: 325118 - protein, 341 aa, unidentified
MKNVSTIGLDLAKHVFQAHGADKSGAVVFRKKLRRQQVLPFFATLPPCTVAMEACAGSHYWGREICKLGHSIKLIAPAYVKPFVKRQKNDASDAEAISEAAQRPTMRFVSVKSEEAQAAAIVFRTRDLLVRQRTQTINALRGHLAEFGMIIAKGPQHLSKLIAMVGDPTSHLPEAARSILALLVEQLRALEERVTRLDREIAGRAKEDKVARRLMTIPGIGVVTAVALAALAPSPETFKRGRDFAAWLGLTPLQRSTGGKERLGRTSRMGERTLRRLLIIGASSVAAWTARKGALAGSWLDRMLRRKPPMLVRVALANKMARVAWALLANGGVYRTPIVAA

SEQ ID NO: 325119 - protein, 340 aa, unidentified
MKIYAGIDLHSNNSYVVLIDESDNIIYQKRLGNDLAIILKELKPYQLQVEGIVVESTYNWYWLVDGLKEAGYRVHLANTVEIKQYTGLKHTNDKTDAIWLARLLKLGILKEGYIYPKEQRGLRELLRKRLLLVRQQTMSVLGVQGRINRYENCKLTARKLKTSKANEEEILSYIHDEHVRLAVQGQLKILQCIVDQLEALERIILKHLQENVDFKRLKAIPGIGSILAMTILLETGEINRFKDPGNYSSYCRCVESKRISNFKKKGENNRKNGNHYLGWAYIEASNFAVRYSNPIKQYYQRKLSKTNRVIALKTIANKLSKACYFVLRDKVDFDMNKAFV

SEQ ID NO: 325120 - protein, 337 aa, unidentified
MDHYAGIDVSLERSSVCVVDATGRIIRETKVASEPEALVRFFRELGLPLTRVGLEAGPLSQWLHAGLTGAGLEAVLLETRHVKAALSAMIVKTDRKDARGIAQLLRMGWYRPVHRKSPDAQEARALLAGRKLLQAKLRDVELSIRGILRGFGLKVGEVSKGRFAARIGELIAGHEMLEAVTGAMLRAREGLRAEFVRLHRRMLAIVRGDAVCRRLMTVPGVGALVALTFKTAVDDPERFRRAKAVGAHFGLTPKRYQSGETDVSGGISKVGDASVRTALYEAANAMLTRVSGISALERWAMGVAKRRGMKRAKVALARKLAGACWTTWQTAERLSRA

SEQ ID NO: 325121 - protein, 328 aa, unidentified
MENKLHFIGIDVAKTKLDVDMLRPDGRHRSKKFANTPKGHNELVSWLCGHQVSNAHVCMEATGTYMEDVAAHLSDAGYRVSVINPLLSKAFVQSQGIRSKTDTVDARQLAYFCREKRPVIWEAPHPVERALRALVLRHQALTEMHVQEQNRRESAREVQLPSIDMHLLWLETELKRIEKQIKDLTDDDPDMKHRRKLLDSIPGIGAKTSAVLLAYVGLKNRFLEARQFAAFAGLTPKQHESGSSIRRVSRMSKMGHMSLRHALYMPAMVTLYKTEWGRIFRERLEKSGKNAKLIIGAMMRKLAQVAYGVLKSGRPFDATQHTENACMA

SEQ ID NO: 325122 - protein, 418 aa, unidentified
MKIQTIYSKIIPDHKLVVACDVGKDKLDAYCELGQQSVRDSFANHTLKIEQRLKTFAGMAESAGYDGLRIIVEPTGIYHQKLLQIARRLGHQTALVNPESVHKFKVVESNDTGKTDAKDPRVINLLAKYGKTLIDRNIRDEYQLLRQLNFMYIDEENTYIATRCKIHRVLTELFCDYSFRMDFIYTNTGRIFMNKYHANPYRIIEHGYTAFHQRLKRAAPRIRTITINRLWQDALISIRNQLPPDYIKILETRLIYLWNELILREDRMSEVESTMTSVLDELRLKDSRIPLPVKGVVSDFRIAQILAETGPLDDFESIEQLWRYAGLNIRERQSGYYKGYNQISKKGRSNLRRVLGYIVLPLVKKKSLYGQVYHAKKDAGMVGNKAMVAMMRKFLRMFYGWYNSGLPFDPKRVFSKVH

SEQ ID NO: 325123 - protein, 344 aa, unidentified
MSEVTTIGLDIAKHVFHAHGADEQGRAVFSKRISRGKLLDFFAAQPSCTVALEACGGAHYWARQLTQLGHKVQLIPPAYVKPFVKRQKNDANDAEAICEAAQRPSMRFVAVKSEQQQAAGLVFRTRNLLVRQRTQLINAIRGHLTEYGWIAPKGPSHVAMLADLIEEEEMASSLPEAAHAMFRLMLDLLAGLNGKIADLDKEIARRAREDEVSRRLMTIPGIGPISATAIAALAPPAETFATGRDFAAWLGLTPLQRSTGGKQKLGATSKMGERTLRRLLIIGSSAVVKQAGKRGAPKGSWLEQILARKPRMLVTVALANKMARIVWALLVKQENYKAPVAAKA

SEQ ID NO: 325124 - protein, 472 aa, unidentified
MGTDRRLVGIDLGIASAHTVRVLDEAGETVAKRKAWPTAESLADLEAVALAGTPPGTRLEVVVEPTGPAWLPIAVFFARRGHIVHRVSSAKAADLRRFLSRHTKTNGIDADTLARLPLFDPDGLRPLELPGTERAALDRRVRACDRLTRAAAEHKVRIRDLVRQLLPMSPLGSDLGVADLAVLERFADPNVLVKAGLKRLTNLIVKASHNHQGPERARQWLEAAQASIELYADHPAVAFADLAAEVVTEVRLLRATQAELAGHATERETAYRWVDPGGLARSLPGLAEVGGPALVAAMGDPARFARGKQFRSFTGLTPRASETGDTDRKGQPMSKAGSSLLRTTMVRAADNARRVDPQLARIYWTQMVERGKDHLGATCVVAANLAERAWTVMHRAMPYVICDTDGRPVTPDQAKAIIAEHWIVPADVRARRRHKKTGKAPQKVLAGQSERGDLPRPASFTPTTNPVNQRTA

SEQ ID NO: 325125 - protein, 366 aa, unidentified
MSEVITHVGIDAHKKDLFIAMLTGRETTPVTWQVANEPNAIRRLMRKLEREAPGPVRCCYEAGPCGYALQRQLTGARVSCQVIAPALIPRKPGDRIKTDRRDARKLAEMWRAGLLTVVQPPTPAEEAVRDLARARDDAREDLQRCRHRMGKLLLRRGLHYSGRNWTQAHRRWIDGLEWAQPAERVVVDDYLLAIDHLEARLIELDARLGDIAETEVYREPVGWLRCFRGIDTLTAMLILAELHDFRRFPTPRALMAYLGLVPGEHSSGEQHRRGRITRTGNALVRRLLVETAWHYQHRPGVGVALKRRRMGQPPRVIAIADKAQQRLCRRFRRLAEQHKPAAKVVVAVARELVGFVWAALQPAPVN

SEQ ID NO: 325126 - protein, 350 aa, unidentified
MTTIARRITGGVDTHLDIHVAAALDELGALLGVESFAATAAGYGELLRWLEGFGTLELVGVEGTGSYGAVLTRHLLHHRVAVVEVDRPNRQRRRRKGKSDPEDAVAAARSAQGGDATGSAKTRDGNIEAMRVLRVARSSARSSRTQAINQMRSLVSTAPEELRAELRGLSIYKVLTLTSAYRHTGRTDVTTLTKLTLRMLARRALSLEEEVKEIDRLLKTLVAETAPELRAIDGVGTDVASALLVAAGDNPERLKNESTFAKLCGVSPLDASSGKQQRHRLNRSGDRQANSALWHIVFTRMVCDPRTQHYIERRMKEGRSKKEAIRCLKRYVAREVFAALPRSQFALDNP

SEQ ID NO: 325127 - protein, 344 aa, unidentified
MVVLGTDAHKRSHTVVAADEAGVEVDSTTVGATPEGHLRLVKWAQQWPERRWAIEDCRALSRRLEADLLAVGEQVVRVPPKLMAGVRRSARTRGKSDPIDALAVARAALREPDLPVASLDGPSRELRLLVDYRESLVKDRTAAQNRLRWRLHELEPGYDPPAGSLNRYKTLDEITGLLAGHDSVVGDLARREVERIRTLTEEANQLERDITQRVNKLVPTLLEIPGCGALTAAKLVGEAADITRFKNRDAYAMWAGTAPIPVWSANNQRFRLNRGGNRQTNAAIHRIAITQIRIHPDAQAFIKRRLETGSTKREALRLLKRKLANVVYRTLHADTQQPALATAA

SEQ ID NO: 325128 - protein, 344 aa, unidentified
MQITTIGLDLAKSVFQVHGVDATGQVVVRKSLRRSQMLPFFAKLPSSLVGMEACGTSHYWARELIKLGHEVRLMPPAYVKPYVKRGKTDAADAEAVCEAVTRPTMRFVPVKSPEQQSALSIHRTRDLLVKQRTQMVNMIRGLLAEFGIDIAKGLGRALLMARRIVDGEAPDVPIEAAKMVGMLSQQALDIDARLRQIDRDLLVWQRGNDVARRLMTIPGIGPVGATALAASVTDPHQFRSGRQFAAWLGLTPLQKSSGGKERLGRITKMGDKYLRKLLIVGMTSLVSRAKSRPEKIDPRLANLLARKPVRVATVAMANKTARTIWAIMTRGEIYRAGHRPILAA

SEQ ID NO: 325129 - protein, 331 aa, unidentified
MKIKQTIGIDISKLTFDVRIHSNQYYQAFDNNLKGFKKLIKWVEKNNPVSKEQTLFILEHTGIYSEQISLFFDQNNISFSLISGLEIKKSLGISRGKDDKVDATKIALYGYRLRDEIKPYKLPSKSINQLKRLLTLRERLVKQRAGHKSTLKEQKRIYIRKDNKLLLETQEKMIKFLTKQIRDIELEMSEIIKSNEQLKQQYKLIVSIKGIGNQTALFMIVTTNGFTRFTSWRKFASYCGIAPFPNRSGTSIRGKTKVSNLANKKLKSLFDLCAKSAIQNNPEMKIYYNRRIEQGKNKMSTINIIRCKLLARIFATIKRQTPYVDTLKYAA

SEQ ID NO: 325130 - protein, 391 aa, unidentified
MIYVGIDVAKDKHDCFITNSDGEVLFKAFSIANNRNGFNDLYQKIESVMEDVTKVKVGLEATGHYSYNLLGYLIDKGLPTYVINPLHTNLYRKSLSLRQTKTDKVDARTIASILMSDVNLKSYSDISYHNEELKSLTRYRFDKVKERAKLKSSVSRLICILFPELEKLVPTLHMASVYALLSEFPGAKQVANAHLTRLTNLLSEASKGRYSKDTAITFRDAARTSIGSNMPAKSLELKHTIKLIKELDSEIDEIENEIKIIMDEINSPILSIPGINYRMGAMIIAEIGDFSRFDSPDKILAYAGFSPSTYQSGHLYGAYAHMEKRGSRYLRYALYNAAKYVCHWDPTFTAYLAKKRAEGKHYNVAISHAVKKLIRVIYHLEKTNQQYIKAS

SEQ ID NO: 325131 - protein, 338 aa, unidentified
MKTYAGIDLHSSNNYIGIIDEQDHRVYQKRLPNQLAHIKQALKPFKESMEGVVVESTYNWYWMVDGLKEDGYKLHLANPSAIKQYEGLKHTDDKWDSFWLAHMLRLNILPEGYIYPKEQRPVRDILRRRLLYVRHRTSHILSLQSAITRNLGYKISGNDIKKLHESDADKLFNESFLVLAARNSISTIHFLGKKIQEIERPVKSHVKLKPEFEYLLTMPGIGDILGLTIMLEVGDINRFTKVGNYSSYCRCVKSDRLSNNKKKGEGNRKNGNKYLSWAYVEAANFAIRHYPKIQSFYQRKKAATNGIVAIKALSNKLARASYYVMRDQVAYDMDQCFR

SEQ ID NO: 325132 - protein, 390 aa, unidentified
MSIVGAFDVHRRQLTFEYLDTVTGELKRGRIMPADRPHLRAWLSRFAGQRDVQFALEGCTGWRYVVEELYAAGITPHLAEPADTAALRGKKRHAKTDKTDTRHLRVHLMAGDLPECWIPPQHVLEARATARLYKDLVDERGGWHQRVAATLFHHGVPAAVSVAKPDGRAAAEQAFLSPAGRQAVETGLRQIDRLTAELEPLRRQLDMLSRRQPGCAALRAAHFGIGAVTSVAIWAELGDVRRFGNSDDVVRHTGLDITVYSSDGKRSAGHLSRQGPPLLRWALYEAAKCAARPAAPDYGYYTAARDDRGGGRATLSVARKLARRCYHTLRELGEEALAPNRGSGDGSMIGGRVGFHHKTLASFIDAFTSAGLSIRVVREFSADGHVVADE

SEQ ID NO: 325133 - protein, 354 aa, unidentified
MLIIGCDYHPSFQQIAFVDTDTGELQERRLEHCEEAEKFYRGLGVQGMKVRLGMEASGHGRWFERLLAELNFELWIGDATEIARKRERKQKTDRQDAQHILKLMLKDDFPRIRVPSWENRDLRQLLWHRHRMVQARTRIMNQLQAVALNEGLRSKKRLWREHGREQLESFRLAPWASRRRHDLLELLDRLNPTIAELSQAIEQEVEKCPEAQRLMTHPGVGPLTALAFVLIIGEANRFQCGKQIASYLGLVPLEDSSGNRRRLGHITKQGNSLLRFLLVEAAQVTVRSLPEWRSKYVHLTMRRGRKIAKVAMARKLAVRLYWMMRKGWDYEQVKKFGSHAGQPGHRHGVKSNIE

SEQ ID NO: 325134 - protein, 465 aa, unidentified
MRTCHGKKNLAMGRAKEGLFEVINPAAAGVDVGASEMWVCVPGECEQDRVRKFGTDTMELEAIAAWLQERGVRTVAMESTGVYWIPLFQVLENHGLEACLVNARHVKNVPGRRKTDRLDCRWLQKLHACGLLSASFRPSAEICRLRTCLRQRTTVVREQAAQVQRMQKAMREMNVQLDAAVSDVTGLSGMRIIEAIVGGQHDPAALAALADRRVRKSPEQIARCLQGDYRPEHLFVLRQALAAYRFFVEQMRECDREVERYTIELEQAAGCADVALPAEAAAEARRRKDGNVPNYDVRTHLYRLTGVDLTRIPGIAELVGQGLVSETGVDMTRWPTGKHFVSWLDLCPSPKVSGGRVIGQGRRHASNRAAQLFRQAASSLKDSRSWLGSFYRRIRVRSGGSAAVKATAHKLALIYYNVLATRTEYRQIETQEYEQRLRERTLRNLQRRARQMGMELVPVEDATAG

SEQ ID NO: 325135 - protein, 447 aa, unidentified
MVWLGSWTNRVPEVIPVARKNPYSLLDVKDMVVEGLVAARAGQAATVGVDVAKFEYVACLVWPDRAFERPWRVKSPEQVGLLVAKLRELHGHCPVTVALESTGTYGDVLRQAVADAGLAVRRVSSKAVKDQAETFDGVPSQHDGKDAAIIGTLCAGGHGSPWPLAQDVAKEQALRYWIRKLDTSQRIKQVWCGKLEAMLARHWPEIGGLLKPSSATLLHAVALWGDPRALAADAQAAAKLAGFGRSYLRPEKIQQVIASARQSIGVRSNDWTVRELREIATAILQRRARILHCRCELKPLSRDNACIQGQAPALGLVAACVLWMCLGDAANYASAAAYRKAMGLNLKERSSGMHKGKLSLSKRGQRLTRKWMYFAALRWMRAPCVRRWTEKKKQRDGGRGGKAVVGVMRRLALAAWHIGLGEEFQPERLFPGAGGVQPAQAKEVVVQ

SEQ ID NO: 325136 - protein, 336 aa, unidentified
MERQQQYVGIDLHRRRSVIVRKTSTGEPIETVQIDNDPDVLAAELRKAGEHPKVLLEATYGWYWAADVLQAEGANVHLAQPLGNNWGHRRVKNDERDATDLIDLLRLGRLAEAWIAPPEVREVREHVRYRAKLVHLRGALKSQVHAILAKEGVAVPMSDLFGKHGGQLLDDVALATAFRVRVDSLRELIDRVDLELAMVEECAHGALSDDPGYRAIQQIPGVGPVLAGVFVAEIGDVTRFRSPSHLTSWAGLTPMHRESDSRSVATTSPSKARASCAGPPSAVIRQRGHTVVQAHHRRVAERRGSQIERVAAARKLLVPVYYGLRDGEIRCLARAG

SEQ ID NO: 325137 - protein, 383 aa, unidentified
MQASTIDTPTAGHYGTIFVAIELSQKTWLVTLHSPDRDRISRHKLEGGDHAGLLALIESIGARAAAKLGSAPKVVSCYEAGYDGFWLHRLLTAAGITSFVFDPASIAVEQRSRRAKTDRIDGELLLRTLMAYLRGEPRVVRIVRVPSVEQEDARRASRERERLVTEQTGHTNRIKALLRLVGMAVGYPRRSDWLSWLERQRDRQGAPMPPRLLAEVAREHARLMLVRGQLAALEQAALAAEEAPATAPMAERRDLLLQLKGLGTVFAATLTNELFYKDFRNRREVAGYCGLTPSPWRSGSIDREQGISKAGNPRARLKAVELAWLWLRHQPDSTLSHWFRTRTANASKRTRRIAIIALARKLIVALWHYLTTGLVPEQAVMKA

SEQ ID NO: 325138 - protein, 413 aa, unidentified
MDILHASCVGLDVHKKTVVATVLVTKERGKPFKATQTFGTMTSDLLALSDWLMRYGVTHAAMESTGEYWKPIYNILEDNFEIWLVNAQHIKAVPGRKTDIKDSEWIAELMRHGLIRSSFVPPKGQRELRELTRMRSTFIKERATLVNRLQKVLESANIKLASVASDVNGVSGRAILHALIAGGSTPEEMAELAQGRLRGKRELLRRSLQGFVKPHHCFVLSELLLQIDGLDETIAKFDEQVQEYCRPFEEAVILLDTIPGVARKTAEVIVSEIGVDMSRFPNANHLASWAGVAPGNNESAGKHLSGKTKKGDQALVSALTQAAHAVSRTKNTYLCAQFHRLAGRRGKKKAILAVAHSILIMAYHMLQDKEPYKELGSNFFDKRNVQATTRRMVHRLEQLGYKVNLEALTPIAA

SEQ ID NO: 325139 - protein, 463 aa, unidentified
MAKKVGGGDGRKPDKPKVDWKALDIVHPDAAGIDIGGGEHWAAISPDRDAEPVRCFDCFTQDLQQMADWLISRGVRSVAMQSTGVYWIPVFEILQQNGLEVYLVNARHTKNLPGRKSDIAECQWLLKLHTFGLLNNSFQPSDEVRRARTMWRHRGGLVAQASSAIQRMQKTLTEMNIQLSNVLSDLSGVSGMAIVQAILDGKRDPRALAELADPQVKASKDVIAKSLEGNWRHELLFVLKQEVELYRIYHEKIGACDRELRQHLQTMEPKVDLQAQPLGPRPKGKRARGNAPKFDLRTELYRITGVDWAQVDGVDVQVAQSVIAEVGVDLREFPTENNFASWLGLCPTNETSGGKVLNRRTPKVINRAKIAFRQAAHALLRSQSYLGAQYRRLRTRLGAPKAITAMARKLACLFYRLLTKGQQYVDKGTEYYEQRHRDHQIRLLMRKAEKLGLQVVTSAPANA

SEQ ID NO: 325140 - protein, 346 aa, unidentified
MKQLYAGIDWATRTHAVGVVDDHGGICARFQVANTGKGFGGLIRRLTKLQVAGVAIERPDGPLVDAILDAGLRVVVITPRQVKALGSRDRAAGATSDTAAGLLLADVLGTDRHRLQPLMPDRDATIVLPALGRTRNDLQKARMALSNQLTAQLERCFPGAVGLFTDLHSATAIVLLRRYPTSQAAATLTPATLTAFLPRIHYSGHTPVAVLLERVKTAPMAATSPDQATGQPVCVQTLLDAIQACHSHERELQAEIIQRLELHTDPQIFTSLPKAGHSVRAAALLSEIGDVRTRFPNEEALAALAGVAPITHASGNLRSVGFRWACDKTLPNPITDLADDSRHASP

SEQ ID NO: 325141 - protein, 466 aa, unidentified
MKHNRRRSPGKPRVSPTVLDRINPNVAGIDCGAAEHFVAVPPDRDPTPVQSFTTFTSDLLRLADWLAACRVTSVAMEATGVYWIPIYEILEARGFEVLLVNARHLKNVPGRKSDVSDCEWIRELHSVGLLRGSFRPTDAIVALRAYLRHRQTLIESAGMYTQRMQKALVQMNLQLPLVVSDITGVTGLRILRDIVAGRRDPHQLAEHRDHRCRASKTEIVAALTGHYRAEHLFVLHQNLELFDICQAQLTACDGAIDGHVQTLTAHVASPATPMPAPRVTKKPRDNEPRFDIRAPLHQLTGGVDLTQIDGIAPYTALKLVSEIGTDMRRWATEKHFTSWLTLAPKNKISGGRLLSSRTQPSANRAAAVLRMTAMSVGRTQTALGAFYRRLAARIGKPQAITATARKLAILVYRALKGELVYRDPGADAYNGQQRTRLLRRLRQRAATLGFELVSRETGEILPAGVS

SEQ ID NO: 325142 - protein, 478 aa, unidentified
MPLLGRNHNHTNMKSKTPKSKKEKKKISVDQGWEAINPQAAGIDIGAKEHFACVPAKATPKNVRSFGTCTADLNALADWFKECGVTSVAMEATGVYWIPVFQILEGRGLAVILVNARQTKNVAGRKSDVQDCQWIQRLHTYGLLQGSFRPEDAYCVLRTYLRYRDELVSARSTQCQHMQKALQQMNVQLTQVLSDVTGVSGMAIIQAILAGERDPVKLAALVDRRVRARPIQIQKALAGDYRQEHLFVLQQAVSLYGTYEEKINDCDEQIVRETAALPDKVDPQRKPLPPRKEGRPASKDQMQDQDMREMLYRKFGADLTAIEGIGVTTALVVLTEVGPNVAGFRTEKHFCSWLGLCPDNRISGGKVLSSHTRRVINRFSDALRMAAVTLERSQSALGGFYRRMKGRLGAAEAITATAHKLARIIYRLIKHGEAYVRQGMEDYERKFRERKLHALRKTAMSMGFNLQGYPIDSTYPKL

SEQ ID NO: 325143 - protein, 346 aa, unidentified
MAKSSVAVLGIDLGKNSCSLVGFDPAGTVVLRRRARRETIVGLTAKLPACVVAMEACCGAHHLGRLLAAQGHTIRLMSPEYVRPYVKAQKNDDRDAEAIAEAATRPTMRFVPLKAQEQLDMQSLHRVRSRLVGMRTMLMNQLRAILLERGLVFPQGRRKFETAVGILVTDPQAQIGARIQALVAEIREEWASLDGRIEALDREFAAHARADEAAHRLVSIPGVGPMTATALRAAVDDGSAFASARDLPAWLGLVPRQHTTGGKPKLLGISKRGNAYLRGLFIHGARAALASLSKVEDATGRWLRGLLARAHYNVVVVALAAKLARIAWATLRKGVSFERQPEPALA

SEQ ID NO: 325144 - protein, 409 aa, unidentified
MDVILDRVCGLDVHKDSIKACVRVPGQGKKRDQHIATFGTKTEDILALRDWLEQWKVTHVAMESTGEYWKPIYYLLEDRFQVLLVNAAHIKNVPGRKTDAKDGAWIAQLLECGLLARSFVPPPPIREIRDLTRYRKKLIQQRTEEVLRLHGVLQRAGIKLSSVASNIVGVSGRAILNALVEGKKDPAAMAELARGQLRKKIPQLKQALAGRFTNHHGKLVNHMLSHIDYLEEVIADLSTELDALMEPYAAQIALLETIPGVERRTAEVIIGEIGVDMGQFPEDRNLCSWAGVCPGNRRSAGKRKPEKIRKGGRWLKPALTEATWAAVKENKSYLSGQYHRLVPHKGKKKATMAVSHSMLVCVYHVLKKATPYRDLGADYFLRRNQEATKRRCLRQLEQMGYAVALQEIA

SEQ ID NO: 325145 - protein, 370 aa, unidentified
MQTVRSFVGMDVHKETISISVAEDGRNGPVRFIGVIPNQPDDIAKMAKRLAKHGELNFCYEAGGCGYNIYRQLTALGHSCTVAATSLIPRKPGERIKTDRRDSQKLAILHRSGDLTRVWVPDATHEALRDLVRARVDASMHLMRARQQLLAFLLRHGRSYPTGKHWTQRHRSWLAGQTFQQEVHRIVFQDYVETVWTAQERRDALIERIGAMTATWSLGPLVEALRGLRGIDLLSAATFICTTGDLSRFESPRMLMGYLGLVPSEHSSGGSVRRGGITKTGNREARRMLIEAAWSYRYPARVAKEKAEILVRLPKNIRDIAWKAQTRLCARYRTMIARGKKPTVVVTALARELAGFIWAIGQEMRTPMTT

SEQ ID NO: 325146 - protein, 310 aa, unidentified
MEQVFVGIDVAKDRLDVHVRPSDEAFAVARDGEGLAVLVERLQGLAPQIAVVEATGGFEVTVAAALAGAAIPLAVVNPRQIRDFARAMGQLAKTDALDARAIARFAEAIKPEPRPVPDDQARELSELVQRRRQVVEMMAMERNRRRQLTQRRLIKGVDRVLAMLQKELSELEEDLDDAIRGTPAWREAEDLLKSVKGVGDIVARTLIADLPELGTMGRKQIAALVGIAPLNRDSGTMRGRRTIWGGRAKVRAVLYMAALVASQRNPQLAAFYQRLIAAGKPKKLALTALMRKLLTILNAILRDRRPWQNA

SEQ ID NO: 325147 - protein, 361 aa, unidentified
MPMQKYKLNFNGENVYVGIDVHLKQWHVCVRTAHVSKKPFSQPPSAMALKQYLENNFPGGTYLSAYEAGFCGFSVHYELESAGIRNIVFNPADINDTQKERSRKTDAVDCIKICRNLMNDELKAIYVPSREELGLRGYLSARDTAVKKQRVAKQRIKSLLNRNGVKIPDELFPTSKTHWSRHFNGWLEQVAADLGSGEGYRLNDLLKDLHHAHSQVLAAGRRLNEVISAHHMDTNELLLSIPGIGRVTAARICLEVPHVSNFVNSDHLASYIGFVPDVHGSDDNVYVRGITYRRRVLLRSAFVESSWRAIGKDPAMGLAYSNYIKRGMKPNNAIIRIARKLVNRVFFVLRERKRYEIARVR

SEQ ID NO: 325148 - protein, 415 aa, unidentified
MEAFSYTLSKQRIFPEAMLRICPGLYDYSVRKNRPVLSDGGPDAVSGLRLSRLFRRSFAPDRRSFSCDKPDSIMDRLSPVTRICKVGFTMENELHFIGIDVAKAKLDVDILRPDGRHRCKKFDNTLSGHEALVRWLRGHDVNRAHVCMESTSTYMEDAAAHLSDAGYTVSIINPALSKAFAQSEGLRSKTDKVDARMLAHFCREKRPSAWEAPHPTERALKALVLRHQALTEMQTQEKNRRETAPEVQLASIDILLGCLSAELARIEKQIKDLTDNDPDMKRRRKLLNSIPGIGEKTAAVLLAYTGLRLKFGTARQFAAYAGLTPVQHESGSSVMRASRMSKAGPVQLRKALYMPALSALYHTAWGKAFRKRLEESGKRAKVIIGAMMRKLAQVAYGVLKSGKAFDASQHELLIA

SEQ ID NO: 325149 - protein, 354 aa, unidentified
MRGYYIGLDTHSTFTKLAAMTESGKIVKQTGGATTIPVLVELLRAIPRPRYVAIEEGPLAGWLYRHLREEVDKLVVCEPRRNRLIAAEGDKDDPIDALKLADLLRGGFIKSVHQADTLDRAVFKQHVSLYHGRVQHRVREALQTISLFRRHGVVLREKAFVNPADRKALLERLPMQRTLRDDVRLLWSGYDQASKQEERVRRRLIELAKQEEVIVRFEQLPGIGWVRGATLFVMLDTPWRFASKTALWKYLGIGLERRGSGNGPEQVRVPLRTNRLLKGTILGAAKSAVAQGDNPFADQYRRWLEQGLSARLARRNVARSQSATLWGLWKNGTAYHPDWVGVAAAALAASPVST

SEQ ID NO: 325150 - protein, 347 aa, unidentified
MRFFNSQHQFYCGVDLHAKTLHVCVVDSQGEKRLHKNFQCQDVETFQEALQPFRDNLVVGCESTFNWYWLADLMHRQNIPFILGHALYMKAIHGGKTKSDAIDSEKIARLIRGGNFPLAHAYPQAHRASRDLLRRRTFLVRRRAEALTHIQMIHHQHNQPKPVNIKYKANRIGIGQRLPDAHTQMLVDVDLQLIEAYDTQIQRLELELVRQVKVTHPQLYYRLTSVPGIGPVLGLTLMHEIETISRFPSVGNFLSYCRLVKGSHTSAGKNYGSPGGKMGNAYLRWAFGEAIQILKRESSEVKQLSERLEKKHGKGRAMNTLAVKLGRAIYYMLRDDHAFDLKRFVGA

SEQ ID NO: 325151 - protein, 354 aa, unidentified
MIWEMKRILRQVVGIDVAQKELVVYFGLLNAELGIEMKAYKTFPNTLNGFAKLVVWAWKLKDADTTVRFVMEATGVYHESLAYFLDSESFDVSVVLPNKIANYFKTLDVKTVTDKTAAETICRFGLGRELDSWKRPHKVFKMMMQLCRERDQIVVERTVSKNQLHAEESEAQPHQPSIFRAKERINLFDRQEKEVQAELRVLIKNDESVDRLMTLLCSIPGVGTLTAATVLAETNGFELIKNKRQLTSYAGLDVKEKESGTSVKGQPRISKRGNKYLRKAMHLPALTAIRHDERFKAIFTRLVARHGIKMKAAVAVQRKLLEMIYTIYSTQQPYDKDYLKSKNELGKVESSTKN

SEQ ID NO: 325152 - protein, 371 aa, unidentified
MANVEKDFAKGKPVYVGLDVHKREWVVTVLCQGEELYHAAIAADPQGLIRTLRRFEASEVHTVYEAGPTGYWLHDALMEVGFDSIVTPPSLVPHVGGRVKTDHRDSKKLASMLAGGFLKRVHVLTAEERAHRQLLRTRNQIERHRKQTQNQIKSLLLFHGKRTPATLRERWSDGFTRWIETLSWEHDALKTSMDSLLTLYRQADEQYKMLTKQIETLALTEKYRERAQLMIQIPGIGVFTAMAILIELQNVERFRRADELASYLGLTPSQRSSGERIRMGRITRCGNARVRTRFVESSWTLIRYDAQAKATYERIKHQTGSGKKAITAIARRLALRVRRVLIDRKPYQLTEGGKLATGRDKMREVRRFVLH

SEQ ID NO: 325153 - protein, 411 aa, unidentified
MVKENFIYVGIDLHKETHTAVMIDCYNQKLGEITFPNRPADFPKLVAKVKKCNTDGKTIVFGLENAYGYGRALAVWLIDKGYLVKDVNTAISHRQAKHRGAMYRKSDSDDAEAIALATLNMLDKLPDAYPNDAYWSLGQLVHRRDNIMKQRTRLVNQLHEQLCIAYPSYKQFFNDISRPTALYFWEHYPSRKYLKGKSVEDLRAELVPVSHNKCSTKTCEKILDAVASDKVKNNAYQDARDMVTLSIVSDLQHYDKQLAEVDKMLEQMYKMLGCTLTTIPGVNVITAVKILAEIGDIKRFSNANKLAQFAGIAPLHLSSSGKGKDLATKQGNRRLQATIYFLAIQMVQISSKGTPRNPVVRAYYEKRKAEGKTSQQALICISRRLISIIYGMLKSGTEYRMPVMENTGETV

SEQ ID NO: 325154 - protein, 386 aa, unidentified
MKKDSIAKLQVTKSQIRRMAAKQRLTVGLDLGDCSSRYCILNEAGEKASEDQLPTTKAGLESLFAKMAPCRIALEVGTHSPWVSRHLAAMGHEVIVANPRKVRLITQSVKKNDRMDAEQLARLARVDPKLLAPIRHRGPEAQADLAVIRARAELVDARTKLINAARGLTKPMGERLKSCDADYVKESLADGLSEATQRVIRPLLKSVEEMTKEIGMYDKEIEKIEKRYPETKLLKQVKGVGRLVSLTFILTLEDAERFAHSRDVGPYLGLTRKQRDSGDSQPELGISKAGDVLLRRLLVQAAHCILRDGAPDTDLKAWGLTKVQAGAKTGSGKKGSKRRKKKAVVAVARKLAVLLHKLWVTGEVYDPQYNRKAVEAAKAKEKAAAA

SEQ ID NO: 325155 - protein, 377 aa, unidentified
MSMTMSGSEHRGGGSATMNEVVLGVDTHLDFHVAVVLDLLGRRLGEVKAPTTEKGYGELVRWAEGFGPVRCAGVEGTGSYGAGLARRLSAMGIAVVEVERPKRRHLRRRGKSDPKDAEAAARTVLAGEAAGVPKSGDGKVEMVRALRSARRSAVKARVQAANLLQALLVTAPEELRRRLRGLPTKEMVAVAARFRPGGDPEDVEGATRFALRSVARRHEALSGEIAELDAQMKRLVAEAAPELLALPAVGPNHAATLLVLVGDNPERLKSEASFASLCGVSPIEASSGKVVRHRLNRGGNRDANRALHMICVVRMGSDLRTRSYVARRTAEGKSKREVMRCLKRYIAREVYRVLLSSATVEPSLLGAKSYVVGPDTT

SEQ ID NO: 325156 - protein, 350 aa, unidentified
MRIIGCDYHPGFQQIAFVDTDTGECGERRLQHREEAEKFYRDLAAQGVKVRVGMEASGHARWFERLLADVNFEMWIGDAAEIRTKRVRKQKTDRQDAQLILRLMLKDDFPQIWVPSWENRDLRQLLWHRHRMVQARTRIMNQLQAVALNEGLRCKKRLWREAGREQLEAFRLAPWASRRRRDLLELLDRLSPTIAELSQTIEQEAEKCPEAQRLRTHPGVGSLTALAFVLIIGRAERFQCGKQIASYLGLVPSEESSGDRRRLGHISKQGNALLRFLLVEAAQVTVRSLPEWRSKYFHLAMRRGRKIAKVAMARKLAIQLFWMMRKEWDYEQVKKFGSHAGQPENRRGVQ

SEQ ID NO: 325157 - protein, 367 aa, unidentified
MKKISTVAVKQSRNCSEQKLTIGFDLGDRSSWYCVLDEQGEVVLEQRLGTTPKAMKEVFGGMPGSRIALETGTHSPWVSRLLSELGHEVIVAHARSVRLIGESRKKDDRLDAQTLARLARIDPQLLCPVKHRSAKAQADLTVIRARAGLVRARTALVNTVRGLAKSYGERLRGCNVRNMNPEKAEGLSPELQRALEPLLAGIETLSERIGEYNERIEKLAQESYPQVARLQQVKGVGTLIALTFLLTLEDAHRFRKSRDVGSYLGLQPGRRNSGQSEPQMHISKEGDPYLRTLLVQGAHHILGPFGVDSDLRRWGLKLAERGGRNGKKRAVIATARKLAVLLHRLWVSGEAYEPLRNRNQRALPAAA

SEQ ID NO: 325158 - protein, 342 aa, unidentified
MKIHTIGIDLGKTSFHMVGLNEHGEVVVRKHFSRVQLLRFTANRKVHVIGMESCGGSHFLGRALQEQGHDVRLMPAQYVKPYVKTNKSDYIDAEAIAEAVGRPTMRFVPIKSDDQLDLQSVHRVRERWVMRRTAVINQIRGLLLERGITVRKGRRYIEAALPGILEDADAKLSGTLRLLLAQLKCELDQTALRLEEAEALIEQTVLKNEACQRLVKIPGIGPVTATAVIAAIGNGAAFRKGRDFAAWMGVVPREYSTGGKQRLLGISKRGNRYLRKLFVQCARAVLQQKTKQAPVLKAWLEKLTARTHRHVAGVALANKLARIAWAVLATGEAYRAPLPAAA

SEQ ID NO: 325159 - protein, 366 aa, unidentified
MDKRTTVGIDLAKDVFAICVLDAHGAVLDRKVLRRAAFERWAESLSEPCTVAMEACGSAHHWGRFFAARGHTARLLAAEFVVPFRQGGKNDGNDALAIAIAARQPTMRFVPVKTVEQQAILAWHRMRQGWIEERTALLNRVRGLLAEFGLVPGRSPAVLIAAMARIVDEAAAPEPMRAIVQQAREQLAQLDARLVACDMQIQAHARCSPQAERLRALLGVGPITASAVVATVPDATLFRHGRLFGAWLGLTPRQHSTGGKTRLGASSKRGDAYLRGLLVNGARSALQAALRAAPDKATRLQLWMVGLARRCGYQKALVAIANKHARMIWAMLARDERYDPEAWRRHARTQPSDATGMPMPSAVGVS

SEQ ID NO: 325160 - protein, 342 aa, unidentified
MKIIGCDFHPGYQQIAMLDQETGELVEQALSHEGEGKQQVRNFYASLSGPVRVGIEASGQSQWFERLLAELGHEAWIGDAGKIRACCERKQKTDRRDAQLLLDLLVQGRFPKIWVPSPAERDARQLLLHRHKLVRMRTQVKNQLQALALNQGVQRKGKLWSVTGRQQLEALPLLPWASRRRTELLVLLDQLGASIGELDQAVSEQAQARAAVRRLMTHPGVGPVTALAFVLTIGPVARFDRSKQLASYVGLIPSEHSSGGRRQRLGHISKQGSPFLRGLLVEAAQSAVRHEPELHRAYQRLAQRKCRSLAKVAMARKLAVRLYWMLRLDQDYAQLIQGSHAG

SEQ ID NO: 325161 - protein, 428 aa, unidentified
MSNQEIIRRKQYCQIVKEITGSDQYLVVGIDVGKDTHHAFMGSATGKALFRKLIFENNLDGFSRLLKTADEIKSQNGLCKIVYGLEPTGNYHKPLARHLIRCDSNVVLVSGEAVNKNRSLLDGRWDKYDTKCAANIADLVSRARCLYYDSPSPSIMELRALLSLRRRLKREEHGLRMRIRNNLLAQYFPELDRFYNACESESLAIVQWFLNPDTIAAMEFGEFFHLVTKTRRGIAQTLRLRKIHGLATESVGCPMGPTAEYEADLLVEKLKQVRQQIQKTADLIEDFCLEFDEYSYLLTIPGFGPYISARVLASIGDPFRFENRKQLIKLAGYDLCAKRSGKTSDKAVPVISKKGNGELRYALYQAASVAAARVDLFRTYFTRLLRERERERGIKTKMRVKLAVKMLVIAWTLMKKREVFDPAHLNIE

SEQ ID NO: 325162 - protein, 411 aa, unidentified
MEVLHPRCAGLDVHKDSVVACVRCVSEPAHREVRSFGTTTSQLFALADWLESHECTHVAMEATGVYWKPVWHLLEGRFELVLANAAHIKNVPGRKTDVNDATWIADLLAHGLIRGSFVPPTPIQELRDLTRTRKQLVREISQHSLRIQKTLEDANLKVASVLSNVLGVSGRAMLDAILAGEDDPQRLAELAVGTARRKKAELVEALRGRVTAHHRALLRLHLGLIDALQSALAEIDDAVGKALEPIQTGARILTTMPGVSDIVAHVIVAEIGVDMTRFPSAAHLVSWACLCPRNDESAGKRRSTRVRHGANWLKTTLVTAAWAAVRTKESYLRAQFLRLKSRRGPKKAILAVAASMLTAAFFMLRDGVEYRDLGAQHFDHHDKTKTVLRLLRRLNDLGCSVQIKPIPRRAS

SEQ ID NO: 325163 - protein, 375 aa, unidentified
MSQYNTLFVGLDVHKESIAVAYAPEGRDSAIVPLGQIGTRHCDIDKTLRHLQSKSPKLLFAYEAGPCGYWLQRYLSRKGQSCLVVAPSLIPRKPGDRVKTDKRDSVTLARLLRSGDLSPVYIPEIEDEAMRDLGRAREDALSDLKAAKLRLKSFLLRHDIGYEGKANWGPAHLRWLADDVAMPTAAQRIVFQEYVRAITQHSERLQRIDEQLREQVKGWRMAPLVEAYQALRGVQFHVAATATAELGDLRRFDKPRQLMAYVGLHPSEHSSGSTRRQGGIAKTGNTHARRVLIEAAWAYRFMPKVSRRIQVRQETLPEAIRDIAWKAQVRLCARFRRLVAHGKNPNVVVTAIARELVAYMWAIAQQVQLPTPQKA

SEQ ID NO: 325164 - protein, 332 aa, unidentified
MYLGIDVHKRYAQVAVMDEAGEIVEEVRVENANLGDLAQRYAGAQAAIEATSNYYHIHDTLSEHLDVTVAHPKELNQIADTDKKTDRADAKELARMVRLNSVPESYVPTDEVREARALVRGRQTLVENRTKYANKIHGLLSDHGITEDVKPLSVQGREFLRELSLPTPWNTLLESYLEVIETLTEEIREIEETIEECAGSLKETQLLMTIPGVSYYTALTIYAELGEISRFDGDKSVVSYVGLNPVIRESGDSRIEGSISKRGSSRVRWLLVQAANTAVHTCNDEYLSRFYERLASRKNSQKAIVATARKMLVSIYHMLDRGEVYDPPGVSA

SEQ ID NO: 325165 - protein, 273 aa, unidentified
MWYAGADLSRRSVMVAMVDDKSRRVRPRRLECREPERIVKFMLDHRPFKVVIEASGSYRWLYDLLAPHGEVVLAHPLRLKAIWSGRAKTDKLDAKVLADLLRGGLIPESYVPPERYQTLRDITRARSRLVCGRTDAGNSIHAILARVNIEPRYKTCLGPRGLKWILSLEFGRVTAFIRDELVERIAHFNAAVKRTDSLLDEIAADYPEIEAIIDIRGIGLYSALLIVAEIGEPDRFTNPEQVSASTGLTPRVRQSGQSDLHGPVSKEGSRWFR

SEQ ID NO: 325166 - protein, 325 aa, unidentified
MIGEHKLPTTPQGIDEVFGRIPRSRIALETGTHSPWVSRQLGRLGHEVIVAHARNVRLIGDSSRKDDRFDSWTLARLARIDPGLLGPVQHRSAQAQIHLTVMRARVGLVRARTALVNTARGLTKSYGERLPKCGTQKMNREMAQGLSQELREALDPLLGEIESLNERIAEYDRRIEQIAKEVYPQVALLKQVKGVGTLIALAYVLTLDDPHRFRRSRDAGCFVGLRPGRRDSGMSQPQLHITKEGDVYLRTLLVQGAHYILGPFGEDSDLRRWGLKLAERGGKNAKKRAVVAVARKLAVLLHKLWVSGEVYEPLRNNHKVVAAVA

SEQ ID NO: 325167 - protein, 340 aa, unidentified
MRVQKVARSCESGKSAIVYDQYIALDWSLKTMAIAHMSRRDDHPRIFERETDMKELKEYLGSLKGRTIITLEESGTAHWLYLELLDCVERIVVCDPFHNKLLWHGPKTDKIDAGKLCELLRAGLLKEVYHSDNGVYELRTLVSAYQDVVCAGVRAMNQKKALALGHRDKGKSASFIGEMLQENIDLYQRSKQQYERRLATVARHNTLIRYQREIDGIGTIGAVRIVATVVDARRFPCAGKYLSYCGLVKHEKLSGGRSYGQRKPRYNRILKSVYKTAALAALRGANPMREYYDHLLAQGVAEHNARHAVARYIARISYGMLKSGTRYEPYRWRGEAKKVI

SEQ ID NO: 325168 - protein, 384 aa, unidentified
MDQTTSTLSANTLHCALELSKNSWLLAIQFRDREQPSLYPIEGGNTEKLMAKLTAALDCWAKVSGSPPAITLCYEVGYDAFWLARFLMGRGIECLVIDPGSLQVNRRARRVKTDRVDVKMLLRTLIAWCRGERHVWSLVRIPSVDEEDLRRSHRERSRLVRERTAHINRIKGLLFAQGVRGINIKSQYKTLAVDQLVTGDGHHLPPRLVCEVAREIQRLAMVQEQIAKIERERDTAPTPCEATERKRRLLLRLRSIGPAISALLSREVYYRQFANRRQVGSFLGLTPSPYSSGEEERCQGISRAGRGHVRAIMIEAAWLWIRHQPKSALTRWFLERTAGQSTRIRKTMIVAVARKLAIALWRYVEHGLVPQGAILNPSTTGNAR

SEQ ID NO: 325169 - protein, 378 aa, unidentified
MQPIQRVDRKTGLDISLELAGKSWKIALTDGRRPHAAVVQLQEPQRWDRLLHLLRVLQEFRRKWRLAADCTLSLIYEAGQDGFWIARALRARGVQVWVVDAASVPVARHARRAKTDRLDALKLLDVLRAWLRGERGEVRMVHIPSDAAEAQRLLSRERGLLQKEVGQHRDRMRKLLLLYGCTDELDSGFVQRLAAGEVRCADGRRLPEELWHRLMREAERLELAQKQFRGLEKTLLHQLPESVQRMVAALARLHGVGWVGAMRLVLELFWRDFANRRQVGACVGLVPQPYDSGNSHTDQGISKQGNRRVRALLIEMAWFWVRYQPASELAQWFAKRTAAGSGRGKRIAIVAVARRLAIALWRYLRNGVLPAGAQLKAA

SEQ ID NO: 325170 - protein, 425 aa, unidentified
MVNAIVGIDLADRKQMVVVCDHDSRVLARRTFRCKAWDLAAALDWASDRAARAGFAGLTVACEPTGHRWRVLGQLASDRGLPFVCVQPAASAYARRTEDLTSDKTDDKDAVLIARLTAQLRCYLPEPVDPTWGRLRHLGARREQLLESHTRCVQQIRDLLECVWPAALEAAAQPFKSTTWVAALTVIVARDDGNLARTRRLGLDRFTRLVRAEVTRRGKAKPCLRIVRKVFAAVTATAGVVEHRQAALERIGWILTDWERARTDQMVVENRMVAVLGQLGLTDLACSIDGLSPVGAASILAETGDLRRFTSARAVVKLAGLAPRERMSGTFAGKTRLSGAGRPRLRVAAWRAVWGCLQNNRVYAARYRHLTSREVNRLKPTQAQTVVAAAILRQLYAVVATGQAWDPDIAAHGTRRLPVAGVVAA

SEQ ID NO: 325171 - protein, 413 aa, unidentified
MENPFLFFVGIDWATENHQICVVDRDGKTIAERQVAHSGTGLQQFLTWLQQQIPVAAERVAVAIEMPAGAIIETLVEHNYRAFSLNPKQLDRFRDRHTVAGAKDDSRDAFVLADSLRTDQPCFHPIHLDDPEIIRIRTLSRFEDSLVQDWSRLTSQLREQIHRYFPQLLQLSPAADEAWIWDVLEAAPLPVLASQLKHQQVQKMLSHRRIRRLSAEEVLQQLRTPPLPVAPGTAEAASEACLLLIARLRLLMQQKKEVERRIEEQLTRFCAEEERMEHRDVQLILSIPGIGRVITATMLAEASQPLAQRDYHALRAYGGAAPLTHQSGKRKRQVIMRYSCNQRLRNAFYHWARISVQQDSRSRAHYHRLRSKGHSHGRALRGVLDRLLVMLISILRHQTEFDPALRKSIPVAI

SEQ ID NO: 325172 - protein, 344 aa, unidentified
MECFAGIDVSLRSCALCIVDGKGTVLLERELPCEVSDIAACLGAFPHPIERTGFEAGTMSQHLFFGLKAEGFDVVCMEARQVNAALSAMRNKTDKNDARGIAQILRTGWFSPVHMKSREAHGIRALLSTRKALLKKTMDLANEVRGLLKIFGIRLPMTVKHGSFDGVVRPLIEMDDVLVHALVPLLDARVVLYQHFLELDRRVKRAASHDEVCMRMMTVPGVGPIASLTFKAAVDDPTRFKRSRTVGAHFGLTPRRYQSGEHDNPGRISKAGDRDVRATLYAAANALLMRTMAGSQIKSWGMRLMRTKGRRRAVVAVARKLAVLLHRMWVDGTEFRQDQVGGMA

SEQ ID NO: 325173 - protein, 425 aa, unidentified
MEQSTRFVGMDVHKDTIVVAVTATGEVGKAIPYGTLSNTAAALEKLVKRLHQAGCGPLKFCYEAGPCGYGVHRTLAKMGEDCMVVAPSMIPRKAGDRQKNDKRDAASLAVLHRGGLLTAVWVPDAAHEAIRDLIRTRQAAVRAVRTARQQLSAFLLRHEHIYPKGRQPWSKAHRGWLADQRFVQPAQQIVLEENIEAVRLGELRRDRIDGHLRAQIPTWSLFPLVQSLCALRGLDTIASAGLAAAIGDPSRFASAPDFMAYLGLVPSEHSTGPKRRIGAITKAGDVHARTLLIEAAHNYRFPARVGRHKLAAVDGVSEAVRAIAWKAQTRLCHRYRRMMAAGKLKQIVVVAIARELAGFVWSIACITSDPPARTSVATPASEDSGLTNRGMTTISSHNDSQRHNEIDRPTTGRDHKGHSQPQGLD

SEQ ID NO: 325174 - protein, 385 aa, unidentified
MDEEANPTTKNGDKHMKKTDKYVGLDVHQDTTVIAVADGGRVGEVRIYGTIPSDLQALAKVLVKLGGEGVRLHVVYEAGPTGFVVYRRLKQLGIECIVVAPSKTPQPKGVRLKTDRRDALQLARLHRAGELTGINVPDEVDESVRDLTRARADAVQDLTRAKQRLKAFLLRQGYRYPGKANWSEAHQRYLRKLTLPLAALRSVLEEQLLAIDQVTERVKRLDELLEVQVPQWRYYPAVQAVMCLRGFQLNAATVIVAELGDVRRFAHPKNVMAFLGLVPKEESTGTTRRLGSITKAGNAQARWCLIEAIQKALTPPKVSARLSLRQEGQPAVYKELAWKIQVRLHKRGWHLLHRGVMKAKVNVALARELAGFIWDLLRQVPAPEA

SEQ ID NO: 325175 - protein, 528 aa, unidentified
MLHHVRTSRRENRKSKSIRRQNQSLQKPNGVISPRVKKVGGEKFAIVCVDPAKHRSEWMMADYFGNILIQPQTLEHQGPFFKSAVELIRQAQHHHHILDLIVVVERTGNYYLPPKRAFASAGFETRVVHPFATKQYRIPADPGNKTDETDLYAQHRAAVAGFGLCEYELESPYRELQLRARHRRKLVEKAAAIACQIREHLHLAMPGFASLFDHLLINKTAMAIARRCESPAKMIELGHAGLSRHLRDSTVRHQSRSMDKVLAWAAQAAGDNIQDGPLHHAIWTDLDELYQHFQRRISSLEQELASDLVQTPYIRLLAISGINVVSAAELAGEMGPMSRYANANAITGRAGLYPSRHQSDQTDHDSGPIIRQANRRLRCVLMRIADNLACHCNYYRAQADMDQARGVDARACRVKIAKRFSRLALACVAGDQPMKHPCFQEPDSILEKLRQFHYLHQTPLDRVLADLETTVEQLPYNTCGREAAVVAKVLEEHTPRHRGGVAIGELLPAVLARLNIKTTNSDKNRDRS

SEQ ID NO: 325176 - protein, 343 aa, unidentified
MQTITTIGLDIAKSVFQVHGIDAEGNVILRRQLKRRYVLVFFQKLPPCLVGIEACASSHHWSRELQALGHTVSLMPPAYVKPYVKRHKNDSTDAEAICEAVTRPNMRFVATKTSEQQSCLTLHRTRHLFIRQQTSVINAIRAHLAEFGIVAPVGRNGVEQLLGVVSDASDKRLPDVARACVAALGAQLQTLKIQILEFDRMIRAWHRSSEASRRLDDIPGVGPALATALVASVADPGAFRSGRDFSAWIGLVPKQNSSGGKDRLGNISKRGDRYLRSLFTAGALAVIRYAKIHGTKHRPWLTALLARRPTKVAAIALANKIARMAWAMMAKGERYKEPAALAA

SEQ ID NO: 325177 - protein, 544 aa, unidentified
MVAARLVLFGPSLSMTSASREVLIGGGPALRKGPALPRWRVCMFSQAEPSLGLKFRLKEYVMSQRKMSTFERLNSGRMNRKQRRELARRVAASDPGLSIVHPHAAGIDVGNSSHFAAVPADRDPLPVREFGFWTAELHKMAEWLVACRIDTVALQSTGVYWIPVYDILEQHGLRVVLVNGQHTQNVPGRKTDVQECQWLMKLHTYGLLRDSFRLAQNLEGVRTVWRVRGRHVEEAARSVQHMQKALTKMNVQLANVISDVSGLTGQAIVGAILQGQRDPYKLAELSDPHIQASQEEIARSLEGTWREDVLFELQQAMDSYQFAHTQIRQCDAKLKAYLASLQSRVLPQPVVPAESKPLQPKTRKTRQQGANAPPMDLTAELVRICGVDLTSIDGINIISAMTIISEVGPDLHQFQDEDHFTSWLGLTGNENLSGGKRVKGPKRKVKNRLADVLRMGATSLLNSDSYLGARYRQLRRNAKIPAVAVKAMARHLAVLVYRLLTKGQAWVDRGAQLYQQQRQERELIMLREKARKQGLQLVPLAPAN

SEQ ID NO: 325178 - protein, 412 aa, unidentified
MEGETVIAGVDTHKDVHVLCLLDGLGRKIWSGSFGADPEGYDRLAEAIGDPGSCMVVGVEGTASYGAGLTRRLAELGYNVVEVLRPKRDKARPGEGKSDPLDAERAARKAASGRGCSVPKSQDGWVEAVRQLYVARRLAVATSTSCVACAKSMLTTAPGALRERFRGRERPKDLMPLLARGRKAGDALEESVLASLRSVATVWKEARSQVESLDARIRALLEANAPALLGVEGCGTTTAAALVVAAGDNPGRLKGEAAFSMLCGASPIPASSGKTERHRLNRGGNRQANWALYEIAIKRMAYDERTKRYVARRTSEGKSRREAIRCLKRYIAREVYRVLMDPNPDGAAPEGPELAKMRKAMRVTQKQAAAGLGMSAASLGHLEHGRRRSTKLERRYYELLCELKGALPQTAY

SEQ ID NO: 325179 - protein, 405 aa, unidentified
MIFVGIDWAEHHHDVCLVDATGQVLATGRVADGVQGVSRLHELVAAHAEDPAAVVVGIETDRGLLVGALTAAGYQVYGINPLQASRYRERHVTSGAKSDAGDARVLAEIVRSDRHHHRLIAGDSDQAEAIKILARAHQGLIWARQRHLNGLRNALREFYPAALAALGTDLADPEALAVLGAAPTPERGRALQVTQITGLLGQAGRRRNLASRAAQIQQALTSPQLAAPAPVTLAYRHVVGAAVKVLAELTTQINALEQELTSAFEIHPDAEILRSLPGLGVVGGARVLAEFGDDPTRYPHPTARKTYAGTAPITRASGTRKVVLARLARNKRLSDACYRWAFSALTRSQGARAYYDQLRARGATHHQALRALANRLVGILHGCLRHRSTYDERTAWAHRSQQAAA

SEQ ID NO: 325180 - protein, 411 aa, unidentified
MEVLVERQSALDVHKAQVTACVRVPDENGGRRELIEQFSTTVPGLLALADWLAAHDVKHVVMEATGDYWKPVWHLLEDDFELMLVNARHVKQVPGRKTDVSDAAWLCRLAEAGLLTASFVPPKPIRDLRLLTRYRRTQIAERKREAQRLHKALEDTGIKLDCVATDILGKSGRAMLDALVKGTTDPEVLADLALGKMRKKIPALRDALQGRFGTLHALLIGSILAHLDFLDEHISGLSEAIEEQIAPFAGARDLLMSIPGVGQRTAEIVIAEIGVDMTCFPSAGHLASWAGQCPGNDQSAGKRRSGRTRKGSKNLNLALKDAAMAAIRSNNTYLQALYRRKRSALGHGRAIGAVKHAMLCACWHMLSTGELYNDLGGDYFQRRDPERQTKRLLAQLQRLGHTVTLQGASAA

SEQ ID NO: 325181 - protein, 443 aa, unidentified
MKSLYMGIDASKGYADFTVINESKEVIDKNYQLDDTDSGHKQLKARIKKYFSDDSDMVVYAGVESTGGYENHWYDYLKSLRTEYKIEVSRINPLIATYSSKADMKRNGTDKISALNIAECLISHKEKIKYDQTDSFRALKRSWTHIVLLTKQKVQLENQLDSFMYESNTELLAYCKHGKNLWLLRLLEKFPTAKDLAKANIKEITKLPYITDKLALNIVDASKRTVSKDDNPFSGILIKSLATQILGLRKAIALLKKEVFKQCDFEEIKILRSFKGMGIDSATGLFVIIENIDRFASAKKLASFFGIHPVFKQSGDKTSKVCMSKRGSRLARKILFMVALSAVRCNPHIKKIYQRHLTKGMTKKAALGAIMHKITRIVYGMLKNKKEYDPQVDIKNSLISTDRVITVSKVDILSRRYQGYDSAAPVSRRQSKTRKEQVKLQKV

SEQ ID NO: 325182 - protein, 427 aa, unidentified
MAYRIAGIDVHKRVLAVVIADVAVEGAYEFKRRRIGTRPSELRALAEWLISEEVEEVVMESTAQYWRPVWSALEAIWSPARRRREGAAARSGILHLAQAQSNRGAAGRKKDFPDAERLVKRLAAHELTLSFVPDAEQRLWRTVMRRKYQLTCNRVQLQNRLECLLEEVQIKLSSWVSDLLGLSARRMLHALADGETNPTALAALGSPRLRATPEELADALGACKDMHPVHRRLLKMMLEELRLLEGHINELEQQMANLLSVHQDAVKRLAEIPGLGVDSAQQIIAEVGPHAAPFPSPKNLASWVGACPGEEESAGVNYSHRSPNGNRQMRRLLNQAANAAVKTRGSIFELLYRRLVIRLGHSQAIGAIAHRLCRLIWIVLHKGVRYEERGPAVTRSRAQRRAAKMIRELRKLGYHVALIEAPSEIQA

SEQ ID NO: 325183 - protein, 429 aa, unidentified
MSYRIAGIDVHKKMLAVVVSNVEVESEFQFERRMFGGNPEQLRLLAAWLLEQEAEEVVMESTAQYWKPVWGTLERYWKPTREKREGAKQRSGTLHLAQAQSNRGRRGRKKDFVDAERLVKRLVARELTLSFVPDAEQRLWRAVTRKKYQLRRDLVRLNNQLESLLEETHIKLSSLVSDLLGVSSRRMLKALADGETDPAALAALAHQRLRATPEQLCDALGACTDLKPVYRRLLKMTLEQLQLLEQQIGQLDQELATLLHPHQDAVHRLAEVPGFGVDSAQQIIAEVGPTAATFPSEKCLSSWVGACPGDEESAGVNHSHQSPKGNRHMRRLLNQAANAAVKVKGSIFEVVYRRCVPRLGHNQAIGVIAHRQCRLIWLILHNGAIYDERGPAVTMQSKYKRTWRMIRQLRQLGYRIDPPNLQPSQAQAR

SEQ ID NO: 325184 - protein, 339 aa, unidentified
MTSVTVGLDTAKSIFHVVEKNASGRILKKVKLPRNKLINYFANKEACTIAIEACGACHYWSRAFSQLGHRVMIIAPQYVAQHRIGNKNDFNDAQALADVAQREDVRTVPPKSIEQQDAQLLHRVRERYVKQRTALGNQIRGLLAEYGIVIPRGISSLRKALPFVLEDSENELTSLVRMMLDELNCELITWDDKIKNIDKLFVQQARENDQCQKLQTMTGVGPLISSILWVALGDGKNFKNGRHFAAWCGLVPKQHSTGDKARLLGISKRGNAYLRTQLINGARSALKHAKNKDDRLSVWAVNLEVRAGFNKACVALANKMARMAWAMVVKQEEYKTQAV

SEQ ID NO: 325185 - protein, 351 aa, unidentified
MEQISRIGMDTSKYIFQLHGVNTAEQPVLRKKLRRKEMFAFLEKLAPTVIAIEACGASHHCARLLQSFGHSVKLIAPQLVKPYIKRGKNDAADAEALCEAMSRPVLGLDPGMRFVPVKTAEQQAGLMLVGVRDRLIRNRTQLSNAIRGYAGEFGLTAAKGKAHLAPLLERIHADDNLPALARELFAAQAEEYAQLQAQIDEVDARLMAWHRADECSRRLSKIPGVGPIGAVLLTMKTPEPELFRSGRQFAAWIGLTPKDHSTAGKVRLGGITRAGDEGLRSVLVVGATTVIQHAQRGGRPSPWLTQLLKRKSPKLAAVALANKTARIAWKLMVTGENYAAKAAPAALAAAA

SEQ ID NO: 325186 - protein, 354 aa, unidentified
MIIVGCDYHPSFQQIAFVDTETGEVRERRLQHREEAEKFYRDLAGQRMKVRVGMEASGQARWFERLLAELQFQLWVGDAAEIRRKRGRKQKTDRQDAQHILGLLLKDDFPPIWVPSWENRDLRQLLWHRHRMVQARTRIMNQLQAVALNEGLLCKKKLWRERGRQQLEAFPLAPWASRRRHDLLELLDRLNPTIAELSQAVEKEAEKCPAAQRLMTHPGVGALTALAFVLIIGDVKRFQCGKQIASYLGLVPLEDSSGNRRRLGHITKQGSSMLRFLLVEAAQVTVRSLSEWRGKYMHLMIRRGRKIAKIAMARRLAVRLYWMMRQGWDYQQCIEFGSHAGQPETGHGVRSNIE

SEQ ID NO: 325187 - protein, 415 aa, unidentified
MIEVVLERCAGIDIGKRFVVVCLLSGAAGQSPRLEKRQYDATVGELERLREWLLAEGCTHVVVESTGSYWKPVFNVLEKSVTVVLANPVQVKNLRGHKTDRKDSEWLAYLLRHGLIRPSFIPPPEIRELRSLTRQRRDLIAAGARERNRVQRLLEEANIKIGNVLSDVFGVSGQRMLEALVEGKATPAEVAQLAVKSVRRKIPLLEAALEGHRLTDTLRFLIAQDMRHMEFLEKEIAALDEQIAEHLQPFAQQVELLGSLPGVDQVTAATILGEIGVDMTRFPTAPQLASWAGLCPGNYESAGTHKGGRIRRGNATLRATLNQCAWAAAHTKGTRLTFRYQHLVPKRGKKRAIVAISHQLLTLIHFLLSERIPYDDPGWKPKLTPKARTRRAQYHLRCLHRLGFKPHVPPEVTNT

SEQ ID NO: 325188 - protein, 314 aa, unidentified
MTRQAVVVGIDIAKSWFDVAVLESGESFRLSNDVAGWKALIGRLRRFSVAAVGLEPSGGYERGLGAALHKAGLPVRNVNPHKLRHYGRALGVLAKTDSIDALLIARYTAQMPTRPLRADPVGRQLGDLVAARRQLSDDRVRLANQLEQVREAVVRRIFMARLKRLATDILIIDKRLDQLVAGDPQLARKDSLIQSLCGAGPVLSHTLLAFAPELGDADRRQIAALAGLAPYDHQTGVFRGKPSIWGGRPEVRRVLYMAALTASRSNPTLRTFHQRLIAAGKPPKVALVAVARKLLTILTAMLRTNQPWAEPNPA

SEQ ID NO: 325189 - protein, 344 aa, unidentified
MSEVSTIGLDIAKHVFQVHGVDGSGAVVIRRKLRRAEVLRFFEGLAPCLVGLEACATAHYWARSIMALGHRVKLMPPTYVKPYVKRQKNDAADAEAICEAVSRPTMRFVPVKGEEQQGILVLHRTRELLIRQRTMLINALRGHLAEFGIVMPQGRAGLSTLVRLVEGDGHDGHDLIPAMAREALLAVVGQLRDAHERIAAIERKIMAWHRSNEQSRRLETIPGMGPITASAIAATITDASLFRSGRELAAWIGLVPRQNSSGGKERLGHISKKGDPYLRRLLVVGAHAVLRFARTGKAATTKWAAALLARKPYKLAAVALANKMARIVWALMIKKEVFQPQSAG

SEQ ID NO: 325190 - protein, 346 aa, unidentified
MPIVGGLDIHRKQITFDYLDTETGQVRRGQVSPADREHLRAWLARFAGREDVAFAVEACTGWRYVADELALAGVAVHLAEPADTAFARGRKRHAKTGKTDCRHLRMLLAEGRLPECWIPPGRILECRALLETYHDLRAEHTAWVQRIHAVLFHQGAPALGEGTLRTGQGRAALRAAAADCLSPAGQLQVATALDMTDALEARLHELRHQLLDAARHLAGAKVLAARLYGVGPVTALAMTCWLAGAGRFSSSRQAVRFAGLDVTVWSPDRKGPPGRLSRQGPPVLRWAVYEAGKAHARASAPDHRYYAAVKDRQGGKRAALSEARKILRQACHILAGLGDDALAPAA

SEQ ID NO: 325191 - protein, 425 aa, unidentified
MKATTDFAATIGLDWADQKHDLWIRPADGSKAEHLQLPQTPEALHQWVAKLRERFGNRPVAIGIETSRGPVISALLGYDFIVLFPVNPKALKDYRAAFSVSGAKDDRTDAMLLEEFIRLHRDKLPALEPDTELTRKLAGLVETRRRLVDERTRLVNQLHSCLKTYYPLAEILLDGKLNHPLAADFLARWPDLETLKKAEAQTLRAFFYKHNSRGAKKMEERLEAVPKAKALTTDPAIIIPARGLVGAFAGMLKPLHQAVAHLDKEIAQAMDQHPDAAIFRSLPGAGPALAPRLLVAFGTNRGRFESATEVAQFYGLAPVVIQSGNSKTIHMRHRCPNFGRQTFHENAGCAIKKEPWARCFYEQHKQRHDGKHHQACRALAYKLIRIYYACWKHCKAYDPNCYLLALEKHGSPLHKKLQNPTPKPL

SEQ ID NO: 325192 - protein, 354 aa, unidentified
MPKTASTQIAVIGIDIGKNSFHVVGHDKRGAIVLRQKWSRGQIEARLANLPPCLVGMEACVGAHHLSRRLKAFGHDTRLMPAKYVRPYAKGQKNDFNDAEAIAEAVQRPTMKFVATKTADQLDLQALHRVRERLVSQRTGIINQIRAFMLERGIAVRQGIRFLRTELPIIFASRTDVLSPRMLRVIEDLAGDWRRLDERIEALSREIETIARQDAGCDRLMSVPGIGPIISSAVVAAIGSGDVFSKGRDFAAWLGLVPKQISTGDRTILGKISKRGNRYLRVLFVQAAWVVLVKPKSWERHGLKSWIEAAKKRLHHNVLAIALANKLARIAWAVLAKGRGFESTRTIGGSTQAA

SEQ ID NO: 325193 - protein, 454 aa, unidentified
MSLEDRPVEQPHAAGVDIGAREIFVAVPHDPEGQPVRKFATFTEDLRRLADWLQGCGVTTVAMESTGVFWIPLYELLEQRGLKPCVVNARHMKNVPGRRTDWHECQWIQFLHSVGLLRAAFRPEDQVCAVRAMVRHRQQLVEMAAQHIQHMQKAMTLMNLQLQHVLSDITGTTGLAIVDAIVAGQRDPKELSKLRDPRVKAGSDVIEKSLCGNWREEHLFTLGQSRQFHRFYQEQIVICETHIERLLQEFAPRVDPQQTPLPPDNRGNRSGAKRRKKAGHVESKFDLRTEAYKLFGVDVTQIPGLETNVLPLFSELGRDLSRWPTASHFISWLSLCPDNDISGGRVLWRGMRKTNNRAGQIFRFAAQSLHRSPTPIGEYLRRLKAKLGPAGAITATARKIATLFYILVTRQVEFDHTLWHATDAQRQRRIQARLTRQARRLGYQLVPLEVSSSI

SEQ ID NO: 325194 - protein, 470 aa, unidentified
MAAVMIGVDPHKASHTAVAISVAEEPLGELRVRACAAQAERLLGWAAAWPQRTWAVEGAGGLGHLLAQQLLAAGERVLDVPPKLGARVRLLAVGDVNKNDPNDARSVAIAALRSAGVRGVTPDDHAAVLKIWSRRYRDLGRTRTQVVCRLHAVLCELIPGGVSKAITAGQAARILGSIAPPDAVAAARCELAAAFLGDLRGIDARIRETRKRLALAVQAAGTSLTGLFGVGPVVAAAVIGDVRDVSRFPGRDHFAAYNGTAPIEVSSGPRKIYRLSRRGNRRLNHAIHMAAVTQIRHSHSEGRAYYDTKLAEGQTRKEALRSLKRQVSNAIFACLQADARRAAAQTEGPGGQQGNDSAASAAGLHPRHRLFGQATPGPRHHPTTAAGNPAPGPVRARGRAGHSSIAATLPPAQPQVQVERPQRSEDERPGGAARRRPHSAARKARGQGSLRKPQRPKGTSQAAKNTAEAP

SEQ ID NO: 325195 - protein, 402 aa, unidentified
MWYAGIDWADTHHDALVIDESGQQVSSLRVSHTPEGVSHLISFLSSMVPTKEQMACIIETNHGLLIAALLEAGFAVYPVNPKTVDRRRGASGAKTDAIDAYLLAKTGRADLADLRQLKPDSPVVAELKALTRDQDALIQSQTRLVNQLTACLKAYYPVALQLFTKLHQASTLKFLQTYPTPQAAQAASVEQLTTVLKATRHPTPAKTAQHIWHMLQQPQLQADAITTRTKSRLMLALVAQLLPLIGQIAAYDKEISTLFLTHADQEVFRSLPGAGKRLAPRLLAEWGDDRERYSDASSVQALAGTAPVAYESGNYSKPHKRYACIKPLRNALQQFAWQSTKQEAWALAYYQRKRNEGKSHSMALRALANVWVRILYAMWLNHTCYDGATFEAAQRAHTKLAA

SEQ ID NO: 325196 - protein, 403 aa, unidentified
MNMNAVGIDVSKGKSMVAILRSYGEIISKPFEVKHTVSGIRSLIEQIQSIDGESRIVMEHTGRYYEPLVRELSKADLFVSAINPKLIKDFGDNSLRKVKSDKADAVKIARYTLDSWTELRQYSLMDEIRNQLKTMNRQFDFYMKHKTAMKNNLISILDQTYPGANTYFDSPAREDGSQKWVDFSATYWHVDCVRKLSLNAFIDHYQKWCKRRKYNFSRSKAVEIYEASKELVSILPKDDLTKLIIKQAVEQLNTASQTVEQIRTMMNEAASKLPEYPVVMAMKGVGKSLGPQLMAEIGDVSRFTHKGAITAFAGVDPGVNESGSYEQKSVPASKRGSSTLRKTLFQVMDVLIKTKPQDDPVYLFMDKKRAQGKPYYVYMTAGANKFLRIYYGRVKEYLSSLPE

SEQ ID NO: 325197 - protein, 452 aa, unidentified
MRKDERSRHEEYCQFIRRIRGSKEHLVVGIDIAKDRHHAFFGTATGKVLLKKLVFQNNQEGITRLIEHAEALKIRHHLSQVVYGFEPTGNYHKPLGNHLVKCGQMVVLVSGSSVKKNREIMDGRWDKNDTRDAANIADLISQGRCLFYEYPSQGIRDLRDLLSLRKRFKKEECRLMLRIRNNLVTKHFPEFDRFFKVYLPESLAIAKWCLDPRKIREQDFRTFFTLVASKRRSLAQENRLRAIHFMAGNSIGCDMGEPSVFEARALVDQVEAVRAVIEDIEARMEQVCRGFPEYQFLLSIPGFGPFISAVVLATIGDPYRFKNASQVIRLSGYDLNASRSGRTSDTAVPKISRKGNSDLRYALYQAAMLSSTKNKNMMVYVGLKLQGRAREKGITTKMRVKLAVKLLVIAWTLMKKKEPFNPTYLSGVDIPLSAREPGLISLRPHVGPRLAQ

SEQ ID NO: 325198 - protein, 383 aa, unidentified
MSRVVIGMDPHKRSATIEAIDEREKALAQGRFSTDTEGYQQMLAAGRAFNDRVWAVEGCSGIGRHIAQRLVADGEAVLDVPPKLSARVRVFDTGQGRKTDPVDAHSVAVAGLRSRSLRTVTPDDVTVVVRLLADRRDELGRARTDIISRIHHLLLELIPGGAKKFLTRGQVSYLLRTAPPPKNIVAKTRHDLARELIEELTLIDAKIRAADKQLRQLVTEHGSSLTELYGIGPSGAARLIGDIGDIHRFRTAAHFASWNGTAPLEASSGDQRRHRLSRAGNRRINRVLHTMAIVQLRRDTPCRAYYRRRLTEGKTTMEALRALKRHLSDVIYKRMLHDAKTRGAGETGPGGHSGATLQSSADGLIPDSRLFRQVTTRTRHQEA

SEQ ID NO: 325199 - protein, 354 aa, unidentified
MKKIFIGIDFSKEKFDATLIQAEGLKECAPSVHEVFDNKTSGYRRLVKWVKTHAEGFTADTWLFCGENTGGYSIGLSNYVYASGYDMWLECAYKIKHSAGIQRVKTDKADSRTIAEYAMRNYDKMIPYKPQSASLTCLREVFLYRHSLVRQKVALQVRRDEKRLTQEKSEARAFVSFTSKHLITEVNKAIAKCDQKIKDIIASDDELREVFDIITSMPGIGIQNATCLMVYTDNFRKFDLNSRKIGCYYGIAPFGRQSGTSVNSRPQVSPFANRMIKSLLSQAALAAIKFDMNVHNYYQRLIERGKHPLLVHNNIKNKMLHILVAMVRDRVKYNPDNVYGTSNEVSLAPQVLNI

SEQ ID NO: 325200 - protein, 370 aa, unidentified
MNSIIYVGMDVHSSNYTLSCYTFENDQDFATVQVEPDYRNVLKYLERVQENYGGPCEFRCGYEAGCLGFTLYHQLTSHNVNCTILAPSTMPSRKGEIKTDKRDAMKIARCLAHNTYSAVHIPTKEDSDVKEYIRMRDAHKDELKHMKQRILAFCKLHDLRFAGGKNYWTQRHLGWLKSVAMDGMLREIMNEYLLTFQELTDKIERMDARIAELAAGPNYAEKVGKLSCFIGVRTHTALALIVETGDFNRFARAEQYAAFLGLVPGEHSSSTDMNRLGITKAGNTHLRRLLMESAQCYSRGQVGYKSKQLKARQYGNAPEVIAYADKANERLRRKFYKLVLKSNKKHNVAVAAVARELACFVWGMMTDRIA

SEQ ID NO: 325201 - protein, 376 aa, unidentified
MREKLRFLGLDVHAETIAVAVAEPDGEVRSLGTIANREESIRKLIRKLGLPSQLRACYEAGPTGFVLYWQLAQLGVECAVVAPTLVPKKSGDRVKTDRRDALKLARSHRSDDLTAVWVPDEGSEALRDLVRAREAAKQDQLRARHRLTKFLLRTGQRPPLGVKTWTERYVEWIQQIHYTHPAREATLLDCLNEVQHMAERVKRLEQSIVDVVKLAPAPVQGVIRGLQALRGVAHISAVTIIAELGNISSRFESARKLMGYSGVFPSEDSSGERIRRGSITKSGNAHLRRIVVESAWSYRHRPSIGAKLRKRQEGVPAEITEIAWKAQNRLHKRYMKLMAAGKEQRKVMTAIGRELMGFIWAIGVKAEAACMQQKAA

SEQ ID NO: 325202 - protein, 370 aa, unidentified
MLDTTTFVGLDVHARSIKAVSLDVMTGEVRCATFGYEAGAVAEWVRSVDPRARCVYESGVTGFDLQKRLSGLGVDCVVGAVSKMIKPSADRRRKNDRNDAEFLARMLSVGNVVEVWVPDDECEAARDLTRALEDARDDLSRAKQRLSKFLLRHGLAFDERTPTGRRKGNWTRAHWSWIESIRFAEGADNDVLAYYVDAVRRAAEEKARLEGLVEAEARKPRWRRRVDSLRCLKGVDTATAADLVFEAGEFSRFRNARSFAAWVGLTPSEHSSGESDRRGAITKAGNKHLRKALVEAAWHYLTCSGRPKDLAKGQAPDRVARRHAAKGVRRLVERREALLARGVHGNKANVATARELACWVWAVGLMAEEA

SEQ ID NO: 325203 - protein, 338 aa, unidentified
MKITTIGLDIAKSVFHAVGVDKAGKLIKKKMLRRKDLLPFLAQIEPCLIVMEACSGANYWAREFELLGHNVKLIAPQFVVPFRQGNKNDYNDALAIAEAAQRPNMRFVKPKSVEQQDVQLLHRMRERLTKQSTALINQVRGMLAEYGIVITKSKSAFKVQFPDILADETNALTTKGRAIFYQLYEEFSDIEQRLKGCDVQVLTETKNNVICQRLETIPGIGPVTATAFYAAVGDGKDFSNGRHFSAWCGLVPKQHSSGGKDNLLGISKRGNAYLRTLFIHGARAVLQHSCHKQDKFSCWAIQLAERRGFNRACVAVANKLARMAWVIAAHDEEYRLPV

SEQ ID NO: 325204 - protein, 433 aa, unidentified
MKVMYERVAGIDVHKDMIKVAIRSPGDKPWTRKTEILEYRTFYGVLQEMARELRRRGVAHVVMEASGVYTEPVYYALCEQDFTEIVVVNPAHAKALKGHKTDAKDCARLAELFECGLLHGSYIPAPALKEVRDLARYRIKTVQARTSEIQRLAKALESAGIKLGSVASDITGVSATAMIEALIDGERRGGVLADLAIGRMRAAGKLTDLSMALAGRFTEHHALLCRLRRDRITSFGAAIADLDERIAGKASRWQREADLLKTIPGFGDVVTWAWLGEIGPAPHLHFSGPGKLASWVTLCPGNNISARKRKSGRTGDAGTYIKPALIQAAWGAIRVKGRLQARYNRLVRRFGGDKNPAARKKAITAIAHTLLKIAYQVLKSGTPYHEPGADFYVRRESPAQRQAFLERQLQKLHPGCTIAITISPPEAALTPGA

SEQ ID NO: 325205 - protein, 419 aa, unidentified
MAQPVWAGVDAGKADHYCMVINDDAQRLLSQRVANDEAALLELIAAVTTLADGGEVTWAIDLNAGGAALLIALLIAAGQRLLYIPGRTVHHAAGSYRGEGKTDAKDAAIIADQARMRHDLQPLRAGDDIAVELRILTSRRSDLVADRTRAINRMRAQLLEYFPALERAFDYNKSRAALILLTGYQTPDALRSAGGARVAAFLRKRKARNADTVAATALQAANAQHSIVPGQQLAATVVARLAKEVMALDTEIGDTDAMIEERFRRHRHAEIILSMPGFGVILGAEFLAATGGDMAAFASADRLAGVAGLAPVPRDSGRISGNLKRPRRYDRRLLRACYLSALVSIHTDPLAHLLRPKTHRRKTPHPSRPRPGPPPPQRPVGHAARPRCLPPRNHYRGGLTTSLRISFSRRAGPVAGPRP

SEQ ID NO: 325206 - protein, 403 aa, unidentified
MIFVGDDWAEAHHDVYLMDESGRRLGSQRLPEGLTGIRQLHELIAEHAEEPDQVVIGIETERGLWVGALTGAGYRVFAINPLAVARYRYRHHVSGAKSDTSDAKLLADLVRTDRHNHRLIAGDSPEAEAVKVLARTHQSLIWTRNRHTNALRNALREYYPAALEAFEDLAHGDALGVLGRAPTPQVGAHLDLAAIQSALKRGGRKRNIAARAHEIRAALRTEQLTAPAPVAAAFGATTGATVGIIAELNRQISELEASLDKHFETHPDADIYRSLPGLGVILGARVLGEFGDDPNRYTDAKSRRNYAGTSPLTIASGKKRAVLARHVCNRRLYDAIDQWAFCSINTSPGARALYDQHRAAGDLHHQALRALGNRLVGILHGCLRHHTPYNEHTAWAHRMPAAA

SEQ ID NO: 325207 - protein, 391 aa, unidentified
MFYIGIDIAKKNHEASIIDSSGKSLSKSISFPNSTKGIEKFNNFISEFGVTTNNCIIGMEATGHYWISLFSYIIDLGFTCYVINPIQSDAFRKMYVRQTKNDSVDSFIIAQIMRFGEFSISNFSDENTFALRNLTRYRFALVDECSDWKRKLVAILDQVFPEYSSLFSNIYGVASKELLSKYPLPEDMLSIPAEELGNLLYECSKGRLGINKAEEIQSRARETFGIKFAKRSFSFQIKQIISQISFLEEQLKEIEIEISYLLEDICPIITTITGIGSVLGASIVSEIGNITRFERANQLVAYAGLDTRVKQSGDFSATNTKLSKRGSPYLRRSIWLAATVAAFKDPALSIYYQGLRARGKAHGTAIGAVARKLTNIIFAALRDQKPYTPNI

SEQ ID NO: 325208 - protein, 368 aa, unidentified
MNHITSVGLDVHARSIKACAFNPLTGEVARRSFAYSPAEVAEWILALEAPKAVYESGVTGFHLQRELEALGVDCVIGAVSKMDKPAAEKRKKTDRRDAAFLARQLALGTISEVHVPDPECEAAHDISRALADARDDVTASKQRLSKFLLRRGYVWDETNDRGQRKKTWTRDHWAWIESIEMAERAAQETLDYYIDRCKRAIEDKRELEAKVKSHAVEGRWKPTVDALSCLKGIDVVTAFALAVETDGFSRFRNASAYASWLGIVPSEHSSGEGRHRGGITKSGNKHLRKLLVEASWHYLGASRHEKSMRRGQEVAPEVRRHAARGVRRLVDRRAGLLDAGKRSVVANCATARELACWAWAIGCMVESA

SEQ ID NO: 325209 - protein, 343 aa, unidentified
MQTITTIGLDIAKSVFQVHGVDADGQVLVRRQLKRRYVLAFFQKVPPCLVGIEACASAHHWARELQALGHTAKLMPPAYVKPYVKRHKNDAIDAEAICEAVTRTNMRFVATKTPEQQSCLTLHRTRHLLMRQQTSVINAIRSHLAEFGIVAPVGRNGVEQLLGVVADSNDKRLPEIARACVAALGAQLRALKLQILEFDRMITAWHRSSEVSKRLDQVPGVGPVLATALVASVADPNAFRSGRDFSAWIGLVPKQNSSGGKERLGNISKRGDRYLRSLFTTGALAVIRYAKIHGTKHRPWLTALLARRPTKVAAIALANKLARMAWAMMARGERYKEPAALAA

SEQ ID NO: 325210 - protein, 373 aa, unidentified
MPNVQRDFAKGKPICVGLDVHKRAWTVTVLCQGEELYHATVVPDVGALIRLLKRFEASGVHTVYEAGPTGYWLHEALVEAGFDSMVTPPSLVPHVGGRVKTDRRDSRKLAAMLANGFLRRVHVLTPEERAHRQLLRTRNQIELHRRKAQNQIKSLLLFHGKRAPATLKERWSEAHVSWMQTIQWEYPSLKISLDAMLTMYRNLTDQYKQLTHEIELLALTEKYRERARLLTQIPGIGIFTAMALLIELQDIERFARADQLTSFLGLTPSQHSSGERIRMGHITRCGNYHVRTRLVESSWTLIRYDAGAKATYERIKHQTGSGRKAITAIARRLALRIRRVLLDKAPYRLSDGGKLATGRDKTREAKRFVLKPL

SEQ ID NO: 325211 - protein, 447 aa, unidentified
MKKVFIGIDVGKFKNSISIIDTEGNPIVKKGLSIENDYYGFARLEEQIDLIINNYGFTYDDCIAGVESTGHYWFNLRDYLKDIGIETVMIKTDSVKHRRALEEGHKGKNDTLDARVIASCLRNGNYVYIRDNERELRALQKLTRMRNDISDELVALKNKIHRCIDICNPVFFKIFENLNSKTGVALIKLYPSPEDIINVDLDNIKKELGEIVYKPNMRMVSLYKEECEIWSRLIKEPSYAEKVEMIAYIDKFLLQNESKEHLDKQIKEIAKNIIPLYSEFEQIKGIPLIQLISVLSEMGDIRNFKNTRAILAFLGLSLKGNASGKYIGERRINKAGSRIVRKHLFNIMDTLIKHNEYFRIAYCYYKSYNHKNPTKKRSMQIAVMCKFVRVMYGMLKHNTNFDYKEMLKGYYFGDCNMKVFKEEFEGEKRTKKIENYKLAYSIFTNYS

SEQ ID NO: 325212 - protein, 341 aa, unidentified
MKNKSFIGIDISKNVIDASIFCERTPIKDFPHDVFNNSRKGFGEMCTWLKKNHVVLSNCLFGMEFTGSYSMELEKFLNARKYQFCMLSTHVIKHYPMGPKDKSDKIDSAKIADFLYRYNGTECVKPYKMPDKTMQRLKALMNERKFLVEQRTCFMNRRQLCTTKEDAQLYDSYIKKLSHDIENIELEEQKLLVTDESLFTTYWNLLTIPGIGFVNAINVIVITRNFTAFETARQYASYVGVAPHFRTSGTSVRWRPRPSARSDGQAKADLSMAATVAVQYDAELQSFYNRKLGGKQDSDTKRKALNAVKFKLILRMFAIGKQNRKWEPLDSKSSNEKLAIS

SEQ ID NO: 325213 - protein, 403 aa, unidentified
MNSVGIDISKGRSTIAVMRPFGEVVISPFEVRHTDSELSKLARRLKSLNGETRVVMEATGNYHAPVAKLLHDAGLYVSVVNAKLVHGYGNNDLRRVKTDRKDAVKLANYGLDRWLTLPRYIPEEDTRLLLKNCYRQYRQYSKVQTILKNNLISLLDTVFPNVNRLFSSPARADGSEKWVDFVAEFWHCRCVSEKSEKVFTNKYQRWCRKHGYNFSEEKAHTIHAEASGHIGVMPKSETTKLLVEQAVAQLRATSVALTALKREMLTLAAQLPEYPVVMGMFGVGPTLGPQLIAEIGDVRRFYSKKALVAYAGLDAPPNDSGDVTGKHKSMSKIGASSLRRTLFLVMSVYLRSAPLDEPVYQFMDRKRAEGKPYRVYMMASANKFLRIYYATVKAYLESLELTA

SEQ ID NO: 325214 - protein, 340 aa, unidentified
MNITVIGLDIAKQIFHLVGLDATGKKVIKKTLRRTKLLEYFANLKPCVIGMEGCASSHYWARELSKLGHQVKLLPAQYVKPYVRGNKNDYNDALAIAEASRIPEMREVRLKTVEQQSIQALHRLRRGAVGDRTKLCNQVRGLLAEFGIIINQGISSLRKKIPEILEDAENELHWIFRDALALKYQQLRQLDTLVDELTTFIEKEAKQHPQIKQLQSIPGFGAIVASTFFSVIGDGTAFKKGRDVSASLGLVPRQHSSGGKNALLGISKRGDKYLRSLLVHGARSVVNHAHKKDDALSLWVTRLVNTRGKNKATVALANKLARIAWAVTTSRKPYQTNFVV

SEQ ID NO: 325215 - protein, 335 aa, unidentified
MKNFDYYIGIDVSKLTLDISILFECENATKTDYYKIENNEKSIAQFVKNKLGKYDAQQLLFCFEDTGIYSMPLAYYLNNNELTYWQVPAVEIKRSKGISRGKDDRIDSKDIAFYARTHMHKFRQGKVSAQSIQQLRLLFTEREKVLRALALFENTSENKGFISKEVFKTVASVNRSIINQLKKTLKSIEQKMLNIIAMEEKLNSQYKLVTSTPGIGMQTAIYLLIATKGFEAFENWRQLACYAGVAPFPYQSGTSIRGRNKVHPLADKKLKSLLNMCAICAVRHDRELKAYYERKVKEGKSKMLVINNVRAKLLARVFAVINRGTPFVNTHKFAA

SEQ ID NO: 325216 - protein, 316 aa, unidentified
MTRRGKEKTDERYHRGRYFERRVGHILEHKQFSNNKMGLRALIRWVRQAKVSLVVFEATGVYHRLLETSLAAHDLPFARVNPRQARRFAEGTGTLAKTDRVDAAMLARMGSLLELKADKPKSETLHNLKGMETARQALIKDRTAARARLNTATYPLLRKQATLRLRQIERDITQIDAAIEAIIAADKALSQKADILISIPGIAKITAYAMLTEMPELGTLSGKQAASLAGLAPISRQSGKWQGKERIQGGRACLRRAIYLPAVVATRFNPDMKAKYHELIANGKCKKLAITAVMRKLVVMANALLRDGRKWTETRT

SEQ ID NO: 325217 - protein, 343 aa, unidentified
MKLSRVGVDLAKNVYQLHGVDRHGKTMWKRRLRRGQWLQALLDKAEPGCVIGMEACTGAHHWARELQSRGYTVRLIAPQFVKPYVKSNKNDANDAEAICEAMSRPHMRFVTVKSVEQQDIQATHRVRSEIKDQRNAKANQIRGLVAEYGLVAPQTLLGLRSAIPCWLEDADNGLTDYFRSLLHGLWGDLVSLDDRMAELDKQIKRLADSSEVAQRLQQLRGVGPLVATALIATVGTGEQYCKGKQMAAALGLTPRQCSSGDKQRLFGISKRGDVYLRTMLIHGARAVVSQAKHRDDRLSRWVTNIAKRSHPNVAAVALANKTARMAWAMLRNAANYDPDFAIG

SEQ ID NO: 325218 - protein, 359 aa, unidentified
MLVERTSVGLDVHARSVAAAAIDGVTGELVQAKLTPSHDHIRSWIAELTGPVAVAYEAGPTGFGLYRSLTQAGIRCVVAAPSKLQRPAGDRVKTDAKDAVHLARLLRLGEITPVAIPSIAQEAARDLVRVREDCRGDLMRARHRLSKLLLRQGIVYSGGKAWTDMHDRWLRQQRFDNMATHLAFESDYDTVLSVTARRRRLDAAIDELAADSEFTPLVHRLGCLRGVATLTAFSLAVEIGDWTRFTGNTIGAFVGLVPSEHSSGASRVQGSITKTGNTHARRLLVEAAWHHRPSYVPSKTMRNRWELASPAARARGDAGNRRLHDRWIAFNTRRKRSVIANVAIARELAGWCWSLAVMD

SEQ ID NO: 325219 - protein, 326 aa, unidentified
METTDQNRSRPALGIDIAKKTFDAALLQGAKLSVGHFDNDAKGFVKLSRWVDDHGADQFHACMESTGVYWEPLAIHLHQAQQRVSVVNPLRIHGFARTELARNKTDREDAARIARFCHLHTPYPWQPLPAERRKLRDLTRHLHAVKKAKRQHANRLEGTPPEWLMQSLKRTLAHFDEEMALLWKEIQAHISRHPDLKRQRKLLETIPAFGELTATLLLAELPNIERFASARQVAAFAGVTPKHRHSGSSVRGRTRMSKMGQARIRCALYMPAIVARTHNPIARAFADRLEERGKCKMVIIGAMMRKLLHIAYGVLKSGKPFDPQHA

SEQ ID NO: 325220 - protein, 359 aa, unidentified
MNATTVAVDLAKSVFEVAVADQNWKVIDRARLSRPQFERWFHNRAVGLVIMEACGSAHFWARQLQGLGIEVKLLPPKYVRAYVKRNKTDAADAAALLEATRCADIVPVRVKSVEQQALQSLHRVRSAWMATRTSRINGLRGFCREFGITIAVGSRLGIEQISRVLVDSSTAVPAMLRDTLKLLIDEIRLLEARIAQLERELTAAAKASAACERLLSVPGVGLLTATAMVAATGGSVSHFKDARHFSSWFGLTPKEHSSGSTRHLGRISKRGDRYLRMLLTHGARSVLRAATVALRCGRPLDPLRQWGLNVQSRSNHNKATCALANKLARICFATLRDQEPYEKTKMLKKLERQAYPMPA

SEQ ID NO: 325221 - protein, 419 aa, unidentified
MTRKRSKVCGVDIHKSFVVATILDSDGNSETKKFKQDLNPLIELRDWILYSKCESVAFESTADYWRPLYVVLESHIAITLANAHHIKHIPGKKTDVTDSHWIAELELNGLISPSRICTGENFDIRTATRYRELLVDTRTTYKNKVHHQFDLCGIRLCDHLKDIFGKAGYIILKGIVENKPHDVIIESVPKRSRKKAEQFFSALSSDIPESTLFIIDSILTVIDNLNEQILKIEERIKFLFNQRKRDIRILMSIPGVGFIGATTILAEVGNVHDFPTSDKITKWAGLTPSVYQSANTNYTGPITKQGSSHLRRILIECAHAAIRSSGKLKNFFNKLFPGKGYKKAIVAVARKILRIAWHLLINDEEFVDEDAKTKDVWIPKMPSVMKKIGIEKIIELLSRGAEMIIQEEGKEVMRLKLDT

SEQ ID NO: 325222 - protein, 343 aa, unidentified
MTHYIGLDVSQKLTAICIVDDTGRRLWRGQCTSDPEHIERVVRGHAEKDGRIGVETGPMTPWLVHELRSRGLEVTCLDARHARAALKMQINKTDPNDAEGLAQIMRTGWYRSVHVKSFGSHRARALLGARVQLVGMTTRLSNHIRGVLKTFGLLPGPMRGVPFDRRVEAMLADRDDIAPIIQPMLVAWRQLRQQVATFDKAVRRLVKSSPACRHLMGIPGIGVLSVLAYVSMIEDPARFGRSRSVGAHLGLTPKRYQSGEIDRSGRISKCGDTLARTLMYEAAVVLMTRVKRTCGLKEWAQAIARRSGAGKARIALARKLSVIMHSIWRSGEPFRWSEQPAAA

SEQ ID NO: 325223 - protein, 343 aa, unidentified
MQSITTIGLDIAKSVFQVHGVGADGRVVVRRQLKRRYVLAFFQKLPPCLVGIEACASSHHWSRELQTLGHTVRLMPPAYVKPYVKRHKNDAVDAEAICEAVTRPNMRFVATKTPEQQSGLVLHRTRHLFIRQQTAVINAIRTHLAEFGIVAPVGRHGVEELLDVVADPNDKRVPAIARACLMAFGAQLRRLKEQILEFDRMIRAWQRSSEMSMRLDDCPGVGPALATALVATVADPKAFRSGRNFSAWIGLVPKQHSSGGKDRLGSISKRGDRYLRGLFVAGALAVIRYAKIHGTKHRPWLTALLARRPTKVAAIALANKIARMAWAMMAKGERYKEPVALAA

SEQ ID NO: 325224 - protein, 341 aa, unidentified
MSELTMVGIDLGKHSFHLHGQDKTGREVFRKKLSRQQMMQFFSNLPVCTVVMEACAGAHFVARQLIVMGHEAKLISPQFVRPYVKGNKNDFVDAEAICEAASRPSMRFVSPKTEAQQTLSVLHRLRESLVRDRTKTVNQMHGFLLEFGISLPRGLAIMKRMPVILTQHELPTRLMTLLDRLREHFNYLDGQIKDLDKELARQLADDDLGSRLLSIPCVGPITASLLAVEMGDGKQYACSRDFAASIGLVPRQYSTGGKATLLGISKRGDKNLRRLLVQCARVYLQQLKVQHGALADWVRSLLIRRHSNVVACALANKLARIAWAISAGHGVFNAGPNAVAI

SEQ ID NO: 325225 - protein, 410 aa, unidentified
MEMILRCCAGLDVHKDSVEACVRRISGGGKVEHEVRHWGTTTRALVEMAEWLSSSGVTHVAMESTGVYWKPIFNILEAQFEILLVNAHHMKNVPGRKTDIRDCQWIAQLLQHGLLKGSFIPPRPQRELRDLTRQRTQLVDEASRISNRIQKVLEDANIKLGSVASNVVGASGRLMLEAIIAGQDDPVQLADLAKRRMRAKIPQLEQALYGKLTEHHRWLLRLLLDQFQTSEQFITRLDERIAELTRPLEPVLEKLDAIPGVDRRVAEVLMAEIGPDMTPFPSDAHLASWAGICPGNNESAGKKRSGKTTKGSRWLRQALVQAAWAASHKKDSYFQAHARNLMHRRGRKRGLVAVAHSLLTVIYHMLKRDTAYRDLGAQFLDRIRATQLVRFHVRRLQQLGLQVAIAPAAV

SEQ ID NO: 325226 - protein, 321 aa, unidentified
MNKYSEIYGVDISKDVFDVVNSTGAYIQYTNGSKGFERLSKKLPKGSLVVMEATGYYHYRLAQYLYEQGHCVSVVNPLSVKRFIQMKLSKVKTDKSDARAICEYACVNEVPLYTAKNKDQAECLQLLRLMDTYLKHSTAIKNKIHGEKVLGMPSKAVYRSLVRSLKSLQKEIGALELRLMSLVKENQQTQLSLLKSIPGMGAKTAMVLLVLTDGFAKFENAAQLCCYAGITPTIRESGSSVRGRARISKVGNKKLRNLLFLCAFSACKYNKACREIYERITAKGKSKKLALIAVSNKLLKQSFAIAKSGLPYDENYVSRLT

SEQ ID NO: 325227 - protein, 363 aa, unidentified
MIVIGTDTHKRTHTCGAVFAGTGQLAGELTASAREPGFRELLDWGRDLDEDRIWALEDCRHVSGSLERFLIASGERVVRVPPKLMGESRRGERSSGKSDPIDALAIARAALREGPETLPAAHLDEDALQIKLLLDHREDLVKARSEDQCRLRWHLHDLWPELEIPAGALDRIVWLDRVARKLARAEQGARVRVARELVTEIRRRTRRAAELEREIGALVKAQAPALLELEGCGALTAAKLIAETAGARRLPSDAKFARLAGVAPIPASSGNRVRHRLDRGGNRQLNCALHRIAVTQGRCHAPAREFLAKKQAEGKTRIEALRCLKRHLARRVWKLLVNPEREISMTTVDTQRGKLTPQIAVAA

SEQ ID NO: 325228 - protein, 343 aa, unidentified
MEHFAGLDVSVKETSICIVDDTGRIVREVKVASEPEALLAVLKSSTYRFKRIGLEAGPLSQWLFSALAEAGLSVICVETRHMRAVLKAQINKTDRNDARGIAQMMRAGLYRPVHVKTLRSQKLRMLLTHRKLLQSKAIAVENDLRGTLRNFGLKVGIVGKLKFEARIKELIENLPDLAVLVEPLLVVRRVLREQLGILHRRVLAIVQDDEVCRRLMTTPGVGPVVALTFRATVDVPARFRNSKAVGAVLGLTPSRYQSGEINRTGAISKCGDEMMRVMLYEAAQSMLVRSAKWSWLKAWAMQIARRRGMKKAIVALARRLAVIMHRIWVDGAEFRWSKNAVAA

SEQ ID NO: 325229 - protein, 353 aa, unidentified
MGKDITAVGGLTIGLDLGDKHTVGCVLTGSGEVEETFSVATTMSALGRTMAGFESSRVVLEVGTHSPWVSRLVEQAGHEVIIANPRRVRLIAENDSKTDEVDAELLARLGRVDPGLLKPIVHRGERAQHDRILLLARDGLVRSRTQLVNQVRGFAKSLGHRMPSSSTEAFPRRVREQFSKDLFPGQSVMLEMIDRLTQEIRRMDREAEKLCNDRYPETGVLRQVKGVGALTALGFVLTLEDPSRFAKSRTVGAYLGLRPRSRKSGEQQPQLRITKAGDELLRRYLVGAAHYILGPFGPDTELRRFGLKLAERGGKAAKKRAAVAVARKLSVPLHRLWVTGEEYQAIGYGQPTQ

SEQ ID NO: 325230 - protein, 348 aa, unidentified
MLIIGCDYHPGFQQIAFVDTETGELGERRLTHREEAEQFYTGLKGQWVRVGMEASGHARWFERALNDLQLELWIGDAAEIRTKRVRKQKTDRQDAQLLLRLMVEERFPRIWVPSAENRDLRQLLWHRHRLVQMRTRIMNQLHVVALNEGVRRKKALWRPAGRSELESLALARWAGRRRQDLLDVLDQLTPKIQELTRALEEEVEKRPAARRLMTHPGVGVLTALAFELVIGTPDRFHCGKQIASYVGLVPSEESSGDRRRLGHISKQGNALLRFLLVEAAQVTVRSQAQWRNQFFHLAMRRGRKIAKVAMARKLAVHLYWMWRKGLDYGQFVKLGSHAGEPGHRHGVQ

SEQ ID NO: 325231 - protein, 505 aa, unidentified
MATPTTSRPPAASSPPSGQQAQAQAQRRAYRRRKTRAKVKSEALRQREAAHVEALPVQHPHAAGIDIGSRSHWVCVGFTTDAASCLIREFPAHTAGLKAIAAFLREHQVTSIAMESTGIYWIPLYELLQAEGFEVLLVDPSYSQQLRGRPKTDRRDCPWIYRLHSVGLLAAAFRPDEQTCQLRAYLRQRANLIRQASRHVQHMQKALEQMNLKLTEVLSDITGVTGRAILRAILRGTRAPEKLAKHRDKGCKASEAEIAQALTGTYREEHLFELKLAHEAWQFTLGQVEKVDGQIELQLGRMKCDRALPPLKPKARPKRRVNSPGFDVRTALYYVVGLDLTEIEGISELTALTVISAIGPGVSRFATVQKFCSWLGLCPNWKKTGGRVKSSRTRRGVNRAAQALRLAAQSLHHSQGALGGFLRRMKGRLGVQGAVTATAHKLARIVYLALKHGMTYVRQSQQEYEAQMKEKQIKALRRKARQLGLEVIEKMSGSEATAVAAAVEG

SEQ ID NO: 325232 - protein, 401 aa, unidentified
MAVAVGVDVAKEFHWAALVHAETGTVLTSRRVDNDPAAIQALIDEIRAAEAEHGSATVAIDVLGGIAGLLQIMVLDAGLRLVHVSGLAVNRARRATRGGERKSDPRDAKVIADQIRLRGDELRPVDAVTDVDADLRLLVGRRHDLVVDQTRRIGRLRDLLTSIHPGLERRIDATTKTDLALLARYVTPAEIRRAGRQRITTYLRRVGGLPTAGVAALVDRALAAAAGQRVTIPGEAVAADIVRELANDALSTRARLSDLDKQIEAILDRHPDAALIRSLPGMGATLTAEFLAVAGGGITRFATGDHLASAAGLAPVLQQSGKVHYLRRATSGDKTLKRIFYQSAFCALQRDPASRTFYDRKRSEGKRHHQALIALARRRINVLHAILRTRRPYEIDHAAAA

SEQ ID NO: 325233 - protein, 377 aa, unidentified
MNDYTTYVGMDVHARSIMCKGMCKQTGELYTKLFADSPSSTEVHEWMATLPQPVYSAYESGCTGFWLARELRELGDDCDVIAISTLPRSAKDRQGKCDKLDAKVILREIMNPLSDCSVVWLPDVEVEAARDLARARQDAVKAVKSAKQKVSSLLLRYHFVWNEKTPTGKLKKAWRGDYRKWLDKIALPDPGAQAALEHYKRAVKRAEEELAEMDGLVRARAEEPRWKPYVDALVHLKGVDVCGAFLACAEFGDFSRFASGRKVSCWVGTVPTNGSSGPRESHGGITKAGSTHLRMGLVEGCCGIDRWRAADKAVKGHPASAEVLAIAGKANERLRKRYRHLRDDLGKTPNKARVAVVSELARWIWVVGLQVQAEQAA

SEQ ID NO: 325234 - protein, 347 aa, unidentified
MAMTIVEAARAVTGGVDTHLDVHVAAALDPVGGLLGTEGFTADPAGYKAMLSWLEGFGEVAKVGMEGTGSYGAGLARFLRRQGIEVVEVDRQSRQARVRHGRSDPIDAVEAARATLAGRAGQPKSMDGAVEAIRVLVVAKRSARQARSKALTQMRHLSYTAPDQLRCQLKGLTIPALVAEAASLRPTRSPDPVTAGTKASISSLAHRVRFLDVEIAGLDELIGPLLFATAPELLALKGVGPDTAASLLITAGDNPERLRSEAAWAHLCGVSPIQASSGKVTRHRLNRGGDRQANSALWRIVMVRIAHDPDTKAYIERRVKEGRTKREVIRILKRYVAREVYRHLPRG

SEQ ID NO: 325235 - protein, 312 aa, unidentified
MSQEKYIGMDVHQASISVAVMDARGKLIMECLLETKAATILEFIQGLRGTLALTFEEGTSAAWLHDLLKPHVSRLVVCDPRKNALLKDGNKSDRVDARKLAELLRTNQVKPVYHGKHGTRALKELGRSYLTITKDVTRVMNRIKAVYRSWAIPCAGTSVYTPRHRAEWLAKLVEPGVRIRAEHLYQQLDSLQPVRLEARRELLLESRKHAAVKLLCQIPSIGPIRAALLVALLQTPHRFRTKRQLWAYSGFAVEIHDSGEYRSVRGKLQRNRERITVRGLNDNHNKDVKSLFKSAARRWLVSLWHGRLPPSP

SEQ ID NO: 325236 - protein, 346 aa, unidentified
MEHYAAIDVSLEWSSVCIVDPSGRIVREAKVRSEREAVVDFLQASGLTLARIGLEAGPLSQWLHAGLVEAGLPAVCIETRHVKAALKAMTVKTDKNDARGMAQLMRLGWFRPVHVKTLVAQEIRALLTARRLLLAKLCDLETSLRGILRGFGLKVGTISKLRFASRIRELAAGQAMLEDVVEPVLRVHAVLRAEYAVLHRTLLAAVRDDQVCRRLMTVPGVGAVVAMTFKAAIDQPERFQHSKAVGAHFGLTPRKYQSGEVDRTGRISKVGDAAVRVALYEAANIMLTRAARWSSLKAWAMRVATRQGMKKAKVALARKLAVVLHRMWLDGTQFRWGSQAVAGSVA

SEQ ID NO: 325237 - protein, 346 aa, unidentified
MTQYVGLDVSQKETAVCIVDGEGTVVFEGRATTDPDALAEIIGERAPAASRIGLETGMMSSWLWRELNQRGLPVICIDARHAHAVLSTRMNKSDGNDARGIAELIRVGWYREVRIKSPESQAARTLLVARSRLVTIRKDLHNQIRSMLGEIGLRLPRAVGRAFVSRVRDCLADRSGLLEVVEPLLAVYERVLAEQARLDKKAQDLARADETVRRLMTVPGIGAVTALAYRHTIDDPTRFASAQTVGAYLGLTPRRRQSGTMDVKGRVSKWGDRALRSYLYEAAVVLLHRTKRWSRLKVWGVQLARRVGLKKAHTAVARKLAVILHCIWTDGTEFEWGEETAMHLRA

SEQ ID NO: 325238 - protein, 330 aa, unidentified
MTTRVLGIDVSSDTFHVALQGENGWMDNSFANSRAGCAQLGRWLKRNGADQVLACVEASGNYWVDVATWLYEHGHQVHRANPLSIRRFIESDLERTKTDKQDARHIGAYIVSRMALPGAVIRLWEPPCAVQYELRALSRRLEELIASRTAIVNRSKDPQVTAFVARGYKRDLTHLDRERERVEAEIDRLIAKDDGLRESRELMETITGIGAATSRLVLAELGDCQQFDSSSQLVAFVGLCPQERQSGTSVRGSNATTRYGHRRIRQALYFPALTALRHDPGCKALRERHAAKDKPPMKTVVAVMHRLLRIIYGVLKNRTPYDPTRALNSA

SEQ ID NO: 325239 - protein, 386 aa, unidentified
MQKLNDLSRSLTPLEPDGTLIAVIEMSLSSWLVAGIVPGVERHPLKKIAVDESALLKLLHRWREEAVKAGHRIKRIVVAFEAGRDGFWLARWLRARDIEAHIIHASSIAVSREHRRAKTDRLDTELLKRAFLGWLRGERDHCKMVAIPTIKDEDAKRPNRERETLVGEQNRIINRTKATLIRLGIRGFNPKLKRAAERLESLRTPEGEPIPPNTLAELRRDMVRRRLVNDQIRQIEDARLERLKQAPSDGPHAMVRLLARVIGVGIETADMLVQEVLSRNMRDRRAVARYAGLTGSPDESGRKRREKGLARSGNARVRRGMIQLAWRFLMFQKDSALAQWFRARTENARGTRKTMIVALARKLLIAFWRLVREGVVPEGLVLRPAQ

SEQ ID NO: 325240 - protein, 468 aa, unidentified
MEEIVMKGKKEINAVGKRKRLSKHLEQVNLYAAGIDIGSQMHYVAVPEGLDTESVRSFSCFTGDLKKMAAWLVEMGIETVAMESTGIYWIPAYEILEESGLEVLLVNARSVKNVSGRKSDVLDCQWLQQLHTYGLLQGAFRPSENIVSFRAYMRQRDTLIKYASSHIQHMQKALRQMNLLLDNVVSSVTGKTGMAIIQSILAGERDPSKLAVHRDPRCKKSEEEISESLHGHYRDEYVLALRQSVHLYETYQDQIRECDLAIEKLLEKFESNGDPDSLSPSKDRKSASAPSFNAREELFRITGVDLTSIPGISEVTALKVISEIGTDMSRWKSAKHFASWLGLSPGTNVSGGKVLSKKTKRTANRASSALRMAAFAVTNSKSAIGAYHRRMRARHGSPKAITATAHKLARLIYSMLKNGAEFVDEGMDYYENQYKDRILKNLKRTASQMGFELIPCQINENLTVSGAL

SEQ ID NO: 325241 - protein, 361 aa, unidentified
MATLRLMDASSQAPERPAAEARITLGVDLARNKWVHALHWGEAVRRQLVTPGGLEHVQALVREYHPAHPVRLVYEACGFGYELAWWAQAVGIEVVVVAPSRVERVPGTRVKTDRLDAHTLATKGAAGQLKGVAIPTRTQHEQRQVLRTYLQVTHDRARAQVRTRSLFQEHGRLGPPPRSGWRAYERWLAQQVLPAPVAAAVAELRALRTAASASAGRLKALLRGLAASAEHRAVVAALTTQAGVAEFTAMRLILEIGDLQRFHSGAAWVNSFGLTPSEYSTGDGPAHRGHIQKCGNASLRAALVQCAWVAIRTDATLRTVFDRLAPRLGKKRAIIAVTRHLALRLRARWLEALATPPAAAA

SEQ ID NO: 325242 - protein, 358 aa, unidentified
MNRKSGMSAGQIIGTVGGQQVVGLDIAKSVFQLHTVDMNSGEIVNQQLKRAKVLTYFANRAPCVIGIEACGGAHHWARQLSAQGHSVRLIHAKAVRPFVGGNKTDAADARAIWLAIQQPGTKFVGVKTLQQQATLMLHRQRELLMKMKTMQSNALRGLLYEFGATFARGKNALVGEIEAALEALSGDIPQYVADSLREQVQRIKDLVKDIKAVEARLAQRLRDDEDMQRVAQIPGVGLLTATAAIATMGQASAFKSGREFCAWLGLVPRQSGTGGKVKLLEISKRGDTYLRTLLIHGARSVLTHAKEPGPWLEQLKARRPANVVIVAQAAKMARAIWAVTAKQEDYQRGHRSVRPQAA

SEQ ID NO: 325243 - protein, 365 aa, unidentified
MYKKLNSTGTLIQRTTMEAPQRHMYYIGLDVHKKTISYCVKDASGQIHRQGTIGATRNELDLWMRTLPQPWTAAMEATIFTGWVYDHLLPHAAQVKVAHPVMLRAIAAAKKKNDRIDAGKIADCLRCDFLPECHMVSTEIRDRRRTLRYRHLIVRQMVQMKNRISGLLLETGVSHNKQQLHKVKYFRDLLATNKEVDESIRPLLKLSRETIVRLQKTDYALVSSLQRDPVLVERVKHLKTVPGVGPITALTWALEIGDVSRFRSVKQAISYCGLCGDEKSSADKVLRTPLSKQRNKHIQRVLVEAAKLAPKQHHELALVYEKEKQKGNANRATLAVARKMVAYLLAVDREKRPFIPTEDYSTAAA

SEQ ID NO: 325244 - protein, 405 aa, unidentified
MERVIERCAGLDVHKKTVAACVRVRGTQHVRTFGTTATELLVLRDWLFAHEVTHVAMESTGVYWKPIFYVLEDAFTCVLSNAAQIAQVPGRKTDVKDCMWIAQLLEHGLIRASFVPPAPIRELRDLTRYRRALIEERTREANRLHKVLEDAGIKLASVASDVLGVSGRAILAALIEGTTDPMVLAELARGVLRKKLPALRHALMGRFREHHAFLVTQILAHLDYLDELIATVSGQVEVAIAPFADELARLDTIPGINQRTAEAVIAEIGVDMTVFPSARHLASWAGLCPGNNESAGKHRPAHARKGNRWLRSALTEAALAGAVRAKKGALAARYRRVMPHRGHKKAVVAVAHAILVTAYHLLARQVTYTDPGADYYERRHADRVRQRAVQTLERQGYRVSLEPAA

SEQ ID NO: 325245 - protein, 388 aa, unidentified
MQIVTDRPQAPTAIRTDLGAIFVSLELSRSTWLITSLSPGGGEKMSKHTIRSGDVAGLWSRFSQLKDKVLDRTGQIVPIIVIQEAGLDGFWIHRLLQSERIESHVVDPASIATSRRRRRAKTDKIDGEALVRALLAYKRGEPRVCTMVRAPTPQEEDRRRICRERKTLTAERVEHVNRIKGLLFAQGISDYEPLSRKRGERLEELRTGDGRPLPEHLKAQIRRELDRLELTLEQIKAVETERNATLSPSDDGTPAPGAMLKNLKGIGPEFAGVLWSEGLFRSFSNRRQVAAYAGLAPTPWRSGSVAHEQGVSKAGNPRLRTTMIQLAWLWVRHQPRSILTLWFHQRTQINGGRVRKVLIVALARKLLIAFWKYVTAGVVLEGAETTSA

SEQ ID NO: 325246 - protein, 344 aa, unidentified
MDHFAGLDVSVKETSICIVDDAGKIVREVKVASEPEALLAVLKNLAYHFKRIGLEAGPLSQWLFSALAEAGLPVICVETRHMQAVLKAQINKTDRNDARGIAQMMRAGLYRPVHVKTIRSQKLRMLLTHRKLLQSKAIAIENDLRGTLRNFGLKVGMVGKVKFEARIKELVENLPDLAVLVEPMLIVRRTLREQIVILHRRLLAIVRDDEVCRRLMTTPGVGPVVALTYRATVDVPARFRKSKAVGAVFGLTCAKYQSGEVDRNGRISRCGDEMMRVMLYEAAQSMLRSKKWSWLKAWAMQIARRRGMKKAIVALARRLAVIMHRIWVDGTEFRWTREQAIAAA

SEQ ID NO: 325247 - protein, 392 aa, unidentified
MEPVVGLDVAKGASVVQAFLGRNEPYGILESITHEESGFERLGELLDELKVLSGREPVIILEATGHYHRGLVSYLIREEYKHFIINPLQSKRARNTQLRKVKTDAADAWHLADMYYRGNVTPHRTWDELYTELQHVTRQHEFITSMYVQAKLNSRALLDQVFPAFEKVFSNLFSATALRVLQSCLNDEFEKVESIIQEQTGKSHSKDWVGEKANQLRQALLEWANNKRSITQSMALVGMVSLLLEFQKQLSRLEETLEEISATLPEVELLKTIPGIGDKLASAIIAEIGDARQFRSAKQLVAYAGLDPSVYSSGKYTASRNRITKRGSKRLRRALYLAVQCGLRGGRNSRLKDYYDMKRKEGKPYKVVVIACANKLLHHVYAILNKDQPYHI

SEQ ID NO: 325248 - protein, 343 aa, unidentified
MQEITTIGLDIAKSVFQVHGIDASGAVIVRRQLRRSQVLPFFRKLPGCVIGIEACATAHHWARELEKVGHEVRLMPPRYVKPYVKRNKNDAADAEAICEAVQRPTMRFVPIKSPEQQSVLMLHRTRQLFIRQRTALINAIRAHLAEFGIVAGIGRNGAEKLLDLITRGEDERIPPAAHACLMALAAQLAMVKRQILEADRRLLAWHRTSKTSKRLEAIPGVGPLVATALVASIPDPNVFRSGRDLSAWIGLVPKQSSTGGKERLGSISKAGNRYLRSLLVVGALSVIRRAKQLGYTRHPWLVRLMERRSVKIAAIALANKIARIAWAMMARNESYRTPLPASA

SEQ ID NO: 325249 - protein, 352 aa, unidentified
MEIIALDAHKRYSQVCVQRKNGQMLCEKRINHGKGQIAQFLHKWTAGSAVALETVGNWYWIVDEIEQAGMRPQLVHAHKAKLMLGSINKTDKLDARGLNRLQQAGTLPTVWIPPGQVRDHRELPRTRMVFANLRTRLKNRIHSVFDKYGLHTDFDGIADIFGRRGREQIVLTIKQLPSERRYTLHCLLRELDMVESQIQRIEKRMKKVFSKTEQIKRLMTLPGIGFILAVAIANEIGDISRFATPQRFASYAGTVPRVHSSGGHTRYGKLRSDVNHYLKWAYSEAGNSTAVNHKRLRFRHTSKLYKRIRERKGHAKAVGAVGRHQAEASFWVLTRNEDYKEPEVKSASPTAV

SEQ ID NO: 325250 - protein, 450 aa, unidentified
MNSSPQTVLPVASGLDVHKSFLVAVIKSTSNQGTVNTVKKRFSTFRADLEDLRDWLLQNDCHHVCMESTGKYWIPVYNVLESAMNEVRVCNPKWLSLVKGEKDDNKDAARICDLYRNGMTKSSYIPNKQIRTLRELTRLRQKYVQQRTSDHNRLINCLTVSNYKLDMVFSNVRGRSASLIINLILSGEPYTDEDILKCVSSRCKAPREDILRACHGFELDKLQREKLRIIQDHIDGLTKEIEKLDQLIAEACEDHKDYIRLLMTMPGVSEISARKIIAELGTEMDQFVKGSRVAKWAGLAPGSDESAGKIHSRHITKGGKYLKPVLIEAAWAAVRSKNPYYRCKFEILSLRLGKKRAIVAIARKMIISIFHMFSDMKEWHPKDCDDCFVPRSLSVQKESRKLNKTVNTLKAMGLTEHQILKTIAAGLDDPEISDDEGNRYDLITGEYRTA

SEQ ID NO: 325251 - protein, 348 aa, unidentified
MKKALLKQVVGIDVAQKELVVSLGKMDQGASTYIYAYKAFVNNEKGFTAMILWVKKQTDADSPLRYVMEATGVYHEAVAYFLSDKAYSVSIVMPNKITNFFRTLETKTVTDKSMSEAIALFGLEKKVEDWIQPKKVFRELRQITRERDQLIAERTILKNQLHAEQVEAYPSEQTIGRIKIRIKMVDGQLKETLAEITAAIKNDTEIGKSVNLLTSIPGIGLLTAAVIMAETNGFELIRSKKQLTSYAGLDVKEKESGTSVKGKPRISKRGNRHLRKAMYMPALSAIRHSERYKAIFVRIVSRTSIKMKGAVAVQRKLLEMTYTIYKTQTPYLNDYLKTQIVKDPALNS

SEQ ID NO: 325252 - protein, 319 aa, unidentified
MSKAILGIDVAKKKLDVALMFDQKTLVRKFANSPVGFKLLGGWLASLHIEQVHACLEATGVYGEAVAEYLHEKGHRVSVVNPLRIKGYAKSDLQRNKTDPADARTIADFCLVKDPVPWHPLPAAVKHLQALTRCIEALEEILTAERNRLEAAPPSVRPSLKRIIKTLETEIKDLQRLIKEHIDNHPDLKDQSDLLQSIPGIGAKTAQVLLGELEFAAFPSARSLAAQAGVTPHQFQSGTSINRTRSSKLGNGRLRKALYFPAITALKYNEIVKTFASRLSHNGKAPMQVICAAMRKLLHIAFGVLKNNRPYDPNLASSV

SEQ ID NO: 325253 - protein, 389 aa, unidentified
MGTTARSHKRKGTGHEGDGTIFGLDVHVETIAVAIAEPGGEVRSLGMIANREESIRKLVKKLGSVERLRACYEAGPTGYVLYWQLAELGVKCEVIAPTLVPVKAGDRVKTDRRDAEKLARSYRSDDLTAVWVPDESSEALRDLVRAREAAKQDQLRARHRLSKFLLRSGQRPAQGVKTWTQIYMTWIRQIRFVQMAQEWTRLDYLHEVEHMGERVARLEQAIAEAAKLAPPGLQKVIQGLQALRGIAHISAVTIAAELGEFSRFEGARQLMGYSGIVPSEDSSGERTQRVSITKTGNAHLRRIAVEAAWSYRLRPRVGPALRKRQEGVAEEIKEKAWKAQHRLHKRYCRLAATRKDQRKIITALGRELLGFIWAIGIKAEAAARPPRSA

SEQ ID NO: 325254 - protein, 410 aa, unidentified
MEVLYACCAGLDVHKSSVVACARKVVQGRVQREVRTFGTTTSQLLALSDWLTEQGCTHVAMEATGVYWKPVWHILEGSFELVLANAQHIRNVPGRKSDVNDAAWIADLLAHGLIRGSFVPEGPIQQLRDLTRTRKQLVRETAQHVNRIHKTLEDTNLKLGSVISDVMGKSGRSILDALVAGETDPGRLADLTQNRLRASREELLEALRGRVTDHHRFLLKLHLEQVDALQRAIAGLDARIEEVGRPFDEHVDRLITLPGMSRTAAWVVVGEIGVDMTRFQRPERLVSFAGLCPRMDESAGKKRSTRLRQGAEWLKTTLVSCGWAAARSKNTYYRAQFLRLKARRGPTKAVVAVSASLLTAVFFMLRDGTTFRDLGANYFDRCQREHAAKRLTRRLAELGYKVNIEPAAAA

SEQ ID NO: 325255 - protein, 338 aa, unidentified
MTLYCGIDLHSNNSQIALIDEADQVIKEKRLPNDINTINEYLAPYQDDLAGVVVESTYNWYWLVDGLMESGYTVHLANTLAIQQYNGIKYTNDATDARFLAHLLRLGILPTGYIYPKAVRPVRDVLRRRLLLVQQRTAQLLSLQSMITRHTGQRLSALKVKQLHTDTLPNYFTHTASLFAAHHALQLLQQLTTQIDDIEAFVLAACKQDAHYAQLTSVPGIGKILGMTILLETGPLERFPEVGNYSSYARCVPTDKISNGKSKGRGNSKNGNRYLAMAFIEAAHYATIWDDTIKRYYQRKVKKVPLMVAKKTVANKLTRACYHMLKEGTHFDVKRAFG

SEQ ID NO: 325256 - protein, 433 aa, unidentified
MSAFARRERALHAVAVVGVDAGKFHHVLVVRPRGRPDSKPFRFSTDRMGFEQAVAYIRDQVGSASLEGEILVGIEFAGSYGFTFAHYLHTLNAGLGMVTVLPAHTKRWKEVTHRQPLKTDAKDAIGITDLTAHGHFVAFPFLAPAYAELRYLLSARERVSTLRRGVITRLRAILDVVFPEFGQLFDDVSKRTARTLLRVYPGPTLLCAAPARAVVTLLKQQSNNHIGRAFYDRLLDAAKNTVALPTAQGAVRDEIPLLIDRLNLYEAQLRTLEARMRLTLRTLPAARALVTIPNVAPVTAAVLLGSIGDPKAYDSSRQVLAVAGLSLVERSSGIMQGLKRISKRGRPALRKHAYMFALRSVHQDGIYRKEYEALLGRNGDKKIPALMAIARKGLKLMFAIAKAERSWTPARPGERRVDVTGAMSSTGAPNESR

SEQ ID NO: 325257 - protein, 338 aa, unidentified
MKTYFGVDYHKKFSHGTIMTESGKILKQGRFSNHPASVRDFVEGYSGGECFSVLEATRNWTVMHDILEELTCRVTLAHPLKVKAIAEAKIKTDKIDSTTLAHLLRCDLVPAAYVCSPQARITKNLLRHRMFLVRVQTMVKNRIHVVLDRHPEIHSQRSCIGLFTQRGIRELKQVKLPRYDRYILDSELALLEHLQSQIRQADIRLSGVGNKDERVKHLMSIPGIGRAFALLIVSEIDDVRRFRTDKKLHCYAGLVPSTYSSGGHTFHGRIIKGGNKYLRWAMVEAVWPAIRKDIGLNQYYRRVSHRKGANPAKVATARKLLTIVYKILKENREYRYAA

SEQ ID NO: 325258 - protein, 326 aa, unidentified
MSNILGIDVSKDKLDLVLLNEKGKFHKVISNDPAGFKTLDQWLISRHIDRVHVCLEATGQYGDEVSEYLYGQGHDVSVVNPARIKRYGESKLHRNKTDKADADLIAEFCLKEKPALWEPLNPDLKHLRALVRRLIDLQANYRQEESRLSSGEKDAWVIQDLTVHAEYLKARIQATEEEIQNFINQTSGLKANQELLVSISGVGKKTSARLMGEIGDISRFENAPQLAAYAGLNPKGFSSGSSVHKKTRISKQGRSELRACLYMPAIVAMTHNPVVRALKERLQKRQLPTMAIVVACMRKLLHIVYGVLKSQRPFDPDYDRQFNYSA

SEQ ID NO: 325259 - protein, 319 aa, unidentified
MNKSTLFFGIDISKDCFDVYSDQMGYNSYSNTKDGFKIFLKVLGKTSHCVMEATGCYHHKLAMFLYEKGIAISVINPLIIKRFIQMKLRRVKTDKSDAFMIYNYAYEQSLEQWEPEVAYIVKAKELLSLIQTYLRQSTALKNKLHALENRGHSKGIMMTSIKRQLRQLKKEHELLEKELETLIKSNEPNLFSRLNTIPGIGKKTAVLMMVSTSNFNSFNSYKQVSSYLGLAPNERSSGSSIRGKSRISKTGDGLLRNHLFMCSFTASVHNPQCKALFDRIVAKGKSKKLALIAVCNKLIKQAFAIAKSGLPYDSNYAVK

SEQ ID NO: 325260 - protein, 381 aa, unidentified
MTIIKQIGIDLHTNCFTIAYRDKTGNFIFEEFNLFKNDEIEGFKKLLSKETTIAVEATINSSYFYEAFSPFVKKVMIVNTSKHDHKKTKRKTDKEDAKRILIFLEANMLSEIWVAPKKVVHLRKLLSIQKQIESIQTGCKNMLGNILIETATKRKRSEITHRDNIALFYNEKFNENQQLISRNLIEITKYMELKNAVMKHAIVKYLGENEHVKLLMSIPGISYYSAVCILAEIGDIHRFDSAKKLCSYAGLVPILEESNGKRKNRGITKSGRRKLRYFATFAVLNAIKSSKTLRDFYNKIALKGSKKKAMVATGRKLLTIIYHILITEKPFREMKDSLYNMKISQWKKSLMINSSDMNKLMKNFIDKEILENIFTTDRLKC

SEQ ID NO: 325261 - protein, 354 aa, unidentified
MKLYVGLDVGLEETSLCIVDSEGVTVREVKVSTEPEAIRCALEGSADRLDRVGVEASSLGIWLYRELQPAGVPIIVVEARHMRVSLSTMRNKTDRNDARGIAQMMRLGWYRAVHVKNIDMQKMRSLLANRKLLKRKLIDIENHIRGTLRAYGLLMGAVGRGGYEARVRELLERSDPIFSVMIEAMLDVRRAIFEGYERLHRVLLQVVQHDAVCRRLMTVPGVGPVAALSFKVGVDDPRRFARSRTVGAHFGLTPRRHQSGTSIDYEGRISKQGDVAVREALCEAAASLLLRVRKWSALRAWGLRIAKRSSMLCAIVAVARKLAGILHRMWVSETDFHVGFGAKVTQRLRLKPAQ

SEQ ID NO: 325262 - protein, 412 aa, unidentified
MGAVVIGMDPHKRTATIEVMDGDETILGGGRYATDVAGYQAMLAFGQQFVDRTWAIEGCNGIGKHIADRLLADGEQVVDVPPKLSARTRVFATGQGRKTDATDAHSVALVGTRMSGLRPVVADEELAVLRLLADRRRSLGQDHTRMVAQLHRILLELIPGGAKKQLSAAQAKVLLGKVRPRDTAGKTRKRVCAELVADLERIHERTKAADKELKALLVATGTTLMTLHGIGPSGAARLLVEVGDITRFPTRGHFASWTGTAPIDASSGDHVRHRLSRGGNRQINRTLHIMAVAQLRNPTKGRAYYNRKKVDGKAPMEAMRCLKRRLSDVVYRQLLADAIRPSKAGPGGHSGAALDSSAVDSNPDIDASEKSLPGPANTHVTRAKSPRPDRSSTRSRRPATAPARSRRQAQSA

SEQ ID NO: 325263 - protein, 355 aa, unidentified
MTWYMGIDLHARTFAIAVKDRDGNELFVETYKTSCEKLREIVGSVNGKKWVVFEESTLASWAYRVLQGCGATVVVADPYHNRLIGKDGKMDDKRAARKLADLLRWGEINRVHHTADLARQGFREVVLMYLDTTRDRTRVKNRLKSKFQQHGVVCRRADVYLPESRAKWRQKLESPDAKLQVDLLWADLDHLEEKSERLRRLIQERAKGIDVIRRLRAVPGIGLIRASTFYVLVDTPHRFEDKRNLWSYCGIGLEGRESGESQEPDHLVRRFNPRLKDVAKGAAASAIAARNNRYSEQYVQYLIDKPQKAASARLTVARSILSTMYELWRRGTEYDPQYHREARAWGKQTDNDTVG

SEQ ID NO: 325264 - protein, 342 aa, unidentified
MKQYVGLDVSQKETSVCVVNEAGQISFEGKAKSDPGALTALLRERAPHAERIGFETGAMASWLWHELRRVDLPVVCIDARHAHAALSVRMNKSDQNDARGLAELVRVGWYREVKVKSEDSQKIRAILVARSRLVAIRRDIENQVRSLIKEYGLLFPRAIGKQFRNQVSELLGEDHQLLGVIAPLLSIHEHICEQQSKFDDEVRRLAKLDDTTRRLMTVPGVGVVTALTFRHTIDDPSRFRSASTVGAYLGLTPRRNQSGETDTSGKISRWGDRLLRSYLFEAATVLLYRTKKWSSLKAWGMKLAKRIGVKKAKVAIARKIAVILHCIWVDGTSFDWGQAKPA

SEQ ID NO: 325265 - protein, 388 aa, unidentified
MIYVGIDIAKLNHFASAISSDGEELIKPFKFTNDNDGFQLLISKLAPLDKGSPIIGLESTAHYGDNLVRYLVAKNYKVCVLNPIKTSTIRKNNIRKTKTDKVDTYIICKTLMMQESLRFVTFYDLDLMDLKALGRFRQKTIKQRTRLKIQLTSYMDEIFPELQYFFKSGLHQKSVYALLKEAPTPEAIASMHMTHLAHLLKVNSHGRFDKEMAQQLRVLAQKSVGANDSSLSIQVTHTIQQIELLDSQLERVEAEMTEIMKFNDSVIMTILGIGYINGGMILGEIGDIHRFSSPNKLLAYAGLDPSVYQSGNFQAKKTRMSKRGSKVLRYALVNAAHNVVKNNATFKAYYDAKMVEGRTHYNALGHCASKLVRIIWKMMTDNLKFNFD

SEQ ID NO: 325266 - protein, 316 aa, unidentified
MNNDTEIIVGIDISKNKLDIQIQEDGQYFTCGNDIIDIEKLVEKMCSIHPTLIVLEATGGYEKGVVSALVEAKLPVAMVTPSWVRYFAKSSGTLAKTDKIDARMLVRYGRANHPPVVIIRTELQERLSVLMARRSQVSLALISEKNHLSTITYPDVKALIEASIQNLEQQIIQLEEMIAEIIDQCPELKNNENIICSVPGAGKITAAILLADLPELGTLDHKKIAALVGVAPFNRDSGYYRGKRRIKGGRQSIRKVLYMAAMTAMRWNPVIKDFYERLLARGKAKNVAIVACMHKLLTIMNAMVRAQTLWRPVFTS

SEQ ID NO: 325267 - protein, 323 aa, unidentified
MEKEPLYCAIDISKATLDVDAAALALPEQLANDQVGYRQLIKAAKKYPGLVHFVFEASGPYHLGLALALWEAELPLSVLNPARVRFFAKAQGKAKTDPLDKEVIGDFARSMRPKATPAPEPVFRELTELLQRRHGLVESRAAEENRLGQPRHPLIKGQIGRSINQWSAQIEQIDELLNKLVSRSEALKAKVERLCQIKGVGQLTAVTLLITVPELGTLNRNRISRLVGLAPLNDDSGLQKKKRFIQGGRKVPRSALYMASLSASQHNPVLSEFYQRLRKAGKPKKVALTAVMRKLLICLNALLREPLDQKALSEDFCFAKAPQ

SEQ ID NO: 325268 - protein, 432 aa, unidentified
MIAASPPLCPEASVFAAFVGLDWADQKHDLMLYDQRGGKPEYSQLTHTAEAIDEWARGRRQRFGNRMIAVCFEQTHGAIAYALLKYDFLMLFPLPPARLAAYRQSFSNSGAKDDPSDAALLLDYLLRHRDQVRVWQPDTPATREIQLLAEARRDAVDQRTRLSNQLTAVLKRYYPQALVLVGSDVDTPLACDFLAKWPTLAAVQAAAPTTLRKFYYAHSCRSEKRILERLELANSAIPLTTDSALIQAGKLQVQCLIGQLRALHKAIQNYEARIDELMDQHPDAALFRALPGAGSALAPRLLVAFGSDRERYQAAAELQSLSGVAPVTKRSGKSRTVQRRWACPKFLLQTFHEFAFCSCKKSAWAKAFYLQQRSVGKGHHAALRSLAFKWVRVLFRCWKTRTPYSEQHYLDQLRRRQAPLVAFLSIATETSS

SEQ ID NO: 325269 - protein, 444 aa, unidentified
MGKPQVFDDQEQGRVFERVAAVDVAKASGVVCMRLPHPAQPAGRRSQVWEVPATMRAVTELAGRLAAEGVQKVTLESTSDYWRIWFYVLEEAGLAVQLVNASQARNLPGRPKTDKLDAMWLARLTEMGLLRPSFVPPAEIRVLRGYARARTRLTHDRTRCLQRLEKLLEDALIKVSAVASKLTTRSVQDMIRAMIAGQRDPQVLAGLARTRMKAKHDALAEALAGLFTDHHAELAQLLLDQIAFLDTQIARLTMLTGEQLASIRAAWGIDADGATGPSPGAIALPAIARLDEVPGVGAELAASIISETGLDMTRFPSPGHLASWAGLCGRTIQSGARTRTGKGQGNAWLRGYLGRAAIAAARTNTFLGERYRRLARRRGAARAQVAVARSILIIIWHLLNDPTARYHDLGPGHYQARTDKSRKARNHIRQLQALGYTVTITQTA

SEQ ID NO: 325270 - protein, 342 aa, unidentified
MKIIGCDFHPSFQQIAMVDTETGEQTERKLTPEEAKQFYGQLQGEVVVGVEASGNMLWFERLLTGMGHRLRLGDAAQIQAREVRKQKTDRRAAELILQLLLEDRFPEIWVPSLAERDARQLLIHRDKLVGMRRQVKNQLQHLCMNQGLQLKQKLWTQIGRKRLEELPLQGWTAKRRADGLRWLDQLDSDVAELDAAVAKLAQQNAVAQLLQTHPGVGPITSLAFVLTLGKIERFRGSRQVVSYLGLNPSEHSSGMRRRLGAISKQGNPMLRSLLVEAGQSASRFDTELKRAYQRLKQKKHSAVAKVMVARKLAVRLYWMWRTQQPYTATRMQGSPSHLVAGS

SEQ ID NO: 325271 - protein, 412 aa, unidentified
MSVVQFTQVLSRGCGMDIHKKVVVATVQGEGICKETRSFDTFTRSLTQLREWLVSLGITHVAMESTGVYWKPIYNVFEGFIPHIWIVNARHIRNVPGHKTDKNDSEWICQLLMAGLLKPSFIPPKAQRELRDLTRYRRKLIQSVSANKNRIIRILEDGNIKLSSVLSDTSGATAVKLIDMLCDGKQITLSDIESVRHGRCQHTKEEMLEACTGCLDEHKVYMLGKIRECNASLKEDILDFDKRIKDVLSSYHDAIERMCEIPGIQNRVCEDLVAEIGLDMSNFPTSAPLCSWAGMCPGNNESADKKKSGRTNHGDKQVKETLVEAAWAASRAKGTFFMERVNRLAPRKGSKKALIAVGHSLLKCIHYVLSTGGRYKELGDNYVPNKKEQKRKEYLKKELQKLGYSVKLSKED

SEQ ID NO: 325272 - protein, 435 aa, unidentified
MTGYEFDRAASVVAPLGSKEVKMEVIVPCCAGLDVHQATVVACVNRSGLHGRSQKDVRTFGTMHDDLIALRDWLKDAGCALVAMESTGVYWKPVYEALEDHFDLMVANARHIKNVPGRKTDVKDCEWISDLARHGLISRGFVPPREIRDLRELNRYRRKLAQVQTGERNRLIKVLETAGIKLAGVASDVFGVSGRAMIRALIEGEETPQVMAGLARGRLRSKRTALARALDAPLKPHQRFMLQTQMGRIEQAEAALEQIDIELNKMIVPYRRQVEQLMSIPGVDWINAVTIIAEIGTDMSAFHSAAHLASWAGICPGNNESAGKKRTGKVRKGNVVLKTTLVNAAIAGFGSRARKGTFLAEKFRRLAARRGKMKAAVAIAHKILVAVWHMLSEGTFYQDLGAGFLDKLDRTRNAKHLVRRLINMGFDVQLVEKAA

SEQ ID NO: 325273 - protein, 399 aa, unidentified
MPSMRSNGDRIKRFRDLKATLRTQRDRLLVGIDVAKAEDVAQIRLAHTRILDKTVPIPNTTAGFGTFWRRLARHQRATGVTEIVVALEPTGTYHQALAQFLDAQGADVVLVDNHVAALHRRLLDRTWDKSDPKDAHNLCDLLEQGRVLFCALPDEPVASLRRLVRLLRRARVELGACKARWQNTLRPALGPAGEPLPAPVITALPAPLRAFLPTAERHAAPGRPRALSPGVAAEMADLATRCTAVRGRIATLEAALVATTTPLPATAWLRSIPGLGPTLTAIVLAELGDIAWFTKFSQLRKLAGLDIIRVQSGQWAGTARISRCGRPLLRWALYQAALGACRTPVWRVKRATLLAKRQGDPHAFFKTTVELAAKLLRVIWGVWRSGRPYTAGRAGAPVA

SEQ ID NO: 325274 - protein, 402 aa, unidentified
MRVGIDAHKMKCTTVMFDGDSVTGSFDFQTTRQGVYEFMEKVPEGSIAVIESSTTGKVLSRMLSGKYEVHMVAPPERKVSIKTDRRDAERIVMEDMLNYLRRCYIPSQYIENIRFVVTQQIQIGRRIARVKNQVHALLEMNMIQHELDDMADIFGVKGLNKLSKIQLPRQDMIALARYLEELKMYVSHHRQLDTEIARIAASDNDVQLLMTIPGINCFTAVAIKSRIGDDVSRFATKKHLCSYAGVVPKANNSGEYISEHNHVKQGDIVLKYALTCAVRGAILANKNSSIKLFYRKISKKGVSPQKAQIAAARKMACIVWKVLSSKQPYTEQDDHMTKRKMKIMSSKAMRTIPTSVVPSKVSELVRNLADDIDVLGKYHEHSDYIIGKDLSNKNRLKEDILR

SEQ ID NO: 325275 - protein, 350 aa, unidentified
MLIIGCDYHPAFQQIAFVDTDTGELQERRLQHRGEAERFYRELAAKRMKVRVGMEASGHARWFERLLSELQFELWIGDAAEIRTKRVRKQKTDRQDAQLILQLMLEDRFPEIWVPSWENRDLRQLLWHRHRLVQARTRMMNQLQAVALNEGLRCKKKLFREAGRQQLEGFRLAPWASRRRHDLLDLLDRLTPTIAELTQAIEQEVEKCPAARRLRTHPGVGPLTALAFVLIIGKADRFQCGKQIASYLGLVPLEKSSGNQRRLGHITKQGSTLLRFLLVEAGQVTARSLPEWRSQYYHLTMRRGRKIAKVAMARKLAVRLYWMMRKEWDYGQLTKFGSYAGKPENRDGVK

SEQ ID NO: 325276 - protein, 338 aa, unidentified
MNRYVALDVSLEFTAVCVMDEEGELVLERKVASDPAAIAGLLFELPERPCCVGLEAGPLSEWLARGLAQAGLDAVLMETRHVRAALSAMVAKTDRNDARGMAQLLRMGWFRPVHRKTMNAREQRALLAARSTLGRRLRDVENSVRGILRGFGIRVPRLPRGRWSDGVRGALQGNTVLRGVVEPLLAATQALRDQLAVVDKRARDAARQDAVCRRLMTMPGVGAIVALTYRAGVDQPERFKSSKQLGPCFGLTPRRYQSGETDRSGAISRAGDASVRVALFEAAHVMLTRSTHWSKLKAWAVAVAKRRGAKRAKVALARKIAVILHRMWIDGTEFRFVA

SEQ ID NO: 325277 - protein, 416 aa, unidentified
MNNQTLYVGCDVSSDNNYYCFLLGCGATIRKTSLPNNAKGSNQLVDLILEDLEGYDLSKLIFGLEATNNFHFHILNFLALHEKLENYDVILYRINAKLIKNFKDGYPDKSKTDKYDAFIIADKLRFGRLPEPFTPFNEFVSLKRLTRTRFHIVKQLEREMNYFLSNLYIKFSEYKKLPFSNTFGTTSIALVTEFDIEEITQISNEKLIDFLIEKGKNHFTDPKAYAKEIKKIARNCYRIDRSVNKTINLILEVSLSTIKALKESLSRIDIAINREISKFKHTLESIPGIGPVLSAGILAEITDINLFENDSKLAKYAGLTWLHKQSNQYKSEETHMNKSGNKYLRYYFIQAAESARKNCDEYRDYYNKKYRESTKHKHRRALVLSARKLVRLIFVLLRKNTLYDPSRYLKNRGGGC

SEQ ID NO: 325278 - protein, 351 aa, unidentified
MIIVGVDYHPSVQQVAFLDTETGETGERRLNHSDGEAERFYRDLQRRQVKVRVGIEATGHARWFERLLAELKFELWIGDPARIKAARVRKQKTDRQDAQLLLRLLIEGRFPQIWVPSPENRDLRQLIWHRHRLVQMRTRAMNQIQAAAMNEGVRRKKTLWSKTGRRQLEALPLAPWATRRRQDLLELVDRLNTTIDELTAAAEQEARKRPEVLRLMTHPGVGPITALAFVLVLGSPDRFGCGHQIGSYLGLIPCEDSSADRQRLGHITKQGSSLLRFLLVEAAQAAVRWDPDWRRRFVHLAMRRDRRIAKVAMARKLDVSLYWMWRKEFDYPQTLQFGSHAGEPGYVHGVK

SEQ ID NO: 325279 - protein, 436 aa, unidentified
MDRVIIGVDPHKLSVTIEARDTREILRATGQFGTDTRSYHQLLKVARQWPQRIWAVEGANGIGRPLAQRLLASGERVLDVPAKLAARARVSGTGQGRKTGAADAHAIVMVALRDKGLRELRIDPELTVLRMLCDRRDELSRARAQALNRLHRLFLGLLAGGAPVKKPASQYRALLATVRPGDLAGKTCRRMAAEELEDLERLDIKLKAMKAELKAAVLATGSHLMDIHGIGPAGAARILADVGDVTRFPDRGHFASWNGTAPIDASSGQHTRHRLSRAGNRRINHVLYMAGIVQLRNDTEGRACYRRKLQQSKTSMEAMRALRRRLSDAVYRQLVADAATRQAALQQTGPGGHSGAALSSSAAGLPPGTGTSDQPLPGPAPSTLPPPQAALKTPAAPIAATSRRRARGVNVERPTGRTTLTPTSAGAHSTAPGPRT

SEQ ID NO: 325280 - protein, 417 aa, unidentified
MPEYAALVAIDWADQQHAVCLSEPNTGEREQTIVKHTPAALQEWALGLRQRFAGAPIAVCLEQSRGPLIYALLQYDFFVLYPINPATLAKYRQAFSTGRGKDDPTDADYLLDLLEHHRNRLRPWHPDDEKTRTLRLLVEQRRRLINDRTRISNRLTALLKGYFPQVLDWFDDIRTVLVCDFLDRWPQLSRLQQARPATVDRFLRSHHSTSKATNQRRLSEIKSAIPLTTDAAVMTSSILNVKVLVAQMKTVIAAIAEYDRHLEALCQTHEDYHLFAALPGAGPVHAARLTAALGSDRSRWQTADELLRFSGIAPVIERSGKQFRIRWRYFCPKFFRQTFHEFAAQSIQDSFWARAYYSLQRAKGKDHHAAVRALAFKWIRIIWRCWHSRTPYNEVIYLESLRKKGSSLLKFAADYQQ

SEQ ID NO: 325281 - protein, 337 aa, unidentified
MDYFAGLDISMDETHVCVLDREGEVVRESKTVSTAQAIADELAKAPSCRRIVFETGRMAPILFHGLRELGFPVVCVESRQAYQALKSLSTHKTDRNDARGLAHLARTGFFKPVHVKSLPAHAVRSLIIARKKLVGQRVTLENQIRGLAVVFGVRLPRALTAAFINEALKASEGIAGLSAAMRGLIAARTAVMTAVAAIDADIRRMTRASAACRRLMTIPGVGQLTALAFVAAIDDPSRIRRSREIGAYLGLVPRRYQSGEVDYVGGISKCGDRRVRTLLYEAANVMLTRYKGQLKLKDWAFAIARRSTMRKARIALARRLAIIMHAMLRDGTEFALA

SEQ ID NO: 325282 - protein, 336 aa, unidentified
MEQISRIGMDTSKHFFQLHGVNAAEKVVLRKKLRRKEMVAFFKALAPTVIGIEACGASHHWARILRSFGHEVKLIAPQLVKPYVKRGKNDTADAEALCEAMSRPTMRFVPVKTAEQQAALMMVALRDRLIRNRTQLSNAIRGYAAEFGFTAARGIAQADENVPVLARELFAAQAEEYAQLQAQIAEVDAKLMAWHKADECSRRLAKIPGVGPIGAALLMMKTPAPEMFRSGRQFAAWIGLTPKDHSTAGKVRLGVITRAGDEALRSVLVVGATAVVQQVRRGGRGSPWIVDLLKRKPPKLAAVALANKMARIAWKLMVTGNSYAAKSAPAALMGAA

SEQ ID NO: 325283 - protein, 340 aa, unidentified
MKVSTVGLDLAKNVFQVHAVDEAGEVVVRKALRRGRVMPFFERLEPCLIGMEACGTSHYWGRELRALGHEVKLMPPAYVKAYVKRGKTDAGDAAAICEAVTRPSMRFVAIKSPDQQSLLAVHRARDLLIRQRTQLVNMIRGQLAEFGIVVAKGIHHVLNLVARLLDGEALGLPALAAKVVITLAEQLRDLQARIGDLEKDLVSWSQEDPVVKCLQTIPGIGIITASALAASVTDPQQFTSGRQFAAWLGLTPRANCSGGRERLGRISKMGDQYLRRLLVNGMTSRLRWVRRRPEAHPWAAKLLRRKPAKLVAVAMANKTARIAWAVMTRGEIYRAPQPAT

SEQ ID NO: 325284 - protein, 351 aa, unidentified
MIASKRSVIGGVDTHTATHHAAVIDLNGRLIDDAEFRATPAGYTAMLTWMRGKGKLTQVGVEGTGAYGAGLARHLHDQGIEVLEVPRPDRRIRRQRGKSDPIDAEAAARTVLAGKASGAPKLADGPIEAIRMLRVARNGAVKARTAALNTLRSMVITAPEPLRSQLRTLSSAQLVAACARLRPDLSNLADPVHAAKHALRSIALRAQHLNAETRSLRKQLDELTQAAAPATSAVFGLGPDTVAALLSAIGDNPDRLRSEAAFAHLCGVAPIPASSGKTHRHRLHRGGDRAGNSALHIAAVVRLRYDPRSRAYADRRTAEGMSMPEIIRCQKRYLAREIFGALRTDYAELRT

SEQ ID NO: 325285 - protein, 344 aa, unidentified
MQHYVGLDVSVKETSVCIVDKAGKVIREVKVATEPVPILAVLTEEALAIERIGLEAGPLSQWLYSALAGAGLPVICVETRHMKAALSAQINKSDRNDARGIAQMMRVGLYRPVHVKTLASQKRRMLLTSRQLLQAKALDIENDLRGTLRNFGLKVGMVGTVKFEARIRELVADHPDLAAVVEPLLIARRVLREQLGVLHRQLLEIVRQDEVCRRLMTTPGVGPVVALTFRATVDVPSRFASSKAVGAAFGLTPRRQQSGEIDRMGGISKCGDGMMREMLFEAALVLMTHSRKWSWLKAWGMKIARHRGMKRAIVAVARRMAVIMHRMWVDGTEFRWTREEAAAT

SEQ ID NO: 325286 - protein, 454 aa, unidentified
MASHSRPRPRRQPPVINPNAAGVDIGATEIYVAVSPDRADPSVRRFATVTEDLHALADWLRQCGVTTVAMESTGVYWIPLFQILEVRGVEVCLVNARHVKNVPGRKTDVQDCQWLQYLHAVGLLRGSFRPADQVCIVRTLLRHRDTLIQIAASHVQRMQKALNQMNLQLHHVISDITGVTGLAILDAILAGTRDPQALAARRDRRIKASREAIAKALVGDYRSEHLFTLRQSLAAYRHDQTLIQECDAEVEHTLHGFDARIDPAAHPLPPATTSHRKPQGNEPRFDLRGELYRLLGLDLTQVPRLNTSTVYTLFAEVGADLSKFPSPKHFASWLGLCPDNRVSGGKVLSVHTRHVKHRLARALRLAAQSLHRSHSALGAFYRRMRTRLGAAKAITATAHKLARIIYHLLASHTPYDESHFADIERAYRQRLESRLRAQAKALGFTLIAAAAVTT

SEQ ID NO: 325287 - protein, 354 aa, unidentified
MITIGVDAHKHVHMAVALDERGRVAGHWQGENSVAGWDEATQWARALGDERRWGIEGGGGYGRGLAQHLVDGGEVVYDINPRLTATERRRSRRTDKSDACDAQAIAQVVQREDAKLPRVAAEDETVALDLLTAEREDAQAEATRLRNRLHHLLLQLDPQYHLHLPALTSVAGVQAAAGYTTTSSSLVQQERAAVVRRLAGRLRLAMEQVAELGQQRIEALAQARYAPLTRLCGVSLLTAGSLAGILGPGRRFASEAQLAAYAGVAPLETSSAGRVRHRLNRGGNRRLNAIVYRIALVQARWSPEAKAYLARRVAEGKTKREAFRALKRYLIRAIWRLWGACLSPAATETAHRAA

SEQ ID NO: 325288 - protein, 331 aa, unidentified
MEKYAGIDIAKRTHWMCVTDGEGRFLMEPRPYGNDADGLSRMVADLDLCGGDVAVGMESTGCYWRSCYKVLAEGGYPVSVINPVVTCAERKSGNLGRAKTDRVDCLVVADALRKQGIAPTPSPDADAAQLRDLCRFRRAVSESMSRAKIQAVALLDQVWPEYGKLFSDKFGDSSRAVLRRFALDEMDADGLADDLRGASRNRFGAAKASDVLESLRSTCGVPATDALRLQLRLLLDQLDFCAAQLAEIDAEADSLLDAVAPTLPTVPGVGRATAAQIAAEVGDATRFRDAKALVAYAGLDPTRRQSGGFDPDRNRISKRGSAHLRRSLYIC

SEQ ID NO: 325289 - protein, 392 aa, unidentified
MSQHFRFDASRSLTALEQDSTIVAVIEMSQTKWLVAALVPGVERQPLKKFDAQEEMLLKLLHRWHREAGQAGRNIERIVVALEAGRDGFWLARWLRARDVEAYVIHPTSIAVSREHRRAKTDRLDTELLMRVFLGWLRGEKRHCSMVAIPTIEEEDARRPNRERQNLVTEQTRIINQIKAIFARFGLRTLRPTMRKLAEGLEDLRTAEGTPLPQNTLSELRRHLARLRFVRDQIHAVEQERLRKLAVAPAAETKSPDAMVRLIARVFGAGIETADMLVNEIFSRHWRDRKAVARYAGLTGSPDESGSRRRERGLARAGNVRVRCGMIQLAWRFVRFQKNSALAQWFAARTADGRASTRKTMIVALARKLLIALWRLVTRGEVPQGIVLRPAS

SEQ ID NO: 325290 - protein, 341 aa, unidentified
MRTTYVGMDIHKNFIQAAALDEQGNIIMEQKFKTNDKEIQRFVKSLKAQKIQAAIEATCTWYHVYEILRALDVETTLVNMRRTKTIAESKIKTDKLDAKTIAHCLRTGFIATAYIPPKHIMEQRNILRHRMSLRKELVRYKNKIHAILLRNGIQHRGYSDLFGVGGMNFLQHITIPDSEQYSLTSYLNIVEALLKEKTQIEKKIETLCKNNHQAMLLTSIPGISYYSAMIILMEMGEVQRFSNPKKLCSYAGLVPRTIQSGSHVYHGRILKECNQNIKWILGQCTHIHIRHCPSSLITKLYCRVESKRGANKATVAASRKLLTCIWHMLMKDETFKYDNDN

SEQ ID NO: 325291 - protein, 355 aa, unidentified
MDSVKYIGMDVHKEAISIAVLNSSGKLVMECVIETKAITILDFLKGLRGSLHVTFEEGTWAAWLYDLIKPHVTELVVCNPRRNALLKEGSKSDRIDARKLAELLRSNLLRSVYHGEQGVRKLKELARSYLAISKDLGRVMSRVKAIYRSWGIPCGGKQVYAQRYRSEWLDKIKEAGVRRRAEFYYQQLDALRPLRQQVRQELLAEAKKHSAWKLLRSIPFIGPIRAALLMALIQTPHRFRTKRQLWSYSGFGIETHSSAEQRFINGELRRAKKPVSIRGLNRNHNHDLKNLFKGAATVGAAKAGPFQEFYNALVAKGIRPEMARLTLARKIASITLIIWKKGARFEAQHLKPQTA

SEQ ID NO: 325292 - protein, 326 aa, unidentified
MHYIGIDISKAKLDCCWLRDAEKNKFKTKVFKNNAADSKALDIWLTSLTKADPSEITVLMEATGIYHENLAHYLFERGYQICVVNPARTKEFASSLGNTHKTDAKDSQILALYCHRMHPELWQPERPEIRELKALLARLESLETDLNRETNRLEKAEFNCSSERVIGSLNLMIEQLKAEKRRLEDDIDNHIGRYPQLRKDRQLMESIPGVGPIVSRLMLSVLHSRSFRTAGQVAAFLGLVPRIQQSGQWKGRSRLSKQGPANVRAKLYMAAVVCLRYNPDIQVQYQRLMENGKSKMQALGAGMRKLVQICFGVVKHQSEYHPQVVT

SEQ ID NO: 325293 - protein, 402 aa, unidentified
MNAVGIDVSKGKSMVAIMRPFGEIVSTPFEIKHTSSDINSLVKLIKSIEGESRIVMEHTGRYYEVLAHQLSEANLFVSAINPKLIKDFDNDSLRKVKTDKADSVKIARYALDKWQNLKQYSVMDELRNQLKTMNRQFGFYMKHKTAMKNNLIGILDQTYPGVNTYFDSPARSDGSQKWVDFASTYWHVDCVRKMSINAFIDHYENWCKRKKYNFSKSKAEEIYGKAKELVPVLPKDDITKLIIKQAVDQLNSASITVESLRTLMNETASKLPEYPVVMAMKGVGTSLGPQLMAEIGDVSRFTHKGAITAFAGVDPGVNESGSYEQKSVPTSKRGPSDLRKTLFQVMDVLIKTHPQDDPVYQFLDKKRAQKKPYYVYMTAGANKFLRIYYGRVKEYLASLPES

SEQ ID NO: 325294 - protein, 340 aa, unidentified
MNATTYGLDVAKHVFQMYWVDNQTGEIANRRFRRDELVAFLAQRPAGRVALEACGSAHWWARKIQALGHEVVLLHAKFIRPFVQTNKTDAADARAIWTAVQQPGMRTVAAKTEDQQAMLGLHRMRSPLIKFRTMQVNQLRGLLYEFGVSFRAGRAAGLAEMRARMAELEDALPGTMFSSLRDQLRRIDGIDQDIDQLEKQISGWHKQEAACQAIAAVPGIGRLTATALVATIGDAKTFRSGREFASFLGLVPRQSGTGGKTHLGPISRRGDPYLRTLLIHGARSVMCHAKVPTPWQKAILERRPANVAAVALANKMARTAWAILAHGGTYDRHHVSARPA

SEQ ID NO: 325295 - protein, 451 aa, unidentified
MSLEVVNPNAAGIDIGSRSHWVSVGQNSEDVKEYGVYSEDHKKLCEWLKKHKVTTVAMESTGTYWQNLFSSLVAYGFEVILVNGRQTKNIKGKKTDILDCQWIQKLHTLGLLSSSFLPDSTTDIIRTYSRHRQNIIKQSASTVMKIQKYFRLMNMRLDVVVKDIVGLTGTKIISDFVNGEKSGEKLAKNRHYNCRKSEEEIAKALQFNGREDYYFALQQEWHTYLHLQKQIDAVDIQIKKHLTDVIDNDDNKKQHIASKKPYKRKNKNTIRDIDMNQMSYQYFEGIDLMAIEGVNDATIMALISEIGLAGIKKFGTAKQFTSWLRLAPNNKISGGKVLSNYMPKGSNRLKISLRQAANSIGNLKEGHLSDFFRRINYKRGRATAVSATARKLAVIIWNMLAKGVPYSPPTEYLFLDQKRKMKLVSRIKKNIAKFELKPEDVGFSNLLNMSI

SEQ ID NO: 325296 - protein, 387 aa, unidentified
MIYYVGIDISKYKHDFCIISNAGELIVENSSFQNNKIGFQCLLEHLKPYNKSDVHIAFEATGHYSLNLELFLTNNGYTYIKTNPLIIHQFLKARSLRRTKTDKADSITIAKYLMSVPYQPNSDLLYTIFTLKSLCRARESLIKERSKFAVLLTNELDKSFPELKPFFNNMISSTLLYILEKYTNTKHIAAMKDYDSIRKISYGKFTYAKFAKLKELAKNSVGFHNENTDLLISTYVSIYNDFNNKIDPIEKQISTIIKVLNPRMLTIPGIGEISAATILSEYGDIKNFSNPNKMLAFAGLDPSINQSGTLESNGKMVKHGSGHLRYAIMNSAMTILRFSPEFYDYYLKKRSEGKCHRVALSHVCKKLIRVIYTLEKNNIDFNPSLLK

SEQ ID NO: 325297 - protein, 337 aa, unidentified
MEVAFVGIDLAKNVFQLHGEDAQGTPVLQKRVRRDRLMAEVEALAPCSIAIEACTGAFYWQRRFEGAGHRVRIIAPQYVKPFAKHQKNDRNDAAAICRASRQPDMKFVPGKTLEQQDIQALHRGRQRLVNHRTALVSQMRGLLLDRGIAFAQSISRARREIRFLLEEETPELSEIFRSMLAQLYSCFVALDEQIAWFDREIEKVFRNSEVCQRLAKIRGVGPKTATAIVAAIGDGSEFSNGRHLAAWMGLVPRQHSSGNRQRLFGISKRGDRHLRTLLIHGARAVVRTSARRDDAQAAWIRDLQARRGAAKTIVAVANKNARIIFAMLKNQTEFRAA

SEQ ID NO: 325298 - protein, 418 aa, unidentified
MQMELSQFAAIIGIDWADKKHDICIQATDTGQRQVYQIAHKADKIDEWARSLQRRFGGPIAVALELSKGPVVSALQKYDFFVIFPIDPTTLAGYRKAFRPSGAKDDPTDAELALELLLCHPDHFQVLTPQSVEMRTLMTLVEQRRRLMNDRVRITNRLRNALKQYYPQALEWFDRIDTQLFCDFIKRWPSLVQVRRARKATLEKFFREHNMNRKALLERRLAAIKSAVPLTTDEAVIVPYRLQVLTLVAQLEVALESIRIYDEEIAGLAPQHPDYGLFNTLPGAGPSLAPRLLVAFGEQRERFASAAELQKYGGIAPVTERSGQKSWIHWRWQCPTFLRQTFVEWAAQTINKSYWAGLYYYQQRAKGCSHQAAVRVLAFKWIRILYRCWVTRTPYDEAKYLKALQERGSPLLKIAQAA

SEQ ID NO: 325299 - protein, 347 aa, unidentified
MFNNNVIAIDLAKSSFHVCSLNKQNKVTTNKSFTRTKLKEWLIKQPKSIVAIEACGSAHYWARLVKQYGHTPMLLPPKLVTPFRKGHKTDKNDALAIAIAAKQPQIKTTAIKTVEQQGLQSIERMRQHHSDFITATSNMLRGLIYEFGITIPKSKAALRKEVPFILEDAENDIPDAFRHQLSEMFNFYKASEEALLQVEKDLAALIKTQKTCQSLMEIEGIGPVNALGLSLALGEKGESFKNGREASACIGLTPQQFSTGGVVTIGGIGKKRGNKRLRSTLIQGALAITKILMKREPRNTKEAWLKALMERCGIRKAAVALANKNIRTAWAMLRYEKSYQIPSTLEA

SEQ ID NO: 325300 - protein, 408 aa, unidentified
MQVLYPRCAGLDVHKDTVVACVRCVSEPEHHETRSFATTTRELLALGEWIASHGCSHVALEATGVYWRPVWHVLEGQVELVLANAHHIKNVPGRKTDVNDAMWIADLLAHGLIRSSFVPPQPIQELRDLTRTRKQVVREISQHSLRIQKVLEDANIKLGSVLSEVLGVSGRAMLGAIIEGERDPHKLADLAHGTARRKHDALVEALHGHIRPHHCTLLKLHLNLIIALEHTVAEVDAAVGKCLDPIHQRARLLTTMPGVRDTVAEVIVAEIGIDMTRFPTPGHLVSWATMCPRNDESAGKRRSTRLLKGNNWLKTALVTAAWAAVRTKTSYLRAQFLRLKARRGAKKAIIAVAASMLTAAYFILRDGVPYRDLGPNHFDRQQRGKTVRRLLRRLHDLGYNLPLQNQPV

SEQ ID NO: 325301 - protein, 393 aa, unidentified
MQWSAETPDRIGDWLGLSNRSCLAEKMKGRQAMRELPRICVGVDLHKLQFTVHAMNEETGEVMLTGVYRTDSQGYEEFCNRLHSIETEEECRIELAVEATGNARYFKNKMEAEGFGVLVVNTSKFKVITMSTKKTDANDAATLSFYLSKDMLPQSHLCDQTSEEIRRMLKTRSILVSSTVKIKNQIHGMLLGYGIETTSAQFQSKKKRQELINVLAEHYFSQFTASSLEVTLNILDDIYAQVKKIEEQIKEMTKENETIELLMTMPGVGFVGATTIASYVDDISRFDGNFKKFSSYLGIIPSVHNSADTVRMGHITKRGPQELRTAFVQVAMGIIRQPQNTSEWKLMKDYRTMKTSKGSGRAIIALTRKVARIVFAILNNQVAFNPELMKKAI

SEQ ID NO: 325302 - protein, 348 aa, unidentified
METIGLDLHKRESQLAIQAEDGTITERRIVTSRERFTAVLGHRPRARILLEASTESEWVACHLEALGHEVIVADPNYAPMYATRSRRVKTDKRDARTLMDACGQGTYRRAHRLSAPRRHLRAELAVRDALVRTRTRYVALAKALVRRDGLRVPSSTAERVGDRVQALALPAPLAAELAPLLTLLPSLNATIAAADHQLSALEQTDPIVALLMTAPGVGAVTASALVATLDDITRFPSAHQCEAYLGLVPGERSSGEQRRIGPITKAGNRRTRWLLVEAAWRILRAKDPESAALRAWTLRIAARRGKPIAVVALARRLAGIVYAMWRDGVPYDGRKIRAPHHARGAQAG

SEQ ID NO: 325303 - protein, 468 aa, unidentified
MFLHRPGRLAWRMEVVLAKLRKNKKAHGLVAAPVMEPNAAGVDIGATEIYIAVPPDRDTQPVRRFAAFTEDLKAAADWLERCRIETVAMESTGVYWIPLFQILETRGMKVCLVNARHVKNVPGRKTDVSDCQWLQYLHAVGLLRASFRPSGQVCAVRSLMRYRESLVGMAAVHLQHMQKALDQMNLQLHHVISDLSGTTGMAILDAILCGERNPLKLAQLRDPRIKASPETIAKSLVGDYRREHLFTLRQSVTAYRSYQQLLACCDVEIEQMLGEFPDGAGPDTPVLADPKDRHRPRRNEMKFDLRGHLYRIFGVDLTEVPGLNALTAHTLLTEVGPDLSAFPNVGAFASWMGLCPDNRVSGGKVLSSHTRKVNNRAARALRMAAQSLFRSQSWLGQYYRRMRAKLGAPQAITAAAHKLARIVFHMLTNRHAYDETVFAQQEIQNQHRLQQKLMQQAKKYGFQLIPIT

SEQ ID NO: 325304 - protein, 485 aa, unidentified
MKNKSIFTRQNQTLINLFRDARHPEKVLCIPLDYAKSTHVALCCNGAGTVLKKAFPVKNNPEGMDFLLEAAEKIRRKHHIKREHVFFGGEDCGTFSLNFIYGLRKQGFIVMGVNAKDAKEQRENMQASSDELDLLGIAKLLINRRGATAGGEPGAERALRSLTRHRKSQVRLKTATSNRIHQIVDQLFPSFLDERLSGIPPFSDASLYVMEDRFSPAQVASRQDKALLRQLKACGLQHAETAIGKLKAYARQVLAHPPELTGLLQTSLASEINLYRCLGTNIDQVGREIAQQLAKTPGAMLTTVRGIGITLAAGSTAEIGPPDSQPSVRRLASYAGIVPRTKQTGGPEKGAKTGRVSRRCNHILKDYIVQCGNHLGQHGPTDLKEDHRRRGAHKQHADFGMARRFLRMGMRLMRNGESYVPPELRTGATLEELQAYYLELWPKLLDKWVKAGAVHTAFHEDNPLGQWRDRIQKIYGIELPLPEKK

SEQ ID NO: 325305 - protein, 417 aa, unidentified
MNSPPETIPIVRYIGIDIHQHYLMIGGQNRHQEWTLRPRKVQVSRFRDWAEKNFKPGDAVVIETTGSVWDIYDIVAPLVTRTQVAHARKVRQIAEARVKTDKEDIKRLITLLIADIVPKVWVPPMHVRELRSLISFRWRLTKQITMSKNRLHSVVQRFNLNAPEGGLLTDKNRTWWDRQEFSDLTGFEVERDLEIVKILESQKAAIDQKLAELSNTEPWASDMVYLMQIPGLGPIFSMVILSAIGDIKRFSHPKKLVGYAGLGAGVHDSGQKHQGKSITKEGRKELRWALVEAAWRAVGSDPYWEAQLKRLEKRMHRNKAIVAIARRLLVSIWHILTKRESYRHFDEETIAYKMLIWSWAMDEKSRGGMTPQQFAKYGLLRLGIGQDLERINRGGALRRIAPTEEILALKPELEPPR

SEQ ID NO: 325306 - protein, 339 aa, unidentified
MRLYAAIDLHSNNNVLVILNENDQVVLEKRLDNEITHVLAHLAPYRDDVVGVAVESTFNWYWLVDGLEAAGYKVKLVNTAAVKTYDGLKYTADEHDARHLAHLLRLEILPTGYIYPKEERSVRDLLRKRSQLVRCRTAQVLSIQNLVSRNSGHGIKLGDIRKLDEESILRHCGNDSARALAMKSNLAVMRCLDEQVREIERVVLKQARIKPAFETLLTVDGIGKILGMTIMYEAGTMDRFPTVGQFASYARCVGSSRWSNDKKKGEGNRKNGNKYLGWAFVEAAHFAIRYNERVQRFYQRKKAKRNGVVAIKAVAHKLARACYHVLKDQMPFEETRAFA

SEQ ID NO: 325307 - protein, 324 aa, unidentified
MTQPITPTPEQSVSIGIDVAKDELVIFIDTRNEHLTVANTESAFKELVKQFQALPIQRIVVEASGGYETALVSTLATNGLPVCLVNPKRVRDFAKGVGQLAKTDRLDAAVLARFGRLAQPALYRLLSTEHAELADLLPRRRQLVEMLVAEKNRTETASQTVKRNLTEHITWLEKRVDHLDTELKQRLHDTEVWRKQNELLQSVPGVGPVLSVTMLGLLPELGQLSRQQVAALVGVAPMTQHSGKWKGQAKITGGRGDVRSVLYMATLAATRCNPVIKAFYQRLRKAGKLPKVAIIACSRKLLTILNAMLRDNVTWSWEAPQPAL

SEQ ID NO: 325308 - protein, 341 aa, unidentified
MSIITVGIDLAKNVFAVHGVDDNGKAVLVKPKVSREHLLPLIAQLPPCLIGMEACSGAHHWARLFRPYGHTVKLMAPKFVTPYRMSGKRGKNDAADAAAICEAVARPNMRFVPVKEEHQQIILSLHRTRQGFVEERTAVYNRLRGLISEFGIVCPQKVANLRRDIIDRLEDLPGYVNQCVGDLLAHADALDVRIADYDRIIAKAAREDARSKRLMQLPGIGPNTASAMLASIGSGHDFKNGRQVAAWIGLTPGQYSSGGKPRLGRITRAGDRYLRSLLVMGARAVLSGLGDKQDRFSRWARSLVERRGYWKAVVAIAAKNARLAWAVLKFGEEFRLKAATA

SEQ ID NO: 325309 - protein, 363 aa, unidentified
MTISIGVDLHKTQFTTHARISGGVKGQYATDEEGYKAFLTQVRAWRKTKGTTVKIGVESTGNTRYFKNRMEREGIEVTVINTLKFKVVNESVKKTDRHDAETIAEFLEKDMLPESRLCSEASEQIRRLLKVRTTLVRTTVTVKNQIHGLLTGLGMQDSKASLQSKRGRQKILDTLAGAANGLVVQPLFETIEKLEENVKLIEQEIGKLAEGDRVVELLQTIPGCGPVTAWTIRAFTDDIGRFETFKKYSAYAGLVPWVQCSNMTEHYGRITKRGPEELRTALVQLVLGMRRSKKTLSWRIMERYTAMKREKGSGKTIIATARQLSRIIWCMLTEDAPFDEGLMIDKRLNRKADSMKQKLRETA

SEQ ID NO: 325310 - protein, 445 aa, unidentified
MATNKPKVRRTKLEVMYPDAAGIDVGGSRHYVAVRGDADAQSVRDYGCYTGDLHAMADWLSECGVKIVALESTGVYWVPLYEVLERRGFEVLLVDARHVRGVPGRKSDVLDCQWLQQLLSLGLLRGAFRPHDQMCELRELNRLRSRLLREQGRSVQHMQKALTLMNVQLSNAISDIAGVTGQKIVRAIVDGERDPTELAAYRDARIKATEQEIAASLQGNWRAEHLFALKVALSTFDFCGEQLQACETEIDRAMQALQRYTEEPVKGKKRSKAKNAPKFDVRERLFKMCGVDLTRINGSDVSTAMTIISEIGTDMTRFPSDKHFASWLGLCPGTRISGGKTLGSGTKHSTNRATLALKQAAAALRTSQSALGAYFRRLCGRMDKAKAVTAAAHKLARLVYTMLTKGEEYADQGQLYYEERFRERAVRQLQRRANKLGMLVVPATA

SEQ ID NO: 325311 - protein, 311 aa, unidentified
MKEPERFVGIDISKEELVVAVRPTAELQSFPNTEEGLATLVGFLQPLGAHSIVLEATGGFARAAINAMALAALPVAVVNPRQIRDFARSVGLLAKTDAIDARIIARFAEAVRPELRPLKDLETQKLEDLNNRRRQIVEMITAEKNRLGMAPPWSQKDIRSHIAWLEKRLKRINDDIDDLIKQSPIWRQKEKILTSVLGVGPVVTTTLLCGLPELGSLSARKLSALVGVAPFNRDSGQSRGKRSCWGGRAHVRAALYMAALTASRCNPVIRAFYLRLRLAGKPAKVALVACMRKLLVILNAMVKNNTCWQQA

SEQ ID NO: 325312 - protein, 450 aa, unidentified
MAQRKASKGSKLHKARVSLVITHPNAAGIDIGSASHFVAVPPDRDDEPVREFPSFTTDLSAIADWLSACGVEVVAMESTGVYWIPLFELLESRGFKVLLVNARHVKNVSGRKSDVLDCQWLQQLMTYGLLSGAFRPEEQVCVLRSFMRQRSMLLKSQATHVQHMQKALTQMNIQLANVISDVVGETGQKILRAILAGERDGRVLAAMKNSRIHASDEEIAKSLQGNWRAEHLFALKQAVAGFDFVGSQLAEVDQEIERQLQDLEAHEGDPPPGKKRGKARNAPRFNLRSLLFKMCGVDLTRIDGIDVTTALAVISEIGTDMSRFPTEKNFTSWLGLCPGTRITGGKVMSGRTKRCANRAAQALRLAAAALRTSKSALGAYFRRMCSRMEKAKAVTAAAHKLARLIYTLLTKGQEYTDQGQEYYETRYRQRVVNHLSQRVAKLGMKMVPIE

SEQ ID NO: 325313 - protein, 326 aa, unidentified
MPGDGHVTKAIKEGGDMDVIIDKGCGLDVHKETVVACVTGEGIKKEIRTFSTMTGDLFRLKGWLSEKGITHVAMESTGPYWKPVFNVLEDTFEVILANARHIKNVPGRKTDVKDSEWICKLLRSGLLAASFVPPKAIRELRDLTRYRRKLTQAISSEKNRVQKVLEDANVKISSVVSDTFGVSGSRMIEAILAGNLDAESISDLAVGKLKGKKGEIKKALEGNFRDHHRFMIQASLDHIESLEKIIAGLDQEINRKLKDYHREFELLQTIPGVKGQGAASILAEIGADMDIFPSEGHLSAWAGMSPGNNESAGKKKAERRPTAIRI

SEQ ID NO: 325314 - protein, 373 aa, unidentified
MPRYSTAFGMDVHLRSTTVCALNAETGEAVARRFRGNPWGEVAEWMSGFPGPSLATYESGYLGFAPQRELSALGVDCVVAAVSKVPRSAADLSSKNDRNDAARMAKAILSHDVTPVWVPSPEIEGLRDLAAAHDAATARLAAAKQRLLAFLARRGYVYGGTTPAGNPRKYWTYGFLRWLDKVRPADDGGIRALAALRNEVEAADEAREALLAEYRAAVAAGPLSAEVEALQSIKGCGFVLAAAFASEVGDFSRFRSGRQVTAYFGLAPKQRSSADSVRLGGISGAGNALVRRLAVEGSWRYAQAGHQPKLMPKGSGVPLEIRMHGRKGSERLLRRREEMLERGMPQAKANAATAAELVRWLWALGMMCREAGE

SEQ ID NO: 325315 - protein, 340 aa, unidentified
MRLIGCDLHASQQSIAMRDRDTGEIVEKTLAHEGGADREFYASIPPPVIVGIEATGSMGWFLRLMAELTIECRVGHPTAIRKAETRRQKHDRRDAALLLQLLVEDRFPAIWMPSTEYRDLRSLLLHRHQWVRMRTRVQNALHAIVLAHGVRRGHTLWNRDGQARLASLPLPPHTADRRSELQALYQHLQAHIDRLDDRVEHVANERARATLLMTHPGVGPVTALATEVFVGEPARFLDGKALASYVGMIPREYSSGKRQRLGALSKQGNPFLRFLWCEAAAHAVRRDPDLQRFYRRKMVQKGFAKARVAAARKLGIRLWIMLRDQIDYNEFCRRGLARQS

SEQ ID NO: 325316 - protein, 349 aa, unidentified
MITIGIDPHKDTHTAAAVKDATGELLGELTVAGTEEGHERLLTWAHGLAREGSLRFALEDCRHVNGRLERFLLAASEPVVRVGTRMTARERRGARTVGKSDAIDALAVARAALREPGLPAASHNPRLRELKLLVDHREDLVAERTAHCMRLRWHLHDLDAGLEPFGRTLDREATRRGLSQRLGRYGAQGVLVGICRELLTRIGEITRRVGELRVEIGAMVRPLAPRLLAISGVGDLVAARILVETDAGRFRSDAALARHAGCAPIEVSSGRTHRHRLSRLGNRKLNAALHVVVLTQARVHPPARAYIAKKRAEGKTTKEAFRCLKRHLVRVVFRALQEPAKPAVSPSSS

SEQ ID NO: 325317 - protein, 417 aa, unidentified
MKSASSSLPDQPVNGVTAGVDWACDDHTVAVVEENGREIGRRTIEHTAAGLSDLLALLRRYRVEEVAIERPDGPVVETLLEAGITVVVISPNQVKNLRGRYGSPGRKDDRFDAFVLADTLRTDRARLVPLTRDSEATIALRKTCRARKDLIGHRVAAANQLRAHLQSVFPGAVRLFADLDSPISLTFLARFDCQDRADWLSVKRLAAWLASVSYSGRTPAAELYARLVAAPRGAPGHYGAVQAHITGAFVALLTTLIEQINALSAEISQQLEEHADQQIFTSLPRSGTVRAARLLAEIGDCRGRFPTPESLACLAGVAPTTRQSGKSRSVGFRWACDKQLRDAVCDFAGDTRHANPWAADLYQRARDRGHDHTHAVRILGRAWLFVIWHCWQEHTAYDPNKHRALQRLLNQDHQAAA

SEQ ID NO: 325318 - protein, 323 aa, unidentified
MNAPCLYIGIDVCKDHLDTIRFDHKPTRLPNTTAGISALIKRVKATGQTALLCCEATGGYEQKLLREATDAGLHIARINPERVRHLAKSDGHFAKTDALDAVLIKRFAEQKQPRPYKRPPACVERLQTLLNRRTQLLDFHTQDNNRLQQTSDIELKRLIKSHLLHLKNQIALLDAKLRELCQTEPELRARHDRLLPVAGFGPVTLQSLLGHLPELGQYSDKQLTSLAGLAPWAHDSGDSHSPREIRGGRSRVRKSLYMAALVASRHNPILSAFYQRLVGRGKPPKLALTAVMRKLLCLSNRLLSDPGFMLTLPEPKTKPLSRT

SEQ ID NO: 325319 - protein, 459 aa, unidentified
MERKMKLGMDVVNFNAAGIDVGSRSHFVAIGQELSDVKEFGVYAEDLTEICQWLMDSGVTTVAMESTGDYWQNLYVELISFGFEVVLANGKFTKNAKGKKTDVKDCRWIQKLHTLGLLSGSFLPDLTTEHLRTFCRQRGNWIDLAASTTHKMQKHLKLLNFRLDVVVKDVCGLTGMKIIEDICKGNLDPQSLAEHRHYNCRKPKEEIARALHGNNRSDYLFGLQQELEAYKFFQKKIADCDKEIEHFIKRELKEHPERKKMKTTEKSYKRINKNAPQIKDMNQLAFRYFDGVDLFAIEGLSHSTVLTIMSEIGPEGFYKFGSSKQFASWLRLAPNNKISGGKILSNRVPKGSNRLKIALRQAANAIGNLKDTHLSDFFRRVAYRKGRHSAVSATARKLAVIIWNMVTKKIEYQPPKQYLFLDQKRKLGLVNRIKKQIDKFELKPEDLGFQNNLDISNLI

SEQ ID NO: 325320 - protein, 320 aa, unidentified
MLFEREVPCEVSDIAECLVEFPHPIERVGFEAGAMSQHLFFGLTAEGFDVVCMEARQVNAALSAMRNKTDKTDARGIAQILRTGWFSPVHMKSREAHGLRALLSTRKALLKKTMDLANEVRGLLKIFGIRLPQTVKHGRFDGVVRPMIEIDDVLAHALVPLLDARVVLYQHYLELDRRVKRAASQDDVCMKLMTIPGVGPIAALSFKSAVDDPTRFKRSRTVGAHFGLTPLRYQSGEHDNPGRISKAGDRDVRAVLYAAANALLMRTMASSQIKSWGMRLMRTKGRRRAVVAVARKLAVLMHRMWIDGSEFRQDQVGGMA

SEQ ID NO: 325321 - protein, 356 aa, unidentified
MSHDVKYIGMDVHKEAIVIAVLNESGKLVMESVIETKASSILQFLHGLRGELHVTWEEGTWAAWLYDLLQPQVQHIVVCNPRRNALLKEGSKSDKVDAGKLANLLRTGMLRPVYHGENGLRTLRELARSYQTIGKDLTRVMNRLKALYRGWGIPCTGTQVYAPRYREEWLNRIPHAGVRRRAELLYQQLDGLQGLRRTLRPELLAESRKHKAAKLLRQIPCIGPIRAARLIALMQTPHRFRSKRQLWTYSGLGIETHDSAQYRYVGGQVQRSKKPQQLRGLNQNHNHEMKEIFKSTATRASCSTGPFHDFYEALLAKGMKPEMARLTLARKIAAITLTLWKKEERFDAEQLKTQAA

SEQ ID NO: 325322 - protein, 496 aa, unidentified
MVVRKALIAGAVALLLVLPGCAGSRVANQGGTDSPSAAGGMIPELFLPAVGRAGAEKQRAVHVRQVPGVGRFAGGARELPDQHRPGFRAVGLPQLVLVREGSGNRRNFKFANRKPDHDRLVAFLKSLPGGVIAGLEPTGDYHRPLAYRLLSEGIPVVSISSLALARVREARFGTWDKNDPKDAQVILSMLTQNMVQTYYDPLLAGTHDLQELSNTYFQITLARMRLQHSLMLHHLPLYFPEFARYWNSTRSQWFIRFLLRFPTAQSIRMLDFESFSREAWDLIDRKVEKRRWLAETYAMAAESIGLPVSLESMAIRMFRLQLARQLELNTQREELDRTAQELLAGDDDFQRLQTLPGIGAIMALTILAEAGDLRLFHHHRQFLSYCGLDLCKAQSGQSRGRETLSKRGNKRLRMVFWMAGLRALRMRENAFRDKYERYLAENPFDLDRRRKAVTAVAAKMARVAYAVIKTGTDYERFFEQRLPSGSIPLARAVEAT

SEQ ID NO: 325323 - protein, 322 aa, unidentified
MFVGIDVSKNTLDAAVLKAVGKPRHKVLANTAAGHAQLLSWLQENGVQAGHACLEATGTWADAIAMTLHEAGHQVSLVNPALIRAFGQSQLKRTKTDKADAQLIARFCQMHQPPAWTPPAPQLRELQALVRRLESLEEMHLMEDNRLASGVSCQEVRADLEEHLADLQARIEKTRQHIKDHIDQHPDLKEKANLLESIPGIGTTTAALLLAEVGDISHFDNARQVAAFAGLVPRIRESGSSVRSRARLSKVGSSRLRKSLYFPAITALRFNPLIKALGLRLSAQGKPKMLIIGAAMRKLLHLAYGVLKSKRPFDPTFCSSTP

SEQ ID NO: 325324 - protein, 342 aa, unidentified
MYYIGLDVHKKTISYRIKDASGHVHREGKIGATRYELDGWMKTLPRPRTIAMEATVFTGWIYDHLLPHAEQIKVAHPLMLRAIAAAKKKNDRMDASKIADCLRCDFLPECHMAPTEIRDRRRTLRYRHLLVRQMVQMKNPISGLLMETGVSHNKQRLHKVGYFRELLATSEEVNDSIRPLLRLSRETIVRLQKTEYALVSSLQRDPVLADRIERLRTVPGVGPITALTWALEMGDVSRFRSIRQAISYCGLCGDEKSSADKVMRTPLSQQRNKHIQRGLVEAAKLAPRQDHELARVYETEKQKGNPNRATLAVARKMVAYLLAVDREAREFVPAEEYRSAAA

SEQ ID NO: 325325 - protein, 358 aa, unidentified
MEIQVLRPIIRGSMVIWIPGLILKLNIMNRQNFCYFIGIDISKKVFDVAIIKDERTTSYVFENSKKGTNAFIRLLKNQKIPLENTLICMEHTGVYGKLIITKLVEKHANFCVEMPIQITKSIGLLRGKNDKVDAQRIAQYASKNFRKLELYKPIPEILEKVRILLKIRKQLVNARADFNKYPNELELFSPEMGKLAKKNLKKINKTLCDEIKRVEGEIKKLILSDDKLNKTIGLVTSVTGIGQITALHFTVFTSFFTRYDNPKQLACYCGVVPFEYTSGSSINRKSRIHPMANRTLKKHLHMSALAAINHDPDIREYYLRKVEEGKNKMLIVNNVRNKLVHRICAVIKRQQPYVKNVA

SEQ ID NO: 325326 - protein, 342 aa, unidentified
MTVIGIDAHKRSHTCVAVNDAGAKVAEKTVASTSAGHAQALRWALTRFGTDLSWGVEDLRSMTGLLERELLAAGQKVVRVPPHLMARNRGSARAWGKSDSLDALAVARAVLREPNLAAAFHDAISWELRLLVDRREDLVGQRVAVTNRLIGRLHQLSPDRPSPAHLERTKSQLALAEYLREQHGLLAELARQELADIGHFGRGISALTEDIVGRVRELDSTLLQLQGCAELTAAKLISETANMDRFRNEAAFARYVGVAPVPQSSGTAVGRVRASRSGNRQCNTAIHRIAIVQLRLKGPGREYYLRRRNEGDTAYTAIRCLKRRLCRIVYNRLRADYQHRNL

SEQ ID NO: 325327 - protein, 478 aa, unidentified
MEQEEAEQPPRRLVGIDLGIASRHSVRVLEADGQVVCRSSCVPAVESLAAVERAALAGAPEGTTLAVVFEPTGPAWLPIAVFFARRGHAVYRVSSAKAADLRRFLRRHAKSNGIDAETLARMPLADPDGLQQLELPGPGAAALDRRVRACGRLTEAASKHKVRIKDLVRQLMPMTPLTGDLGKADLAVLERYADPRSLLAAGDGKLTRLITTASGHQQGSPRAGQWRAAAAAAVELYGDHPAVPYDELAAEVVTEIRLLRAIQAELASHAAAREQHYRQVDPGQLARSLPGFAEISAPVLVAAMGRPGRFRDGTKFKSYVGLAPRASETGETDRKGQPMSKAGPSQLRSAFVRAADTARRQDPQLARIYYLQMTERGATHLKACCVVAGHLAERAWAVLSRGTPYVICDNNGNPVTPAEATKIIADKWTVPEDIRKRRRSRKIAGKAPQTASTRPDKRGDPPRPRSSRPSGKAVNPAT

SEQ ID NO: 325328 - protein, 348 aa, unidentified
MLVRKVRQRTATGKPAPLMAGKSAVEYDHYVAIDWSLKTMAVAHMSRRDQIPRIFERPSNLKELKTYLGSLKGRTMITFEESGTAHWLYLELVDQADRVLICDPFQNRLLFHGPKTDKIDAGKLCELLRTGLLKEVYHSDSALYELRLLVSAYEDVVRSGVRVLNQKEALQLGHRDKGNGAVFVGEILKENIDLYRRSKEQYEQRFHGFARRNKLVRFQREIDGIGTIGAVKIVACVVDARRFPCSAKYLSYCGLVKHEKLSGGRTYGWRKPRYSRVLKSVYKTAALAALKGNNPIREYYDHLLAQGVAEHNARHTVARYIARISYGMLKSGTRYEPYRWRDAERKSA

SEQ ID NO: 325329 - protein, 387 aa, unidentified
MDVLYQSCAGIDVHQANIVVCILHGPLTSTRPKREMATFDTTTKGLRACHDFLSQFHVEAVGMESTGVYWRPVWHALCDDFELILAQPAHMKAIPGQKTDKKDAHWIAKLTRIGLLPRSFVPDETIQELRELTRQRKHYVESRNRETNRIHKFLQSGGIKLTTYIEDIMGLSGRNLLQLLVDGTPITPRIVHQSVYTSLKKKVPQLLEALDGYFSDHHRFMLKQSLEIYDFYQKQIELLEERMNVYLSQYEKHVEILDSIPGIDVITASVIISEVGVDMSQFPTFGHLASWAGLCPGNNESAGKKRSTKIRHGNSYLKKCLCQAAFAVKRQKGSPLAERYYQIQSRRGSQKATIALAHQLLKIAYILLKEQMTYPEFLAQKRLLGTS

SEQ ID NO: 325330 - protein, 345 aa, unidentified
MKHYVGLDVSMKKTSVCIINEQGKIVHESEVKTDPHTLADAIEKTGLKVELVGFESGSLGHYLTQGFKERALPAVCMDARKMSAILSIRVNKTDKNDARGIADALRTGMFTRVHEKPQEAINRGAVLSMRRCLVKQRTDIKNHVRGILKTYGIRLGAVGPTKFSDAVKRRIEEQDPLVRQTMEGMLEVFDMLTRKITRFDQQLLKIAHQDKDVRLLMTAQGIGPITALTYKAEIFDPSRFPNSRTVGAYLGMTPTQYSSGEMQKQGRISKCGSMELRSLLTEAGVVVLTRSQKWSKLKAWGLKLMRKKGLKKASLAVGRKLAVIMHRMLLEQKEFAWGETPVKAA

SEQ ID NO: 325331 - protein, 338 aa, unidentified
MLHIGVDFHKRFSRVVTLDDAGLVVDRQTLRHRDREGMIEYFRSRAGDATVTVEATRGWYWLNELLANLGVDMKLAHPRKVRLIAESVIKTDTVDAGTLAQLERTGFLPEAYVPSREVRDSRELLRYRLTLVRIRTGLKNRVHTVVDKLGIDHPFSDLFGTAGRKFLQSLELRPVYQQQLTSYLELLDEVDRRLKAVTLQIKASVRPDPRAELLMTIPGVAHITAYLLLCEIGDIRRFPSAKKLCAYAGLVPVTRQSADHCWQGRITKEGNRYVRWAMVEAACMATRKDWGLSQYYRRVSGRRGSLKARVAVARKLLTAVWHILTDGQPYRLTKPDVT

SEQ ID NO: 325332 - protein, 451 aa, unidentified
MKCEIRTFTTMMEDLVRLRDWLKASDCQAVAMESTGVYWKPIWNVLEEEEMELLLVNAQHIKAVPGRKTDIKDAQWIAELLQHGLLRASFVPPRPQRELREVTRYRTKLVEERARLVNRIQKVLEDANVKLASVASDITGVSGRAILNALLSGQDDPKDLAELARGRMRNKREELARAVQGTLREHHRFLLGSHLRQLDFSDQQIAELDREIASRLRVQAEPENLDPKSEPTTDSTAPSVDLSLEKVEISMPLSSQSSADPSPEEVKVSTPLSSPPLAKPTRSQAEVIRILDEVTGINQRIAEIVVAELGIRLDQFPSEGHLVSWTGLCPAAKISAGKRLSTKTGKGNHWLRQALIEAAHGAARSKNTFLGAYYQRLKKRLGSKKAIMALAHRILIIIYHLLKEQQSYRELGPGHVQEQVLESSKRWAIRRLEQLGFAVTLAPKDHEEEVA

SEQ ID NO: 325333 - protein, 398 aa, unidentified
MTESSDYESVQVFIGVDVGKDTHHAVAVNRSGKRLFDKALPNDETKLRSLISDLKQHGQILLIVDQPATIGALPVAVARSEGVLVGYLPGLAMRRIADLHAGEAKTDARDAATIAEAARTLPHALRTLKLADEQIAKLSMLCGFDDDLAAQTTQASNCIRGLLTQIHPALERVLGPRLEHPAVLDLLQRYPSPDKLASLGEKKLATQFCKLAPRLGKRLAADITRTLTGQTAVVPGTNAAVVVLPRLALQLITLRKQRDEVALEVEQRVLAHPLYPVLTSIPGVRVRTAARLLTEVACRAFASAAHLAAYAGLAPVTRRSGSSIRGEHPSRRGNKTLKRALFLSAFAALRDPISRAYYTRKMSQGKRHNQALIALARRRCDVLFAMMRDGTFYTPAAS

SEQ ID NO: 325334 - protein, 417 aa, unidentified
MTDFAALVGIDWADKEHALCLRDAASDQRERAKLPQTPEAIAAWAAQLRARFGGLPVAICLEQSRGPLIYALLKYDFLTLFPVPPKTLAKYREAFAPSRAKDDPSDAALLLDLLLTHRDRLRPWRPDDERTRTLQLLVEHRRRLISDRTRVSNRLTALLKAYFPQALDWLPDLRTALACDFLLRWPSLGALKGVRRATLSQFFRAHHSARRGKLEERVGAIRASLPLVTDAAVINSSVLMVKALAAQMKTTLAAIKEFDAEIAQLCAAHEDFELFTSLPGAGEVYAARLLAALGTDRERWTSADEVARYTGIAPVIERSGQSCWVRWRYFCPKFLRQSFHEFAGESVRHSFWARAYYEQQRGRGKDHHAATRALAYKWVRIIFRCWQTSTPYDEVRYLESLRRKGSPLLSYAARKPA

SEQ ID NO: 325335 - protein, 387 aa, unidentified
MQSVTSATAVATTARANDITLFASLELSRSKWVVTINSPGNEKFSKHVVEGGDGAGLLDLLSRSRAKAEQRHGVRIMTVVIQEAGLDGFWIHRLLLANGIESHVVDAASIAVDRRHRRAKTDAIDGEMLLRALMAWARGERRVCSMVRAPSPEDEDRRRMTRERGTLLKERIQHTNRVKGLLMGQGVRDYNPLRRDRFERLEALRTGDGRELPPMLKEEIRRELDRIALVTTQLAAVEHARDALIRMDAEEHNNPAALLLKLKGLGPEFASLLWLESLFRSFGNRRQVAAFGGLAPSPWQSGGVERDQGISKSGNRRLRKTMIELAWFWLRHQPDSALSRWFQARVGAAKGRVRRIAIVALARKLLVALWRYVTQGVVPEGAVFKTA

SEQ ID NO: 325336 - protein, 319 aa, unidentified
MEKEKVYVGIDVAKANMDIAVHPSGKCWSFTNDDRGISEAVSRLRESSPTLIVMEATGGVEAPLVAALAVAGLPVVVVNPRQIRDFAKATGKLAKTDVLDAQVMAHFASTVQPKLRTLPDTQSKEFAAILARRRQVIEMLTAEKNRLSSAREVVRERIEAHIVWLEQELDSIDSDLRRSVRKSPVWQEKDNLLRSVPGVGPVLSATLLADLPELGTLNRRQIAALVGVAPLNRDSGTLRGKRTVWGGRAKVRPALYMSTLVAIRHNAVIRAFYQRLCAAGKEKKVALTACMRKLLTILNSMLKHGTPWNCSRLDHSIMP

SEQ ID NO: 325337 - protein, 416 aa, unidentified
MLKTLNVGVDISLREATISLLTWQGKYLGGSSKISNNLPGAKQLEESLLSILSLGNFEHIRFGMEATSNYGFHLAEYLASSEKLSAWKPLVYVIGAKHIKDFKKAFPERDKTDLVDSQFIAEYLRFGRLPHPFQAKCRYLPLQRLVRYRYHLVKNLERETKFFLANLFLKFPGWVQNRPIKTLGKTAMEVLTEFYSLDEIVHMPLEELALFVARAGKNRSPDPERIAAEIKRAARESYRLNPKLANSVQFILENIIINIRALKSSLKEVDRAIASQMEGFSNPLLSVKGIGPVYAAGIFACIGNIKRFSSDDKIAKLAGLVWKRKQSGKFEAQERHLIREADRYLRYYLIEAANSLRVHNEQYRAYYQKKYREVNKYQHKRALVLTARKLVRLVFSLLSKNQLYEPARAFQCAQPS

SEQ ID NO: 325338 - protein, 428 aa, unidentified
MNCTRNLKIEQVTEQTLVIGMDIAKHKHYAAMVDERGRELKKPFPVLQSRIGFEQFYASIEEAKKVFGKTEVIVGIEPTGHYWLNLAYFLEEKGIPLVMVNPMHVKRSKELDDNLPTKHDAKDARIIAKLVKDGRFSYPRILHEVEAELRAGSTFRESLITERNAVHNQMIRWTDRYFPEFSQVFPSFGKIALAVLEKTPFPNEIADQTVEELIEQYRQSEGLKCPQKPKIQKLLEVSRQSIGITQGQQMARIEIATLVRRYRQLEQEIAALTEQLIALAQTTVEYEWLQTIPGLGDATIVELLSEIGSVYQYQDPRQLMKLAGLTLKENSSGQHKGQKRISKRGRKRLRALLFRVMMPLIRHNEAFRALHEYYTTRPINPLRKKQSIVVLCGKLLKILYAVCVKQQAFDGERMIRDISHTHTQAHAA

SEQ ID NO: 325339 - protein, 319 aa, unidentified
MFNLGIDVAKAKLDCALRLPNGKHRNKVVENNHKGFIALSEWLLKQDAGSPRVCMEATGTYWEKVAEYLAGCGMLVSVINPAQIKAFGASRLVRTKTDKVDAQLIADFAHERQPEPWLAPSPAEQALRAMVLRLEALQTMRQQECNRLDVAREAVRQGIVDHITWLDGQIKELIQAIKRHINDDPDLRGKSELLDTIPGLGERSIPVLLSYYANPERFDSAKQAVAFAGLDPRQHESGSSVRGKPRMSKVGHSFLRKALYMPAMVTVYRTAWGKRFGQRLRAAGKAKKLIIGAMMRKLVHVAFGVLRSGKIFDPTLHAA

SEQ ID NO: 325340 - protein, 354 aa, unidentified
MPVYLGVDLHARTQTVSWCDTADGVIHQRTLDHQHDDVRAFYAQFAAPAIVGLESSGYAVWFHRLLAELRHRVLVGDAFAIRQFARRRQKNDRRDAELLLDLLLRGDFPAVHVPPPGSRQVLSLLRYRHRLVRMRTMLRNGLQAVALNHQLQLGPRLWTQRGQQQFAALPLAGADAVQRSHSLQLLAGLQEQIAAIEGELAQRADGDLRIHRLRTHPGVGLLTALAVVHTLEPVTRFDRARRVAAYCGLDPKEHSSGDTVRFGHISKQGNRLLRFLLVEAAHRAVQSGQDDDLRRFYFHLLVKKCVAVAIVAVARKLVLRLYRMLREQIDYDEFRRRGRDARRARETRRPAMPA

SEQ ID NO: 325341 - protein, 389 aa, unidentified
MKIFVGIDIAKLNHFAAAISSDGEILLEPFKFTNDADGFQLLISKLESFDKDSIIIGLESTAHYGDNLVRYLVAEFYQVCVLNPIKTCQMRKNNVRKTKTDKVDTFVIAKTLMMQDDLRFITFFDLDMMDLKALGRFRQKTIKQRTRLKIQLTTYVDQVFPEIQYFFKSGLHQHAVYALLKEAPSPNEIASMHMTHLANLLKVNSHGHFTKEQAKELRVLAQKSVGANDSAISIQITQTIQQIELLDSQLEKIEAEMTDIMRFNDSVIMTIPGIGYINGGMILGEIGDIHRFSNPNKLLAFAGLDPSVYQSGNFQAKTTRMSKRGSRVLRYALVNAAWNVVRNNATFKAYYDAKRVEGRSHYNALGHCAGKLVRVIWKMLTDELEFNLE

SEQ ID NO: 325342 - protein, 374 aa, unidentified
MADYSEAYVAFDTSKLRNAVAIAEGGRTGEVRFLGDIDNTAVAVRRLVKKLSGKYTRLVFCYEAGPTGYGVQRLIRDLGYECTVVAPSLVPKKPGDRVKTNRRDAVALAKLMRAGELTAVWVPDERHEAMRDLTRARGMAVVDQRAKCQQVTALLLRLGRHYAGKSKWGKAHWAWLNRQELGQPEQRIVFEEMLLALRQAQERIKRLEEAIRAAVPEWSLEPVVTALMALRGIDLVSATVFLAEIGDLSRFRTPRELMGYLGLVPSENSTGETIRRGAITKAGNRRARRVLVESAWSYRYPPRVGRAKQLRVEAAPSAVRAIAWKAQIRLYARYRALLRRGKLKTVAITALARELAGFIWAISREVTPPLTQTN

SEQ ID NO: 325343 - protein, 421 aa, unidentified
MEEISAEEAELVARVAALDIGKAELVACVRVPHDSKPGARRQEVRTYATTTRSLLELHDWLICQGVTLCVMEATSAYWKPPFYLLEDAIECWVVNARDVKNVPGRPKTDRLDAVWLCKLAERGMLRPSFVPPPWQRELRDLCRYRRTLIQERTREKQRAEKLLEDTQIKLSAVISDIFGASGRAMLDALIAGQRDPHVLAQMARGAMRKKISVLQEALTGHFRDHHGYLLRMMLDRVDALTTQVQALTGRIEEVIAPFAHQAAQLDEVPGIGIIGAQEMIAEIGVDMTRFATAGHLVSWAKYAPRARQSAGKNKPGTTGKGNPWIGATLGEAAMSAARTKTFLGTRYHRLARRRGKQRALVAVGNSILTIAYHLLSDPDAHFTDLGPDWHDRLTPLRRKRQLIAELERLSGKKVLLQEEVT

SEQ ID NO: 325344 - protein, 321 aa, unidentified
MQSFYLGIDVAKAKLDCALRLADNKYKHKVVENNQNGFTKLMEWLAKQGAVNVHVCMEATGVYWEAVAEFLAGNKMTVSVINPAQIKAFGASRLVRTKTDKVDAQLIAVFCSERRPEPWQAPLPSEQALRALVLRLDALQAMRTQESNRLAVAREVIRDDIIRHIKWLDDQIKGLTKKIRDHINGDSDMKRKQALLDSIPGIGERTIASLLAFCIHPGRFANARKAAAFAGLDPRQYESGSSVKGKPRMSKVGHAFLRKALYMPAMVTLYRTNWGRRFRERLAASGKPPKLIIGAMMRKLVHVAFGVLKSEKFFNPELQHA

SEQ ID NO: 325345 - protein, 312 aa, unidentified
MPAKLPPTYVGLDISSDQLDYSRSENDEGRCAYTAEGIAELIKKLQVLLHARVICEASGGYEKRIVAELLQAGIEVCVVQPGRVRAFAYAEGLMAKTDRLDARLLRRFGEKIEVRLAVPTDPALTTLRELLEHRRQLTRQLIEVIGRLSLAGATLRKLLEKQRLFLEKQIAAVEGMIKDHIDQNPDLKQKSARLQQINGVGPVLSATILAYVPELGKIESNQLSALIGVAPHPDDSGLRNGPRHVRGGRAQVRRVLYMAAVCAARTNPILRAFYERLRANGKPAKVCLVAVMRKLVHLMNKLILNPNFSLVR

SEQ ID NO: 325346 - protein, 467 aa, unidentified
MTPHKDYCLAPPPPVPTPMLPESSVLSDTLQVCHPHAAGIDIGEAEPWVAVPPGCDPQPVRRFGTFTVDLDAVADWLIDCGVTTVAMESTGVYWIPLFELLEARGVQGLLIDPRQAKRVPGRPKTDRLDCKWLQRLHTYGLLAGAFRPEAHVCVLRSYLRHRQMLLTYAAHHIQHRHKALEQMHRKLTQVVSAITGVTGMAILKAILAGERDPQHLAKLRNPHCHHDEDDIAKALQGTWRAEHLFALRQAIELYDFSHQQMTQCDQQIKAHLAPFDDKSAGRPLPPKARRHKKTNEPRFDARTPHYHLAGGDLTTIEGIAEGTALGILSAIGTDMHRWPSVKHFCSWLGLCPQHKISGGKVLSRRVRPGAHRVTVALRLAARTLHHSQSALGAFCRRMKARLGAPQAITATAHKLARLVYSLLQHGSAYVQQGLDAYEAQYRERKVTTMAKQAKALGDTLVPLAAQG

SEQ ID NO: 325347 - protein, 429 aa, unidentified
MEKMRMNAAGIDIGSEKVFVGLEGGKVRSYQTFTSDFKLLADFLDENGVRTVAMEATGVYWIVLHDILMERGIEVWLVDGRQTRQVPGRKTDVKDCSWIQQLHSYGLLNRCFVADGSLKELRSYQRLREDHLRSSTMHINHMQKALIEMNIRLPEVISQVHGKSGMAMIQAILSGERDKNALLALCHESIKKTKSEEVLKALEGYYTQAGLFSLRQAYNGYQFYQQQIAECDSQIQQVLDQINGGTPTAGGKRKAIRHNRPDIENLGSHLLAIFGGKDASAMSGVTDYTWLQIYSEVGSDLSRWQTEKHFTSWLGLSPGQNHSGKKRKNARKGRPKAGQIFRQIAQSLMNSKKIALGAFCRRLKARKGPAIAIKATARKIAAQYWRLMVKGASYTEQGVARYEEQILKQKHKYLHKLALELDMVMVPNT

SEQ ID NO: 325348 - protein, 367 aa, unidentified
MMGWMAPLRHRGAKLVFSNNHQEKEPSMSEITTIGLDLAKHVFQVHGVDAHGATVLRKRLRRGQVLAFFSRIPRCLVGLEACATAHYWARELGALGHEVRLMPAQYVKAYIKRNKHDAADAEAICEAVGRPTMRFVPVKTTEQQGSQLLHRGREQLVRQRTMLVNALRAHLAEFGMVAAQGLRNVGELIAIVRADGDTRLPAVARQVLQVLANQIEQTESAVRTLERQLLAWHKTNPVSQRLASIPGIGPIIATAIASTVADPNVFRSGREFAAWLGLVPRQNSTGGKIRLGGITKRGNRYLRRLLINGASANLLRSRATKADPWVIGLRRRRPPLVVAVALANKTARIAWAVMLRQNEYQPRAVAA

SEQ ID NO: 325349 - protein, 406 aa, unidentified
MKQIVSVGIDVSKGKSTVCAMIHPNTIIKESFEVLHTVEEMSMLADYIGSLDGEIRIVMESTGHYHLPVAQFLYQKGFFVCVENAYIIRQFSRIMLHGAKTDPLDAKKLAKYGLAYWSELKPYKFHPSCYTELSLLSKQYQTYIKLLIAAKQNVIHLMDEMLPGFKEALDTASSVQFSKVKYVDFAKEFYHVDMIKSMGKEIFRENYKQWCKEKGYRFQSEKADELFHLAEDGIPTLPTEFPSTRLCMEVATEQVSQLGYALEQILSQMQNLAKTLPEYQTIRQMGGMGEKLCVRFIADIGDVRRFHNGKALVAYAGIDAPPYQSGQYTGTKRRISKRGNSALRKTGYEVMKSLKSHPPKTDTRVYDFIIKKENEGKSRKQAKIAGLNKFLQIYYARVMEIYKNIV

SEQ ID NO: 325350 - protein, 337 aa, unidentified
MSTIHILGIDLGKHCFHAVGNNHTGKDVIRRKLSRSQLLRFLSVLEPTIIAFEACGGAHWLARKCEAYGHRVRLIPPQYVKPYVKGNKNDFIDAAAIAEAASRPSMRFVSAKSEEAQVIAAIHRIRDGYIKERTACMSRIGAILLEFGLSFPKGHAKMKALFQWLAEQDIKLPPSLVAELLSIHEHYKYLNEQVSTQDRKLKAITENNENAELLKSIPGIGDLTATLCVANISSPSNFGGGREMAAWLGLVPRQYSTGGKSKLLGMSKRGNKHLRALFIHGARSVLSRIETTGKVFGDWLVNLRATKPFNVVVVALANKLARIAWAVLYHRQAFKAV

SEQ ID NO: 325351 - protein, 405 aa, unidentified
MTSVMIGVDPHKGSHTAVAIGMAEEPLGTLRVRASAVQAEKLLAWAAEWPERTWAVEGAGGLGRLLAQQLLAHGEQVLNVQPKLASRVRLLQAGGTNKNDPNDARSVAVAALRSPVRRLVTADDHAAVLKVWSKRHRDLARSRNQVACRLHAVLCDLIPGGTGKEITAAQAEKILQSITISGAVAMARAELAAEFLQDLRRLDAQLRQTKKKLAAAVRASGTSLTEVFGVGPVIAGTIIGDITDVSRFPGRDNFAACNGTAPIEVSSGNRKTHRLSLRGNRRINHAIHMAAISQIRHRHSDGRAYYERKEAEGKTHKEALRALKRRISDAIYARLLADAQKASARPAEGPGGQPGNDSNSSAAGSHPARQLFGQATPGPCPRYDATPAGTRSLSNQTPRNTRTTP

SEQ ID NO: 325352 - protein, 344 aa, unidentified
MDHFAGLDVSVKETSICIVDDAGKIVREVKVASEPEALLAVLKNLAYHFKRIGLEAGPLSQWLFSALAEAGLPVICVETRHMQAVLKAQINKTDRNDARGIAQMMRAGLYRPVHVKTIRSQKLRMLLTHRKLLQSQAIAIENDLRGTLRNFGLKVGMVGKVKFEARIRELVDNLPDLAVLVEPMLIVRRTLREQIVILHRRLLAIVRDDEVCRRLMTTPGVGPVVALTYRATVDVPARFRKSKAVGAVFGLTCAKYQSGEVDRNGRISRCGDEMMRVMLYEAAQSMLRSKKWSWLKAWAMQIARRRGMKKAIVALARRLAVIMHRIWVDGTEFRWTREQATAAA

SEQ ID NO: 325353 - protein, 347 aa, unidentified
MNFYNNMHPYYCGIDLHARLLYVCIIDNTGLILVHKKIKDDPDALLKLLKPYIGDIVVGVECMHCWYWVADFCKEHTIDFILGHALYMKAIHGGKAKNDKIDSHKIAKLIRGGNFPLAYVYDKDMRATRDLLRRRTKIVRHGADLKAHVANTASQYNLPAHNVNLKNVCDREKMRYYFPDPVVQRSINLNMAILDCYHKELKPLEHYIEQMAKQHNPVHLNILQTINGIGRILALTIIYEIGDINRFSSVQKFASYSRLVKCKAESAGKTYGTQGNKIGNAHLKWAFSEAAVLLLRHNHNANKYLEKLQKRMSKAKALSALAHKLGRCVYYMLKKETVFDEEKFLKS

SEQ ID NO: 325354 - protein, 349 aa, unidentified
MSAKFNSEIAVIGIDIGKNSFHVVGLDQRGAIVLRQKWSRGQVEVRFSNLPPCLIGMEACVGAHHLSRKLTSLGHDARLMPAKYVRPYSRGQKNDFRDAEAIAEAVQRPTMKFVATKTAEQLDLQALHRVRERLVSQRTGIINQIRAFLLERGVAVRQGLRFLRAELPRILARPCDALSPRMLRVIEDLAGDWRRLDERIEGLSNEIEVLARQDAGCERLMSVPGIGPIISSAIVAAIGGGDVFSKGRDFAAWLGLVPKQISTGDRTILGKISKRGNRYLRVLFVQAAWAVLIKPKSWARHGLKPWLEAAKKRLHHNVLAVALANKLARIAWSVLAHGRVFEATKIQAA

SEQ ID NO: 325355 - protein, 367 aa, unidentified
MKKNSTVKQSPKRAKVLARGPITIGVDLGDKSSRYCVLDENGQVQAEGSVATTKKGMAGKFGCLKRCRMVMEVGTHSPWLSRLLSSLGHEVIVANARQVQLISASSRKDDRMDAQTLARLARVDPQLLRPIRHRGEKAQQDLLLIRVRAALVEARTSLVNTARGLAKAMGERLPSCDTDSLGVEQLEPLPERLRAQLQPLLRQVESLTEEIQEADRKVEQIARTEYPETQLLRQVSGVGPLIALTFLLTLEDGDRFEKSRDVGCYVGLRPKRSESGESQPQLRITKEGDIYLRKLLVQGAHCILSRRGPDTDLKRWGLRLAERGGKNTKKRAVVAVARKLAVLLHRLWVTGEVYESLRNSTAKQAAA

SEQ ID NO: 325356 - protein, 320 aa, unidentified
MSTKKAKSFIGIDVSKQLLEVAVHESDYQFRCANKTSGFAELIGELISLRPALIVLEATGGLEIPVTAALQAAGLPVVVINPRQVRDFAKATGQLAKTDRLDARVLAHFAAAIKPPLRPIKSADELELDALVGRRGQLVEILIAEKNRRGSAATETVRQEIDEHIDWLDQRIAALDEQLKGLLKTSALWQSNDAILQSVPGIGPVVSVSMLAELPELGTLNRQRISKLVGVAPLNRDSGPQRGSRHIYGGRKRVRSMLYMATLSATRFNPVIKAFYQRLLAMHKPFKVAITACMRKLLAIINVMIRDRTHWKTEVEPLSA

SEQ ID NO: 325357 - protein, 337 aa, unidentified
MKRYLGVDLHRTQFTVCTRLENGRTYLRQWPMRELKLFAAQLRKEDEVAVESTGNTRLFHDAVVEHAARVAVVNPSQFKVISQSVKKTDKNDAELLALYLAKGLLPEVRMKERRQREMSHLAQTRDLLVKQRSALKTKINNMLSAEGINLKRESLSSKKALERVLALPLSPLMLSEARVLVGQIRSLTQSIEELEEMIEEEGSKLAGHKNLMSIKGIGPVSAAVLLSVIGDIRDFADPGKLAAYVGLVPRVQNSNETEHSGRITKQGNKLARTCLVQCALVAKRYSSFLQNFYQRIQRRRGGGKANIALARKFLGVVYHTLKNDWVFEDFPNFVLAS

SEQ ID NO: 325358 - protein, 340 aa, unidentified
MNINTIGLDIAKTTFHYVGLDKHGKQIHRKKLRRGQLLSYFANFPACTIVMEACSGAYYWQREFIKLGHKVKLLPAQHVKAHLRGNKNDYNDALAIAEASRVPEMREVAPKTIEQQSMQALHRLREAAVDDRTTLVNQVRGLLSEFGIVFHQGIKNLREGLPTVLEDATNELTYTFREALALKYTQLLQLDESVKRLTQLIEQASEEHNEIALLQSIPGFGSIVSSSYYSVIGDGRAFAKSRDVAASLGVVPRQHSTGGKTVLHGISKRGDKYLRKMLINGARSVVNHAHKKEDALNVWVTRLVETRGRNKATVALANKLARIAWAVTVSGKPYQENHAV

SEQ ID NO: 325359 - protein, 353 aa, unidentified
MNSLTDLRDLVDVVIGVDTHVHTHCAAVVDAATGGVLDEITVEATAQGYAELVEFANNHPMSRAWAIEGTGGHGAGLSRHLLESSELVIELDRPKRAARRNGAKTDPLDGIRAAREAMARPRLGTPRAGGERQALSVLVAARRSAINASTEAQQQVFGLVIAAPEPIRVRFRAQKLAAMLNTAANLRVHASWDTETTSTVVPLRTLARRAHAMLKEARELQKSIVAIIRSWRPDLLEEFGVGPIVAATVLCAWSHPGRVHSEAAFAMLAGVAPIPANSGQITTRYRLNRYGDRQLNTALHTVVQSRIQYQPATRDYVARRTAEGKTSREIKRCLARYVARDLYRLLESGGAAA

SEQ ID NO: 325360 - protein, 343 aa, unidentified
MEHFAGLDVSVKETSVCIVDDTGKIVREVKLASEPDALLAELRNPAYRFKRIGLEAGPLSQWLLSALAEAELPVICVETRHMRAVLKAQINKTDRNDARGIAQMMRVGLYRPVHVKTLRSQKLRMLLTHRKLLQSKAIAIENDLRATLRNFGLKVGIAGKVKFEARIKELVENQPDLAVLVEPLLIVRRVLREQIGILHRRLLAVVRDDEVCRRLMTVPGVGPVVALTYRATVDVPARFRKSKAVGAVFGLTCSKYQSGEIDRSGRISRCGDEMMRVMLYEAAPSMLFHSTKWSWLKAWAMKIARHRGMKKAIVALARRLAVIMHRIWVDGTEFRWTKEVVTA

SEQ ID NO: 325361 - protein, 408 aa, unidentified
MRFTRMDVHRDACQICVLDADGNDHQQRVPSRPDELAQFAASLGACDVVAIEATGPAAAIARILEPHAGQVVVVNPRRLGQIAARAKTDRIDAHTLSRLLAAGVLTGVWTPDEPARALRRLVSRRAAVVRARTRAKNEVHAVLARNLCPGVPVTDAFGKAGRRWLAGLALPEEELITLTGCLRQIDTFEAEITELEDVLVGRVARSSEVRRLLSVPGVNVIVATTFLAYVGDIGRFAGPRQLVGYLGLDPRVRQSGEAAARGGHISKQGAACVRHVLGQAAWRPARVAGPLRAFYERICARRGPQVAITALARKLATLFWHLLTRDEDYAFAEPSVVRAKRRALELKAGAPPHKGRSGPEGPVSPAPAQRVAERELVLASETAYRRMMADWRRTREVGAGAANGARLT

SEQ ID NO: 325362 - protein, 439 aa, unidentified
MNTSNMPSTPLVAAPTPLVFAAYVGLDWGDEKHAVSLAAAGSEKIERSTLEQTPEALVAWASELRQRFLDGKIAVCLEQARGPLIYGLQCYEHLVLYPINPKSLARLREALHPSHAKDDPLDADLALELVRKHREHFRPWQPDTVPTRQLALLTEGRRSFVDQHTAGTNALQTHLKSIFPQALELIGQDLGSPLATDFLKKWPTLQHVQKVKAAVLRRFYYGHNSRSEELIQQRLELVQKAQPLTSDEALLAAHGLAIQSLAAQLAVLHQTITQYDRQIAAVFTSHPDAPIFQSLPGAGAALAPRLLAALGTDRSRYPTALAVNCASGIAPVTEKSGKTQYWVHLRWSCPKFQRQSWHEFAGCSIKLCAWARCCYDQLRKRMGHHEALRKLAYKWQRIVWRMWQERQSYDESRYVKSLQRYDLKTYAELVPQGPATNCE

SEQ ID NO: 325363 - protein, 403 aa, unidentified
MNTFFAGLDWASQTHAVCVIDAHGAIHEHFDIAHDAAGLAELRHRLTAAGSPPVAIERPSGLIVDTLVEAGFTVVPIHPNVVKATRPRYRSHGAKSDASDAYLLADLLRTDGHRFRPLAPQSEDIRALRALVRGRDDLVATRVQLANQLRSLLESFWPGAAVIFAEVDSPIALAFVDRYPTPESAARLGPKRMASFCAQHAYSGRRSAEELLARLHQAANTACGELEMDAKGELAKSLARILAGLVDQIRLLSSRIEHHVASLDDGQLVMSFPRAGRICAAQILAELGSVRERFDSDARLAAEAGVAPVTYQSGKSKAVTFRWACNHRLRAALTCLADNSRHASAWAAKVYAQARARGCDHPHAIRILARAWVRVLWRAWIDRKPYDPAQHHGAQLALQATEG

SEQ ID NO: 325364 - protein, 332 aa, unidentified
MSVYVGIDVHRKRSQVAVIDQDGKVLANRNVNNGVTPILSVIGGLPPGTPAAFEAAYGWGWLVELLEDYGFEPHLVHPLQCKAIASARLKNDKVDAAILAQLLRADLLPEAWIAPPEVRQLRALLRHRVQLVRLRTLLRNRIHAVLADHGHGRPEGCWSGPGRAWIARLDLPAISAEVIQDALALIDAVESVIVRLDAEIRGHARSDPRVDVLTQLPGVGPFTALVLLAEIGDITRFASARKLAAWAGLTPTVRGSDRTVRHGHISKQGSAWVRWILCEAAQKAKRHPDFAASYQGIAGRRGTKIATTAIARKLLTRAYHLLTDAASAGASS

SEQ ID NO: 325365 - protein, 400 aa, unidentified
MLSIGIDVSKGKSTVCGMKPGGEIVYAPFEVQHTREGMSELVSLLRSSGEEVRAVLESTGSYHCPVVAALLENGIFVSVVNSLRMKRFCSQSIRKVKTDRIDAMQIALYGLAYWQELQPTKLPEDTYRELQLLARQYYQMTSILIKAKVDFNAICDQVLPGMQELMSDHAGRHKLSDFVLRYHHTTHILEMGETRFRKDYCKWAEKKGYRNCERMAVLIFATAQNGIPVLPNAPSTQIVITEAIRVLHTVEASRDAILTQMQALAKTLPEYSLVREMPCIGDTLAPRLIAEIGDVRRFHSKRALIAYAGIDAPPYQSGKFCANNRHISKRGNRYLRKTGYEVMQGYVMHKPANDPIFTFIEKKRGEGKSGKLAMVAGLNKFLRIYYGKVTELYRSLPAIE

SEQ ID NO: 325366 - protein, 411 aa, unidentified
MIFVGDDWAEDHHDVYVCDVDGRRLVKRRFPEGVAGVAGLHELLAGLVEDPAEVVVGIETDRGLWVQALVEAGYQVYAVNPLAASRYRERHVVSGAKSDEADAKMLAGLVRTDRHNHRQIAGDSGEVQAVKVLARSHQSLIWDRNRMVARLRGTLLDYFSAALSTFDELWDRDAPAVLAKASTPLAARSLTLAQIRSALRAGGRRRNIDTRARQIADGLRVVGLEAPPAVVDAFGSITRSIVAVIVEINAQVAALEAQLTAHFDAHPDAGIYRSMPGFGAVLGARMLGEFGDDADRYTNAKARRNYAATSPLTRASGRSRVVSARFVKNKRLADAAHRWAFCALSNSPGARAYYDHRVALGDSHNKALRALSNRLVGILHGCLRHRSSYDEHTAWAHRPENDLDVESRPAA

SEQ ID NO: 325367 - protein, 340 aa, unidentified
MNATTYGLDVAKRVFQMYWVDAQTGEIVNRRFGREELIGFLAQRPGGRVALEASGSGHWWARKIKALGHEAVLLHAKFIRPFVQTNKTDAADARAIWTAVQQPEMRSVAAKTEDQQAMLSVHRIRALLVKFRTMQVNQLRGLLYEFGVMFRAGRAAGLAEMRARMAELEDALPGVMMCSLQEQLKRIDGLEQEIDRLEKRVSTWQKQEAACRAIAEVPGIGKLTATALVATIGDAKAFKSGRELASFLGLVPRQSSTGGKIRLGSISKRGDPYLRTLLIHGARSVMYHAKEPATWQREIQARRPANVAAVALANKMVRTAWAILAHGRAYRKDYVSVKPA

SEQ ID NO: 325368 - protein, 316 aa, unidentified
MTGTPTYAGIDVAKDRLDVVLRPSGEYVEATNDERGIRSVVRRLRKDDVALAVLEATGGLEQPAAAALALAGVPVAVVNPRQVRDFAKATGKLGKTDRLDAAVLAHFAEAVRPEPRPLADEHARDLSAVVLRRRQLLAMTTAEANRARTAPKAVKKRIEAHLRWLRKELARVDGELKRVVEESLVWKERAALLMSVPGVGPTLSATLLAELPELEHLDRRRLAALVGVAPLNRDSGTLRGIRTVWGGRSGVRTTLYMATLCATRHNPAIREFYGCLVASGKPKKVALTACMRKLLTILAAILRNRTPWQPRLLPDS

SEQ ID NO: 325369 - protein, 422 aa, unidentified
MSGNQPAVQYAAFLAIDWADQKHVWSLQEANSSARERGEVDHMPEAVETWVAQLSQRFAGRPIAVAVEQSRGALVFLLSKYAQLHIFPVPPAMTANLRKAFYSSGAKNDPTDADLLLDLVQQHREKLRRLSPDTEATRRIQNLVEERRKLVDEKTAQSNRLEAHLKIYFPQIPHWFGDVGSPMVCALLERWPTLEALQKARPDTLRSFFRKHHCRKEELIESRIKAIGEAMPALKDRAVVQTKVAVVKVSVQLIQVLHEGIEGLNRQIQEAAEAHPDFFIFDSLPGAGAVMAPRLLAAFGSQRERYQNAVEMQTFSGIAPVTESSGKSSWVHFRFACSKFLRQSFHEWAALSITQSQWARAYYELQVRRGKKHHAAVRALAFKWIRIIYRCWKERVAYDENVYLAALAKHNSPLVAATKAAL

SEQ ID NO: 325370 - protein, 408 aa, unidentified
MEVICPRCAGLDVHKQTVVACARIAATGPALQEVRTFATTTSGLLALADWLESFGVQHAAMEATGVYWKPVWHVLEGHFELVLANAAHVKNVPGRKTDVNDAMWLADLLAHGLIRASFVPPVAVQELRTLTRTRKQFVREKSAHAQRIEKLLEDANLKLGVVLSDILGKSGRAVLQAIIDGQDDPERLASCITTRVKASRAELLEALRGRISDHHRFMLKLHLGHIDALDQAIAAIEKEVGLGLEPFRQAARLLSTMPGLSDVSAHVIVAEIGIDMSRFATPAHLLSWACLCPRNDESAGKRRSTRLRRGGKWLKTTLVQAAWAAVKVKGGYLQAQFHRLRARRGAKKAIIGVAASMLTAAWHMLRNGTEWHDLGAAHFDRADAHKTANRLIRRLQQIGYAVQVMPAC

SEQ ID NO: 325371 - protein, 467 aa, unidentified
MPSSSRPRLGQASHPHQTASEDIVPAAITFAALGLDISQAEVTVCFLLPDGSEVVPRWTIPNSQPGAQALAERVQALAKAQGIKELRIGLEATGLYWWHLACFLKETHLLTEGDQGIYVFNPSLVQGLKRVYADAGKTDRLDAFFIAERLRVGRLPIPFQPDLVYAPLQRLTRFRMHLAQTLAREKNYCLALLFLPFSAFSQEAPFDDLFSPTSLGVLETFTTEDLAQTSLEDLAAFVQQHGRGRFADPRQVATALQQAARHSYRLAPGLDEPLKLILTTTLATIRTLQSQLRAVDRTIAQDIAALPAARRTLDSVPGLGPVWTAGLLAEVGDIFRFANEAAVAKFAGLVWKPRESGDFQGEDTVLAKTGNPFLRYYLIEAANSVRQHCPEYRDYYNAKLAQSPKHAHKRALVLTARKLVRLVDALLRAGTVYQPPETRQDREEAQTRPHGARPQRHRRTPLAPSAC

SEQ ID NO: 325372 - protein, 374 aa, unidentified
MINVAMDVHVRNSVVHATVSGGRVLQRGRVQNRLADLAAFLAPVEQEAAESGQEVVVTIENTTNARGMLRMLESYGQQAGLNLTARAVDPRKMRVIAESVCKCDRLDAATLNELAGADLRLPVCYFPDDETFALREHLRARADLVRLRTMSKNRVHSIFHRRCILTPATGDVFAARGRVFLQQARGQLDQAGAVLLDRWLGVVDQIDEHLDASDQELTELAGAERWKSSVELLRTMPGVGRLTALTILAELGDIHRFRSRAAVANYAGLTPVVRSSNQKTWHGHITRRGPALLRAMLTQAAWNAIRYAPVYDAIFQRVSERRGSQVAIVAVARRMLEDAWTMLIRGEPFRHSVRAVLRTQQASDAEIIAPGAAG

SEQ ID NO: 325373 - protein, 359 aa, unidentified
MRKSISKFETVTTVGLDLAKNVMQVHAVDAAGNVVVNKPIRRGKLIAFFAALPKCVVGMEACSSAHHWGRQIAELGHDARLMPPAYVKAYVRRGKNDKVDAAACCEAVGRPSMRFVPLRSVENQAELMRHRAREMLSSQRVALLNALRGHLAEIGVIAPQGAQNAYYLKKLAETGHDENGEVLVPDGVRQSLAPLARQIDAIDAEIAAIDKILVKQAKSDPTARRLATIPGIGPVGATAFTATVLNVKAFANGREFSASLGLPPRQHSSGGKPRLGGISKMGDRYLRKLLVVGATAVLRHADGHNDALRGWAKELLARKNGPYKKKIAAVALANKLARIVYAILSSGGTYDDRPVRARA

SEQ ID NO: 325374 - protein, 409 aa, unidentified
MDLMIARCAGLDVHQATVVATVRIPDDHGGRRSVTETFGTMTPDLLVLREWLQAYGVAHVALESTGVYWKPIYYVLEDAFTLLLINMQELKRVPGRKTDVRDSEWLAQLLECGLLKASFVPPPPIRELRDLTRYRVQQVRDRSQEVNRLCKVLEDAGLKLTSVVTDVMGVSGRAMLRALVEGTTDPTVLADLARGALRKKLPALRRALQGCFRPHHAFLIEQIFAKIDFLDETLDRLTTEIDRRLGPFEPILTALDTIPGVDRIGAISMVAETGGDMSRFPSAGHLCSWGAMCPGQNESAGKRHSGKTRKGNRYLRRTLIQAGLGAMRSNGTALQARYHRVKRHRGHKKAVVAVGHQILEIAYFIMRDGVTYDELGADYFVRRHAERAMRRHVRQLEALGFHVTIEKAA

SEQ ID NO: 325375 - protein, 346 aa, unidentified
MSEKNAKILKKTVIGIDISKKSLDWCVIDGKEVVDYHKTTNEMDAIVKKMAEILSNGDRDIMDVLVCAEYTGRYIYPLVLACYKCGVDLWLESGYNIKCEARKERGKDDRTDARRIAEYGRKNQDDARIYHLPAKSIATLRDLISERALYCSQRAAHKGQLRDERQYMDPKAYTARAVRQLSLVKELDRLVEEVDKNMAEIIASDPELQRQKELLLTIPGVGIICATALIAVTAGFSLFDNGRELCCFAGLAPFAYTSGTSIRSAKRVSGRADHELKALLHMCALVAATRRKTGHFAEYYKRKIAEGKNKMSVLNAVRAKLMLTAFAVVRNNRPYEENFKNNFVKS

SEQ ID NO: 325376 - protein, 360 aa, unidentified
MTGTMTWAAMDVHARSTYAASMDVITGELTRQRFDTGAVEPVVGWLASLPGPVRCCYEAGPTGFGLYRAAVAAGIDCQVIAPSKTPRPPGDRHKSDRRDTDLLLRQLMAGALTPIVVPSPTFEAARDLARAREQVRVDLMRCRHRLSKLLLRHGRVWDRSTWTNVHREWLGSQTFAHQNTELAFIDNLAACDGLTARKQTLDERLSWVATDPEFWPLVRRLRAFRGIDTLSALILVLEVADFTRFPRAVQLGSWLGLVPSREQSGESDRNGSITKTGSKYARRILVEAAWHYARPPRIGKTLYERQEGLPDHVLQIARRAQTRLYRVHRRMQERKKPGNVITVACARELACFLSAAATAP

SEQ ID NO: 325377 - protein, 286 aa, unidentified
MKANTKFSYTETCESIKLGIDAHAKWYYVGRQVDGATPQPVQKMSFEGLLHFVAKQQRLAREVFTCYEAGPFGYHLHRQLTEMGVTNYVVQPQIWDERSKGVKTDKLDALALCQRLDRFVRGNRKAFSIVRVPTEAEERERAFSRQRQQLVRERQRLQAMGRSLLSSHGIYVTGRWWMGATWKQICEEAPDWVIERLEVFIRLINPVETEEKALTEAIEEAGRQTKIPKGVGPLSFEVLRREVGDWSRFNNRREVSSYTGLCPREHSSGGCTPSYPGRCAVTEQQS

SEQ ID NO: 325378 - protein, 323 aa, unidentified
MMAEPAEIQSVLGLDVSRNTVTLCDGRTRHTVTIANDADSLRAALLPYQGTATLAVCEATGGHEDTLLGVLLELAIPAHRADPAKVKAYIKSFGKRAKNDPIDARWLSRYGRDRAATLPRWQPVDLTQQKLELLVARRLDLVAMRVQEQNRLKARRSRLIADNICDHLAELERHIEALNAEIDTLVGESRDLALRAEQLRSVPGIGPVLVPLLLAVMPELGTLNRRQVASLAGVAPHPKDSGKASSHRSTTGGRRQIRPALFIAALAACRGDNPLATAYKALLKAAKPKRVALTAIMRKIITIANARVRDALPHQNEIMPINA

SEQ ID NO: 325379 - protein, 354 aa, unidentified
MIIIGADYHPGFQQIAFVDTDTGELQERRLEHREDAEKFYRDLAAQELKVRVGMEASGHARWFERLLGELQFELWIGDAAEIRAKRVRKQKTDRQDAQLILRLLLEDRFPPVWVPSWENRDLRQLLWHRHRMVQARTRIMNQLQAVALNEGLRCKKKLWRDAGREQLESFRLAPWASRRRHDLLELLDRLTPTIAELTQAIEQEAEKCPAARRLQTHPGVGALTALAFVLILGRADRFECGKQIASYLGLVPSEESSGQRRRLGHITKQGNSLLRFLLVEAAQVTVRSDPEWRNRYFHLVLRRGRKIAKVAMARRLAVRLYWMWRKGWDYQQLKKVGSHAGEPGHPDAVQSNTE

SEQ ID NO: 325380 - protein, 325 aa, unidentified
MAILFADGLVETAARVFNEFKTTVSGYRQLVKWVEQNSCGIDSSLWLFCGENTGDYSKGLCNFLYGKGYDMWLENAKSIKDASGLRRLKSDRADASMIAEYAMRNYDKAVMYEPLSESLTQLRELFLYRQMIVRHRCSFQVRRGEKRLTMEKSPVKTMISQSGRHIVSELNKEIEKIDKRIADLIKSDEELTEVFTIVTSVPGIGTQNAVCLMVYTDNFRRFNYDSRKIACYYGLAPFGKDSGTSVHSDPHVHYMANRQIKAMLTQAALAAVNFNPIMARYYMRLVERGKKKQVALNNVKNKLVHLVTAMVRNRQTFTPEYKISA

SEQ ID NO: 325381 - protein, 344 aa, unidentified
MSKASIAILGIDLGKNSCSVAALDAGGAVVLRRRMSREGVLAFTARLAGCVVAMEACCGAHFLGRVLQQQGHTVRLMAPEYVQPYVKAQKTDDRDAEAIAEAATRPTMRFVSLKSETQLDMQVLHRARQRLVAARTRLTNQLRAVLLERGIIMPKRRAVLRRRLVDFLTDAPALSPRALKLLEDMQDEWADLDQRIGAYDDELTALTRANEQARRLATIPGVGVINATALLAAVGDASAFARGRDLAAWLGLTPRQHSSGGKTKLLGISKRGNAYLRVQLIHGARAAMAHFVKQPTPTGEWVRQLLARAHPNVVVVALAAKLARIAWAVLRQGRSFVAQSARAA

SEQ ID NO: 325382 - protein, 409 aa, unidentified
MPGPPREAINFPISALDKVQKERPDMKKDSIARLQVRKNQIRGMATKQRLTVGLDLGDRTSRYCILDEAGEKVNEDKLPTTKAGLMAMFGKMPACRIALEVGTHSPWVSHELAELGHEVVVANAHRVKLITQSVKKNDRIDAERLARLARVDPKLLSPIQHRGREAQADLAVIRARATLVEARTELVNSARGLAKPMGERLKKCDADYVKESLAEGMGKAVQAAIRPLLKSVEEISKQISEYDQKIEGISKRYPEMKVLTQVYGVGTLIALTYILTIEDPNRFEHSRDVGPYLGLTRKQRDSGDSEPELRISKAGDQLLRRLLVQGAHCIMRQGAPDSDLRAWGMGRLQSNGEDNQGGKKGKNKPKISKTRKKKTIVAIARKLAVLLHRLWVTGEVYDPQYNRKLAQAA

SEQ ID NO: 325383 - protein, 416 aa, unidentified
MSEYAALVAIDWADQQHAVCLLDPSSGKREHSIVKHTPQALQEWALSLRQRFAGPIAVGLEQSRGPLIYALLQYDFFVLYPINPATLAKYRQAFSTAHGKDDPSDADYLLDLLEHHRNRLRPWRPDDEKTRTLRLLVEQRRRLVSDRTRFSNRLTALLKGYFPQVLGWFEDIRTVLVCDFLERWPELAALQRARPDTLNKFFRSHHSTSNSTNQRRLAEIKSALPLTNDAAVMTSSVINVKALVAQMKTVIAAISEYDRHIEALCQTHDDYHLFAALPAAGAVHAARLTAALGSDRSRWPSADELVTFAGIAPLIERSGKQFRIRWRYFCPKFFRQTFHEYAAQSIQDSFWARAYYSSQRAKGKDHHAAVRALAFKWMRVIWKCWQTRTPYNEVIYLESLRKKGSSLLKFAADHQK

SEQ ID NO: 325384 - protein, 342 aa, unidentified
MKKYAGLDVSMEETAVCVIDGEGSIVAEAKVRSDPAAIASFLKRWSGDLVRVGLEAGGLTPWLYHGLSALKVAAICIETRRMKAYAKASTVKTDRRDAQMIALAMRAGLYRAVHVKGEAAQKLRLALSARQVVLRQARQLQGKVRGDLKPFGIRIGKVGSGGFAGRVKERLADRADLWTLVEPLLNLRAALLAQVRAYERMLRRFAKGDAACRLFMTAGGVGVLTAVAYRATIETPARFRRSADVPAALGLTPRIDQSGEIERCGAITKAGDTLLRGLLFEAANALLTRSRRPCALKRWGLAVAKRRGMNRARVAVARKLAIILHRMWCDGSEFRFAAPKAA

SEQ ID NO: 325385 - protein, 351 aa, unidentified
MPRETTSLEAVATIGIDIGKNTFHLIGLNKKGAIVLRQKLSRGQVNTRLANTPPCLIGMEACVGAHHLARQLKMLGYDARLMPARYVRPYSKGQKNDFRDAEAIAEAVLRPTMKFVAIKTVEQLDLQGLHRIRERLVCQRTSVINQIRAFLLERGIAVRQGLRALRTEIPIVLAMTDKLSPRMIHMIEDLCTDWRHLDGRIETVSDEIETLSEQDDGAKRLMTVPGIGPIISTATVAAIGRGDVFSKGRDFGAWLGLVPRQMSTGGRTVLGPISKRGNRYLRMLFVQAARSVLLRPQSWEKHGLKSWIEAAARRLNRFKLAIALANKIARIAWGVLHGDRNFELRPATQAV

SEQ ID NO: 325386 - protein, 342 aa, unidentified
MLGVSTPATTMGGPSVEAYDGPQIVGMDLHRRRSVLVRMTGDGRRLGTAKITNSPAELRREIARAGSCPKVLEATSGWYWAADVLQAAGAEVHLAHPLGVKAFSYRRVKNDEKDAADLADLLRMGWLAEAWIAPAEIRELRELTRYRIKVVRLRASCKDQVHAVLAKLGIQVTCSDVFGTWGNLWLDGLALPQPYAGKVASLRSLVAQLTGEIGLLDTVIASLLEHHDGYHALQSLPGIGPVLAAVITAEIGDIARFRHPARLCCWAGLTPRHRQSDVKVTRGHITKQGSPILRWALIEAIQRLPAGTPVRQARDRIIARRGSQARNIAKVAAARYLLTCVY

SEQ ID NO: 325387 - protein, 403 aa, unidentified
MKSVLSIDVANGKSEVLLITEYGEVLIEPYEVKHCLSEFNLLKEKIDNFNLNDLTIFMESTSTYHLPIQRFFTKNNYNVQVINPILGKNNTRNLRKTKTDIEDCYNLADLFFKNTVKIHTKNMNDIYSSMIELSRQEKHLTESLVRSKNRFKQIIANAFPEYIKCFTANDIFGKTSLNFIKEFPHADIIKEKRIDALANNLYKSSKNGCSYNKCLSKAKKIKELANNSYPGIDVDSYEVNNLINIVDVISYNGSKLNDVKQDIVKLARQTPYFNIINSIYGIGETSTAQIIAELGDINRFENIKQLNAFCGLDPTIIQSGKSINYHGPISKRGNRNARKILFITCCSIIRASVLHNMDNEILLYYRKKQAENKHFKECIIACSAKLLRTIFAMCKNNSLYVQK

SEQ ID NO: 325388 - protein, 448 aa, unidentified
MGKHAGKGRSLSLECIEANAAGIDVGATEIYVAVPPDRDAEPVRHFKTFTGDLREMAAWLLRCGITTVAMESTGVYWIPPYEVLEEAGMRVCLVNSQHVRHVPGRKSDVSDCQWLQYLHSVGLLKPSFRPDAAICALRSLSRHRASLVESAAVHIQHMQKALTQMNLQIHHVLSDIIGISGMAIIEAIVAGQRDPSLLAALCHAKVHSDRQTVIKSLTGNYRAEHLFTLKQSLAAYKNYQHLLAECDQEIQRLTGTMAGKMDTGGPAPQNNRQKRRKNQFHFDMGSELHRLFGVDLTAVPGINALTAHALLSEVGPDLSRFPSAAAFANWLTLCPGTKKSGGRVLSSKTRPTNSRLSHALRLAAQTLARSHSHLGNFYRSMRARLGAPKAITATAHKLARILYHLLTTGSAYDETVFAREQQKQNLRFHKRLCKQAKLLGLQLVPITT

SEQ ID NO: 325389 - protein, 336 aa, unidentified
MIMPFRCNFGGKKRTMTATQDKIEFDQVIERGCGIDIHKSVLVSTVQGKGIKTETRSCGAFTESIEQLRDWLKSLGITHIAMESTGVYWKPVYNILENDFVIVLVNARHLKNIPGNKTDKKDSRRIAKLLLAGLLKGSFIPPKPVREMRDLARYKRRIIEQIASEKNRIHKFLEDANIKLSTVVSSLSGATATKIIDAMIEGEGKAEELAKLRHGKMKASEEELIVALTGNLTEHHKFMLKMIKKSIKEKELLINELDKQIDSKLKENEMVLDAGLLSTIPGVDKEAAAYILSEIGNDMERFPDEQHLASWAGLSPGNNESAGKKKVQEPHMETNG

SEQ ID NO: 325390 - protein, 320 aa, unidentified
MRNAVGLDISKLTFDATVIVGNAEYSAKFGNNSKGLDQFSDWLKSLGCEDLHICMEATGNYYEEVADYFAEYYSVYVVNPLKISKYAESRFKRTKTDKQDSKLIAEYCQSVKESELVKRQKPTDEQYRLSRMTAAYTQIKSECAAMKNRYQVAKDEEAAKAYAEIIKAMNEQLEVLKAKIKEQTEKPKCREGVKRLETIPGIGRMTAAVLFQYLTSSKFETSNKFAAFAGLSPQQKESGTSVRGKSKLTKFGNRKLRAVLFMPAMVAYRMRAFPDFIKRLEAKKKPKKVIIAALMRKLAVIAYNVNKKGEDYDQSRYKSA

SEQ ID NO: 325391 - protein, 382 aa, unidentified
MNYTQNRKIAQVTETTLVVGVDIGSQWHYARAFDWRGIEITKKAFRFSNDLDGYTAFEKWVRETAKNSAKMEVLIGCEPTGHYWYTFARYVGLHGMKLAFVNPYHVKQSKEMDDNSPRKTDEKDPKTIAKLVTEGRYSFPYLPEGIYAELREAVSVRDQIVKAMNAAANRIQRWLTIYFPEYLKVYKVFDSVSGLTMLWQAPLPEDVVKLGADGIVALWHEKKLRAVGKKRAQTLIEAAKSSIGMPGGNCAKMNLHLLLEDYFTKKEQLERITAVLQEELLKVPNSEKLLAVKGIGIITVAGFLAEVGDLRRFTSPKQIQKLAGLEPKENSSGKQKCRTSISKRGRRKLRSLLLQAVLPLLGSKEDFREVYPYYSTRKDTPL

SEQ ID NO: 325392 - protein, 385 aa, unidentified
MTVATAPSKTTLHCALELSKSSWLLAIQFPDRPQPSLYRIKGGDAAGLKAQLLIARDRCAKATGEAPSTITLCYEIGYDAFWLARFLMARGIECLVVDPASLKVDRRGRRAKTDRIDVGMLLRALIAWLRGDRHVWSVVRIPSVDEEDVRRSHRERGRLIHERTSHINRIKGLLFAQGIRDINVKTQYRKLKLEELVTGDGRPLPSRLKAEIAREISRLAVVQEQIAVINRERDEAPTPCKATEKKRILLTQLKSIGPAISAVMSREVYYRQFNNRRQVASFLGLATSPYDSGDMERSQGISRTGRGQVRSIMIQAAWLWIRHQPKSTLTRWFQNRTMGQGRRVKRIMIVAVARKLAVALWRYVEHGLVPQGAILVPPAAPKSAH

SEQ ID NO: 325393 - protein, 449 aa, unidentified
MSDRSGISRGDRNRNARLARLREAVPLSNAIAGIDLADSKQMVVVTDHESRVLARRTFRRRAWELGAALDWAAARGAAAGFGGVTVAVEPTGHRWRVVGQLAAERQMPFVCVQPLMSSWARRAEDLTFDKTDDKDAVLIARLAAQLRCYLPEPADETWSRLRHLGIRRARLVAEQVAQVQQMRDLLECAWPAVLDAARQPFRSTTWHAALTVALSRAGGGDLGRVIRLGRRRFDAAVRRQVARWDAVNPWQKIIGAVFAACADPAGVAALRHGALERVALLLADWRDTQARLADTEQRLVSVLDELGLTELACSITGLSAVGAAAILAETGDPRRFTTGRALVKHAGLAPRQKASGSYTGRTRTTGQGRPALRLAAWRAVWGALKSNPVYAARFAHLTSREHNRLSTGQAHAVIAAALLRHLHAIITTGQRWDPVIAAGGRSNPALIAA

SEQ ID NO: 325394 - protein, 339 aa, unidentified
MQVVYRRCCGMDVHQEHLTACVRVGDEKGNPEVRKKEFGTHWKELQRLKMWLYACHVEAVAMESTGVYWKPVWNVLEGHFPLIVANAYFIHNFPGEKTDARDSAWIADLLAHGLIRPSYVPPQAIRELRDLTRYRVKLKEEYNRIHNRIHKVLEDANLKLATVVSDILGVTGRAILRKVIAGEERPEWLADRAVGSLRRQREALRLALKGKITAHHRFLLGELLDDVEKVEARISRIESELVQRMKPHEAAIERLITIPGVNLITAWTLVAELGTDMSVFADAHHAASWAGLVPGNCESAGKRLCFFSMNHSVLSSTFHNFCGSIDNSSRPSSRLIAVE

SEQ ID NO: 325395 - protein, 429 aa, unidentified
MNSTQNKKIEQVKETTMIVGIDVGSEKHYFRAFNWRGIELTRKPVAFSNSMEGFNSFYNTIVELMQKRELEEALVGIEPTGHYWFDLGQFMGEKNIKFVMVNPHHVHKTKELDDNSPSKNDRKDPRVIAGLVRDGRYFYSYMPTGVYAELRNASNRRFVLVEEQTRAKNRLQKWIAVYFPEYKGIYTHIDAKGGLLVLKQAPTPEEIVKLGEEGIIKIWKDAKLRRNGNKKALKILNAAMRSIGLRTGLTEARMEIQDLIEDYELQTKRLERVNDLIKELCQQIRYADKLLEIKGIGITTVAGFIAEVGDITRFDSTKELQKLAGLELVADSSGKHNGKTKISKRGRKRLRYLLFEAAISVVGKNEEFKEIHRYYTTREKNPLKKMQSLIAVACKLIRVFHVILTKGVSYDASKMLEGIRHPGEQLKAA

SEQ ID NO: 325396 - protein, 346 aa, unidentified
MRNHTENKRIKVLGIDLAKQTFQLHGINAQGHPVLQKKLTRKKLSAFIANLPPCLIGLEACGGAHHWGRVFTKLGHTVRLIAPQFVKPFVKSSKNDAVDAEAICEAVQRPSMRFVPAKILEQQDVQSLHRIRSQAVTRRTALANQIRGLLMEYGVIIPKGISYVRKEIPLVLEDADNALTPLFRELLNELYDEMVHLDERINKLEGKLETICTQNEDCQRLLTIPGVGLLSATALVAAIGDISVFKNGRELATWLGLVPRQHSTGGRSSLLGISKRGDCYLRTLLIHGGRTVVRVADKYQDRRSKWISDLDKRRGRNISAVAVANKNTRIAWTLLTNKTTYQANIA

SEQ ID NO: 325397 - protein, 369 aa, unidentified
MDKDTTYVALDDSKRKIVAGILRPSDTQPELREIANDARQIRRLFERLKREGPVAACYEAGVSGYDLHRQITGLGVACAVIAPALTPRRPGQRIKTDRRDAAKLVRLFRAGELTAIHVLDESEEAVRDLVRCRDDIRRDVLRWRHRVLKLLARHGHAYLTGKNWSHAHWRWIREQRFELPPLQRAFEATVFALEQALARQAELDKELEALAATAPYREPVGWLRCFRGIDTLSAIILLAEVVDFQRFRRPRELMAYLGLVPSEYSSGETQRRGALTKAGNSHARRVLVEAAWHYRHRPTIGRALASRTHGQPDEVVAQAWRAQQRLHRRYRHLVGHGKRTPVAVAAVARELVGFIWAAMTRHESRRAAA

SEQ ID NO: 325398 - protein, 411 aa, unidentified
MRRVIGIDVHRTFGEVVFWENGRLRHAGRIDMTRTALEGFGKTLLASDEVVLEATGNSMAVSRVLAPFVARVIIANPLQVKAIAQAHVKTDKIDAGTLASLQAAGYLPQIWTPDAETERKRRLVARRYQVVRHRTRLKNEVHSILHAHLIPKCPHADLFNGRGRAWLAAQQLPDDERAAVDRHVRELDRLAEDLALLDREIAQDAIEDSAVNRLMTITGVNLAVAAGIVAAIGDISRFNSPQKLVSYFGLNPRVRQSGLGAAHHGRISKIGRSHARAMLVEAAWAAAKAPGPLHAFFVRIRARRGHQIAAVAVARKLTVLCWHLLTKCEDYLWARPALVANKTRAMQLQAGHPQQKGSRRGPAYAYNIKALRDREMLIAAQAEQSYERFVSQWKPRRPKPGARAPQLGKTK

SEQ ID NO: 325399 - protein, 426 aa, unidentified
MNPLPHPTPAPYAAFLAIDWADQKHTWSLQVAGQTQKETGTLEQKPEVIGPWLARLRERFGGQPIAVALEQSRGALLHALFTHDFLVLYPLHPNTVARFRAAFKSSGAKSDPLDTDQILEILTKHLDQLQPLRPDTAETRLLARLGEDRRRAVDLRTAHIQAALASLKEYFPQAIELLSGNLTSRLAADFLKKWPTLEAFRQARPSTVQRFFYGHNVRSPQALAHALHLATTAPSLTTDGAVLESGQLLTRVHVQLIQTLNPLIEDYDRRIAQVFQAHPEAPLFQGLPGAGPALAPRLLAFFGTDRSRYATAQNVQSFSGIAPVTKSSGKTRVVYARRACPRFDRQTFHEFARLSVARCQWAQNYLTYYTAKGKPYHTIIRALAFKWIRILFRCWQNHTPYNDAQYLQELRRRGSIFATLHLATKS

SEQ ID NO: 325400 - protein, 416 aa, unidentified
MNAVGIDVSSRKSTVAVLRPLGEVVCLPFDVSHDADGLASLAEKLKALDGETRVVMEHTGRYYEAVAKALHEAGFFVCAVNPLLIKEYGANSLRRVKTDKADAVKIARYALDNWADLRDFTPMDAIRYDLKTLNRQFQLASKQRTASANNLIALLEQSFPGIRKCFDSPVRSDGTQKWVDFAHSFWHVDCVRKQPFPAFCERYRKWCKRHAYLFKLSNAEEVYALAKRAVVLTPKAKVVKVLVQEAANQLISISRSVEVYRAEMDRLAAMLPEYPVVMAMYGVGKSYGPQLMAEIGDVRRFERKQALVAFAGIDPMPNQSGDKNVRSNKSSKRGSPYLRKTLFNVIRTYLQCAPQDEPVFQFLNRKRAEGKPFYVYMLAAANKFLRRYYAKLRDYFASLDTLQPVAPIPTILKATL

SEQ ID NO: 325401 - protein, 438 aa, unidentified
MIELNNPFCNQSSHAAYASVDWGHQTNCIHFLPAGSRSEQRFEVAADPGSMNAFMAGLRERVGQGRVAILSEQSKGALVNLLLDFEFVDLFAVNPLAAARFRKSLHPSGAKSDPIDSSALLRMLFTHRDRIKPVLKGDEASRRLDALNAHRRELVEQRVAVALRLKSLLREYYPQALPMVGDELWDPISLAFLRRWPCYSKLSKSKDQTLERFYYANGSRSAKAIAKRVAALRSSSKLSSDPLLEELGALRLGNCVEQLSVLNSQIRAIAKCVKSCFGSHPEKDLFATLPGAGAAMAPRLAAAFGSDRERFEDVSKFQVYVGIAPIKVSSGTKNYTFMRGRCHKFLRQSFHEWAGLTIQFSPWAKACYELMRQRGKRVGVAKRALAFKWTRILYRCWKDRTQYDEAAYVRSLAKRGSPIIGKMKELGFIDDENNLLFT

SEQ ID NO: 325402 - protein, 448 aa, unidentified
MHSPQVIPDEDHEVVYERVAAVDVAKASGVVCMRTPGPGGRYSSKIWEVAATTAQVLAIGQVMVRQRVQMVTLEATSDYWRIWFYLLESLGLAVQLVAPAQARNLKGRPKTDKLDAMWLARLTQWGMLRPCFVPPAPVRALRDYTRTRADLVRERTRCWQRLEKLLEGALIKVSAVASRLTTISAQDMIRALIAGERDPRVLAGLARGRMKARHDALVEALTGMFDAHHGELAQLELDQIAFLDARITQLETRAAGTLAQIPASWGTDATGETGPQAGTGPDAAVPPAAARLAEIPGISPTLAVCVIAETGLDMTRFPTPGHLVSWAGLCPQARQSGPRTRKGGKKHGNAYLRCSLGQAATAASHTDTFLAERYTRIARRRGKAIAQVAVARSILVIIWHLLADPGTRFTDLGADYHATRTDKDKKIRNHIRQLNALGIQVTITPAAG

SEQ ID NO: 325403 - protein, 348 aa, unidentified
MDHIIRIGMDTSKHVFQLHGVNAAEEPVLRRKLRRNDMVVFFERLAPTIIAIEAAGASHHWARLLRSFGHEVKLIAPQLVKPYVKRGKNDAADAEALCEAMSRPTMRFVPVKTAERQAALMLLGLRDRLVRNRTQLGNAIRGYAAEFGLAAAKGIAHLAPLLDRIQSDESLPGLARELFAAHAKEYAQLQAQIDEVEGKLMAWHKTNPGSRRLVQIPGIGPIGAAMLIMKTPAPETFRSGRQFAAWIGLTPKDHSTAGKVRLGVITRAGDEGLRSALVVGATAVIRHLRNGKGRSMLSAWVEQLLKRKPPKLAAVALANKLARIAWKLMVTGETYAAKPRPVALAGVA

SEQ ID NO: 325404 - protein, 345 aa, unidentified
MVVLGIDAHKRSHTVVAVDEHGRELGSRTFGTTSRDHLALLRWAEQHGGERRWAVEDCRHLSRRLERDLLTAGERVARVPPKLMAQVRSSARSYGKSDPIDALAVARAALREPELPTARLDGPDRDVRLLVDHREDLVGERTRIIGRLRWHLHELDPGWEPKARALDRPSTWAVITAQLEGVPGVVARLARDLVERCATLTDDIRELEREITTLTCELAPSLLEIVGCGSLTAAKILGETAGVDRFRSRDAFARHNGTAPLPVWSSNRARHRLSRTGNRQLNAAIHRIALTQAHWHPDARAFIARRVEGGNSGREALRALKRRLSDVVYRALQADLAVDDFTLAA

SEQ ID NO: 325405 - protein, 353 aa, unidentified
MGDQSIQGEVILGVDTHLDTHVGAVISDTGKLLGTLAVATDAAGYLKLLTWAKSLGRLRRAGVEGTGTYGAGLARLLCDHEIEVLEVNRPDRANRRLQGKSDPTDAESAARAVLSGSAAAIPKAQSGVAEAMRAVSVARRSAVKAKTQAINQVRALLVSAPQDIRARLWKVKPSECIDGCAHLRSLGTTPLLHTLAATLRMLARRWLMLAEELKELDAILERLTSQHAKRLRGQFGVGPQTAAVLIAVAGDNPERLRNEAALAALCGVSPLKASSGKTARHRLNRGGDRSANNALWTIAMVRMRSDPRTRAYVERRTAEGMSNKEIHRCLKRYIVRALYPLILADLADSARFT

SEQ ID NO: 325406 - protein, 436 aa, unidentified
MKRFLEICAGIDVGKREIAVTLLAGAADVEAEAETRTFGTTTRELSNCAEWLQAAGCSTVVMESTGSYWIPVWNVFQARFAVIVANPEHVKARRGEKTDAQDSRRLAERLRVGDVRGSFVPPENVVILRDLTRRRKRLLTAANSERNRVQKLLERSNVKFGNVVSDVFGVSGQRFLAALLKPETPTAAEIAQLAKGRLRNKMAQIVETLEGHRLDEHLRWMIQHCLDHLVYLEKQMAEIRTRTNEALVPFQREVELLQTIPGVGEEIAAVVIAETGGNMAQFPTEKNLTSWAGVCPGNNMSAGRQKSASIKRGNKWLLSALVQAGWAAARQRGTIFKRRFYRQMQHRGRKRAVIATARLVLCTVWVTLSRGEPYREPNTDFQLHEHSKKVRHHLRKLAQLGVDVSALNLPEPTPAELRRPDRLRPPCIGALGIHAR

SEQ ID NO: 325407 - protein, 343 aa, unidentified
MDYFAGLDVSVKDTSVCIVDGTGKIVREVKVASEPQALLAVLRNATYCFKRIGLEAGPLSQWLYGALAEAGLPVICVETRHMRAVLKAQINKTDRNDARGMAQMMRVGLYRPVHVKTLRSQKLRMLLTHRKLVQSKAIALDNDLRGTLRNFGLKVGVVGTVKFEARVRELVENLPDVAELVEPLLIVRQVLREQLGILHRRLLAIVRDDDVCRRLMTIPGVGPVVALTYRATVDVPVRFRKSKSVGAVFGLTCAKYQSGEIDRTGAISRCGDEMVRTTLYEAAQILLVRSTKWSWLKAWAMQIARRRGMKRAIVALARRLAVIMHRIWVDDTEFRWTRNAAAA

SEQ ID NO: 325408 - protein, 379 aa, unidentified
MERFNIGVDLHKTQFTICCLSGESFLWEGQYSTNPGGYAEFKRRILGLSKRSKKSSVYLAVESTGNTKFFKNTVETWGCKVHVVNTLKFKVINESVKKTDKHDARTLAEFLSKDMIPEAHLCSWESEELRRLLHVRRTLTRAVVTVKNQIHGMMNAHGLESLKGGLQSEKGRQRILGALTGIDTDPVTGLVAQQLFQTICLLLGQIKDLVKTLEQKVANDEVVKRLQTIPGCGLITASTIRAALDDIGRFPGPKQFAAYAGLVPWVQCSNTSMHYGKITKRGPEELRTALVQLVLGMYRSRVTAEFRIMKSYRYMKSNKGSGKSIIATARKLAVIIWQMLSEKKDFDPEKMLDHNLNRKAVSMRAASIEKSPMLSGIEN

SEQ ID NO: 325409 - protein, 400 aa, unidentified
MLSIGIDVSKGKSTVCGMKPGGEIVYTPFEIQHTREGMSELVSLLRGSGEEVRAVLESTGSYHCPVVTALLENGIFVSVVNSLRMKRFCSQSIRKVKTDRIDAMQIALYGLAYWQELQPAKLPEDTYRELQLLARQYYQMTSMLIKAKVDFNAICDQVLPGMQELMNDHAGRHKLSDFVLRYRHTTHILEMGETRFRKDYCKWAEKKGYRNHERMAALIFATAQNGIPVLPDAPSTQIVITEAIRVLHTVEASRDAILTQMQALAKTLPEYSLVREMPCIGDTLAPRLIAEIGDVRRFHSKRALIAYAGIDAPPYQSGKFCANNRHISKRGNRYLRKTGYEVMQSYVMHKPANDPIFTFIEKKRGEGKSGKLAMVAGLNKFLRVYYGKVTELYRSLPAIE

SEQ ID NO: 325410 - protein, 360 aa, unidentified
MPTTMTFAGLDVHARSTHVAALEVASGELKRIRFGPGSEEVIAWLAALPQPVHGCYEAGPTGFALYRAAEQAGLRLDVVAPSKTPRAAGDRIKSDRKDAELLCRLLMAGQLKPVTVPAPAVEAARHLARAREQVRVDLMRCRHRVSKLLLLHGRVYPERSTWTQAHRRWLSRQRFEQPASKLAYLDCLAAVDGLVARKQELDERLSRLALEGEWWPTVARLRCFRGIDTLSALVLCLEIGDWQRFARPAQLASWLGLVPSLDQSGESRLQGSITKTGSSYARRLLVEAAWHYLREPRIGVTLRNRQQGQPAHVLQIAWRAQHRLYRLQRRLRERRKPSNVATVAVARELACFLWAAAVAP

SEQ ID NO: 325411 - protein, 353 aa, unidentified
MITIGVDAHKHAHMAVALDERGQVAGQWQGANSAAGWDEATRWARALGDERQWGIEGGGGYGRGLAQHLVGLGEVVYDINPRLTATERRRSRRMDKSDAFDAQAIAQVVRREDAQLPRVTVEDETVALDLLTAEREDAQAEATRLRNRLHHLLLQLDPEYHLHLPALTSVAGVQAAKTYTTTSASLVQQERAAVVRRLAGRLHLALEQVAELGRRIEALAQARYASLTRLCGVSLLTAGSLAGILGPRHRFASEAQLAAYAGCAPLETSSAGRVRHRLNRGGNRRLNAIVYRIALVQARWSPEAQAYLARRVADGKTKREAFRALKRYLIRAIWRLWSACLSPAATEPARRAA

SEQ ID NO: 325412 - protein, 413 aa, unidentified
MDVIVDRVAGLDVHQKTVVACVRTPGVGRQKRQSEVRTFATFQGQLESMRAWLLECGVTQVAMEATGVYWKPVWHVLDGAGFEQVLLVNPAHIKAVPGRKTDVNDATWIAQLLECGLLNASFVPPVEIRELREVTRYRRQLTEERSREVQRLQKILEDANVKLSSVASDTLGLTGRMILEALCAGERDADVLAGMAQRKLKAKTDELRQSVPGRFNQHHATMVRKLLAHIDFLEQAVCDLDDTVDQMMIPFVPARDRLDTIPGVAKRTAEIVIAEIGVDMTRFATAGHLASWAGLCPGNNESAGKHKTATTRSGNPWLTSALVEAAWSASRTKGCYLGVRFWRIAKRRGQQRALIAIAHTILVICWHLIANETTYTELGTDYLAGKDQTDKRRKHLIEQLQELGYNVELTPAA

SEQ ID NO: 325413 - protein, 339 aa, unidentified
MKITTFGLDLAKRVFQLHWVDTATGEIYRRQVNRAQLKEFFANREASVIAMEACGSAHYWRRLFQELGHEVRLIPGQFVRPFVKSNKTDAADAQAIWEAVQRPGMKFVAVKSEAQQSVLMLHRMREQLVKMRTMQTNQLRGLLYEFGAELPKGRHKALERIPDELARLEDTLPAMVIEAIRSQLQRIEALDQDIAELEHKLAVWKKEDDAAKRLMAIPGVGLLTATAAVAMIGDAKTFKSGREFAAFLGLVPRQSGTGGRVKLLGISKRGDVYLRTLLIHGARAVATHQKVRAPWLDQLLARRPFNAAVVALANKMARTIWALLAHDRTYQTDYVAKAA

SEQ ID NO: 325414 - protein, 371 aa, unidentified
MGQNLRRRTQPKGKPKGGPAPNRDRLTVGVDLGDQWSNYCILGLEGETLGEGQWRTTREDVAAFFKALAAARVIFEVGTHSAWVREVVVGCGHEVLVANPRLMEGTKRRKRKNDRLDANKLARLGRVDPQSLFPIEHRGTEVRQDLVVLRARDALVTARTQLINTTRGLVKSMGARLPKCSSPSFSKKVEEALPAEVREALLPLVRLAEALSDRIKDYDERIEKLGREKYEHTELLRQVKGVGSLTSLAYVLTLENPDRFGKSRDVGPYLGLVPQQEDSGDSQPQLRISKAGDGMLRRLLVGSAQYILGPFGPDTDLRRYGLRLCERGGKNAKKRAAVAVARKLAVLLHRLWISGEVYEPLRHGAPTAEAA

SEQ ID NO: 325415 - protein, 366 aa, unidentified
MDYGVYCGVDFHARQQTICCLTTEDGVIATYELKHDCKNAVRDFYAQLPGPVLVGLEAGGYSLWFEQLLEELGHEIWLGDASEIRRCARRRQKNDRRDAALILDLLVRGEFPRIHRQAPLSREILRMLRYRHRLVKIRTIIKNCLHALAIQSGLSLKSQLFTQAGMQQLTSLGMSPVMQCQRKQWLQLLPTLEERISACEKWLSEQAAADPRVRRLRTHPGLGLLTSLAVVHTLDPVSRFPNQRKVAAYGGFDPCEDSSAERKRYLGISKAGSKLLRFLLIEAGQTAVKEDPELRRFYGRLQQRRNKPKAKVAVARKLLIRSYILLRDEIDYAEFQRRAVAARLARENARLHACPLIEQSASVAGD

SEQ ID NO: 325416 - protein, 354 aa, unidentified
MNDANHIGLDVHQATISVAVRDSAGKLVIEAILETKAEAIIQFLRGVRGSLHVTLEEGTWAAWLHDLLLPHVTRVVVCDPRRNALLKAGNHNDRADARKLAELLYLNELNPVYHGEHGLRTLRELGRSYIAITRDLTRVMTRLKAIYRSWAIPCAGEQVYSPRYRTEWLAKISEGGVRRRAEHYYQQFDALAVLRHGVRRELLAESRKHQATRLLRQIPSIGPIRAALLLAIMQTPNRFRTKRQLWGYCGLALRTYTSGEYRFDKGQLKRSKKVLAIRGLNLNHNHDLKNIFKGAATRAAAVGPFKNFYEACVARGMKPHLARLTLARKIAAITLLVWKKGVRFDAKHLKQQAA

SEQ ID NO: 325417 - protein, 348 aa, unidentified
MQEHTNVATLVELRKREPVGRMTIGIDLGDRKSHFCVLNDQAQVIARGFLPTTITAFRREFEGLPASLVAIEAGAHSLWANQVLKVCGHEVLVGNPRKIRLITESDRKSDRVDAESLARLARADRLLLAPIQHRTQEKQVQLSVIRARHVLVRSRTALINCARGLVKPMGLRLPICSTEAFAKRAASTSLPELLRAALAPLLNQIEALNQGIRDYDRQIEHMAATQYPETCLLKQIKGVGTLISLTYVLTLEDPHRFARSRDVGAFLGFLPREKQSGERAPRLGISRAGNEYLRTLLVQGAHYILGPLGPDTDLRRWGLQLAARGGGGAKKRAVTAVARKLSVLLHHF

SEQ ID NO: 325418 - protein, 315 aa, unidentified
MTTETKVYVGIDVSKDTLDLAVLEENRVEQFTNTVGGIRDLVKEMDVLSPSLIVVEVTGGYERAVVMGLFEAGLPVARVSGYRARQYARAKGLLAKTDPLDAINLADYGKHVQPRLFVAKSEQGQHLSGKLARRRQLGEMLKAEKNRMRLAYGENGPSIERGIEFLSRELKQLDQEIRAYLDSDPEWLKQEQLLRSAKAVGPVTAATLLADLPELGKLNRKQIASLVGLAPINRDSGKRSRYRKTGKGRPAVRSVLYMATLTGIRYNPVLRKHYHDLVSRGKVKKVALTACMRKLLTILNAMMRDQEPFRYPAIS

SEQ ID NO: 325419 - protein, 368 aa, unidentified
MCAKSFTFRKEPAVEKKMTYVGLDVHDETIVAVWQKRGFRERTITVANDGEGLEGLLKAVGAGDVSAAYEASGAGFSLYDKLKKKGWDVIVVPPTAIPKSAKERKRKTDVEDARSLMKMLMAHGECDAKMPSVWVPSVKVRQDRELVRHRLRLAEDRARIKTQIKCLLKIHDVVSPGKADWSGRHVAWLRGLAGEEGRAWTFRRVLGSHLALLEVYGAEIADLDKALMKLSEEEAYAEQTEAVTKIRGVGLITALTFLLELGDVKRFKNRRALASYLGLTPASYESGKADDRKGHITKQGSGRLRKVLNQAAVAHVRTNDRPVWEWYENLKERRKGKIALVAVMRKLATLMWHRACDVVTETGSDGRP

SEQ ID NO: 325420 - protein, 406 aa, unidentified
MLRVGIDQGSQYHDVCLAPEAQAPQYLRVPSDADGLAQLLEAIRRLEPHPDQVHVAVEGSGQGLFVAALLAEGFRVYPINPKAVDRYRDRFSPAGSKDDRRDALVLAEILRTDLHRLRPLRPESDTLRRLRVLFSHHQALVEERTRLINQLTACLRAYYPRALEWFADLGRPVAWAFLRAFPTPAEWARARKAQVEQLLRQHRYPGVEAKTAALLTLARKAQLPGDPATVALWARRMRFLVDQLEAVSQELKACHRQLEALVQGHPDGELFRSVKGLGTVLAAGLICLFGEDRQAVPDVNPIQCRAGTAPVTVRSGKSMRVQFRRACNKQARNTVQQLAQQLVLHHAWARQIYQAHRARGRHHHEALRIVAHHALRVLFAVWRDRQPYDAARFEEARRRRQQPKAA

SEQ ID NO: 325421 - protein, 345 aa, unidentified
MKHFIGLDVSVKETAVCIINESGKICREVKVVSHPDDLIAVLKGQTLNVERVGLEAGPLSQWLFEGLAKAGLPVICIETRHVKAFLKAQPNKTDRNDARGIAQMIRVNLYRPVHVKTLTSQKRRALLTARKLLQEKAIAIENDIRSLLRNFGLKVAAVGTVKFEERIRELTEGMPDLAAIIEPLLAARGKLRTEFARLHRQVLAVAKDDAPCRRLMTIPGVGPVVALAYTATIDIPQRFRKSKAVGAILGLTPKLDESGESRRVGRISLCGDGMMRTLLYEAAQILLTRVRKWSSLKAWAMKIAKRSGMAKAKVALARRLAVVMHRMWLDGTEFCWTREAMTPAS

SEQ ID NO: 325422 - protein, 412 aa, unidentified
MDLVHERAAGIDISKRDAKVCVRVPGDKPGEFTSSVSTWPATTNGILELRDFLERKHVTTVVMEATGVFWKPFYYLLEETLDVMLVNARQAKNLPGRKTDVSDSMWLAQLGAHGLLRPSFVPPEPIRELRDLTRTRQVLVRDRTREIQRLAKFLESTGIKLSNVATDLMGASSRSMLEALIAGEHDPNTLAALARGKMRVKIPELSEALLGRFNAHDAFMVRAHLTQIDAFTAQIDLFTERIEEVMLPFRAIRDALTTIPGVSTRVADTIIAETGGNMSVFPTSRHLASWAGVCPSSNESAGRVKSTKIQPGNKYLKEMLGVAAISASRTKNTYLNALYHRLIPRIGNLKAIVALEHSILTSVYEMLTTGQPYEDLGPDHFTRLNPERALARHLRHIRNLGYNVTLTPIEAA

SEQ ID NO: 325423 - protein, 355 aa, unidentified
MTSAKYIGLDVHQATTAAAVLDANGKLLMESILETHASTLRDFLAGIRGELNLTFEEGVAAEWLYGVLKSDVDKIVVCDPRKNALLKAGNKNDRIDARKLAELLRGGQQRQVYHGNRGVRTLKELAHNYLVLTRDVTRVLNRIKAVYRSMAIRCPGQRVYHPRYRQQWLEQLAVPGLRRRAERLYQQLDLIQPVRQQARRELLAESRKHAARQLLEQIPSIGPVRAALLMAILQTPHRFRTKRLLWAYSSLGLVIRTSSDHDFKNGQLRRRPKQISVRGLNRNHNPELKNLFKSTALSASLRPGAWQECYQRMLAKGIKPAMAQLTLARKIAAVVLTLWKKGENFDPDKLTMQAA

SEQ ID NO: 325424 - protein, 410 aa, unidentified
MGLFCGIDWATEHHDVAVIDDDGHVVARGRVSNDAPGFAALLTLLAQAGDSAADPIPVGIETDRGLWVAALRETGRTIYPINPLAASRYRARHGVSGAKSDATDAVLLANIVRTDPGAHRPLPADTELAQAIRVLARAQQDAVWARQQIGNQIRDLLKDFYPAALTAFADLPEGRLARRDARTILAAAPTPAQAAKLTPARLRRLLINAGRKRYLDRDTDRLREIFADTYLHQLPQVEVAMGIQLTALLGQFDAACTAAADLAEAATAHFEQHPDAKIITSFPGLGNLTGARVLAEIGDDRARFADARGLKAYAGAAPITRASGKKTVVLHRHIKNRRLAAVGPIWALGSLRASPGARRHFDARRATGDWNHQAQRNLFNKFLGQLHHCLQTGQHYDEHVAFPPPLRLAA

SEQ ID NO: 325425 - protein, 404 aa, unidentified
MKIEYARVAGLDVHKKTVVACVVTPAGRETRTFSTRTRGLRELMAWLEEQQVTHVAMESTGVYWKPVYNLLEETECELLLVNAHHIKQVPGRKTDVKDAEWIANLLQHGLLTSSFVPDRAQRELRELVRYRRRLVQTRSSEVQRLQKVLEGANLKLASVISDVTGVSGMAILTAIIEGETDPAILAALGGARLKASKEELTEALDGIQGHHQRMLLKSQFRHIQFLNDELKRLDEEVAKRTLPFLEAVQVLDEIPGIGRRGAEDILAEIGTDMDQFPSDAHIASWAKVSPGSNESAGKKKSCRTGKGNPWLRSALVEAAWAAVRKKDSFYADLYRRLSARRGKLRAIVAVARRILQTIYFMLKRKEPYREIGPALQQANRDNQARRAVSRLNKLGYKVILETAA

SEQ ID NO: 325426 - protein, 331 aa, unidentified
MMFCGIDVSAATLAVAVQQQDQPVEQREFANSAAGHKALIAWLGRRKIAVRVSLEATGIYSLDLALALDRAQGIEVAVLNPKAANRFAQTLRRSKTDSADAQVLAEYSRCMRFTAWRAPDPHALRLRALSRHIQTLTEQNTREQNRLHAAQGSSETPRCLIADLKRSLASLHKRILKLRRDAIALVRADDTLRQRFERMTSIPGIAQLSALHLLGELAALAPELSVRQWVASSGLDPAHHDSGTSVHRPARISRAGNRHLRKALYMPALAAIQHDPHLRAFYTTLVARHKAKMQALIAVARKLLHAIYGIFKTQTPYNGAKLFPNLQIHTS

SEQ ID NO: 325427 - protein, 448 aa, unidentified
MSSGGGVSRGDGNRNARLARLGEAVPVMNAIVGIGLADARQMVVVTDHEWRVLARRAFRRRAWELGAALDWAAARAAAAGFTGVGVAAGPAGHRWRVAGQLAAGRGMAFVCVQPLMSAWARGAEDLTFDKTDDKDAVLIARLAAQLRCYLPEPADETWGRLRHLGIRRARLVAGSVSQVQQMRDLLECVWPAVLGAARQPFKPTTWRAALTVALERAEGDLGRATLLGRRRFGAAVRRQVARWDAVHPWQKIIDAVFGACADPAGVPALRRGALERVALLLAGWRDTQARLAGTGTRMIAVLAELGLTGLVTSVTGLSTAGAASILAETGGPSRFTSGRALVKHAGLAPGEKNSGTCTGRSRTTGHGRPALRLAAWRAVWGALKSNPVYAARFTHLTSREHNQLSTGQAHAALAAALLRHLHAVITTGQRWDPAIAAGGRPGPALIAA

SEQ ID NO: 325428 - protein, 410 aa, unidentified
MQVVYARCAGLDVHKKTVVVTVLLTASNGAVTKETRTFSTMTAELLRLEAWLADLQVDHLAMESTGVYWYPLYTLLEEGRTVLLVNPQHIKAVPGRKTDVRDSEWLADLLRHGLLSPSFIPPKPIRELREVTRYRKQLVYERTQYANRLQKVLESSNIKLAAVASDILGVSGRAMLEALIAGEQEAARMAEYARGRMRQRLPDLRQALEGRVSPHHRFLLRQILKHIDGVDQELLEVEQQIAAYLQPYEEASQLLQTIPGIGAPAAAALISELGVDMTRFPSAKHLASWAGVCPGNNQSGGKRMSAGTTGGNRWVRAILGEVVWVISRTKGTYLAAQFQRLMRRRGKYKAVMAVAHTLLVIIYHMLRDHVPYADLGPDYFDRLDQARVERHHVRRLEQLGYTVTLSPAVA

SEQ ID NO: 325429 - protein, 352 aa, unidentified
MVKLLVKFKIKSMQSSKKNYLGIDVSKPWFDVSLLSIINHQKQPMITERFDNTTAGMKEFKKWLVVHDVSFDSNSLLVIENTGVYHRLIWSFCSKYQLQLHIGNAAHIKWSLGITRGKSDKIDSQRLCIYCCKQADELQATPALDPVFMQLKDLMSSRSRLVTQLHSTKNYIKEIQCTNDKVLLSMLDKAHKAALDGIKKSIVQLEDLINKIIHENQVIYNNYQLIKSVPGVGHLTAVYIICCTNNFAANPTGKQLASYAGVVPFEHSSGISIKGKNRVHKMANKDLKKMLHLCALTAIKYCPEFRQYFDRKKAEGKNGMLVLNAIRNKLVLRIVAVVKNQKPYVENVQVAA

SEQ ID NO: 325430 - protein, 374 aa, unidentified
MKDFNKFVGLDTHKETIAVAVADAVGGKARYYGEIANTPEEVGKLVKRLCPDGEVISFCYEAGPCGYEVYHQIRGLGHHCSVVAPSLVPRKPGERVKTDRRDSEKLSRLDRAGELTPVWVPDREQEAIRDLTRAREDMKGLERTTKQRLNAFLLRYGRNYASGKSRWTQAHRRWLERLKFEQPVQQIVFQEYVDAVKQAETRVGGLEKEMEKALQHWKLAPVVEALMALRGIKLISAMTIMAELGDITRFDSPRQLMSFLGLVPSEFSSGLTRRRGGITKTGNGHVRRVLIEAGWCYRFPARKTAHLQRHAEKCSDEVQAIAWKAQKRLCGRYTHLLGRGKLKVQVCTAVARELVGFIWAIAGEEMNKHVVSAR

SEQ ID NO: 325431 - protein, 271 aa, unidentified
MNNVSTLSIDLAKNVFQLLSFDKQGNKCFSRRLDRAKLLQTLTQLPACNVVMGSCSTSHYWGRYCLQAGHQVQLIPAQHVTPFVRGNKNDKNDCMAIYEASLRPNIRCVPVKTEHQHAILALHRYRERLIHNRTACINQTCGLLLEFGIVIKKSLKSFRATIADLLNRNLHGALNLLLRDVYEEMQKLDVNIKNVEAQFKQFNEQSQAAQIIQSIPGIGIINVSALSATIDKGQAFSNKKELAVWLGITPRQYMSSMISFASIDTNNGAFH

SEQ ID NO: 325432 - protein, 328 aa, unidentified
MENTLYVGIDIARHKFDAAFFTSTGKAKHDTFHNNAGGFAAFLQWCGTHSARLHLAMEATNVYHEELAQYLYEQGHTVSIVNPRCIHAYAKSQNLRSKTDKIDATLIARYAAKEVPPAWQPPREPLRVLLLTLRQLERLKTAEQQQRDLPGTVKEPGCVESIKRLHAFLQGGIKRMGKEVKAIIAADGRMQHNAKLLHTIPGIGERTVPWLLACLHDGKRFANGKAAATCAGLTPMLHQSGTSDGKAHISKIGPSGIRKVLYMPAVVYSFGICRDGPYKSFADSMLANGKAKKSVITALMRKLLTIARAVLQYRHPFDLQRYEKATKK

SEQ ID NO: 325433 - protein, 455 aa, unidentified
MGTERKVAGLSLECIEPNAAGIDVGARSIYVAVGAERVAEPVRCFATFTEDLRAMAAWLKQCGITTIAMESTGVYWVPVYEVLEDAGFKVCLVNSHHVKNVPGRKSDVSDCQWLQYLHSVGLLQASFRPERDICALRALSRHRAGLVEVAAVHVQHMQKALTQMNLQIHHVLSDITGMSGLAVVDGILQGERDPQRLAGLVQSRIHADRETVIKSLVGNYRAEHLFTLRQSVAAYRHYQKMLADCDREMEQYMGRLPDKGQGGSGQPLSGKSGKGKRRKNQFHFDMGKELYRVLGTDLTLVPGLSALTVHTLVAEVGSDLSRFANAAAFTSWLALCPGIKKSGGKVLSSKTRKTNSRLSLALRLAAQTLHRSHSYLGAFYRRLRARLGAPQAITATAHKLARIIYHLVTTRTAYDESVFRNEEEKHALRSQHRLQRQAEALGFQLVPISHQEVVH

SEQ ID NO: 325434 - protein, 351 aa, unidentified
MLIIGCDYHPGVQQIAFMDTETGEFGERRLEHGGGEAEKFYRDLQQRGISVRVGMEATGHARWFERLLEELHFELWIGDPLEIRATRVRKQKTDRHDAQLLLKLLLEDRFPRIWVASWENRDLRQLLWHRHRLVQMRTRIMNQLQAIALNEGVRQKKRLWGQTGRAQLESFVLAPWASRRRKELLELLDRLNPSIRELNAAVEQEATGRPEVRRLMTHPGVGSLTALAFVLIIGTPQRFACGKQIASYVGLVPTEESSGGRRRLGHISKQGNSLLRFLLVEAAQATVRSDPDWRRKFMHLAMRRERGIAKVAMARKLAVRLYWMWRKEWDYEEVKRFGSHAGQPGNPLGVQ

SEQ ID NO: 325435 - protein, 364 aa, unidentified
MKVTEKKTVVRFVGIDLGKRTYEAAFVKNGAVTRSNGRTCAAGRRTLYNKLKPTDKVAIEAGNMAFIMAKEIEAAAGCKVYVLNPSNLALIYASMKKTDKEDSLKLAHIIEDFQEHRLPVVPVPSDKEMNRRKILGSYRRVQQARSREINKLHALFLAQGITTVVRKDLASGEPRKETIQVLTGLERAEAEYLVSCLDLHEQRIALLKQQMKEESAGDEVIERLQEVPGVGPLVAFAFTAHVAPERFEDASQVSNYLGLVPRVYISGESVRHGRITKRGNGYLRALLVQAAWAMINTKQGGKLKERYEYMTVEKSKSKKQAIVAVARRIAELLYTLMRDGSKYEAKPFNRDKKVQELVQLAMSA

SEQ ID NO: 325436 - protein, 357 aa, unidentified
MKTLHRRCAGLDVHSDSVVACVRLTVRTKVSHEVRRFSTATRDLLELADWLAAQGITHVAMEATGVYWKPIWHILEGRFELVLANAAHIRNVPGRKSDVNDAVWISDLLAHGLIRASFVPPAQIQDVRDLTRTRTQLAREVAQHIQRIQKTLENANIKLTSVISNIVGTSGRRILKAMIAGETNPAKLAELGSTRLKCPRAELTAALDGRVTAHHRFLIAHHLSLIEELERHIAAFDARIDKLLTPLRDAVAQLITIPGVSRVSAQVILAEMGADMTPFPTSGHLLSWAGLVPRLDESAGKRRSTRVRKGAPWLKPVLVQCAGAQPAARVPTIRHSSSASKLDADPKRLPSRWRPRC

SEQ ID NO: 325437 - protein, 344 aa, unidentified
MEHFAGLDVSVKDTSVCIVDDTGKIVREVKVASEPEALLAVLKNPAYHFKRVGLEAGPLSQWLFSALAEAGLPVICVETRHMRAVLKAQINKTDRNDARGMAQMMRVGLYRPVHVKTLRSQKLRMLLTHRKLLQSKAIAIDNDLRGTLRNFGLKVGMVGTVRFEARIRELVENLPDLAALIEPLLIVRRTLREQFCILHRRLLAIVRDDEVCRRLMTTPGVGPVVSLTYRATIDVPARFRKSKSVGAVVGLTCAKYQSGEVDWDGRISRCGDEMMRTMLYEAAQAMLRSKKWSWLKAWAMQIARRRGMKKAIVALARRLAVIMHRIWVDGTEFRWTREQATTAA

SEQ ID NO: 325438 - protein, 350 aa, unidentified
MEQISRIGMDTSKHLFQLHGVDAVEKPVLRRTLRRRDMITFFERLAPTRVAIEACGASHHWARLLRGFGHEVQLIAPQLVKPYVKRGKNDAADAEALCEAMSRPTMRFVPVKTADQQAALMLVKLRDRLIRNRTQLVNAIRGYAAEFGIAGAKGIAHVTTLLARLQADVTLPALARELFAMQAGEYAQVQAKIAVVEAKLLAWHRADPCSQRLAGVPGIGPIGATMLTMKTPAPQAFRSGRQFAAWIGLTPKDHSTAGKARPGVITRAGDEGLRSVLVVGATALIRRVREGRCRDGDRFAAWVGKLLERKPPKLVAVALANKLARVAWKLMITGEAYAVKPASTGAASAL

SEQ ID NO: 325439 - protein, 444 aa, unidentified
MRERSGGQRVEEVTDEPLYRDRVCGIDIGKAGLAATIRVPSDRDPARRMQETRGFGTTRREVLALADWLRCWQVPAVVMEATGDYWKGPFYRLEAEGFECVLADAKQVKNLPGRPKRDPADSRWLAACFERGAITPCFVATPEFRIIRLHTRYRRDLTEERTREKQRAEKLLESAAIKVSSVVTDLHGVTGRDIMDHLIAGERNPKVLAQLARAAARRKISQLEEALEGAEFFTPAHAALLAKVLARIDRLSADIDDLSQVIERLLAPYEEQLQQAESMPGWGRRAAQDAVAETGVDMSRFRTGGHLSSWAGRAPQDHQSGKRKGRAKAKKGNRYLGAITGETAVAAGRTQTREGARHRRLARKRGAAKACVATGNTQLKVYHKLLSNPGMRHQDLGPDYYDRQRDTRRQIAHHVGKLGSLGFEVTLCRIPDPEPDATGPAQPA

SEQ ID NO: 325440 - protein, 354 aa, unidentified
MKTPPLGQWYVSIVPLQQEEVKMNYIGLDVHKKECQAAILDEDGNLVKEMRIQTSEKGFRHLVKATDKGSSMVMEASSSFYGPYDFFRGAGLEVKVAHAQRVKAIASAKIKNDKIDAETLAQLLRADLIPEVYVPDDKIRELRELLQHRKGLVKVRTESKNRIHALLTKRGITHGFSKLFGKAGMNWLKSLELDTIGDFELRQHIVNIEHLNDQVSETEKRLWEYEKILPEARLAQSMLGIGRLSSLMVMAGIVDITRFPDEKKLASYAGLVPSLSQSGDVERHGRITKQGSKFIREGMVIAANAAIKRPGTKMRRFYDRVAKKHGANTAKVALARKMLNWLYFMLIRGEHFAS

SEQ ID NO: 325441 - protein, 387 aa, unidentified
MPEDAPRPAQAAIRTDLGAIFVSLELSRRAWLVTSLSPGGGEKMSKHSVQAGDIAGLLRRFAQLKEKARARTGRDFPVITIQEAGLDGFWIHRVLQSEGIESHVVDAASILTSRRRRRAKTDKIDGETLVRTLLAYKRGGPRVCSMVKSPTPEEEDRRRICRERRALVAERVQHTNRIKGLLFAQGAFDYEPLKRNRRAHLEDLKTGDGRPLPVNLKAQISRELDRLEVVLQQLQTVDAERDALLEPASEASPAPAAMLSQLKGIGPEFATILYTEGLFRGFDNRRQVAAYAGLAPTPWQSGSVDHEQGVSKAGNPRLRTTMIQLAWLWLRHQPDSALSRWFQDRVQRNGGRMRKTTIVALARKLLVALWKYATSGVVIEGAVLKAA

SEQ ID NO: 325442 - protein, 391 aa, unidentified
MIYIGIDVAKDKHDCFITNSDSKVLFKAFTIFNNLDGFNDLYQKIESVMDDVTKVKVGLEATGHYSYNLLGYLIDKGLPTYVINPLHTNLYRKSLSLRQTKTDKVDARTIASMLMSDVNLKSYSDTSYHNKELKSLTRYRFDKVKERAKLKTSVSRLVCILFPELEKLVPTLHMASVYALLSEFPSAKHVATAHLTRLTNLLSKSSKGRYGKDTAITFRDSARASIGSNMPAKSLELKHTIKLIQELDSEIDEIENEIKIIMDEINSPILSIPGINYRMGAMIIAEIGDFNRFDSPDKILAYAGFSPSTYQSGQLDGAYAHMEKRGSRYLRYALYNATKYVCHWDPTFAAYLAKKRAEGKHYNVAISHAVKKLVRVIYHLEKTKQQYVKAA

SEQ ID NO: 325443 - protein, 407 aa, unidentified
MICVGIDVSKRKSTVCFMAPGDKIIRRPFDVKHTKEELQPLVDEIRVQAKYDEIKVVMESTGVYHLSIAYFLQQNGIFVSVVNALKVANFNKAENFRHTKTDSIDSTNIARYGIAYWAKLPQFDLNGDKYFLLKRLCDAYLNFSEERSRILLQLQSQLEQTMPGIFDLFGGFDINSGKDKLLDFLERYCHIEDIIAKSEAEFVASYREWAKEKGYRSNESKAATIYAQAKNGIPSIPNNPIVRETIMWYVGLLRRADEALMASLTRMEDITKDLPEYELVGEMGGVGRVTRVALIAQIGDVRRFKNKHSLICFAGLTPSIHESGKFRASQNHIVKKGPARLRKVLYQVMMSLVMHKIPKDDAVYRFIKKKEAEGKYKKVAKVAGMAKFLRIYYGRVMHLYRDLGLAA

SEQ ID NO: 325444 - protein, 353 aa, unidentified
MAACIETKRVDTHKHTHAAVAITGFGARVAELTIKVGCHGYRQLETWAASLGTIHAFGIEGTGSYGAGLARALRDGGYTVHEVSRPDRRLRRQHGKTDHLDVEGAARAVLSGQATGLHKASTGGVEMIRHLKVARDTAVKARTQAMLTLKAVIIVVPAGLREKLETITGTMALVRHLAALRPGAMTSPTASAKASLRALARRWLDLDTEIKAHDAHLEALVEHCAPTLVKAYGIKSGTAAEMLILVGDNSERIHSEGALAKLCGACPIPASSRKVTRYRLNRGGNRQANAALHRVVVVRMRGHQPTIDYVRRRIAEGKSKPEIMRCLKRFVVREIFGHLCHSSKPAPSDQNAG

SEQ ID NO: 325445 - protein, 317 aa, unidentified
MSKNSTVCAGIDTGKYKLDVAIDESADQLQVDNSPAGYRCLSAWLRQRRVERIGIEASGGYEQAVVSFLRADGFVVIVFQPVQVRAYAKFVLQHAKNDNIDAVLIARCTAAATDIHEPPDARLAPLAQRLTMIEQLTQDVAQVKTRREACWDQRIREFWKQEIDRFKRLLQAELKQLVAAIREHRDLSTRLDLIASVDGIGLRTAVAILVRMPEIGRVSREQAAAIAGLAPYDDDSGQRRGLRHIKGGRQRLRQSLYAATLPAAFYWNTQLKALYKRLIAAGKTHKLVLVACARKLLIFVNTVVARGTPWKSAPATT

SEQ ID NO: 325446 - protein, 410 aa, unidentified
MRLCVGDDWAEDHHDIEVMDETGQVLARKRLPEGVAGIGQLHELTGRFLPADGDAEVRVGIETGRGPWVAALIAAGYTVFPVNPLQASRYRGRHGVSGAKSDGGDAHMLADVVRTDAHQLRPAAGDSPVAEAVKVLARTHKTLIWQRSAVVLRLRAQLLEYFPAAVAAFEDLDAPDALELLGKAPEPARAAKLTRAQVSAVLKRAGRYKITERTDAILAALRSPQLSQPPALTAAYAATVRSLTAVIATLNEQVASLQGQVEAHFGQHPDAEIYRSQPGLGAITSARVLGEFGDDPDRYASAKARRNYAGTSPITRASGKRKIVAARFVRNDRLIDALMIQAFAALRASPGARAFYDAQRAKGLEHNDALRRLASRLVGILHGCLKTRTCYDEATAWGHRENIPQSEAAA

SEQ ID NO: 325447 - protein, 425 aa, unidentified
MHTKQYSKQMEKRSRIGEHTLVVGMDIGSEFNAACFMDKEGNVLGRFPKIYNSRKGFDYFRTMITKTQRKHRFTDVLIGMEPTGHYWRKIAFFAKEQGYEVRFVRTTAVKHQRELDESSSAKSDIRDAFTIGNIVREGKYIDTVIEDGVFRHLRTLAHSRERILRYIIGSTHGLQAVLNDYFPELTDLFWSMQAKGLWALLETYPFPEDVRHAGISAVTALLAKSTRRKSQARGKAERIYQAAQETAGLKAVGEADRARLTMYLEEIKRSDARRKILEQQIRELLKEVPLAEYILSLPGMGPVSCGIFLGELGNPEYFKSPRQIIKYAGYDPKENDSGSRVSRKIISKKGRWLLRKCLYFMVLRVVHGSSFFKEYYEHKKKGFVRPLAKTEALCAVILKLIRVLFAMMRDRRMFTEEIPGCREAA

SEQ ID NO: 325448 - protein, 351 aa, unidentified
MATIIGIDLGKFKGVARSYDTATQEAAYATIPTDPDALRGMLDRARPDLVAFEACTVSGRLADTCRELGLEFLVADTMTEAWSWRKVKRKTDRDDAKKLARMAALGELPSVHVPSPEARQYREIVAYRDKLIGRRTAIRDRIRALLQGQGLAAPVGHRAWTEAGRAAIAAWARPLADCGPRELWRGELALELAALEALIEQIRCVDAKLVGHADGDSRVQLLRTIPGVGRCTAEVVVAALDDAGRFATAGQVSAYAGLVPKQFQSGATDRLGRITRRGPGLLRKVLVEAAWLMLRYNAWAAKLVARISRGQVTRRKQALVAVARKLLVRCWAMLRDGRPWDPRLAGCPPSP

SEQ ID NO: 325449 - protein, 384 aa, unidentified
MKEYIAFDSHKHYTLVEREDVQTKRVVQQRIEHQRGTIRGYLRNCEPGTPVAVEATGNWYWIIDEIEQAGLAPRLVHPRKAKLMMGMINKTDKLDVHGLNVLQRNRTLPTVWIPPGEIRDLRELTRGRMVLTRQATRLKNRIQATLAKYGLGVRQSTDAFGKGGRKEMTSLVPQLPAHTRWMTDLQLEVLDTLTPRIERIEARLKQLLKRTPPMQRLESLPGVGTILAAVIAFEMGDVRRFAGAERFASYAGTTPRVHSSGDKTRYGQLRRDVNHYLKWAFIEAANCVALHHKTHEERHVSKLYASLRQRKGHSKAIGAVARHLAEAAYHVSRRDRIYRDPSLGQRRGRRARPPHEPTCIGSGSECDTPSEYIHAPHEGEEMIG

SEQ ID NO: 325450 - protein, 409 aa, unidentified
MQESRCIAGIDVHKKMLAVVVGRTHDRSLQLERAKFGTTTEHLELLSDWLEAHGVQEVVMESTGQYHKPVWLQLEGRFQLHLAQAHSNRGPKGRKRDFADAVRMVRRFLSDDLILSYVPGMEQRLWRRLTRTKTSIGDQRKRVQCQVEGLLEEMMIKLSSVISDLFGLSGLRILAAIAAGEQDPVKLAALGDDRLKVSKEALQAALKGKVQPAHRLLLGLYLEQVDLIDRQTAALEREISAAMRPHAAAVERLAEIPGLGIDSAQQIIAEIGPEAATFPSAGQVASWVGVCPGREESAGESHSNRSPKGNRPMRRLLNQVAWAAVRTNGSSFQDLFRRLLVRKGPKLSIWAVAHRLLRVIWKVLHKKVSYIEHGPRSAHPKVIEKRKRALVRQLRGLGYSVQITPIPAG

SEQ ID NO: 325451 - protein, 358 aa, unidentified
MAETAVTTQVVVLGVDTHQQTHHAAIVATDGRPLADREFPTTTAGYTQLWQWACGFGRVEDAAVESSASYGAGLTRMLTAEGVRVIEVNTPDLPRRYAHGKTDQLDAYAAAMAVITGRATAVAKDTRGAVESVRMLTVARASAVEEATRIGNQIRDLCTTAPVEYADQARQARTIAKRAAFIKGLPVPAEKADLSGPAAAFVRAARSLLDRHRLAQQQARSLARELTRLLSKLVPTLLSRPQIGPITAARLVITAGDNVERMGTEARFAKLVGAAPLPASSGKTSRHRLNRGGDRQANSALHMIAVGRMKSHAPTRAYVERRSAEHKTKKDILRCLKRYIAREVFRDLTTDLGALDKL

SEQ ID NO: 325452 - protein, 420 aa, unidentified
MRNAGIHANSLLEVRRMYNAVGIDVSKGKSTVAVLQPGGTVIRKPFDVSHTSQNLNELADYLSSLDGTTKIVMECTGRYHEPMVKALSEAGLFVSIVNPHLIKNFGNNSLRKVKSDPVDARKIARYTLDNWTELRQYSGMDNTRTQLKTLNSQFSFFMKQKVAAKANLIALLDNTYPGVNKLFDSPTREDGSEKWVDYAYSFWHADCVRKIGLKAFTERYKSFCKKHHYIFQQDKPEKLFNASKELVAVFPKEKTYKLLIQQSIQQLNLASEHVERLRREMNELASTLPEYSTVMGIYGVGKTYGPQLIAEIGDVSRFTHREALTAFAGVDPGVDESGQHKSKSNRASKVGSARLRKTLFQIMTTLLQNAPEADPVYRFLDKKRSQGKPYYVYMTAGANKFLRIYYGKVKECLRNLEQTE

SEQ ID NO: 325453 - protein, 368 aa, unidentified
MIVRSITYERSTLVNDEKYIGLDVHQATISVAVMDATGKVVMESILETKAATILEFFAGLRGTLWVTFEEGTWSVWLYDLLNPRVDKLVVCNPRKNALLKDGNKSDRIDARKLAELLRGNQLKPVYHGETGVRMLRELSRSYLTIVKDLSRVMNRLKAVYRSWAIPCAGRDVYYRRHRAQWLAKIREAGVRRRAERLYEQLDMLQHLRQQARRELLAEGRKHAITAKLRQIPYLGPIRSVLAVALIQTPHRFRTKRQLWAYSGLALETRTSADYRYVEGQLRRSKKLVSIRGLNKDHNHDLKGLFKGAATMASVRPGPFQDFYHAALAKGIKPTMARLTLARKMAAITLTLWKKGENFDAEKLKSQAA

SEQ ID NO: 325454 - protein, 498 aa, unidentified
MALRAAPGWMRIAVRMWPADVGTAWFCETVHKNDAGALVFGCPPVASRTRVSVSLLLRGSAGGMRVVIPVLSWEAGMQVVYARCAAVDVGKDVIAVAVRLPGDGPEGRATIKRTFRTFYGVLAEAARWLGSLGVTHVAMEATGIYSAPVYYALAGHGGFEKVLVCNAGHVKNVPGRKTDFCDAEWLVHLLECGLLAGSFIPPAEIKAARDVIRYRAKVSQSRTSEIQRLGNVLQDAGIKLDSVASSIATKSGRAMIEALIDGERRGPVLADLAKGAMRAKIADLSMALEGRFGDHHALMCRLHLDHIDHLDAMITALDAQVEAMMTPFHAARRLLTTVPGIARLSAAAVISEIGVTVTEFFPDGAHLASWAGLCPGNNESAGKRRSGKRRKGNPHLQSLLVECAWAAIRHPGYLKSLYHRHVMKWGGYRSPAAKKKAIVVVAHALAIIIWHILATGKPYEELGEDYFTRRLDPERETRRLIARLEALGHRVTLDDAAA

SEQ ID NO: 325455 - protein, 353 aa, unidentified
MSSMPDSVIEVVGGVDTHREFHVAAALDQLGRVLGTGSFPATRAGYRELLGWFQQYGSVTRVGVEGTGAWGAGLTRFLSDHRVEVVEVIRPNRQHRRRYGKSDTTDAVAAARAVLSGEANGAPRGGTGPVESLRLLKVARRSAMKHRTAVANQIHAVVVTVPAELRATLNGLGLTAVVDRAVRYRPRDPSCPHDAAKLALNKLASRYRYLTNEISDLDIHIEQLVSDTAPEGLLDLCGIGPQTAADLLITAGSHPDRIRSEQAFAALCGTSPVDASSGRNQHHRLNRGGDRQANAALYRIVIVRLRYHQPTRDYMQRRLKQGLQKRQIILCIKRYVAREIWKYLTTTPQPQPI

SEQ ID NO: 325456 - protein, 387 aa, unidentified
MPQVDDLSCSLVAFDQDATLIVVVEMSEASWLVAGMAPGVDRQPLKKLGPDPDALLRLVERWRDEAVKAGKMIERIALAFEAGRDGFWLARWLQARGIEVHVIHSTSVAVSREHRRAKTDRLDTAMLMRVFLGWLRGERGHCGMVAIPTLEDEDARRPSRERESLVGERTRIINRMKAILAWLGIRGFNPKLRKAPQRLDALRTPEDLPLPPNTVDELRRDMARLAMVCEQIKALEQARLAHLEQAPGTGPHAMVRLIANVIGVGIETADMLVQEVLSRNLRDRRAVARYAGLTGAPNESGSRRREKGLAKSGNARVRRGLIQLAWRFLRFQKDSALAQWYRVRTEGPAAARKKKMIVALARKLLIAFWRMVTVGEIPAGFALRQPA

SEQ ID NO: 325457 - protein, 401 aa, unidentified
METVRDNASRVKRFRALKATLRTDRSRLLVGLDIARAEHVVHLRHAHTRVVTPALTIPNTTRGFTQLWARIQQAQRSSGCREVVCGLEPTGTYHQAVATFLEAQGADVVLLSSSVAYWNRRTQDGTWDKHDRKDAANCADLLEQGKILFYSQPTGPLAELRHLVRCLRRARGELAACKARWRTTLRPALAPMGEPLPSRLWAELPAVLQAWERVAPGRPAVPKGRLPLGLATACADLGAQVTAVQARIVALEQALTPLAERVPAYALLRTIPGIGPTVGAILLAEIGDIAWFTTFSQLRKLAGLDIVRVQSGQFAGQARISKCGRGLLRWALYHAAMGLARTTGGRARLAALKAKRQGDRYAGFKAIVELAAKQLRVVWGVWRSGVPYDPTRAGGLRRQPR

SEQ ID NO: 325458 - protein, 328 aa, unidentified
MDNPLYYVGIDIAKAKFDVAIKLQNGKHKHKVFKNNPEGFQSLMQWLNTFGETFHCVMEATNIYHEALADFLFQQQITVSVINPKCSANFTKTDNLRSKTDKIDAKMLADYADEKRHKLPIYQPISPAQRELLRKNRQLDHLKKQLAQEKTRLTMLLDNDCIASTQQMIAFIKAQIKALEKTIKQCINADNTLKNNVKLLCTIPAIGFATAVQLIAHLGDGNRFKNAKAAATFAGLTPMIKSSGKSLNTVIGISKIGQSDIRKALFCPAMNFAFGSYKNSVYRSFVLRLLECGKPKMVIITALMRKLVTIAQAVLQKQTAFNLDTFMK

SEQ ID NO: 325459 - protein, 345 aa, unidentified
MEPMYYIGLDVHKRTICYCVKDSRGAIHSEGSLFATRFDLDRWMKTLPQPWSAAMEATMFTGWIYDHLKPHAAALKVAHPLMLRAIAAAKKKNDRIDAGKICDCLRCDFLPECYMASTAIRERRRTLRYRNLLVRQMVQMKIKISSLLMEAGVSYNKQRLHQAGYFRELLASNPDINDGLKSLLQLGRETVVRLQKTESAMVRSLERDSLLMDRVERLMTIPAVGPITALTWALEVGEVQRFSSIKKAISYCGLCGAEKSSGNRVQRTPLSKQRNKHLQTTLVEAAKMAPRYSPDLAMLYEKEKQKGNANRATLAVARKLVTYLLAVDRGQRNFQVVPASNCIAA

SEQ ID NO: 325460 - protein, 396 aa, unidentified
MIYVGIDVASNKHDVCIMSNNGEIFGRKFQILNSSDEYKKLLSKINEAKKFFKDSNVRIGIESTGVYSSTILNYFSKFDNIEVIFINPVLTNMFQLSQAVHYAKTDSIDAEGICIYLQDKRKKLFTYTPPSYHSLQLKSLYREMIKMNKLITQSKNRLTGLIHIVFPEFLTVFPKINGNAVYFLLKQYPTPNSYKGKHAETIHKLILKEGNGRINVNKIEKIISLAKSSIGSYNHSDVLLIKQLSSLISMLEEQKKELIEEMTNIIKEHFPNILSIPGIGGNTAAGIIGETGNISNFSNPNSLLAFAGLNPLVYESGKFKAQHTRISKKGSSYLRNALTLIARSIIKHDQTFSKYYLKKRDEGKSYSTAICHVRKKLVRVIYSILKNNIEYKSLNN

SEQ ID NO: 325461 - protein, 378 aa, unidentified
MRTIDTINSTMLVAIELSASSWLVAARVPGSDKPHLHRIDGGDTMGLLAAISSLRDRVARRLNVAIGVVCCFEAGRDGFWLHRLLTAHGLTNYVLDPTSILVHRRARRAKTDRLDAIGMLRVLAAYIRGDRQSCSMVRVPTPDEEDAKRIHRERESLVQERLRIENRIEALLFTQGIRKRPSLRSWKRDLSVLRTGDGREMPRHLRAELDRLNRRLVIILELIREVEAERDQVAEIKPQDQNCRKIAALRCIRGLGENFSAVLTREVFYRSFDNRRQIASYVGITPMPYQSGVMDRDRRISRAGNPRARTTMIQLAWLWLRYQPGSELAVWFRKRVGELTGRTRRIAIVAMARKLLIALWRYVETGVIPAGAEIRVEA

SEQ ID NO: 325462 - protein, 371 aa, unidentified
MQTSITYVAMDTHKKQHQVAWGHPETGAIQQFSVPNTPREIERMVKRLRKQTPGEIHVCYEAGICGFVLQRQLQRLGCVAKVIAPSLVLRKPGERIKTDRRDARKLLSQFAAGQLTAVVAPSVAQEADRELTRCRESAQMDLKRARQRLNSLLVRHGYIYADGNLWTGKHQQWLRGLSFDQPKLRTVFEEYSSEVEHCFQRVQSLDQQVQQLAQSEPYRAAVAALRCFRGIDTLTAITLLTEIFEFGRFDSPRALMAYLGVTPSEDSSGERRRPGAITKTGNRRVRRILTETGWHYRHPPHVSKALQARRQGQPAWAVDLADRAAKRLSRRYRHLIERGKAAPVAVMAVVRELIGFLWALLRQLPGSNPAA

SEQ ID NO: 325463 - protein, 375 aa, unidentified
MQTNYYVGMDLHSNNTYIGVLDEQERRVWSGKIANEFEAILNALKPFQDHVVGIVVESTFNWYWLVDGLMEQGYKLHLANPVAFQQYRGIKFTDDKHDAFFLARMLRLGILPEGYIYPKEERQVRDLLRKRLMLVRQRSQHILSFQSLVNRNLGFSLDSNQVKKLKSDDIADWFSSEHLFYSARTNLDAIDYLKKEIRDLEWIIQHSSVLHHKQELLSTVPGIGKALSKTIALETGDISRFKTVGDYASYCRCVPSNRISNGKSKGKNNSKNGNKYLSWAYVEAANFIKRFNPRARVFFDKKAKQRNQTVATKALAHKVARACFYILRDEVPFDELKMFCNPNPCDKGSSSEPERGLHRECIAPIGPSAAANLNE

SEQ ID NO: 325464 - protein, 408 aa, unidentified
MRVVGLDIHRVFAEAVMLDDGKVVRLGRIGMTRDHLGAFARTLTHDDHVVVEATGNAAAVVEVISPHVGRVVIANPRQVRMIAHAKIKTDTIDATVLAKLYASNFLPEVWVPDAKTQALRRQVTRRNQIVRQRVRLKTITQSILHAHLLPQCPHADLFGNRGRNWLLAQVLPPDERDAVERHLREYDRLGEDLKVVERELARDALADANVKRLMTIPGIDMVVALGLSAAIGPITRFKGPDQLVSYMGLNPSVYQSGEGRPQHGRITKQGRAHARTMLVEAAWQAVRGPGPLRAFYQRISARRGNHVAAVAVARKLAVILWHMLTKGEDYAGVRPALHAKKLRDLELRSGQPMRRGQRGSAYEYNLTRTRQEEKRRAEQSEVAYRRLTEGWTKRGRRAPMGAAKEERP

SEQ ID NO: 325465 - protein, 353 aa, unidentified
MKSDKYIGMDVHQETTVVAVVDCDGKVILETIVATEGSAIVRLLNGLSGPLHVTLEETTQAAWLYEVLRACAGDVIVCDPRRNGLLTEGSKGDKPDARKLAELRRAGLVRAVYHGHDGTRKLKELVRGYETLSIDTERTMVRIKAVFRGRGIRTPGTAVYQAKQREQWLGLLNEEGVRQRTTWLYAQLDHLRALRKEAKRTMLAESQQHRATALLKTIPQLGPIRSALIVATVDTPHRFRTKRQLWSYSGLGIVTHTSAEYEIQAERVVRRRKAVSTRGLNRNFNRRLKNVFVAAAIGGSHCEPYRKYLEGLTQKGMRAEMARLTLARKIAAVALSIWKKGETFDPKKLNWTT

SEQ ID NO: 325466 - protein, 409 aa, unidentified
MRYYLGVDWADQTHAVWVVEEDGTKIAARTVPHTAEGLSEWGRELDEWRAQGIELWAAIERREGRVVDFLLDHGVVYPVNPKALDRARDRFRQSGAKSDPFDARALADFLRTDHAHLQALQPSSEAAQELKLLTEHYHRQIRQQTRLVNQLTHTLKAYYPRALEIAELTTALTREFLQAYPTPQAVTALTPRQWQRWARAHHLSEARTRDLWAVLQSPQLPVPAHVVRAKARLMLTLVAQLMPVVAAVGHYREAIEDFFARMPAAQWARTLPIGNHGITAPTLWARLGDAPGRWESFRHLQAHAGTVPVTKRSGKQQRVVHFRFACDKALRYVVDQVAYLSRLSSVWARAYYDQQRARGHAHRHALRALGAKWLKIIFVMWHRQVPYDEQYHLATMTRQQLRQRQERIA

SEQ ID NO: 325467 - protein, 344 aa, unidentified
MNEVITIGVDLAKNVLQVHGVDAEGDVVIGRQLRRSRVLPFFKKLPPCLVGMEACATAHHWARQLIEFGHEVKLMPPHYVKPYVKRGKNDAADAAAICEAVTRPTMRFVSVKGAEQQSVLMLHQTRELLVRQRTMLINAIRSHMAELGIVAPVGVPQVKKLLRIIADTDDARLPSLARTCLESLARQFLSLHDEIHATEKRIHAWHRMSEVSRRLETIPGVGPIIASALAASITDPGVFKNGRELAAWIGLVPRQNSTGGKQRLGKISKQGDQYLRWLLVAGAMSVIMHAKRRGTTNLPWLADIIARKPAKVAAVARANKTARIVWALLRHGGTYQKPVAVQAV

SEQ ID NO: 325468 - protein, 404 aa, unidentified
MNNVAGIDVSKGKSTVSVLRPFGEVVAKPFSVGHTGSELKELADYLKSLDGETRVVMEHTGRYYEPVARFLHEEGIFVSTVNPKLIKDYGNNTLRKVKTDKADARKIARYGLDNWAELRQHTPMDTIRMQLKTLNRQQGLYSKTKTMMKNNLIALLDQTYPEVNSLFDSPVREDGSQKWVDFATAFWHVDCVRSMSPAAFTERYRKWCKRHGYNFSQGKAIEIHTDAQDLIAMLPKDALTKTMIRQAIDALNAVSVSLERLKAEMRTLAAQLPEYPVVMAMRGVGDSLGPQLMAELGDVTRFTHRNAITAFAGVDPGADQSGNHDAKSNRTSKSGPPELRKALFLVMDCLLKTQPQDDPVYRFMDKKRAEGKPYLVYMTAGTNKFLRIYYGRVKEYLASLDNAD

SEQ ID NO: 325469 - protein, 339 aa, unidentified
MNLYAGLDLHSSNTFIGVLDPQFNRIFKKRVSNDLDLILKSLEPFRDRLKGIVVESTYNWYWLVDGLMDAGYACVHLANPCAIKQYEGLKHSDDQHDAFFLAQLLILGILPQGYIYPKETRPVRDLVRKRLFLVQQKTAHILSLQSLLARCCGQRVSSNQLRKVTGHDLRQWLKEEHLVLSGQANLDNIVFLKQQIGRLEEAIQKQVKLSDAFNCLLTVPGIGKILAMTIMLEVGDIRRFATVGNFASYCRCVSTQRLSDGKSKGSGNRKNGNRYLSWAFTEAAQMARRFNSRFRSYFDRKAAQTNSILATRALSNKLARVCYYIMRDQVEFREESVSH

SEQ ID NO: 325470 - protein, 402 aa, unidentified
MRHIGLDIHRDFCEVAIAEDGKVRSAGRIRTTVEELELFAQSLGSDDHVGLETTGNALTIARLLEPFVARVVVADTRNLRAITHAKVKSDPVDARMLARLLASDMLPEVWRCDEQTRVLRRRVSRRTQLVRQRTRAKNQVHAALIRNVKGKPPMTDVFGRKGRGWLAELELPEDERHTVDGCLREIDFVSGEIDTLDRALAQHAVSSPDIRRLMTIPGISRLTAATLMAAIGDVRRFPSPRHLVGYLGLDPRVRQSGESAARHGHISKQGDAAARHVLVEAAHSVERAPGPLRAFKRRVQARRGFQIAMVAVARKLPTIAWHLLTKQEDYAYARPALTHRKLRQAELAAGAPKRSNPRGSRGPATPDRPAQWHHEREVAEQAERAYERLVKDWASVGRRSEG

SEQ ID NO: 325471 - protein, 330 aa, unidentified
MQAVTTIGLDIAKSVFQVHGIDAEGNVLIRRQLKRRYVLAFFEKLQPCLVGIEACASSHHWSRQLKALGHTVRLMPPAYVKPYVKRQKNDAADAEAICEAVTRANMRFVETKTPEQQSCLMLHRTRQLFIRQQTSVINAIRAHLAEFGIVAPVGRKGVEQLLAIVADTSDQRVPEVARACLAALGTQLRMLKAQILEFDRRILAWHRSNETSRRLDAIPGIGPALATALVASVADPKAFRSGRNFSAWLGLVPKQHSRRGQEQARQHQQARRSLSAQPVHRRGSRRDPLCQDPWHPTSALADSIIGQAADQGRRHRPRQQDRQNGLGRDG

SEQ ID NO: 325472 - protein, 318 aa, unidentified
MNSKINQKEINIGVDTGKHQLDIYIRPLDIFFSVMNDEKGIKESINIIKQHKPTRIIIEATGRLEHAFIFACSKHKLPFVVANPVHVRKFAGAIGQLAKTDPLDAKLIAHYGEAIKPALSELKPESMRLMSDLLARRRQLMTMQTMEKNRLQIMPNEITGFIKPILTAIKNQIKKTDLKLIKLIESCDEYKIKNDIIQSMPGIGNVVAFNLLGNMPELGYITNKQAAALVGVAPINKESGSYTGKSKIRGGRYQVRTAMFMAMMSAMQCNPVFKEMYHRLLAKGKPKKTAIIACVRKMIVILNSMVRDGVYWDPEMGK

SEQ ID NO: 325473 - protein, 370 aa, unidentified
MLDTTTFVGLDVHARSIKAVSLDVMTGEVRAATFGYDAGAVAEWVRSVDPRARCVYESGVTGFDLQKRLSGLGVDCVVGAVSKMIKPSADRRRKNDRNDAEFLARMLSVGNVVEVWVPDDEREAARDLTRALEDARDDLSRSKQRLSKFLLRHGFVFDERTPTGRRKGNWTRAHWSWIESIRFAEGADEEVLAYYVDAVRRAAEEKARLERLVEGEARKPRWRRRVDSLRCLKGVDTASAADLVFEAGEFSRFRNARSFAAWVGLTPSEHSSGESDRRGAITKAGNKHLRKTLVEAAWHYLTCSGRPKDLAKGQAPDRGARRHAAKGVRRLVERREALLARGVHGNKANVATARELACWVWAVGLMAEEA

SEQ ID NO: 325474 - protein, 343 aa, unidentified
MQTMTTIGLDIAKSVFQVHGVDAGGQVIVRRQLKRRYVLTFFQKLSPCLVGIEACGSAHHWSRELQALGHTVRLMPPAYVKPYVKRQKNDATDAEAICEAVTRVNMRFVPTKTAEQQSGLVLHRARHLFVRQQTSVINAIRAHLAEFGIVAPVGRHGVEELLNVVADPNDKRVPEIARACLSAFGAQLRRIKEQVLEFDRLIRAWHRSNELSMRLDEAPGVGPVLATALVAAVADPKSFRSGRNFSAWIGLVPKQHSSGGKNRLGNISKQGDRYLRGLFVAGALAVIRYAKIHGTTHRPWLTALLARRPTKVAAIALANKIARMVWAMMARGERYKEPFALAR

SEQ ID NO: 325475 - protein, 455 aa, unidentified
MYLPDWKWIPIRKGLLLMSNKVIFNLDELFISVGIDVGADFSWMSIALPTQQFVGKPYKILHNSIDSLTTAVSKIKEAEELYSLESRIFLESTGIYHYPLFCYLRDKGFNCSVINPIITKNSTNINIRKVHNDRFDSKKAALVGLKPDLKVSLMPSDLALNCRNLCREYYDLMDNRSAYVNKLQGELRMAFPQYLGIFSKVTINTSLTLLETYTSPSAFLKADKQEIIDIIKSTARFGLTYAQNKYNAIIQAATDANQFGYIIDSNIKRIRLYISFIRKYDEEINSILESLHELVDANEDSDFVKQIHLIETFKGAGFLSAVSIMGEIGDFSAFSKPKQLFAYFGLDPAVKQSGKFEGTKVQMSKRGSAIARRVIHTLTLQSISISRNREAKNPVLREYYLKKCDSKPKLVAMGAVSHKVCNMIFAILRDNKPFKIIAPQEHIKQYNSAKCDIAA

SEQ ID NO: 325476 - protein, 323 aa, unidentified
MSEHSIVCAGIDTGKHKLDVALAGSPAQLQIGNAADGHAALSSWLKRHQVKRVGIEASGGYEQQVVAHLRRDGFVVVVFQPAQVRAYAMFLLQRAKNDKIDAALIAACTAATKKIHAPPDPRLAPLAERLTLIDQLTEQVAGFKNFRESSRDPRIRQLWEQKIADFNRLLRAERKALVAAIRQHADLAERLDLIESVDGVGLKTAVAILVRMPEIGRLTREQAASLSGLAPFDDDSGKHQGIRHIAGGRQRLRGSLYNAALPAAFKWNAQLMALYQRLIAAGKPHKVALIACARKLLIFINTVVERGTPWVRTAPASVALKAA

SEQ ID NO: 325477 - protein, 371 aa, unidentified
MNDLIRIGMDTSKSVFVLHGVDAAEQPVLRRKLRRRQVVEFFDKLPALKVGIEACGGAHHWARELGALGHQVLLLPPQRVKPYVARNKNDAADADAICEAMSRPRMRFVPMKTTEQQAALMLVGVRDQLVARRTELSNSIRGYAAEFGLVAAKGLDKIEPLLERLAMDRTVPALAQELFATLGEDYAQVKLKLRTIEAKLMAWHRQNELSRRLAEIPGIGPIGASLLAMKVPDPKAFRCGRDFAAWIGLTPKDHSTAGKTRLGVITRAGDEALRSVLVVGATSVIKQARGQKGHPSPWLVALLKRKPPKLAAVALANKTARIAWKLMVSGQRYNPHLAAKTRFVPPTGSVAPCARRQGRFAPPAAVACGQP

SEQ ID NO: 325478 - protein, 398 aa, unidentified
MKEDIAKAISPQTAAALNDAKGWSRYGGFIGLDVHKDTIAVAIAMPGRDEPVYRGEIAHEPKALKKWLDRLNDEFGGAVLLFCYEAGPCGYGLYRQLTEAGHECHVVAPSLIPKKPGERIKTDRRDALKLARLLRAGDLTAVWVPDTEQEAMRDLTRARDDMKSQERKARQQLNAFVLRHGHHWPRGKTRWTQAHHNWLESIRFEQPWLQIVLQEYIDAAKAASRRVADLTDQLMQALPGWSLAPVVDSLAALRGIDKLAATVLLAELGDISRFDSPKQLMAYLGLVPSEHSSGPRRRQGAITLTGNGHARRMLVESAWSYRFPARQTMHLKRKAQHASEQAKAIAWRAQKRLCGRYRQLSQAGKTTKQTTVAVARELVGFIWDSVRHEMPKLQAGAK

SEQ ID NO: 325479 - protein, 348 aa, unidentified
METIVRIGLDTSKSVFQLHGVDGMEQPVLRRKLRRSQVLEFFRRLPPAFVAMEACGASHYWARELRSLGHEVAMIPPQYIKPYVQRGKSDAADAEAICEAASRPKLRKNFVPIKSPEQQGAQMLTRVRSQFIGRRTQLANSIRGYAAEFGFTAPKGLSRLHQLLIDIRADETVPDLALELVEALAAELARVDDQIAKLDKKLMHLHRSSEMSRRLAAIPGIGPIGATLLSIKVVDAGGFKSARNFAAWLGLTPKNHSTAGKNRLGVITRAGDGMLRTVLVAGATAVIADVRRRESRSWPWLKDMIARKPPKLVAIALANKLARIAWKLMVSGEHYRPAGSVIPTTTPV

SEQ ID NO: 325480 - protein, 425 aa, unidentified
MNYKQNEKINQVKESTLVVGIDIGSTTQYARAFDWRGIELGKVFPFSNSREGFESFKAWMQHLQDKYKKLDAIVGIEPTGHYWFDLGAYLEDEGILLVMVNPYAVKQTKELDDNSQSKNDRKDPKVIAKLVTEGRYSAPYTPDGVYADLRIMVANRKRLIREMTQIKNRFARWFAIYFPEYTDVFGDYEAQSSMLLLKKACTPEAIVELRAEKINQIWRDAKLRAVGMKRATTLCETAKRSIGLKKGSSAARYEMKLLLEDYEYKKAQLDAVMEEIEKLCRKIPESEQMLAIKGIGVITVAGFLAEVGDVRRFESPRQIQKLAGLSLRENSSGKHKGQTTISKSGRSKLRAVLFNAAIPLITKKPEFKSLHEYYTTRANNPLKKKQSVIAISCKLIRVFYAILANGVTYDAQKMLSDIHRQPQAA

SEQ ID NO: 325481 - protein, 401 aa, unidentified
MAPTAGIDWASEAHEVCVSDEGQVVERFSAPHDETGIAGLAARLVRAEVARVAIERPDGILVERLPETGIEVLAIHPNQVKAARARFAVAHGRSDRFDAYVLAELARTDAHRFRAPVPDGDETKALKALTRAREDLVGVRVELANQLRARLEAFWPGALIFREVDSPISLAFLERYPGPAQAEGLGTKRMAAFLGRNSYSGRTDPAELVARMKAAPTGTAGAAEVGARRAVVLGLVAALRPVVAEIAELTARIRGAFVAHPDAEIFRPLFRDPKTTICPATLIAEPGDARGRYPTEAAMAADAGMSPVALESGKLRVATFRRACDKRLRVAVATLADSTRHRHPWAEEVYRKARTRGQDHPHAIRTLGRAWIRVLWRCRRDRVPYDPARHGNFNRIQPVGG

SEQ ID NO: 325482 - protein, 393 aa, unidentified
MICVGIDVAKDKHDCFILSSEGEILADVFTIPNNAEGFNRLLQTIRRCTRPEDKIKVGLEATGHYSYNILGFLLDKGLPTYVINPLHTNLYRKSLSLRKTKTDRIDARTIAAMLMSDVDLKSYTDTAYHNEELKSLTRYRFDKVRERAKLKQSVSRLVTILFPELEKLVPSLHLASVYALLSEFPSAKQVAGAHLTHLKAVLSDASKGRYGRDMAATLRDAARRSVGSVMPAKSLELKHTIRLIRELDAEIEDIETAIQIIMDEMQSPITTIPGMGVRMGAVILAEIGDFSRFDSPDKILAYAGMSPSTYQSGQLSLSGAYSHMEKRGSRYLRYALYNATKYVCHWDPTFAAYLAKKRAEGKHYNVALSHAAKKLVRLIYAMEKSQQSYRNAA

SEQ ID NO: 325483 - protein, 401 aa, unidentified
MQDTQQRDAVDVFVGVDVGKGHHHAVALDRNGKRLYNKALPNDEAKLRALIAELKTHGRLLFVVDQPSTIGALPVAVARAEGVLVAYLPGLAMRRIADLHAGEAKTDARDAAIIAEAARSMPHTLRSLRLADEQLAELTMLCGFDDDLAAQVTQTSNRIRGLLTQIHPALERVLGPRLDHPAVLDLLERYPSPAALAGTGEKTLANRLTKLAPRMGKGLAAEIVQALSEQAVTVPGTQAATIVMPRLAQQLAALRQQRDEVAVEVERLVLAHPLWPVLTSMPGVGVRTAARLLTEVAHKAFASAAHLAAYAGLAPVTRRSGSSIRGEHPSRRGNKVLKRALFLSAFAALRDPVSRAYYSRKIQQGKRHNQALIALARRRCDVLFAMLRDGTIYQPKSAPNA

SEQ ID NO: 325484 - protein, 352 aa, unidentified
MKNLFIGVDFSKEKVDVAIIFADGLTETAARVFNEFKTTVSGYKQLVKWVEQNSYGIDSSLWLFCGENTGDYSKGLCNFLYGKGYDMWLENAKSIKDASGLRRLKSDRADASMIAEYAMRNYDKAIMYEPLSESLAQLRELFLYRQMVVRHRCSFQVRRGEKRLTMEKSPIKTMISQSGRHIVSELNKEVEKIDRRIAELIKSDEELTEVFTIVTSVPGIGTQNAVCLMVYTDNFRRFNYDSRKIACYYGIAPFGKDSGTSVHSDPHVHYMANRQIKAMLTQAALAAVRFNPVMARYYMRLVERGKKKQVALNNVKNKLIHLVTAMVRNRQLFSPEYKINSSLKFEYMAMRP

SEQ ID NO: 325485 - protein, 346 aa, unidentified
MKILALDLSKFKSVGCVYEAESGAHRYRRVNTTPQALHDLLVELEPDRVVLEVSSVSGWISDLVRALEIELQVVNTNGEAWRWRNVKQKHDQADALKLARLSAMNQLELVHVPAPDIRQWRAVIKYRQHLVGRRTDIKNHVRELLVREGVILPRGRKCWSQEGCAALEASARSWEEVGISELWRGELQSELQQLQVIQERIREVEAKLETLAQADDRVGLLQTIPGVGPRLAEAMVALIDDPHRFRRARDVGAYLGLVPRQYQSGEMNRLCRITKRGSKLLRSLLVEVSWVSLRYNPWLRSLYERMNRGSKTRKKIAIVAVARHLAIYCWAMLRDGTSWRPPCTNQ

SEQ ID NO: 325486 - protein, 386 aa, unidentified
MKKHTKNETRKCQRETKKVAELETAGWSEREANTLVIGIDLGDRSSSYCVRTLGQQIVREATVATTATAILKEFQGLRRQRIVIETGTHSRWVAHLLEMMGHEVMVANARKLKLISENNQKSDKVDARLLSQLGCMNVEWLHPVYVRSQEAHCELLLARSREALVETRTGLINHVRGVVKSFGSRLAKCTSESFVEVARVGLPDGLKPALSGVLAALEEMDEQIYDYDCRIEHLCNTKYKEAAQCLLQVNGVGPVTTVTYLLTIENKDRFEQSRDVGPYLGLVPKSRQSGQRDPQLGITKAGDEMLRKLLVNCAHHMLGAKGQDSDLRRWGLELVRAVERKGKQGARKLAAAAVARKLAVLLHALWVSGAVYEPLRNRGAQQTPAA

SEQ ID NO: 325487 - protein, 390 aa, unidentified
MQTEADRPEAPTAIRNHLDAIFVSLELSRSTWLITSLSPGGGEKVSKKSVRGGDVTGLLERFAQLRKKAQARTGRNFPIIVIQEAGLDGFWIHRVLQNEGIESHVVDPASIAISRRRRRAKTDGIDGEALLRTLLAYKRGEPRVCAMVKVPTAEEEDRRRLCRERKVLTNERVLHVNRIKGLLFSQGVSGYEPLRRDRRQRLDELRTGDGRPLQKHLKAQISRELDRLELLLEQIKAVETERDALLAAQQVAVPAPAAMLLDFKGIGPEFAAALWLEGLFRHFDNRRQIASYAGLAPTPWQSGSVDREQGVSKARNPRLRTTLIQLAWLWLRHQPQSALALWFEQRVRRNGGRLKKTTIVALARKLLVALWRYVTAGVVIEGAVMKTVGQ

SEQ ID NO: 325488 - protein, 411 aa, unidentified
MSIDQFAAHVGLDWADKKHDVCIQFKNGERRFEVIQHTPESLDTWLNTLHKQVNGRIAVALELKKGPIVYALQKYPFITVFPVHALSLARYRQAFSPSGAKDDPQDAELALDLMLRYPEKIKPIEPSTGELRLLQQLVEQRRLLVEDKRRFVNRLINTLKQYYPQPLEWFSHRDSGLFLDLIARWPSLQLLKRARANTIRRFLNSKGGPAVKHTESRIEHIRNALPLTTDQYVIEANMLLAVTQVKQIKLVVESIKVYDVRIDELFKTLPDADIFKSLPGIGPCMGPRMLAALGDNRNRFNSAEEIQNYAGIAPVTERSGQKSWVHWRWQCSKFVRQTFVEWAAKTVHTSYWAGIYYQGQRSKGKSHQSAVRALAFKWIRIIYRCWKTKCCYDEAKYLKALKERDSPLLKT

SEQ ID NO: 325489 - protein, 281 aa, unidentified
MRMLAIDLAKQSFHVHGISADGEIISRRVGRQGLPSLIVKLAPAVIAMEACATAHYWGRLFMAAGHEVRLINPHFVKPFVRGSKNDAVDAEAIFDAASRPTMRFVPVKTEEQQDLQSRHRVRDRLVVQRTSLINHLRGLLAEYGLIYPKGAALLLSRVRGGLAEARVSAMARETFEALLDELESLEGRIERLDDRLIAICREDETCRRLMTLPGVGPIVATALAASIGDPRQFQSGREMAAWIGLVPRQYSTGGKSRLGGSGDARTTICVDNSCMAQERSR

SEQ ID NO: 325490 - protein, 343 aa, unidentified
MSEVITIGIDLAKNVFQVHGVDAEGNVIIRRQLRRGQMLPFFKKQPPCLVGMEACATSHHWARQLLALGHEVKLMPPRYVKPYVKRNKNDMADAEAICEAVTRPTMRFVEIKTPEQQSVLMLHRTRQLFVRQRTTIINALRAHLAEFGIVAGVGRNGLGRLLKIIENGQDDRVPPGARECLLALHDQLNLVKSQILDADRRILAWHKSSELSQRLDDIPGVGPLIATALVASVPDPHAFKSGRDLAAWIGLTPRQNSTGGKERLGHISKAGNRYLRTLLVVGALSVIRRAQQVGYTRHPWLTKLLQRRSAKIAAIALANKIARTAWAMMAHGTYYQEPEAQAV

SEQ ID NO: 325491 - protein, 332 aa, unidentified
MEVLHPHCAGLDIHKDTVVACVRHMVDGAVKREVRTFKTTTKDLMALSEWLSAEGCTDVAMEATGIYWKPVWHILADGDFKPMLANAAHVKNVPGRKTDVNDATWLADLMAHGLIRGSFVPDEPTQEMRNFLRTRKQFVRERTSHVQRIQKTLEDANIKLDSVITDIMGLSGRRMIEALIAGETDPFALAGLAHRRIKASQAELEAALRGRVSDHHRFMLRLLLQHIDAIDAAIGQIDQEVDAHVEPFRTAIQILSSIPGISDLSAEVIVSEIGIDMNRFPTEGHLISWAGLCPRNDESPTGQARGLKAHGKRRSTRMRKSLPPRRRGAPPG

SEQ ID NO: 325492 - protein, 344 aa, unidentified
MNQKFSFVGIDVAKTQLDVAVRPTDQQWQVTYTEKGIQELVEQITELHPTLVLLEASGGLELPMVAALAVANLPVVVVNPRQVRDFARATGKLAKTDALDAQVLAHFAEAIRPPPRSLPDTETQSLTALVARRNQVMSMLVAEKNRLRTSRPPVSERIQLHIDWLEQELDEIDRDLKEMLRNSPVWREKENLLRTVPGVGPQLAISILAYLPELGTLNRKRVAALVGVAPFNRDSGALRGKRAVWGGRSRIRAALYMAALVASRHNPVISAFYQRLLAAGKAKKVALTACMRKLLVILNAMLKHHSSWQSLNPQLLGPCSLLLRQLLSSQVCGIINACSTIHPM

SEQ ID NO: 325493 - protein, 316 aa, unidentified
MNETIVEKFVGIDVSKSTLDVCIEPDEKTLHVAYDEAGIKQIVDRLKEVSPTLIVIEATGGLEIRIATELASKGLQVAVINPRQARDFAKATGRLAKTDQVDAAMLAAFAKAIRPQARPLRDEDTCALNDMVSRRRQLIDMRVQETLRLGTAASKPLQKNLSKHIAWLDKQIAEIDADLTKRLRNSDVWRIKDDLLRGIPGVGAVTTLTVLAKCPELGTLNRREIAALTGVAPLANDSGKHRGKRFIWGGRADVRAVLYMAAVSAIRCNEPIKAFSERLKKAGKPPKVVIVACMRKLLTIMNSMLKKNEPWSPNFA

SEQ ID NO: 325494 - protein, 335 aa, unidentified
MNKITTVGVDLAKSVFSVHGVDADGRTVLRKTVRRDKLMELIVTLPPCLIGMEACGGAHEWARQFQHHGHRIGIMMARFVAPYRKSSKNDGNDAEAICEAVGRPNMRFVPVKSAEQQAILSLHRVRQGYVEQRTATINRIRGLLAEFGIVLPQRAAEVRRAAVVLAEQLPLLAREAIADLRSHLSYLDGRIDHYEQQLTAMNRHCAPARRIMTMPGVGPLTASAITASVASGHEFSNGRQFAAWLGLVPRQHSTGGKSRLGRITKRGDAYLRTLLMLGARAVLQNAGRKSDRLSRWAMALRERRGYHRAVIAIAAKNARIIWALLAKERTFVPVN

SEQ ID NO: 325495 - protein, 314 aa, unidentified
MSPRTKSTLVCWSLGAVWKSAFPNSRPGHQDILSWLERHASGLTVHAGLESTGPYSRGWCELLYAAGHIVSLLNPARPKAYAQACGQRNKTDRVDARLLAQFVAERKPLRWSPPEPARDELKELTRRREDLLALIQAEKNRLESARSGRVRASLHRSIEALKQELKSVESDLAELMAAHARLKAQQKLLRSIKGIGPVSSRKLLAELPEVNRFGSARQAAAYAGLCPRRHESGKSVRKRGRLSKVGNADLRKTLYMPAMVAIKHNPLFRDFAQRLRAKGKCEKVIIGAVMRKLLHVAFGVLKHQKPFDPAYATT

SEQ ID NO: 325496 - protein, 341 aa, unidentified
MLEVSTIGLDLAKNIFQAHGSDASGAVLFRKKLRRDHVLRFLAAQPACRVAMEACAGGHYWAREIAKLGHDVRLIAPGYVKPFVKRQKNDAADAEAICEAAQRPTMRFVAVKSEDQQAAAMVFRVRDLVVRQRTQTINAIRGHLAEFGLVAAQGLFHVAKLIAAIEDNGSAIPEAARPILSLLVAQLRSLDERVAGLDREIAKRAREDEEARRLMTIPGIGPITATAVAALAPSAQTFKRGRDFAAWLGLTPLQRSSGGKQKLGETSRMGERTLRRLLIIGASATVRWAMRRGAATDPWLIRMLNRKPPMLVIIALANKTARIVWALMAKGETYRAPALAG

SEQ ID NO: 325497 - protein, 391 aa, unidentified
MTILVGIDVAKDKHDCFFMNSEGEVLAKPFTIFNNKEGFDFLYEKIQSVSSSDKIKVGLEATGHYSYNIIGFLLNKGLATFILNPLHTNLYRKSLSLRKTKTDKIDSKTIAMMLLSDVSLKSYSDISYHNEDLKSLTRYRFSKVEERAKLKTSLSRLAQILFPELEKLVPTLHMTSIYQLLEEFPSASAIASAHLTRLTNLLSKASKCHYNRETAIKIREAAKNSIGSNMPAKSLELKHTIKLIRALTIDIDEIEAEISKMMDKIASPITTIPGIGRNMGAMIISEIGDFSRFSSPDKILAYAGFSPSIYQSGKLDNCYAHMEKRGSRYLRYALFHAAKLVCHWDKTFADYLAKKRAEGKHYYVAISHAVKKLVRVIFHIEKTKQAFLKAS

SEQ ID NO: 325498 - protein, 401 aa, unidentified
MHGDYQVFLGLDVGKDGHHAVALNRDGKRLHDATLVNTEAKLRQVFDKLARYGQVLVVVDQPASIGALPVAVARACGHQVAYLPGLAMRRIADLHPGSAKTDARDAYVIADAARTLPHTLRRVDVGDEALAELEVLVGFDDDLAGEATRMTNRVRGLLTQIHPALERALGKNIQHKAVLELLSRCGGPAGLRKAGRRKLTSIANKNAPRMGERLVEGVMAALDEQTVVVPGTAAAETILPRLADSLRDVLQQRDQVADEVDRMLDTHPLAEVLTSMPGIGVRTAARILLEVGDGSSFASPGHLAAYAGLAPVTRRSGSSIRGEHPARGGNKQLKRAFFLAAFAALADPVNRAYYDRKRAQGKKHNAALICLARRRCDVLFAMLRDKIPYQPRPLPALASAA

SEQ ID NO: 325499 - protein, 357 aa, unidentified
MKTIRQCVGIDCSKDTLDTAINFLDENFQSKVYATEIFENNDKVFKCLMKWMRKLCLKDMPYQVVVEATGVYHEQLTYALVSNGFSISIVLPNKIRNYCRSTDIRTVTDKISAKQIAEFGLVKKLDNWVIPDKIYTQLKALSRERIQLLDEKTAASNQLHAYKHAALISSSTAHRSAKRIRLIEQQIKQIEDEMKQLVNEHPTLKEKIDKICSVKGLGFITVVSIIAETNGFNLTRNQRQVVCYSGYDVIVKESGTSVKSKARISHKGNKYIRRALHFPAITAVKYNAPLENLFNRLYDKQQIKMKGYVAVQRKLLILIYTLWNKNEVYNPEYVHSSIKNLEQPKEAALTELDHVRS

SEQ ID NO: 325500 - protein, 321 aa, unidentified
MNKYKEIYGIDISKDVFDVYGSQSGHNQFKNDSKGFVSFKKHLPKDVLVVMEATGYYHYRLAQFLYKSGVSVSVVNPLSVKRFIQMKLAKVKTDKSDAKAISEYGEMNDVPLYTALTDVQSECLQLFRLLDSYIKHRTATKNKLKGEEVLGIPSKFVYRSLNRNLKHLNKEVLELETRLLELVKQDQQHQLTLLKSIPGLGVKTALFLIVVTDGFKKFENASQLCSYVGITPTIRRSGSSVRGRSRISKVGNKKLRNLLFLCSFSACKHNKACREIYERLVAKGKSKKLALIAVANKLLKQAFAIAKSGRPYDENFVSRLA

SEQ ID NO: 325501 - protein, 404 aa, unidentified
MKGPIVSIDVSKGKSDYQAFKNLNVKYTGSRSIKHTKEGFDEIVNLVKEMEKKLETEVCVVYEATGVYHRVLKKVLEDNNIKQFIINPLLSAKTRKNDSLRSPKTDKLDPKSIAKTYYSHSLHNSHKPETIYHELRELSRYYEDILVHIRKDKVAFIAQLDIVFPGYDALYDDLYGPVALAVIEKYPHPEMLQKKKINTVSKVIQNKTCHRQATSDTMADKAIEYSKTIYSGCDKDDIEVLILQRLIKKLKEDMAEAERTIGEMIKLAQELPDFSIIKSIPGIGDNLAARIIAELGDMTRFKKKNELVAFAGLDPRISESGQDDGDHMHITKKGNKRLRCLLYLAVTCSIRLKRDDNSIKDFYIKKKQQSNPMCSKAAKTACASKLVRIIYSMCKTGELYQYNK

SEQ ID NO: 325502 - protein, 375 aa, unidentified
MKKVRFVGLDVHADTVAVAVAEPTGEVRSLGQIPNRPESVRKLVKKLGSANSLRVCYEAGPTGYVIYWQLTTLGVHCDVVAPTLVPTKAGDRVKTDRRDAEKLARCYRAGDLTAVWVPDAVHEALRDLVRAREAAKKDQLRARHRVGKFLLRHGRRPPTGMRSWTQRHLAWIKTAVHFEQPAQEATLLDYVHEVEHVAGRIERLERAIDEAVQTAPTRMRAVIDALQALRGIALVSAVTIVAEVGELSRFARAPQVMGYSGLGAREDSSGGRTRRGGITKTGNAHLRRIVIEAAWAYRHRPSVGGALRKRQAALSDDVKAIAWKAQHRLHGRYRKLLGRGKCQQQVVTAVGRELLGFIWAIGVTVEHRTSQSIAA

SEQ ID NO: 325503 - protein, 331 aa, unidentified
MKKKDVIGIDVSKLTIDAYLKLAQAHAVFGNDTKGFRQLVKWIRKHTDCKTEELLICFETTGLYSLQLASFLSQSNIDFVMENPIQIKRSMGLVRGKDDHVDSKRIAEYAYMRKEKLKLTQLPSEELIKMQNLLAIRERMIRQKAGYQASLGEYKRVLVQQQQKDFFLLLNNMINALKKQIRKAEETLIEIIHSSSKLLNIYTLLTSIKGIGVILAANIMVTTICFTKFNDSRKYACYCGTAPFKYSSGTSINGRTKVSQMANKKMKALFNLAALSAIQHDPELKLYFDNRMANGANGMSTINIIRNKIIHRVFAVVKRGTPYVVMAKYAA

SEQ ID NO: 325504 - protein, 366 aa, unidentified
MKKISTVQVFGNELFKEQKLTIGVDLGDRWSCYCVLDEAGKIILEQKVSTTPEAMKETFERIPRSLMALETGTHSPWVSRLLKELGHEVLVAHAQKVELISKSNRKDDRHDARTLARLARIDPELLGPVRHRSAKAQIHLTVIRARAELVSARTGLVNAARGLTKSYGERLPKCGTKQVSRELAAELSVELREVLEPLLKEIESLNERIKEYDARMEKIARESYPHIELLKQVKGVGTQIALTYVLTLDDPHRFRRSRDAGCFLGLCPGRRDSGQSQPQMHISKEGDRYLRTMLVQGAHYILGPFGEDSDLRRWGLRLAERGGKNAKKRAVVAVARKLAVLLHRLWVSAEVYEPLRNSHKAMRAVA

SEQ ID NO: 325505 - protein, 447 aa, unidentified
MKRRSKPKKNMQEHLKQVNLYAAGIDIGSKSHFVAVSPNLDDTPVREFSCFTIDLEHMANWLKKIGIKTIAMESTGVYWIPAYEILESRGFEVFLVNPRHLKNVPGRKTDVIDCQWLQQLHSFGLLQGAFRPSAEICEFRAYMRQRTMLVESSSSHIQHMQKALRQMNLLLDNVVSDITGKTGMKIIRSILHGERDPKTLAKNRDRNCKNSEEVIAKSLKGHYKKEHLFALQQAVDLYDFYQQQINKCEQVIVNLLGEMENPEDIHDSSPKGKNLLKEDLQFNARESLLSITGVDITKIDGIKETTALKIISEIGTDMSAWPTVKNFTSWLGLSPGNKISGGKILSSKTKTSANRAASAFRIAAYSLSKSKSALGAFYRRKRSQLGAPKANTATAHKIARLVYSMLKHGTEYIDQGQNYYELKYRERIIKNLHKRAKELGFEMVPQS

SEQ ID NO: 325506 - protein, 334 aa, unidentified
MQTATLIGIDLGKYSFHVHCQDRQGNALLRKKFSRSQLATFLATYPACTVVMESCAGAHYMARTVSQLGHRVKLIAPQFVRPFVKSNKNDFVDAEAICEAASRPSMRFVTPRTEDQQAMSALHRVRSSLIRERVKTTNQMHAFLLEFGISLPRGSAVIKRLPSVLEENGIPPDLERLLARLHTHYGYLSEQIKEIDNELKTHLNEDETAQRLLTIPGVGPVTASLLATRLGDGKNYASSRDFAASTGLVPRQYSTGGKPTLMGISKRGNKVLRSLLVQCARAFMRRLEHNSGRLAEWVKKQLASHHSNVVACALANKLARIAWAVTAHQTEFSK

SEQ ID NO: 325507 - protein, 425 aa, unidentified
MAESAVLLQEPQFAAFVGIDWADQKHAWCLQPAGATQRESGEVEHTPEAIEAWVGQLCQRFGNRPIAVAVEQVKGALVFMLSKYEPMHLFPVPPAMSASMRKALSPSGAKDDPRDADLLLDLLLKHRDKLRRLAPDSEATRRVQNLVEERRNLVDEKTAQTNRLTNHLKIYFPQMLGWFDRLDTELVCAFLEQWATLEELQKVPPARLRTFFRKHRCRDQELIERRMEGIKQAIPATRDGAVIEAKSAVVKVSAQLIRSLVRGIGELDRKIEAAAAAHPDFFIFESLPGAGAAMAPRLLAAFGSQRDRYANAEEVQAYSGIAPVTERSGKKKWIHFRWACPKFLRQSFHEWAGHSIAHSQWARSYYQQQRERGKGHHAAVRGLAFKWIRIVFRCWKDGVVYDESKYLAALAKRNSPLAAVAGTIL

SEQ ID NO: 325508 - protein, 321 aa, unidentified
MVYIGIDISKSNFVVAYPSTNGYSTKTFPNSTAGVRKFIATLSVAEHHCVMEATGNYCFLLLYLLHQSSIAVSLVNPKQIKHFARMMMAVTKTDEKDACMIAMYGEKMNPPIYKMPSQAIILLKQKKTVIRQLRKQLVASKNLRESLVVLPYRDKACVRTLDKTIDFLTKQIEQLEAELADIASSEFDKQLKALTSIKGIGVTLATALILTTGGFTYFDNAKQLSRFIGICPTYQQSGTSVNIKGHINRNGDEHLRSLLYVASWVALRYNASCRECYLRLKANGKPSKVALIAVANKLVRQAFAIATTDSTYIDGFISTKK

SEQ ID NO: 325509 - protein, 310 aa, unidentified
MANQYVGIDVAKATLDVAIGSDGELVQVENNEAGIARLLERLGEVEPTLVVLEATGGYETVVAGAIVGRGIAVAVVNPRQVRDFAKATGVLAKTDRIDARVLARFAEAVRPEPRPLPTAEAKELEEYLSRRRQLVDMLTMEKNRQSIATTERMKKSLKKHIDWLEEALRRANDDIDKAIRNSPAWREQEDLLRSMPGIGPVSARTMLAELPELGRLNRKKIAALVGVAPLNRDSGTLQGSRTCWGGRASVRQVLYMAAVTAVRCNPVIRRTYAALRTRGKKHKVALVACMRKLLTILTAMVRDQRRWSPS

SEQ ID NO: 325510 - protein, 345 aa, unidentified
MLDTETGEVVNLTLMHEGNQVREFYSQLPCPVLVGIEATGSMHWFLNLMEELGIECRVGHPATIRAAEPRKQKHDRRDADLILKLLAENRFPTIWLPTKELLDLRALVLHRHQWVRIRTRIQNALQAMALANGLRRGPSLWSYDGQAKIAFLPLLPHASYRRSALQALYRSMEEEIDNLTQQVAEQAEQRSGARRLMTHPGVGPVTALATDVFLGNPKRFLDGKALASYVGIIPREYSSGGKQRFGGVTKQGSPLLRFLWCEAGAHAVRRDPELKRFYRRKLVQKGLGKARVAVARKLGIRLWIMLRDEIDYEEFCRRGQKQQSGAACAGMLEVGNGANSHRPVD

SEQ ID NO: 325511 - protein, 285 aa, unidentified
MRIVTIGLDLAKSAFQVHGIDESGQAVVRRQLRRGAIEEFFAALPPCLVGMEACATAHHWARRLAALGHQVRLIPPTRVKAYVQRGKKNDATDAAAIAEAVTRPHMAFVPVKSEEQQAVLMLHRTRDLLVRQRTMLINALRAHLAEFGIIAAKGRGKAGELAAGLADAEIPVLARTALQELVGEIDDCDQRITTVEKEIFSWHKTNEPSRNLATIPGIGPITASLLAATVTDPSAFKNGRQMAAWLGLVPRQNSSGGKDRLGGITKAGDRTIRRMLVLGATSMIR

SEQ ID NO: 325512 - protein, 275 aa, unidentified
MQTITTIGLDISKSVFQVHGVDAGGQVIIRRQLKRRSVLAFFQKLSPCLVGIEAFASSHHWSRELQALGHTVRLMPPACVKPYVKRQKNDMADAEAICEAVTRANMRFVPTKTPEQQSCLMLHRTRHLFIRQQTAVINSIRAHLAEFGIVAPVGRRGVTELLHIVADPSDKRVSEIARACLAALGTQLVDLKEQILEFDRMIMAWPVQTSKRLHYIPGGGPMLATALVASIADPRTVRSGRNFSAWIVLVDPKGYEGTGEAQHQNARSCCGDQVN

SEQ ID NO: 325513 - protein, 343 aa, unidentified
MQTITTIGLDIAKSVFQVHGVDAGGRVIVRRQLKRRSVLAFFQKLPPCLVGIEACASSHHWSRELQALGHTVRLMPPAYVKPYVKRQKNDATDAEAICEAVTRANMRFVPTKTPEQQSGLVLHRTRHLFIRQQTAVINAIRAHLAEFGIVAPVGRHGVEELLNVVADPGDRRVPEMARACLLAFGAQLRRIKEQILEFDRLIRAWQRSSEMSMRLDECPGVGPVLATARVATVADPNAFRSGRNFSAWIGLVPKQHSSGGKNRLGNISKQGDRYLRGLFVAGALAVIRYAKIHGTKHRPWLTALLARRPTKVAAIALANKIARMVWAMMARGERYKEPVALAR

SEQ ID NO: 325514 - protein, 393 aa, unidentified
MISVGIDISKDKSTVCMLRPYGEVVEAEQALNALIERIQSFDEDVKVVLEATGGYHQVVVTKLLSAGIFTVVVNPYIMKKYCAAALRKAKTDKIDSIRIASYGIDHWFSMTAYCPPDEIYAELKLLGRQYDRYVRLKVNCKIQLANLLDGVMPGIKTILQGTVPAYSTKDKLCDFVEKYWHYDNIKKMSEKRFIEDYGKWAKKKGYRCSESQAIAIYQLSKNNIPTLKSGTPSTKMLVLQAVKAVRDAEITLSLIISQMQEIASTLPEYSVVRNMKGVGDVLSVRLIAEIGDVRRFHNGSALVVFAGIDAPPYESGKFIGTKRNISKRGSSTLRKIGYEIMHSLKVVKPTEDSAVYDFIIKKETEGKPKRVAKIAGLNKFLRIYYARVMETYC

SEQ ID NO: 325515 - protein, 352 aa, unidentified
MSRYEGMVGDDSSIYVGIDIHLRQWHVTIRTMEQELFCGSIPGSWKSLSSVLSGYRPDRVTVVYEAGFSGYWLHDCVVARGARCLVTPPSLIPTVVGNRVKTDKRDSRKLSWLLSRGMLSSIWISDEAHRSHRQVLRRRRQLVQDRTRLQSRIKAELALQGISVRTGLGRWTGRIATELASIEFADRWAQHSYHRLLTMYRLVTEQLAEQTRLLRELAATERYREPLRLLETVPGIGKITGMALLLELGSVERFTRADALAAYVGLTPSQYSSGAHIRMGRITGMGNRYLRSLLVEAAWIAVRRDPHLRAVYDRLKPRAGGKRAIVAVARRLLLAARRVLLDQTEYRCRQAA

SEQ ID NO: 325516 - protein, 349 aa, unidentified
MNFYNRQHQFYAGIDLHARLLAVCILDQAGHIVCQTTIPADKQILLDTLAPYRSDVVVCVECLFAWYWVGDLCREHQIPFVLGHALYMRAIHGGKTKDDDIDAEKIGRLLRGGNIPTAYVYPKGMRETRDLLRRRNHLVRKRAQLIAHIQITNAQYNLPPFAKKLIYAHNRAAMQVAQRFPEGPIRKSIEVNLALVDALDVQLADLELYLERTVKVEDPQSYHLLRTIPGVGKILALILLYEIHTIRRFATAGDFLSYARLVRCVHKSAGKTLGHGGKKIGNAHLKWAFSEAVCLLVRCCPTVKAWQQRREKKHGKKKTLGILAARLGRAVYHLLRRGTAFDLSKFLGQ

SEQ ID NO: 325517 - protein, 314 aa, unidentified
MTSTQIFVGIDVSKAQLDIALRPEGRFAVSNDEAGCAQISERLRAMPPTLVVLEATGGLEIPLTGVLAAAGVPVVVVNPRQVRDFAKAAGKLAKTDALDAQTLAHFAEVMRPEPRPLPNEQTQTLAAILTRRRQLVEMLTAEKNRLASARTAVRKSLRAHIAWLERELAHTDRDLAHAIRESPVWREKEELLRSTPGVGPVMTTTLLANLPELGTLTGKQIAALAGVAPLNRDSGTLRGKRTVWGGRAQIRATLYMAALVAARFNPVIRAFYQRLCAAGKAKKVALTACMRKLLIILNAMLKHRTPWRTELVHA

SEQ ID NO: 325518 - protein, 354 aa, unidentified
MNSVRYVGMDVHRDTISVAVLDESGRLMMQSVLATRAGAILDFIHGVRGTVQVTFEEGTHSAWLYDVLVRRVAKLVVCNPRKNALLKSGSKSDAIDARKLAELLRAGMLSPVYHGETSALEVQQMARSYSQLTEDTTRVMARLKAVFRGQAVSCVGKRLYGKRHRDEYLEQLSGGLLRRAQHLYQELDALQPLRHGVRRELIVECRKHAAAQWLQSVPFLGPIRVALLLGRVQTPHRFRSKRQFWTYCGLGLETRDSGEYSVVNGRVERRRKPALIRGLNWNHNHEMKNLFKSTATAASVRQGVWREFYLGLLAKGMRPEMARLTLARKIAAITLKIWKKGERFDAEHLKLQAA

SEQ ID NO: 325519 - protein, 462 aa, unidentified
MPGRDEIASSGKSRGQLAGLPIIRWNVAGIDLGSERHWVCAPTRDRSGREVASFGATTAELLRMGEWLKARQVESVAMESTGVYWIAPHEVLEAQGLQLLLVDTRQLAQVPGRDKKSDPTDCEWIQRLHSCGLLRGSFRPEEGVCMLRTLVRDKANLVAESGDWLRRMQKSLDQMNVRVHRAVSDLDGATGMAILRAIAGGERDSQKLAKLRDRRCSKTEQEIAEQLNGHWREDHVFSLQQALKMYDAVQERIAAYEQEILRKLGEMEREEPHEPTAPPLQNANKARTIKNRGQEAKRQALYRMSGVGMTQIDAIGVETVEVVVSEYGSDLSRFPTEKQFVSHATLAPRVPKSGGKPVKKKKRNSASTRVAAALRMAALSLRHSQTALGAYYRRIAQRRGGDIAVFATARKLATLVYRLLRWGQPYADEGAAAYENRYRQHRIGRLAATAKELGYQLTPVSA

SEQ ID NO: 325520 - protein, 317 aa, unidentified
MEQCDVSTKIAGIDVGKYWLDAAIDGQSTPLRVVNDAAGIKTLSSWLKSHGVGRVGMEASGPYDRRVRADLQAVGLEVVLHQPMEVKLFGRIRRQRAKNDRLDARLIAAATAGIERQPLKHDPRLAELAERLTVYEHVADTIAGLKSLLESVGLEDLHRAVTGQIEQLAAFKSQLAEAAMATIKAQSDLRHRLGLLMSLPGFGPIVATSMLVRMPELGDMQHGQPACLIGVAPHDRDSGTHAGTRFIAGGRSRPRRMLYIAALAAKRCDPDLKAFAQRLEANGKPKKLVLVALMRKLIEAANIVLKRNAPWVIKQPN

SEQ ID NO: 325521 - protein, 369 aa, unidentified
MEWPAPPSGVVGSPELQEEDLDMALATVSVLGVDLGKNVCSVVGLDGSGKVVMRRRVRRETLVGLAEKLPRCMVAMEACCGAHHLGRVFAAHGHDVRLMSPEYVRPYIKAQKNDDRDAEGIAEAATRPTMRFVDLKSQDQLDVQTLHRSRDRLVGERTALINQLRAILLERGMVVPKGRRNLEQFLMVLMDEQGGAGLSPRMILLVADARMQWAELDRRIAAFDAEFVRWTKENEDARRLAAIPGVGPIVASALVAAVGHAESFDHGRDLAAWLGLVPRQFTTGGKPKLLGISKRGNRYLRKQLIHGARAALPYVAEQDTPLGRWAKALMTRAPRNVAIVALANKLARIAWAVLRRGEPFVATGVSMAA

SEQ ID NO: 325522 - protein, 277 aa, unidentified
MYYTGIDLHKKTSFITTIDKNGKIVKRRNIVNDEVEIPHFFLTLDDDTQVVIESTAKWYWLYDLLTDHGMDVVISNPVKTKAIASARIKNDKLDSHMPAQLLRADLLATVHVSSQKTRQLKELLRHRSKLVRDTVRMKNRIHSIMAKNNLKIPVSDLFGCRGLEFLSQAPLPQYQRRQVDTYLNLYFQLKEETDELTKQVKRQAKSNSKAQLLMTIPGVGAITAMFMIAEIEDIDRFKSYRHLASYAGLVPRLNASAGKQRIGSITAGIAISSNSPG

SEQ ID NO: 325523 - protein, 397 aa, unidentified
MYIVGIDIAKRKHEAAVIDGEGTVIIKPFSFTNNCSGYNRLLAMLAKAKLPLDEVSFAMEATGHYWLALFTRLQKEGFRVQVINPVQTNSIRSFYIRQAKTDPRDALLIAEVIRFGHFSESTLHPENIYELRELCRGRHAIVSMQADVKRKVVALLDQVFPEYETAFTNLFGDTSMAILQTCPTPKELSEMPLEELCHLIEVSSHKRFRMAKAQELQALARNSFGFAMAGDVFSTMIRLYAKHLVFLKQQVQEMDRKIAEIMDTLDTLITTITGIGPTLGAYILSEIGDISRFSSAAKLAAYAGIDPTMRQSGEYNGVRNRMSKRGSPYLRHAIWLAASSAVLHDPALKLYFQKKRDEGKPYMASVGHACRKMVSIIYAVMRDNKAYTPCIPNEISA

SEQ ID NO: 325524 - protein, 375 aa, unidentified
MDELSKIHVGLDVHKDSISVGVADPGRAAGRLVGKIAHDIGTLTKLLSRIGRTEQLHLVYEAGPTGYGLQRALIAKDYVCEVIAPAQMPRRPGDRVKTDGRDCVQLAECSRAGQLRAVWIPDPSDEAIRDLSRAREDAVNSRTQARHQLKGFLLRHGLRFAGKTSWSKAHCAWLGSLSFEAQPAQTAFTEYWLAVQAADTRVQRLTQAVRDSVSGWRFEPVVKALQALRGVDVVTAVGLVAEIGDLRRFEHPRKLMGYLGLVPSEASSGERVHRGSITKTGNAHARRLLTEAAWHYRFKARIGSHAQRRQQDLSQPVREIAWNGQLRLNKRFAALQARGVQINKACVAVARELAGFVWAIGRQSMIESGDWPRAH

SEQ ID NO: 325525 - protein, 370 aa, unidentified
MTRVAKFLGLDVHKDSIAIACCEGGPIAAPVHVATVPNDIPRVVKRILKLGPAEHLRVAYEAGPTGYGLCRALLEAGVHCIVVAPGKVPKEPGKRVKTDKRDARELARLLYCGYLEGITLPDRAQEALRDLVRSREDCMRDLRRSRQRLKGFLLRHGRIWTGRTSWSQKFREWVRHQAFDAEAQRVTLKHYFDEVEHLEMVRDHLTAEIERLIPTLDQEELFRSLQALRGVSTIVAATIVCEVGDLRRFPSAGQFMSYLGLVPSEHSSGDKRSLGAITKAGNTHVRRVMIEAGWACRLRPNRSLTLLRRQEGLEPKIVDIAWKAQNRLNQVYVRLRKKGRQQNVAVVALARQLAGFIWAIGQEVQPKPAA

SEQ ID NO: 325526 - protein, 354 aa, unidentified
MSQHHDVTAGIDIGDRYSHLCLLDTESGEVIEEGRIPTNTKAFERRFSDAEPMRIAIETGTHSPWISRMLEECGHEILVANARKVRLIYGEGHKNDKIDAEKLARLARVDPKLLAPVKHRAETSQAHLALIRSREALVGARTKLVNHVRGAVKSFGARLPKCTAESFHNRVAEHLPQELVPALGPILKIIASLTERIRDYDRKLEGVAEEIYPETKLLRQVHGVGVLTALTFVLTLEDPSRFAKSREIGAYLGLVPASDQSGGSNPEKHISKHGNKLMRKLLVGSAHYILGPFGEDSDLRRHGEKIAGRGGKNAKKRAVVAVARKLSVLLHRLWVTAEVYDPLYNASRPRGQAA

SEQ ID NO: 325527 - protein, 369 aa, unidentified
MNDITYVGLDVHKATVCVAVAENGRGGEVRQLGVFENRPDILSRMVARLGKSGRRLSFCYEAGPCGYGLHRLLTGYGHSCVVVAPSLIPMKAGDRVKTDRRDAMMLAKLHRAGELTPIWIPDAAHEAMRDLVRARATAVRVLSKARQHLQGFLLRHDRIYHGARAWTLAYHRWLTTVRFDYPAQQIVLQDYIHAVQDGEARRDRLTQQIEELLPNWSMAPVAAALQAMRGIALVVAVTVVAEVGDFRRFTNARQLMAYLGLVPSEHSSGSSVRRGGITKAGNSLARRVLIEGAWTYRMPARVSRKINDRLELLSAAIRDIAWKAQVRLCARYRRLAATGKPKVVVTTAIAREMVGFIWAIARVAQPVLV

SEQ ID NO: 325528 - protein, 377 aa, unidentified
MEQATRFVGLDVHKETIVVAVTSAGEVGKATHHGTMPNTPAALENLVRRLRTAGSGALKFCYEAGPCGYGVHRTLTRLGEDCMVVAPSMIPRRSGDRQKNDKRDAAALAVLHRGGLLTAVWVPDTAHEAMRDLVRARQAAVRAVRAARQQLSAFLLRHERIFPSDGRPWTKTHRSWLADQRFDQPAQQIVLEESIEAVRLAEQRRDRVDGYLRAQIPSWSLFPLVRNLCALRGVDVIVGAGLAAAIGDPSRFATAPDFMAYLGLVPSEHSSGQRRRVGAITKAGDIHARTMLIEAAHSYRLPARIARRKLKAVDAVPDAVREIAWKAQTRLCQRYRQMMARDKLKQVVVTAVARELAGFVWAIACTTSDPSAHRSIS

SEQ ID NO: 325529 - protein, 338 aa, unidentified
MVTFGGDSHKRTHTLVAVDENGRQVGQRTVAATPTGHMEALGWARQWQEGHWALENCRHLSRVLERDLLGAGEAVVQVSPKLMGTTRRTGRELGKSDPIDALAVARAALREPHLPVAQLEGKEREVKLLVDHREDLVGERTRIQNRLLWHLHELEPGYQVVAGGLLRNVVLAEVRARLESHTGVVAEIAQELVDRLAELTQSVTKLQRRIEALMVELAPSLLSLPGCAALSAAKLVAETADVSRFRSSAAFAMHNGTAPIPVWSGNQERHRLNRGGNRQLNVALHRIAITQMRLAGLASAYIAHRLAVGNTKTEAIQHLNSSVCRAWRRTAAAGARQS

SEQ ID NO: 325530 - protein, 367 aa, unidentified
MKKVSTAAVKQNRNFSEQKLTIGFDLGDRSSWYCVLDEAGSVLLEQRVSTTPKAMREVFGGMPRSRIALETGMHSPWVSRVLSAVGHEVIVAHARNVRLIGESRKKDDRMDAQTLARLARIDPQLLCPVKHRSARAQADLTVIRARAGVVRARTALVNTARGLAKSYGERLRGCNVRNMNPEKAEGLSLELQRALEPLLAGIESLSERIGECNERIEKLAQESYPQVARLKQVKGVGTLIALTYLLTLEDAHRFRKSRDVGCYLGLQPGRRNSGQSEPQMHISKEGDPYLRTLLVQGAHHILGPFGADSDLRRWGLKLAERGGKNGKKRAVIATARKLAVLLHRLWVSGEIYEPLRHNHPRTMPAAA

SEQ ID NO: 325531 - protein, 428 aa, unidentified
MNEDELSRLKEFRQLKKQIQGSERHLIVGIDVAKDRHHAFVGTATGRTLVKKLIFANTSVGFAELLARVEAVRAQSGLSEVVFGLEPTSNYHKPLGRYLISEGCHVVMVGGKAVKNNRELLDERWDKHDTKDAANIADLVSRGKCFYYDMPSREIEELRDLHSLRARLKKEEHSLSLRIRNNLLAKHFPELDAFYSACERETLAIVRWCLNPQKIAVMPFEEFFKRVAPNARGIAQKLRLQKIHRLAHESIGCPVGSAVQFQARLLAEKIKEVRGQISDVDHLIAQASAPFPSYEYLLSIPGFGPYVASKVLATIADPRRFDSAKQIIRTSGYDLCADRSGKRSDQAVPVISKKGNSQLRYALYQAAMIASSRHRFFMAYFARMLQGREREQGIRTKMRVKLAAKMLVIAWTLMKKGEPFNPEHLSVQ

SEQ ID NO: 325532 - protein, 485 aa, unidentified
MKAQRAKAYRRSHRHQSGPIRPAASMPVVNPHAAGIDLGATEHWVCVPEDAVPEGQANVRAFGAFSADLDQLVEWLRACGIKTAAMEATGVYWVALVQKLEQAGMEVVLANARHLKHVPGRKSDVKDCQWIQQLHSYGLLNGSFRPTQDICALRSLLRHRQNLIESCGREVQHMQKALQQMNVHLHHAVSDLVGATGLRILDAILGGERDPQQLVQLRDEQLCTKTTREELEKALAGDWREEHLFVLRQALATYRHLLNQVLECDAQIEQALVQVIIPQPAPLESPIPPNPKAKDGAPAQTKKKRFHRLKTGTSLKRDLTPELKRLCGVDLTQVIGLNVLSVLIIISEIGLDMSRWRSAKAFCAWLGLCPGNKISGGKVLDSRTAHVINRAAILLRTLAPRIGKTDTWLGIFHRRMRARLGPAGANTATARKLACLIYHLLKYKEDYIEVDHLVFLEKIRKQRIARLRKQAQELGMQLTELQQAA

SEQ ID NO: 325533 - protein, 350 aa, unidentified
MNVNHYIGFDVHKKTVSYCVKTTDGQIVEEGKLRATHDALRQWAGKRREPWHGAMEATLFSGWIYDTLKPFAAELQMGHPALMKAIGASKKKNDKLDARKIADLVRCHLLPACYVAPVEVREMRQMLRYRNLVVEQAVRMKNKMSGLLMEAGAEYSKQRLHGKKYFTKLLDTVKEVPESVKDLLRLSRDAMEMFETTQQQLLGQLRRDPRLAERVILLRSIRAVGEVTALTWILEVGDPHRFSSVAQAVSYCGLTSALVSSADKQQRGPISKQRNAHLQTVLIEAAKLAPRWNSQLAALHARELERGNRNRATLAVARKLVAYLLAVDKSGQPFEVRTPSAIETEDQKVA

SEQ ID NO: 325534 - protein, 389 aa, unidentified
MEVVTDHPETSTAIRSEIGAMFVSLELSRSSWLITSLSPGNGETLSNHAVRSGDTAALLTRFAQLRDKAQARTGRRFPIVVIQEAGLDGFWLHRALQAEGIESHVVDPASIAISRRRRRAKTDKLDGETLVRALLAYKRGEPRVCAMVKAPSPEEEDQRRITRERKVLTNERVQHVNRIKGLLFAQGVSGYEPLRRDRRERLDMLRTGDGRLLPNHLKAQIGRELDRLELLLEQIKSVEAERDALMAAARSAATPAPAAMLLHVKGIGPEFAAVLWSEGLFRHFDNRRQVASYAGLAPTPWQSGAVDREQGVSKAGNPRLRTTMIQLAWLWLGHQPHSAVTRWFRERVERNGGRLRKTMIVALARKLLVALWKYVSAGIVIEGAVMKAA

SEQ ID NO: 325535 - protein, 442 aa, unidentified
MIRAEIERCAGIDVGKERLSVSVMVGPLAGEPRVEYREFGTITAELEGLRQWLQAEGVSHVVMESTGSYWKPVFNVLEDSVRVYLANPQDVKNRKGHKTDKKDSWWLAHLLRHAMIRPSFVPSRGLRELRDLTRRRGKMIGVGTSERNRVDKMLQDANVKLSSALSDIFGVSGQMMLEALLEGKAQPAEIAQFAKNRAQRKIPQIVAALEGHRMSDHHRQMIRYSLEHLRFLEQHILDLDEQIVAKIEALGYTPQWKLLQTVPGLRENSAASVLAEIGPDMGQFGSEKKLSSWAGVCPGNNRTAGKNMGSKTTKGNRWLRAALTECAWGVSNRKNCFLKEKFWRLATKKHRKPPATMAIAHTLLVLCYQVLKSGKPYQERGMPPMDQTQRDRLICHHVRRLGKLGIRVRSLTLPEDSKKAKPKKVPADSGKPKTKKARAKKN

SEQ ID NO: 325536 - protein, 352 aa, unidentified
MQHFIGCDVHTRNQVVAWIEEETGEIRKRRLEHEGQEVKEFYAQFPPGTVVGIEATFPAYWFERLMGELGHELWVGDAARIRASEVRYQKTDARDAEGILDLLRSGRFPRLWVPSLDERDLRQLLVHRMKQVRARTQVKNQLQALAISQGVCRKRKLWSAKGRAELEKLVLLPWAARRRKELLEWLDRLDEQVRELDRAVEEAGRARPEVALLRTHPGVGMVVGLAFVLSVGPVERFPNRRKLVSYWGLNPREDSSAGRQRLGSISKQGNTMMRWLLIEAAQTAARLDPQLRRTYQRLKHQRNSGVAKVAVARRLVVRLFWMLRTRHNYAQLVHMSGSPSSAVVPPQGGPKV

SEQ ID NO: 325537 - protein, 398 aa, unidentified
MTESSDYESVQVFIGVDVGKDTHHAVAINRSGKRLFDKALPNDENKLRSLISDLKQHGQILLVVDQPATIGALPVAVARSEGVLVGYLPGLAMRRIADLHAGEAKTDARDAAIIAEAARTLPHALRTLKLADEQIAELSMLCGFDDDLAAQTTQASNRIRGLLTQIHPALERVLGPRLEHPAVLDLLQRYPSPEKLASLGEKKLAAQLCKLAPRLGKRLAADIAQALAEQTVVVPGTNAAAVVLPRLALQLITLRKQRDEVALEVEQRVLAHPLYPVLTSMPRVGVRTAARLLTEVACRAFASAAHLAAYAGLAPVTRRSGSSIRGEHPSRRGNKALKRALFLSAFAALRDPLSRAYYTCKMSQGKRHNQVLIALARRRCDVLFAMMRDGTFYTPQGS

SEQ ID NO: 325538 - protein, 454 aa, unidentified
MSHRPKKKVQTQPVVFQPDSAGVDIGATELFVAVPPDRAEESVRSFSTFTEDLHALADWLTACGIKSVAMESTGVYWIPVFQILETRGFEVCLVNARHVKNVPGRKSDVLDCQWLQYLHCVGLLRGSFRPPDQVCALRSYLRHRDMLVKTGARHVQHVQKSLTQMNLHLHHVVSDLTGVTGLAILDAILAGERDPQKLAALRDRRIKASEATIAKALVGDYRPEHLFTLQQALALYRVYQSQIVDCDRAIERHLGSMESKTSQPTPAPVGRQRKNPERHQPQFDLRGHLHRILGVDLTALPGLSTINVHTLFAEIGGDLSKFPTAKHFSSWLGLCPDHRISGGRVLSAHTRTVKSRAAYALRMAAYSAGKSYSVLGDYFRRMRARLGAPKAITATAHKLARIIYHLLKTGTAYDDTVFARNETRYQQRREHHLRQQARDLGFTLVPFPQSQEVS

SEQ ID NO: 325539 - protein, 442 aa, unidentified
MATKLVNPNAAGIDVASNEHVVAVPEDKSKDSVRTFKGFTRDLHQLAKWLLSCKVETIAMESTGVYWFDLYTILLDYGFEVYLVNAHHVKNVPGRKSDVSDARWLQQLHTFGLLRASFQPDNITRSLRNHVRQRKSIVQQMSRKTQHMQKAFDQMNIKLNNVIRDLNGTTGTKIITAILEGERDPKKLAQHRDRRIKASEETLIKSLEGNWREEQVFNLQLAYDHYIFLQKQLKQCDAESEKIIQKMTSGNSPKSRTKKVQKSKNNPDFDVAQYLHAALGVDVTQIYGIKEVTALTIFSETGANLKEKFPTEKQFLSWVNVVPNNKITGGKVISSKVKKKKNAAGQAFRDGASALWRAKNPIGDYLRRKKAKSGAKKAVVATARKIAAIYYKMVTEKVEFNPLEISKGKEQYLQKRLKQLEMAKEQTQMLLSDYQHQNSLVI

SEQ ID NO: 325540 - protein, 450 aa, unidentified
MRGRRRERNVEKRARIKGETLVVGLDIGSDFNAMVMMNKEGEILGRYPKVYNSRKGFDYFKGEIERKRKEGYKDVIIGMEPTGHYWRKIGYFGQEQGYEVRFVRTTALKHQRELDETSWGKSDIRDAITITNIVREGKYLETKIRDDVYRQLRTLGKVRERIQRYNTGSKYALKAVIEDYFPELKGIFWSMKAKGLWAILERCPFPEDVIKMREEEIAEVIGEASRRKGRAEEKAKKIYELAKESIGLKKIGIADRFRVKKYLEEVKRTEDILAEIKREMGKLLKEVPEAKYLLSIPGVGKLTTAIVLGELGGVENFDNWRGIVKYAGYDPISRDSGKRVGGKWISKKGRYLLRKYLYFMSMRVIHRSLYFRSYYKRKLKERNRFGQEISKKEGICAVAIKLMKVMFALMRDKRKFGEIPPRFVRKEEKDSGIGGMRLVYPRRPLRACAN

SEQ ID NO: 325541 - protein, 382 aa, unidentified
MNNSVYHTELSSHEETRCQFNGGNCAIKLGIDVHQEFYVVVMQEGGQNPKPPQRFAKEAFLHWAAKLARSAVQVYAVYEACGFGFSLQRRLSALGIECYVVCPQKLDEQNKRVKTDALDARALCLKLDRFLQGNSHALALVRVPSEEEEQARALHRQREQLVKVRKVLEAQGRSLLVNHGIEPVQQWWKGRTFATLAVPQWIKELLGNSQPVVLALQEKIEQLTLQLQNAAQCEPPRGLGKMSSVIIDREIGDWNRFKNRRQIASYTGLCPGEYSSGQKRLQSCVTKHGNPRLRAALVELAWRMVRFQPHYRAVHKWTERLRKGQLTTGAARKKAIVALAHQLAIDLWRIRTGRLTPEQLGLEIGKKHRTERERRFEGNSCF

SEQ ID NO: 325542 - protein, 326 aa, unidentified
MVEHYIGVDLHKAFFQVCVVNAQGERLWEQQFPRTDEGIAAFLARCPARAAVAVEASTPTWHFADAIRDHVDDLRVVDSLKTRLKAGYAAKTDRLDARRLADALRRDSVVGIYYPPMGIRELRELCRGRHTLVQLRTRLLQRLRAILLRQGIVEARRLVRQDAVLDTLVLPPRAAASVALLRRLLADVRREMHDVDREVQALAQQDPIAVRLQQIPGIGPVLALLLRAEIGDVRRFPTPGHLASYAGLVPRVEASAGRYHYGRITRRGSPWLRWALVEAAVHGPQRADPVGRWTRRLAVRKGALKARVACARQLCHEIHAVWRAIA

SEQ ID NO: 325543 - protein, 499 aa, unidentified
MEADRGVPRLRVLWPNTRCLKSESRAAGRALLRNEYSDEVRNKAVKRAHYKDFAGAKPASAWVEDKEDEETTMSVKEKVPEPEFVAFVGIDWADQKHVWSWQNADSTQHESGELEHRPEAVEAWVGELCRRFGHGPIAVAVEQTKGALVYMLRKYECLHLYPVPSTMSASMRAALYPSGAKDDPRDADLLLELLLLHRDKLRRLTPDNEATRRVQNLVEERRKLVEEKTAQLNRLIGYLKVYFPQMLEWFAKLDTKLVCDFLERWPSLEELQQVRAGEVKKFFRHRRGRHGELTEWRMEGISQAMPAIQDRSVIEAKRTVVQVIAQLLRTLLEGIATLDRKIGEAVEAHPDFFIFQSLPGAGAALAPRLLAAFGSQRDRYGSANEVQKYSGIAPVTERSGKRKWVHFRWACSKFLRQSFHEWAGHSIGQSAWARAYYQRQRERGKEHHAAVRGLAFKWIRIVFRCWQDGVAYDESRYLAALAKRGSHLTSTCAAAAVSM

SEQ ID NO: 325544 - protein, 414 aa, unidentified
MDEAVKPTTNSEGKHMIIHKYLGLDVHQDDTVIAVAEGDRTGEVRLYGKVSSDLSATEKALRKIRGEHGVLHVAYEAGPTGFVLYRRLRQLGIECIVVAPSKTPQPKGGRQKTNRRDALQLARLHRAGELTGIHVPDAVDESIRDLTRARSDASRDLKRAKQRLKSFLLRQGYHYTGKANWSEAHQRYLRELVLPLPALKAVLEEYLQAIDRGTERLTRLEELLVAQVPPWRLYPAVQALMCLRGFELVAASILVAEINDVRRFAHPRGLMAYLGLVPSEASTGNTRRLGAITKQGNAQARWILVEAVQSADNPPKVSAPLALRQQGQPEAYRVLGWKTQVRLYKRYWHLTRRGVMAAKVRVALARELVGFVWDLLRQVPAMADSAKAAALAPGSRSATRRHPPGAPLPALVGN

SEQ ID NO: 325545 - protein, 411 aa, unidentified
MNAVGIDVSKGKSTVAILRPMGGVVQRPIDVPHDAVSLERLAYQILSLGENTRVVMEATGRYHEPVAMELHDRGIFVSVVNPLVIHGYCSGGTVRKVKNDQKDSLKIAKFALDHWVDLREYTPMDTVRQQLKIFSRQYNLYMKSRVALQSNLISLTDKVFPGVNEIFTSPERSDGHLKWVDFITTFWHCECISRVSENAFTEQYRKWCKRMGYKFSAAKASDIYIGSRGHIVTLPKNNNTKLLIQTAAKELTAMNELLTVVKAEMIRLAKELPEYETVQAMFGVGELLAAQLMAEIGDIRNYPRRSSLVGFAGVDPEVNQSGKMNSESNPSTKRGSPHLRKTLFQVMTVYLRLSPADEAVYQFLDKKRSEGKPYYVYMTAGANKFLRIYYARVKECMAKIEDSAETAEENG

SEQ ID NO: 325546 - protein, 437 aa, unidentified
MKGEVVSAFRERGLHLAVRDAEPQVSESINSMERKTDTMKSYILREPKAVQPQKSARPSRSEPGGEPALFIGLDVHNDTIAVSLAPSASTEVRRYGIIGGQHEDVLRLLKKLSAAHPEADLRCCYEAGPRGYPLCRFIRSQGAQCSIVAPSKVPRQPGDRVKTDRRDADQLARLLRAGELTGIYVPDPQDEAVRDLIRARYQVKKQQHRARQQLKMFLLRHNIRYAGTKAWTAQHLRFLATVKLPFAEQQFVFQEMVNVISEAGQRLERYEKQITSVVESWRWEPVVRALMSLRGVALLSAATLVAELGDLERFATAPQLMSYLGLCPSEHTTGKDRQQGGITKLGNGIARKATIEAAWNNRSPVRISRTLLARQQGLPKAVTQAAWNAQIRLHQRYKHLTAVGRKKSQVAAAALGRELAGFIWAIGRMVKPRPMKN

SEQ ID NO: 325547 - protein, 414 aa, unidentified
MKKHTYRSKNVNKINFSQVKERLANESVVFAIDIAKEKQYGLLSDAKGTVSEFIWWNHPEQTLELLNALKGLECQIDIVIESTGTYGDALRFQFRNCGFEIYQMNAKRVKDASEVYDGVPSQHDAKSAMIITRLHREGLSKLWIELSDDERTMNALRREYDMHQSQYQRNQNRLEAYLSRHWPEVGYLLSLDSVTLEKLLIEYGSPAGIAADAENAAKSMRIWGRHLLSDAKIEAVISSASNSLGQPCIESELSYLQALATEMSHSRLQQKQAKQALEESIKSNSDLKELGVLIGMVTTAVLLSCHLDPRKYDCARSYQKALGLNLKEKSSGRHVGQLKITKRGSSVARSYLYFAALRLIKSNSVVKAWYLNKVDPKAKNKTVIAVMRKLSKALWYVGRGDKFDATKLFTVAGM

SEQ ID NO: 325548 - protein, 458 aa, unidentified
MPGPLSFTQPSRHPENTAKARLIKDLHIMTFTGLDLHKKEVEAVLLAQDGRILHRSRFPANRAALEAFAAAHLSPLDSVVAVEATTNTWPVAAILQPLVYKVVVSNPLRTKAIASAKIKTDKVDALVLAQLLRTDYLPEVWIPDCHTRLMRQRSTERAMLSSDRTRIKNRIHSVLHQRLIAAPGADLFSTSNIAWLKALELDPFGRDSLDRHLRQLDRVEQELAALTSQIAVHAHQTPAVKLLMTLPGVDFTVAETILAALGDLSRFPTPDHAASYLGLVPSTRQSGDHCYHGPITKQGARHARWLLVQAAQHAALHPGPIGAFFRRIATKKNRNVAVVAVAHKLVVLAWHMLKNNEPYRYAQPKTLQAKLSRLRILATKQKRKGGNAKGQPRPAQYGKGCTKAIPSLDQLYLKEGLPPLSQQLKPGEEAMLESRNLTAFAAAVRVPKRIPKGASKKA

SEQ ID NO: 325549 - protein, 351 aa, unidentified
MQIIGVDLHTRQQTVAMLNVETGEIVEKTLQHEGDSVREFYSTLAGPTRVGIEATGSMQWFLELMEELGIDCQVGHPAKIRAAEPRKQKHDRRDAALVLQLLVENRFPSIWMPSREQRDVRSLILYRHQWVRIRTRVQNALQAIALSQGLRRGSSLWSKMGQHAISSLSLTRYTAERRTALQSLYQQLEQQIADLNQKVEELAWQRPQARRLMTHPGVGPITALATETFLGEPKRFVDGKAVASYVGLIPSEHSSGGRQRLGGLSKQGNPLLRFLWCEAVGHAVRKDAELQRFYQHKLVQKGLGKAKVAAARKLGIRLWILLRDQIDYQEFCRRGQLRQKHGGAHAGMPAR

SEQ ID NO: 325550 - protein, 370 aa, unidentified
MAQQMSVLGIDIAKLVFHVVGMDDTGAVVLRKRIARSELLTFIANIPPLRIGMEACGSAHYWARCFCEHGHDVLLIAPQFVKAYVKSPKNDARDAEAICEAVTRPTMRFVSIKRVEQQDLQALHRIRERLIKARTALVNEMRGLLNEYGIVLPQGITKFRTLVVKKLEAEQAKLTPFSIEMFWQLYEEFLALEKRLASYDEKLTSIGQAHPECQRLQTIPGLGPVSATALIAAIGDVTPFKNGRQLAAWLGLVPREHSTGGKPRLLGISKRGDGYLRKLLVHGARATLRWVETKPDDKSRWLRALIARRGKNRAAVALANKNARIAHIPSDLVVDRGASTVRGACPFTFRVHPLPSYATCQKIISTISVA

SEQ ID NO: 325551 - protein, 374 aa, unidentified
MKNVCGLDVHKDSVFMCILKENGDKIEEKFGVLTPELDRLRDLLISHSVGEIAMESTSIYWIPIWRVLCSDFNVKLVNPYFIKQLPGRKTDIKDAQWIATVFQKELIKGSFIPEPIIQELRLYERRIFYLNRNMQRAEQAIDLILQRCNIRLSNYVSDIGGKSMQKVIDALIQGRTEPEGLLALVHKRTRNKQGDDVVKAALTGIVSKADRNMLKLSREETLMYERQIEECYKQMREICKSYFDQEITLLQTIPGIREDAAMRIMAEIGVDMKAFLTASAIVGWAGLKPRNEESAGKIKGRKTLHGNKYLRVLLIQCAWAACRTKESRFFYKYHTLSKRMNHNKALLANTRKLLVIIWNILKKKQIYVSNMGAA

SEQ ID NO: 325552 - protein, 353 aa, unidentified
MRKQYNTVSFKNQTVFVGIDVHKKQWTVTIRHCGQNQKTFSMDPEPEKLADHLKRNFPDAEYRSVYEAGFSGFEAHRALCRLGVQNIVINPSDVPTSGKEREKKNDNYDSRKLARELENGSLEPIYIPTPENLMLRNLKRREDQLVQNLTRVKNRIKGHLYFNGIKFTSWTGGSLKIMEEKAQKRNDWTLLSMLRELRFLRTERLQVIRDQRSCLKLLGREKLQENIQSVPGIGFRTGFALQAELWDMNRFKSNDHLNSYVGLAPHTFGSGEDVVVKCGNRKKKQLHYLMIEAAWRAVGHNLEYRARYGALLGRGMSSQKAIVVIAKKRMETIRAVWLQDRKYKNYLETSKVK

SEQ ID NO: 325553 - protein, 434 aa, unidentified
MEEVTDEPLYRDRVCGIDIGKAGMVATIRVPSDRDPARRAQETRSFGTTKREVLALADWLRCWQVPAVVMEATGDYWKGPSCRLEAEGFECVLADAKQVKNLPGRPKRDPADSRWLAACFERGAVTSCFVATPEFRIIRLHTRYRRELTEERTREKQRAEKLLESAAIKLSSVVSDLHGVTGRDIMDHLIAGQRDPKALAQLARARARRKIAELEEALEGAEFFTAEHADLLKVMLERIDRVAEEIARLTEVIERLLAPYEEQLEQAESMPGWGRRAAQDAVAETGVDMTRFRTGGHLSSWAGKTPLDNQSGKRTGRSKSKKGNRYLAAITGETAAAVSKTQTREGARYRRLARRRGKAKALVATGNTQLKVYHKLLADPGMRYQDLGADYYERQRDIRRQVSHHVGKLGALGFEVTLARIPEPEPDETGAQTA

SEQ ID NO: 325554 - protein, 406 aa, unidentified
MNMNAVGIDVAKRKSTVAVLRPGGEVVVKPFDIPHLTNDFKSLTSLLHSLEGETRIVMECTGRYYEPVARTLSQAGFFVSAVNPQIIRNFQGQDNPLRKVKSDKADSVKIARYALDSWINLKQYSLMDEIRTQLKTMNRQFDFYTKHKTAMKNNLIGLVDQTYPGANTYFDSPAREDGSQKWVDFLDTYWHVDRVREMSLKAFTDHYQKWCSRKKYNFSKTKAEEIYGTAKGLIPVLPKDDFTKRIIKQAIEQLNAASQTVEQLRSLMNETAAQLPEYPVVMAMKGVGPSLGPQLMAEIGDVTRFTHKGALTAFAGVDPGVNDSGDYSQKSVHTSKHGSPVLRKTLFQIMDVLIKTKPDDPVYLFMDKKRAQGKPYYVYMTAGANKFLRIYYGRVKEYLASRPVSE

SEQ ID NO: 325555 - protein, 349 aa, unidentified
MIVIGVDSHKRTHTAVAADGNGRKIGEVTLATTSAGHLELVRWAARFPGHRFALEDTRHLSRRLAGDLLRAGEAVAWVPTRLMAGARRHGREQGKSDPIDALAVARAALADPDLPTATLEGEERELRLLVDHREDLVAERTRAQNRLRWHLHELDPGNEPGPRSLDRAVALRALDERLGTIEGTVARIARELVGRVRELTRAIDALEREIAGLVRGLAPALLALPGCGPLSAAKLVGQVAKAGRFRSAAALARHNGSAPLPVWSGNEERHRLSRKGDRQADAALHRIAITQLRIDERGRAYYEHRRAAGDTKAEAIRALKRRISDEVFRRMRHDERLRATPRAALAAAA

SEQ ID NO: 325556 - protein, 339 aa, unidentified
MSIVNSARWFVGLDYHQDFVQVCVLDESGKIVRNSQVQNDWRKIAASVPAGAVVQASLEACCGAADLADELVERAGWSVGLAHPGFVSRMKQNPDKTDYSDARLLADLLRVGYLPKVWLAPAELRELRRLVRYRQQKVNERRDVKLRIRAILRDHRIKDLDGNPWTKKWLAALAALEQIGPDTEWILQRHLASLERLNREVRQVERRLEERVAGDALVRKLREQKGIGLVTAATMRAEIGRFDRFQTGKQLARFCGLTPRNCSSGNKQADGGVILAGNPQLRAVIVEAVHRIMHCDERWMRLAQRLKQRGKHICVVVAAVANRYVRWLHHTLQPEALAV

SEQ ID NO: 325557 - protein, 467 aa, unidentified
MRVYVGIDLAFKSSHKAYAVTAAGDELLSGYRFRTDAEDLDRLVEKVEGMAPGAEVWSISEPTGSVWRNVGAYLKSKGWKAHIVSNQKAHDLRRFLHRHTKTDAVDAEALAQMGRIAPEALQPIRIDPKAQSLLRWAKRYSKASLQLASLKRGFVNQVEEVLPGVGTVAPDLLTAAGKAFYRHYISPMKVRRLGLKRFTRALEKRAGRKLQPGAAQRLFDFALKMNQLSAEGVLEVDFTELEDLVQIELDALEAKEAQLARLKDGLVKLYRELHPSGALHSIQGVGEVTAASCLAILLTHSFPNAKHLRSYLGVIPRVNESGVTTSKGSRLTKQGPAWVRRLLYIAAESARRWDPQLAEVYRREMVDKANPHRKAVLAVVTRLVDRIWALYRDDRGYELRDQDGNSVSAKEARAVVTEHLEVPKEVRARLKKQREEDDQEKREEARAEAPKGRGQPKAVSQSAASFY

SEQ ID NO: 325558 - protein, 346 aa, unidentified
MEHYAGIDVSLEFSSVCIVDAHGKFVKETKITSEPAAFVSFFKGVGFPIKRIGLEAGPLSQWLQAGLAKAGFDATLLETRHVKAALSAMTVKTDRKDARGIAQLIRMGWFRPVHAKSIGSQEVRALLVARKQLLGRLIDVELSIRGILRGFGLKVGQATRREFEGRIRDLVRGQATLERIVGAMLSARAALKREYERLHKAMLAIVRDDTVCRQLMTVPGVGPLVAMTFKSAVDDPSRIIKSKAVGALFGLTPKKYQSGEKDVTSGITRAGDEMVRTALYEAANVLLSRITRFSKLKRWGMDVAKRRGSKRAKVALARKIGVIMHRMWVDGTTFRWTEVKPIATPA

SEQ ID NO: 325559 - protein, 341 aa, unidentified
MQAITTIGLDIAKSVFQVHGIDAEGKVLIRRQLKRRYVLAFFEKLPPCLVGIEACATSHHWSRQLKALGHNVRLMPPAYVKPYVKRQKNDAADAEAICEAVTRANMRFVETKTPEQQSCLMLHRTRQLFIRQQTSVINAIRAHMAELGIIAPVGRKGVEQLLAVSTNDKRVPEVARGCIAALGAQLRMLKAQILEFDRRIIAWHRSNETSRRLDAIPGIGPALATALVASVADPKAFRSGRNFSAWIGLVPKQHSSGGKHKLGSISKQGDRYLRSLFTAGALAVIRYAKIHGTQHRPWLTALLARRPTKVAAIALANKIARMAWAMMARGERYQEPVALAT

SEQ ID NO: 325560 - protein, 408 aa, unidentified
MNAVGIDVSKGKSMVAALRPMGEVALLPQEFLHTEVGLEQMAYAIIALGEDTRVIMEATGRYHEPVAAALHEYGIYVCVLNPLFIKQSGGGSIRKVKTDKADAMKIAKYGLDNWVDLREYTPMDTVRQQLKLCSRQYNLYMKTVVSLQNNLISLTDKTFPGVNELFSSPERADGHQKWVDFVMTFYHCDCICRVSENAFAERYQKWCKRKGYHFSAEKAQDVYLGSCGHFTTLPKNDNTKLLITTAAQQLLAGKMTLAALRTEMTRLAKQLPEYDIVRAMYGVGETTAVQLMAEIGDVRRFPRRSSIVGFAGVDPAVDQSGKHSAKSVPTTKRGSPHLRKTLYQIVCTYLKRSPADEPVYQFLDKKRAEGKPYFVYMTAAQNKFLRIYYARVKECLEAFDERQDTVQN

SEQ ID NO: 325561 - protein, 422 aa, unidentified
METIYERCCGLDIHKKTVGACLIVPGPLGRSAKEIRTFGTMTEDLLKLSDWLTANRVTHVAMESTGVYWKPIWNLLEGNFELLLANAQHIKAVPGRKTDVKDCEWIADLLPRGVGGPTYSAHHGLLKGSFVPDLPQRELRELTRYRTSLVRERTSEVNRLQKTLEGANIKLSSVATNTMGKSGRQILEEMLRGSSDAKTLAQLAKGRLREKIGELERALEGCFGAHQRFLVAQQLAHIDFLDDTIEQVSAQVQERMRPFDEALSRLDAVPGVGRRTAEVLAAEIGIQMARFPTPAHLASWAGMCPGNNESAGKRKTARTRKGSPWLRSALVEAAHAAARTKETYLSAQYHRLAARRGKKKAAVAVGHTILVIVYHLLKQGTTYADLGPIYFDQHDRQAVERRLLNRLHRLGYKVTLESLSAA

SEQ ID NO: 325562 - protein, 312 aa, unidentified
MSLQESPVFIGVDVAKLSLAIQFPDRLWSTVNTPAGHTALVAELRHFGAVHVVCEATGGYERALVLALHAAGVRVSAINPRQIRDFARACGRLAKTDALDATIIRDYGCRLQPDPDPAPAPGEVEFAELIRSRQDLVGLITEEINRREHTTLPVLLKLSRARQRQLERQLAALDALIDAQVARQAALAAKTQRLQQVSGVGRVTALTVVALMPENGTLRHAEAAALAGFAPMNRDSGQHRGQRRIHGGRPALRRVLYMAALTATVHNPILKAFYQRLRQNGKPAKLALTAVMRKLIILLNRLLKNPQFNLVS

SEQ ID NO: 325563 - protein, 314 aa, unidentified
MNTLENSDFNIGIESSQTQLDPYVRPYGHFVSFTNNPSGIKVAVQYIKLFSAMRVLIEAMGRLELDFVCAAQHAKLPVVVGNPTQIRQFARASGRVAKTDKLDAQHSAQLGEALQPALTTVKPANLRLVSVLLTVRAQCLEMSAMQKNRLKRMPKPVHRSINAIPQATQKDLAKIDQRLDRLNASCPAAKLDQLTSAKGVGKVLAYTLLSELPELGSLDRKKIAALVGVAPMNRDSGIYEGKRYIRGGRHKVRTVLFVSMMSAIQCHPKLKPMYERMVAAGKPKKVAIIACMRKQLIILNAKVKNGTYWDEYMT

SEQ ID NO: 325564 - protein, 341 aa, unidentified
MNVKTIGIDLAKNVFQIHGVDEHGKRLFNKQLRRAQMASFFANIPPCLIGMEACASAHFWANKLISMGHNVKLMAPQFVKPYVKTNKHDAADAEAICEAVTRPNMRFVPVKTAEQQAVLALHRSRQSFIKQRTAQANQIRGLLAEFGIVVPRGIQQLQRRLPELVEDADNPLPVLFRTQLSLLQHHMAYLFDVIATLDKQIEQCYRQNALCQRIGKIPGIGPVTASALIATIGKANNFENGRQLAAWLGLVPRQHSSGGKQVLLGISKRGDTYLRTLLIHGARAVLQSAKHKQDAVSSWANQLMARRNNNIASVALANKNARTVWTLLAKEREYCAPIISA

SEQ ID NO: 325565 - protein, 363 aa, unidentified
MVVLIGADVHKNSHTFVAVDAAGKQIGQITVRATHSGHEKAYRWARKSFIEQDHRWGLEDCRHLTSLLERDLLAHGEPVVRVPAKLMARQRATARTRGKSDPIDALAVARAMAREEDLPAAFTDEQAREIKLVLDRREDLVAERTRVINRLRWHLHELDPEVDPAPRALTHRPAQERVREVIEAGAGIVAEIAGMNLTDLERLCSLIGELDARLRAMVRKQEPVLLEIPGCAELSAAKIIAETAGIERFATESKFAMFAGCAPIPVWSGKTEGRVRLNRGGNRQLNCAIHRIAITQTRLEGPGKEYYERLRAKGKTVMEALRCLKNQIARRIWRTLTRVHAETLTNTPIPLNPTPTTCASQAA

SEQ ID NO: 325566 - protein, 366 aa, unidentified
MDSSHLYRISIKVGSNQTKGIHTMNDDITITIDLAKNVFQVAVFNRSGNVLFNNVLNEKRMCKLIEKYPNARIYMEACGSSHYWGRYFQKREHFVGLLPAQIVAGFRMGNKSDKNDALAIYEASKSKNEQIHLVPILTLEQQDISMMHTYREGCKKQRNQIASRIRGIGLEYGVKFPLGINKLCEQINDVLEDGENELTVKGRELIDQLYSELKQVMKLFVQATKDIEVLAKENDACKRLTAVPGIAWLGASMMFAKFGNASHFKRGRDGSACLGLVPAHTGTGGTVRILGITKRGDTYLRSILVNGARAVVIHSKEKTDKLSCWIRDLLARKSFNTVVVAVANKMVRMATALLKSGEEYRQAVAQ

SEQ ID NO: 325567 - protein, 342 aa, unidentified
MKLKRIGVDLAKNVFQIHGVDSHERPVWRQRLPRDRWLQAVLEKIEPGCEIGMESCGGAHHWARQLQARGYRVKMIAPQFVKPYVKSNKNDANDAEAICEAMSRPSMRFVAVKSIEQQDIQATHRIRSGLIEQRTAKANQIRGLVSEYGLVPKELLALRRAIPCWLEDGDNGLTVRFRRLLDGVWNDLRALDARVDELDREIAEIANNEPAAVRLQQLRGVGPITSTALLAAIGDASQFTNGRQLAASLGLTPRQHSSGGKDRLLGISKRGDAYVRSLLVHGARAMIRTAKAKDDGLSRWVIALADRSHPNVACVALANKTARMAWAMLRNNTDYQPERAAA

SEQ ID NO: 325568 - protein, 340 aa, unidentified
MSKITTIGLDLAKNIFQVHGVDETGIVVVIKRLRRSQVIGFFAGLPPCLIGMEACATAHHWARELSGLGHEVRLMPPQYVKAYVKRNKNDAVDAAAICEAVKRPSMRFVPVKTIEQQSALLMHRARDLLVRQRTMLVNALRGHLAEFGLIEAQGLHKVVRLIAIVMDDKDERIPDMARQVLKMITGQIEELQTRIAALETQVLAWHKSNPVSQRLATIPGIGPIIATAIAATVADAGVFRSGREFAAWLGLVPRQNSTGGKTRLGGISKRGDSYLRRLLVNSAHTVLLCSKAAKADRWVVSRRGRKPRLGVAVALANKTAGVAWAIMSRQNTYRRAAVAA

SEQ ID NO: 325569 - protein, 390 aa, unidentified
MFAETTHTDQYTVSQPHLYMAFELSQSKWMLGFTIGFGQRPRLRTIAARDLAALRDEIHLARERFGLGEEVPVISCYEAGRDGFWLHRYLLSLGVTNLIVDSASIEVNRRAKQAKTDKLDLGKLLTMLMRYQAGEKKVWHVVHVPSPEVEDHRHLHRELADLKAQRTQHTNRIKGYLSNQGVCLEVRDDFPELVEHQRLWNGEPLPPGLQARLLCEYERFQLVQQQVKALEVERRETIRHSTQPEMEQVRQLLHLRGIGINAAWLYVMEFFCWRAFRNRREVGALAGLTPMPHQSGEEDHELGISKVGNRHIRAMAIEIAWGWLRYQPNSELSRWYQRRFGKGSKRLHKIGTLAPDASAGVVALARKLLIALWRYLEFGTLPTGAVLKST

SEQ ID NO: 325570 - protein, 355 aa, unidentified
MDRTKYIGMDVHQASISIAVRDASGKLVMESLIETKAATILEFLQGLKGTLWVTFEEGTSAAWLYDLLKPHVVKVIVCDPRKNALLKTGNKNDRVDARKLSHLLHAGLLTPVYHGESGVRTLRELARSYLTLTKDLTRVMNRLKALYRSWAIPCVGEKVYSPRHRSAWLEQLSEAGVRRRAEQLYQQLDILLQIRRDARRELLRESRKHPAHELLRQIPQLGPIRVALLIALVQTPHRFRTKRQLWAYCGLGLQTRSSGEYRFTAGQLQHSNRLPALRGLNTNHNHDLKNVFKSAAMHVSTSQDALGDFYRSLLAKGMKPAMARLTLARKMAAIVLTVWKKGARFDPGELKRQAA

SEQ ID NO: 325571 - protein, 424 aa, unidentified
MKSTQNEKILQMKFETLIVGIDVGKETHYARAFDFRGLELAKLFRFSNTRQGYEALENWTQEIMREHGKTEAIVGFEPTGHYWFTLGDHLQSQGHRLGIVNPFHVKCTKELDDNSPTKNDRKDPKTIAMLVKDGRYRDVYIPEDLFQELREAVNERERLLEQLIVLSNQVLRWLDIRFPEFSGVFKDWSRNAAWLTLRHHSTPKKVVTAGVEGLMRTWRQEMKRPSLKKAERLVKAASESIGRTAGSEVAEAALQNILTQYELIDRQKQETEMLMQELLLKVPNASKLMDIKGIGMVTAAVIVSEIGDIRRFRDPRQIQKMAGLNLRENSSGKHKGKTTISKRGRKRLREGLFRAMITMLATNQEFRAIHRRNLTRENNPLTKMESVIALCGKLIRVIFAILTKGSDYDAKKMMDDMNRSMKAA

SEQ ID NO: 325572 - protein, 355 aa, unidentified
MKYYTSTTEFNCGIDLHARQMYVCVMDRSGKTLVHTNVKNNDFEFFLKLVAPYKHDLTVCCECMFGWYWLADACQQAGLHFVLAHALYLRAIHGGKNKNDRIDSEKLTHLLRTNLIPPAYVYPADKRPLRALLRQRLFYVWRRAELLARIASHQLAHNRAPIKQTRRVRDDWETQLLAAEDHPLRQLALQNDLAMIAHFDRQLTQLERELQRQAKAIAARDCTLLQTVPGIGEHLGLTILCEIGDIQRFPTVKDFLSYSRLIKGTVASAGKIKGLRGAKLGNPYLRWAFGEAAVIAKRDPAVIGPLAQRLEARMNGNKFKANTVLAIKLARAVYYMLKSKTVFDPERLVAALSRN

SEQ ID NO: 325573 - protein, 385 aa, unidentified
MNQTSCFATSTHALHCALELSKKSWLLAIQFPDREQPSVYSIKGGDTEKLMAKLTAARDCWAKVSGSLPVITLCYEVGYDAFWLARFLKARGIECLVIDPGSLQVNRRGRRVKTDRVDVKMLLRTLIAWCRGERHVWSPVRIPSVEEEDLRRSHRERSRLVRERTAHINRIKGLLFAQGIRDVNVKSQYKTLAVDRLLTADGHRLPPRLASEIARELQRLAMVQEQIAEIERERDTAPTPCDATERKRQLLLQLKSIGPAISALLSREVYYRQFANRRQVGSFLGLTPSPYSSGEEERCQGISRAGSGQVRAIMIETAWLWIRHQPKSALTRWFVERTAGQSTRMRKIMIVAVARKLAIALWRYVEQGLVPQGAILNPPTTGRAR

SEQ ID NO: 325574 - protein, 500 aa, unidentified
MVPGRRLYIGEALRSSPLDQNPQTASLGGRAQKGWGKEMTGKHEVESSEGSRRQLQGLPVVRRNVAGIDLGSERHWVCAPTVDGSGREITSFGATTPELIRLAEWLKQRQVESVAMESTGVYWIAPHEVLEAQGLQVLLVDTRQLARVPGRDKKTDPRDCEWIQRLHSCGLLQGSFRPEEAVCILRTLVRDKANLVAERGDWLRRMQKSLDQMNVRVHRAVSDLDGVTGMAILRAIAGGERDAQKLAQLRDPRCSKTEQEIAEQLRGHWREDHLFSLQQALQMYDAVEERIAAYEKEILRKLGDMEREEQRGQTAPPLQNPNKAKAIKKRGQEPMRQALYRMSGVDATHIDAIGVETLEVVLSEYGPDLSRFPTEKQFVSHVTLAPHVPTSGGKPLRKRKRNSTSTRVAAALRMAALSLRHSQTALGAYYRKMAQRLGGDIAVFATARKLATLIYRLLRWGQPYVDEGAKAYEARYRQQRIGRLAATAKQLGYQLAPINA

SEQ ID NO: 325575 - protein, 337 aa, unidentified
MTPPTSAPASPSPSQPATPPLFVGIDVAKDKLDLAASDTDAVATFPNDPAGHDRLVELLAGRRPTVIVVEATGGYEWPLVQALLEADLPVARVNPGDVRHLAKGLRILAKSDPIDARLLARFAQVAEPRLLEKASHNQAELHALVTCRRGLCQSLTQQTNRLDMTRSKLPAKALGKVIKTLQTQIDALDKAIADLIDADDEFRDNNRLLQTIPGVGPVAAATVVASVPEIGNARGRQAAALVGVVPYDHDSGRFKGQRSIAGGRAEPRNVLYMAALTARWCNPLIKAFADRLKSRGKKHKVVIVACIHKLVTLMNVMLRDRLTWDQLTVVKNFVPTP

SEQ ID NO: 325576 - protein, 411 aa, unidentified
MDVVYSRCAGLDVHKATVVACVRVPGAAPGERRGEAKTFATTMRGLTELSGWLGRHGVTEVAMESTGVYWRPVYAVLDTTVTVILVNARHVKMVPGRKTDVRDCEWLAQLLECGLLKASFVPPQAVRDLRDLTRLRKALIRERAHHVNRIEKTLELAQIKLGCVVTDLMGKTGRAILHALSEGRDDPDQLADAAQGLLRKKRAALREALEGRLTPHYAFLLQQYLALIDTLEAHIVRLDARIDELMAPFADAVALAQSMPGVATRAAQAILAETGVDMAAFPTAAHFASWARLCPGTHESAGKRQPVSTGQGATWLRATLQEAAWAAIHTKKSYYRVLYHRLKARGSPKKAIVAVQHAMLIALWHMLKHRVPHHDLGADYFERRNTERTRRHHVHRLERLGYDVVLVEKVA

SEQ ID NO: 325577 - protein, 391 aa, unidentified
MIRHVFRTTIKKEGKSHLFGYNFVAQQNFTERRLAMIKRNKLDFTGQPIYIGLDVHKKSWSVSIATKYGQYKTFSQPPEVVKLVHYLRQHFPGAQYYSTYEAGYCGFWIHDQLKENGIGCLVVNPADVPTKNKERKTKRDRIDCRKLSRSLRNGDLEGIYVPPRGKVEDRSLIRTRLSMVRKQTRCKNQIKSMLLFYGVVLPEEKEMGHWSRRFIRWIENIRLERASGDMALQIHLEELCHLRQIIAKLDRAILALSRTEEYRAGVLLLRTVPGISTLTAMILLTEICEIRRFPSIDELTSYVGLIPDTQGSGEKEQVGGVTQRSHSQLRWLLIEASWRAIQKDPVLMMAFDQYCKRMRKTKAIVKIARKLLNRIRYVLKNRAEYVPSVLE

SEQ ID NO: 325578 - protein, 417 aa, unidentified
MSSEWLPFTIKTHKGECIMNSVGIDVSKGKSTVAIMRPFGEIVASPFEINHTEEDFEKLVSRIKSLKGESRIVMEYTGRYYEPLANYLYNSGLYISVVNAILIHDYDNSSIRKVKTDKKDAIKIANYGLNRWLDLPEYIPEEELRQALKIYNRQFTQYTKLKVAMINNLIALSDQTFPGIDGLFGKTPRKDGHQKWIDFIKDYWHKDCITTKTIKSLERSYQKWCSKNGYNYQSNKVNDIYQLANQTVASMPANANTKLIITETAKELISLIDVLEKIRQEMNRIASQLPEYPAVMSLPGVGTTLGPQLIAEIGDIRRFHSRKALIAYAGIDSSPYQSVTIDIKSRGISKRGSSALHKTLFTVMDCILRHQQIDDPVYQFFDKKRAKGKHYYVYMIAGCNKFLRIYYARINAYLNSI

SEQ ID NO: 325579 - protein, 354 aa, unidentified
MSNKSTSIVATMGIDIGKNSFHVVGLDEHGAIVLRQKWSRSQIEVRLANMPPCLVGMEACVGAHHLSRKLQSQGHDARLMPAKYVRPYSKGQKNDFRDAEAIAEAVQRPTMKFVATKTAEQLDLQALHRVRERLVSQRTGIINQIRAFLLERGLAVRQGLRFLRTELPIILAKRTDVLSPRMMRIIEDLAGDWRRLDERIEGLSAEITALARQDAACARLMTVPGIGPIISSAMVAAIGNGGAFSKGRDFGAWLGLVPKQISTGDRTILGKISRQGNRYLRVLFVQAAWAVLVKITDWDRYGLKTWIEAAKKRMHHNVLAIALANKLARIAWAVLNKERNFECVRTAATSSRPA

SEQ ID NO: 325580 - protein, 316 aa, unidentified
MEAVLECCVGLDVHQETVVACIVFGPLEHRPKKEIKTFGTTTPELLTLADWLEERKCSHVAMESTGIYWKPVWNILETGSFQLILANAQRIKNVPGRKTDVKDAEWIGQLLRSGLIEGSFVPPVEIRNLRDLTRYRKKLLQDTTQEKNRIHKVLQDANIKMTTYISDIFGVSGRNILECLLNGEVITAENITKMVKGKIRSKVPGLVDALNNRLHRHHREMIRFSWEHLKYLERTILDVEVIIEQCLTPYRQDIDLLDSIPGVGHTAAAVMIAELGTDMSVFPTDRHVSSWAGVSPGNNESAGKKKELAPHQGIKR

SEQ ID NO: 325581 - protein, 344 aa, unidentified
MEITTVGLDLAKNVFQVHAIGSTGGVVVRRSLRRAQVIPFFSKLPSCLIGMEACGTSHHWARELVGLGHEVRLMPPAYVKPYVKRGKTDAGDAEAICEAVTRPTMRFVPIKSVEQQAALALHRTRDLLVRQRTQLVNMIRGLLAEFGIAIPKGITNALAFVRRAAVCEADEVPDLATKVIGALAEQAIEVQGRIRQLERDLLASYRSNDLARRIATVPGVGLLGATAIAATVTDPTQFRSGRQFAAWLGLTPLNNSSGGKERLGRISKMGDQYLRRLLVTGMTSLVRRNKHHPDSADPRINALLARKPPRLVTVAMANRAARAIWAIMVRGDVYRVPALGSAVA

SEQ ID NO: 325582 - protein, 347 aa, unidentified
MYDHTVIAIDLAKIAFHACTISKHNKIITQRQFNRTRLMSWLIKQPRAIVAMESCGSAHYWARFAKRHGHQVKLLSPQAVKAYRQGHKTDANDAVAIAIAARQPNVKPVTPKTIEQQGLQGIERMRKHHSDTKTAQSNLIRGLLFEFGITIPQGDCSLKRDMADILEDAENELPISFREQLADMYRCFLKTEQALIKVEKALMGLIKSQPDCQALMAIEGIGPINALGLSLALGERGQSFANGREAAACIGVTPKQHSTGGKAMLGTIGKYCGKQYLRSTIIQGAMAVAKVVQTREPRTTKELWLKQLIERSSLKSAAVALANKNIRTAWAVLNSGQPYQRPRPLVA

SEQ ID NO: 325583 - protein, 346 aa, unidentified
MIVIGIDPHMKSHTAVAVDGASARRLAQRTVAGDAAGAEELLAWARGLGGERLFAIEDCRQVSARLERRLLACGERLLRVPPKLMARARSSARSYGKSDPIDAECVARAALREGQLPEARLAGPERDVRLLADHRDDLLGERKRAQNRLRWHLHDLECDLALPPRALDRYLWLNRVERCLAGLSQTTRRRIALELVARCRELTASVRALEREIRVLMRALAPELLALPGCSALCAAQLVGQVAGASRFVSEAAFAMHTGTAPLAASSGVTTRHRLNRRGNRRLNSVIHVIAVTQARMHPPAIAFLERKRAQGMSTREALRCLKRHIARTVYKTMRRAEQARPAVCC

SEQ ID NO: 325584 - protein, 507 aa, unidentified
MAARKNSKVKADGAGDGGQPAHGGEAAEVSDEVTQVVERAAGIDVAKGFGMVCTRVPGSRPGRRPQEIWRVEATFAQVTALMDHLVCEGIQRLVIESTSDYWRMWYYLAEAAGLEVWLVNARDVKHLPGRGKSDRADCVWLCKLNERGMLRRSFVPPQPVRDLRMLTRTRSRLAQDQARHQARVEKTLEDALIKVSVVISDLFGASGRAFLDALVAGERSPAALAALGDPRLKASKATLQEALTGRFRDIHATEIGVHLRLIDAINAEITGLDEEIEQLLPQVPRTAAVCTACGVVGGEHALDCQDLGVLLLGLADRLNEITGIGAVNARVLIAELGTDPSTFPAPGHAAGWARLTSRTMQSGETARPGRTGKGNPYLRGALGQAVMSAAKTDTRLGAMYRRIARKRGKQKAIIAVARVICEIAWILICDPAARYTELGPDYYQPRSARRRTTASIRQIEKDNPGKKVILIDDPGYGKARPAEPAALPSVTPESPVTCWGVTPLTVI

SEQ ID NO: 325585 - protein, 346 aa, unidentified
MGMDISVLGVDLGKNVCSVVGLDASGAVVLRRRAKRETLIALAAKLPPCVIAMEACCGAHHLGRVFAGHGHDVRLMSPEYVRPYVKAQKNDDRDAEGIAEAATRPTMRFVGLKSQEQLDMQTLHRSRDRLVGERTALINQLRAILLERGIVAPQGKRKLEQFLTVLMDEQDGAGLSPRMIVLVADARAQWGELDQRIAAFDTEFIRWTKENEDARRLASIPGVGPTIASALIAAIGKGEAFEHGRDLAAWLGLVPRQFTTGGRPKLLGISKRGNRYLRKLLIHGARAALPHVAERDTPLGRWAKALLERAHPNVAIVAFANKLARIAWAVLRRGERFVVRGLPLAA

SEQ ID NO: 325586 - protein, 334 aa, unidentified
MHEVVRNRYTTYGETSYVDVVGIDVSKDNFHACLLQRSGGARKVFANSAKGYKQMLSWLKNRRCTKVHACMEATGAYWLGLATALHSAGMDVSVVNPSRTALFARSQLRRTKTDHVDAQMIAEFCKTQNPASWTPPPPETLELRGFLTYRAQLVAEKIRLKQIAEQVHLAADLRKLHAKQIKSLDAAIATVEKSKRSLLRSHRNLALQVEKLTSIQGVGFITAAAIAAKLPTERLRDSKAAAAYIGLSPRERQSGTSINGKPRICKTGNAELRRDLYMPALVAIRYNPVLRTFAERLAARGKPPKVIIIAVMRKLIVLAFRLLTDPNFGPAVSA

SEQ ID NO: 325587 - protein, 400 aa, unidentified
MLSIGIDVSKGKSTVCGMKPGGEIVYTPFEVQHTREGMSDLVSLLRSSGEEVRAVLESTASYHCPVVAALLENGIFVSVVNSLRMKRFCSQSIRRVKTDQIDAMQIALYGLAYWQELQPARLPEDTYRELQLLARQYYQMTSMLIKAKVDFNAICDQVLPGMQELMSDHAGRHKLSDFVLRYHHTAHILKMGETRFRKDYCKWAEKKGYRNHERMAALIFATAQNGIPVLPDAPSTQIVITEAIRVLHTVEASRDAILTQMQALAKTLPEYSLVREMPCIGDTLAPRLIAEIGDVRRFHSKRALIAYAGIDAPPYQSGKFCANNRHISKRGNRYLRKTGYEVMQSYVMHKPANDPIFTFIEKKRSEGKSGKLAMVAGLNKFLRVYYGKVTELYRSLPAIE

SEQ ID NO: 325588 - protein, 401 aa, unidentified
MVSDFMKGRYNLMKIFVGIDIAKLNHFAAAISSDGEILLEPFKFTNDADGFQLLVSKLESFDKNSIIIGLESTAHYGDNLVRYLVAEFYQVCVLNPIKTCQMRKNNVRKTKTDKVDTFVIVKTLMMQDDLRFITFFDLDMMDLKALGRFRQKTIKQRTRLKIQLTTYVDQVFPEIQYFFKSGLHQHAVYALLKEAPSPKEIASMHMTHLANLLKVNSHGHFTKELAKELRVLAQKSVGANDSAISIQITQTIQQIELLDSQLEKIEAEMTDIMKFNDSVIMTIPGIGYINGGMILGEIGDIHRFSNPNKLLAFAGLDPSVYQSGNFQAKTTRMSKRGSRVLRYALVNAAWNVVRNNATFKAYYDAKRAEGRSHYNALGHCAGKLVRVIWKMLTDEVEFNLE

SEQ ID NO: 325589 - protein, 444 aa, unidentified
MELVHTHCAGLDVHKKTVVACVRIPGPDGKPLKFTRTFSTMTADLLALADWLLAHGVMQVAMESTGEFWKPVFAILEGQLTVLVVNAQHIKQVPGRKTDVKDAEWIAELLAHGLLRPSFIPPQAQRDLRDLTRQRTVIIQERAAVVNRLQKVLEWANLKLAAVASDVVGKSARAMLEAIVDGQSDVAALAELAQGRMRAKREALEQALKGRVREHHRFMLARHLEHIDFLDEQIASFDAQIAALIEGEEPSSTPPAEPSEQEPVSEPASNEGQTTSLSWAEAVEIWDAIPGIGRRVAEQLVAEVGVDMAQFRSAGHLASWAKLCPGNHESAGKRKTASVGKGNNWLRSALVQAAHAAVRVKDSYLAAFYNRLVGRRGKKKAIVAVAHKLLVLAYTLIRKGERYQEPGAAYLDERQQERLLHRLTFRIERLGFIVNLEPRAVAAD

SEQ ID NO: 325590 - protein, 375 aa, unidentified
MKKNNSNGRQHNVMTSTAEKTKDQGKEKFAFYIGIDLGDKHCDVCVLNGDGEFEESFRLRMLGPELQTYFATVGRSRVAIEAGGQSRWVAEVIERCGHQVYVSNTRKVAYITQSDDKDDPGDAYKLAELVHFKPRLLHPIQHRSQEAQADLSWVRAREALVESRTQLVNTIRGMSKAFGERLAKCSVESFTAKLASLVPEAIRGAVAPLLETIDDLNERIRYYDQMEEHIARERYPKYRLLQQVDGVGVHTALLYMLTIGDADRFEKSRMVGCFLGLRPRKHESGQSQPQLGITKAGDGFLRKTLVNCAHHILGPKGKDSDLRRLGLRICARGGKNAKKRAVIAVARKLAVLLHRLWVTGEVYEPLRNSPVEEAA

SEQ ID NO: 325591 - protein, 350 aa, unidentified
MIIIGCDFHTRYQQIAMMDTETGELVERRLEHENGEARAFYASLPKPVVVGMEATGYAQWFERMLAEFGHELWIGHASEIRAGVVRKQKTDARDALHLLHLLLEKRFPRIWIPSPAERDTRQLLRHRHKLACFRVSVKNQLHALAMSQGVCRKKKLFTARGREMLEKLSLGPWARRRCQELLGMLDQLNTVIDELDRAVQQQAESHAEAARLMRHPGVGAVTALAFVLTLGPVTRFRRSKHVVSYLGLNPKERSSGGKQRTSTISKQGNTMMRWLLVEAAQTAARYDPELLRLYQRLKFRRGANVAKVAIARKLAVKLYWMLRATASCAQRAPMQGSSRGTLVPQAGSSF

SEQ ID NO: 325592 - protein, 395 aa, unidentified
MKTVCGLDVHKVMILMCILKANGSKVIQEFSTLTVDVESMRDLMKEHGVEEVGMESTGVYWIPIWRILQGHFDLKLINPYFIKQLPGRKTDVKDSEWIATVVQKGLVRGSYVPGRNIQELRQFERRYVRLCEHSTRIEQEIDRQLHRCNIQITNYASRIGSTSVINVVKAIIAGETTAVKLEKHVHGRIKNKHKEKIAASLTGVISGTDRFIFGQNISEYDLILAQQEECLREMSVFCEKYFEKELLLLCTIPGIQKLSAMIIIAELGVDLRTFATAAALTGWAGLRPRNDESAKKIRSRKTTKGNKYLRRILVQCAWAASRQKSCWLKSKYEQLCIRKSSKKAIIAIARKLLVIIWNVLSKHETYREFVPKIDPKQRLKRIEYYNKRLQELKIV

SEQ ID NO: 325593 - protein, 337 aa, unidentified
MDRQYVGIDFHRRRSVIVRLSGSGERLGLHRIVNEPFELAKVIASCGEAPQVVIEAMYGWYWAVDLLQELGAVVHLANPRALNWGDRRVKNDVNDATDLADMLRLNRLAEAWIAPPALRELRELVRYRAKLVQLRSGLKAQVHAVMAKEGAIPVVSDIFGPAGTRQLDELELAAPFARRVRSLRELIARYDHEITGLERDIHQHLKGHRGYQAVQAINGIGRVSAAVLVAEIGDVSRFPTAAHLCSWVGLTPKHRESDLKTRRGRISKQGSRLVRATLIEGISRYHGGPVLAGQYHQIAKRRGRNKARVALARKVLTLVYYGLRDGEIRCLAHADAA

SEQ ID NO: 325594 - protein, 385 aa, unidentified
MTIQPVASKFIPRDYDVFAGLDVDKKSMSVVFADHQGAMRALRMAYRAEPLVNYVRKHFAGQRVAFAYEAGPTGFGLHDELVRQAYTCIVAAPSKVPRAPGERVKTNRLDSRKLAESLRGGQLQGIHVPPVVYRDLRHLVQLRDTHVRQLTASKLRIKSLLLYEGVPFPDPREKWTVRAMRELQRLPCSETVRFKLDDLLDTLHFHFQAAARATKQIRQHCLRDPELQQSIKLLLSLPGIGWIVASHLAARLGDPQQIKNGKQIAGFLGMVSSEHSTGEKENRGEITRSGDSRLRNKLIQSAWTAIKKDPELRDFYRRIYQRHPKKVAARKAIVAVARKLTTRVYVVLKEQRPYVMRPDSSIVPLTAAETVGPRDRLDSAQNDQS

SEQ ID NO: 325595 - protein, 409 aa, unidentified
MINTLFVGIDVSKKSNVIRFTDSNGETLSLFKAPNNHDGAIKILEKLKDTILHTDFSSVTIGMESTSIYADHLAVFLRNDDFLKKWNVKVHILNAKQVSKFKESYPELPKNDDIDTLIIADYLRFGRIAKEVNLDEKYIALRNLTRARFQVAQNLSREKTRFIETLFYKFSALDSSKVFSDTFGATSIAIISDFFSVDDINDMPLEDLAAFIAEKSKNKFSDPEKIALELKAAAKSSYRLSKTVNDSLNQLLAVRLIGIRSLQQQIKDLDKAISSYMQLFPDILTSIPGIGPVYSAGILAEIADIHRFNNHAALAKYAGITWSRYQSGGFEAANTKLILSGNKYLKYYLLEATNKVRMHDTEFQRFYQSKFKEVPKHQHKRALALTARKFVRLVYSLLYTNRLYIPPTR

SEQ ID NO: 325596 - protein, 366 aa, unidentified
MDKRTTVGIDLAKEIFAICVLDAHGAVLERKVLRRAAFERWIESLPGACVVAMEACGSAHHWGRLFAARGHAARLMAAEFVVPFRQGGKNDGNDALAIAIAARQPTMRFVPVKTVEQQAILAWHRMRQGWIEERTALLNRVRGLLAEFGLVPGRSPAVLIAAMARIVDEAAAPEPMRAIVQQAREQLAQLDARLGACDMQIQAHARCSPQAERLRALLGVGPITASAVVATVPDATLFRHGRLFGAWLGLTPRQHSTGGKTRLGASSRRGDAYLRGLLVNGARSALQAALRAAPDKATRLQQWMVALASRCGYQKALVAIANKHARMIWAMLARDETYDPQAWRRHPRTQTAAVTTLPTAPALGTA

SEQ ID NO: 325597 - protein, 389 aa, unidentified
MLHDHPSAGPTAILTQFGAIFVSLELSRSKWVLTSLSPGNGEKMSQYSLVAGDIGGLLARFSDFKCKAKQRTGSDFPIITIHEAGLDGFWVHRVLRNEGIESHVVDAASIATSRRRRRAKTDKIDGEALLRALLAFKRGEPRVCVMVVAPSPEEEDRRRLCRERQTLIAERIIHVNRIKGLLFAQGVSDYAPLRRDRRKRLEGLRTGDGRPLPVHLKTQIGRELDRLELLFDQIHSVEVEQEALLAAESKAAPEGEPHNAVAMLLAVKGIGEHSAAILWSEGLCREFSNRRQVAAYAGLAATPWRSGAVMHEQGLSKAGNPQLRTTMVQLAWLWLRHQPQSALACWFRARGERGRKGSIVALARKLLVALWKYVTHGVIIEGAVMKPAA

SEQ ID NO: 325598 - protein, 347 aa, unidentified
MRFYTNQHQYYCGVDLHARSMYVCIVNHAGEILVHRNMKAAPEPFLKAVAPYRDGLVVAVECIFTWYWLADLCAQEGSPFVLGHALYMKAIHGGKAKNDTIDSQKIAALLRGGMLPQAYVYPAEMRATRDLWRRRLHLMRQRAELLAHVQNTHSPYNLPELGKQIAYKANRAGVAERFADPAVHKSVEVDLALITYDDQLLGDIALSIVQAAKHHDANTLYLVQTVPGIGTILSLVRLYEIHDIARFPRGQDFVSYGRLVTCAKESAGKRLGTAGHKIGNGHLKWAFSEAAVLFLRNNPAGQKYLARMEKNHGKGKALTILAHKLARAVYYLLKRQTAFDMDKFLHG

SEQ ID NO: 325599 - protein, 389 aa, unidentified
MFYLGIDIGKNTHVASLVDDKKKVIFKAFSFSNSIDGAESLIFKLEAFKNELEVGMEATGHYWLSLYSYLCEKNFTVRVINPIQTDGWRQGIEIRKRKTDIIDSLLIADLLRYGDFVETSLSNEDSLSLRNLSRFRSYLISSIGDLKRKTIALLDQVFPEYASSFSNIFGKTSKEILSNFSTPSDFEDINSDDLNTFLESVTRKNYASKKIDELSKKASSSFGINFCLDSFSLQIKMLIEQISFIQNQVSDVENEIEVLLEKLNSPITTIPGIGSVNAATILGEIGDIKRFSNPSKLVAYAGLDASVSQSGEYESTYNHMSKRGSPYLRRALFQSALRAEFCDPVFSDYYQKKISEGKHHLVATNAVARKLCHTIFAVLTKNEPYQVQS

SEQ ID NO: 325600 - protein, 350 aa, unidentified
MLYTGVDYHRSFSYLTTMNDKGEIIGQKKLPSNGEIVDFLKEFDEEMEVAIEATPSWYWLYDCLEDEGFEVKLSHPLRTKAIAYAKVKTDKVDSATLAHLLRSNLLPLSYVPEKPVRLNRELLRYRASLVRIQSDVKNKIHTVLAKNNVSHGYSDLFGKEGMTFLHSLALPENYKIALEGYLAILDAVRQEIRAASKKVQQLAEQDHDYLLLMTIPGMGYYSALLTASEIGDVRRFRSAKQLCAYAGLVPSTYSSGNTCFHGHITKQGSRWLRWILVEATIHAVKRHGVLRRFYFKVERKKGGQIAKVATARKLLEWIYHILRDGRTYQEMEKIADLLGRGEPGKNSGSE

SEQ ID NO: 325601 - protein, 402 aa, unidentified
MNAVGIDVSKGKSMVAIMRPFGEIVSTPFEIKHTSSDINSLVKLIKSIEGESRIVMEHTGRYYEVLAHQLSEANLFVSAINPKLIKDFDNDSLRKVKTDKADSVKIARYALDKWQNLKQYSVMDELRNQLKTMNRQFGFYMKHKTAMKNNLIGILDQTYPGVNTYFDSPARSDGSQKWVDFASTYWHVDCVRKMSLNAFIDHYQNWCKRKKYNFSQSKAEEIYGKAKELVPVLPKDDITKLIIKQAVDQLNSASTTVESLRTLMNETASKLPEYPVVMAMKGVGTSLGPQLMAEIGDVSRFTHKSAITAFAGVDPGVNESGTYEQKSVPTSKRGSSDLRKTLFQVMDVLIKTHPQDDPVYQFLDKKRAQGKPYYVYMTAGANKFLRIYYGRVKEYLSSLPES

SEQ ID NO: 325602 - protein, 400 aa, unidentified
MRAVFGIDVSKASSEVAILVNGEKVHGYTISNDALGFARLLGDLKTVHKPEIIFEATGVYSRRLQAFLEDNGYAYTRLNPLEAKKQLDSLRVRKTDQIDAEKLAQSQFVLNRKPTYVQEEVYQNLRDLSRFYQNLTEDIVRAKNRLHKVLQVTFPELETILSTPTGEQYGNLVVAFPCKDFVLDLSKDELSESIRQSTSKRISDKRVAYLAEKLIALANQSYCAVKKTSPMLEEVRYYAQELLRLSERRKAVLDQMVELAQPLPEYDILLSIPGIAETTATSIIGELGDIRRFQSANQTNAFIGIDLRHYESGNFLAKEHITKRGNPYARKILFKCIHNIASASHTNPCHIADFYEKRKRQSQTTSTKPHTIASIHRLIRTMYYLIMHNKLYDYASTQNR

SEQ ID NO: 325603 - protein, 319 aa, unidentified
MLGINVSKDTLACTLFDPATQKPLWGRTVPNTAAGVQRLLKQTPLESPWALEPTGRYSLLAATKANHAGRRVLLAQPKKARHFLRSIQTRAKTDALDSHGIGLFALCRPLPAYPLKSPNVEQLDQLLSVRKSLSASLASFGLQARELTHGASALEPVIATLQAQKEEVDKQIAQLTASQPEFAIAQELEKVPGIGKVTAATLASRLSSHPFGHSDAFVAYCGLDVGVRQSGKRSGQTGLTKQGDGELRRLLYLAAQSNLRSKNSPFKAQYERERAKGLPTTAALCAVARKLARLAWSLHKHGTSYEPDRVHQQNQPHNP

SEQ ID NO: 325604 - protein, 391 aa, unidentified
MTILVGIDVAKDKHDCFIMNSEGEVLAKSFTILNNKEGFDFLYKKIQSVSSSDKIKVGLEATGHYSYNIIGFLLNKDLATFILNPLHTNLYRKSLSLRKTKTDKIDSKTIAMMLLSDVSLKSYSDISYHNEDLKSLTRYRFSKVEERAKLKTSLSRLAQILFPELEKLVPTLHMTSIYQLLEEFPSASAIASAHLTRLTQLLSKASKGHYNRETAIKIREAAKNSIGSNMPAKSLELKHTIKLIRALTIDIGEIEAEISKMMDMIASPITTIPGIGRNIGAMIISEIGDFSRFSSPDKILAYAGFSPSIYQSGKLDNCYAHMEKRGSRYLRYALFHAAKLVCHWDKTFADYLAKKRAEGKHYYVAISHAVKKLVRVIFHLEKTKQAFLKAS

SEQ ID NO: 325605 - protein, 467 aa, unidentified
MPRVRPHAHHRGRAVTLPPELHQVNLNAAGIDIGAAHHYVAVPPGRDPDGRDVRTFGAFTADLIALADWLTRGGIETVAMESTGVYWIPLFEQLTERGFEVKLVDPRQLKHVPGRKTDVLDCQWIQQLHTFGLLAAAFRPADQICVLRSYLRQRGMLVRYAAHHIQHMQKALEQMNCKLTHVVSDIAGLTGLAIIRAILAGERDPRVLARLRDRRCKADEATIARALEGTWRREHLFELRQAVELFDVYRAQIAACEAEIEAQLGQFADQSGGQPLGAAPRGRPAGRGALSFDARQHLQRLTGVDLTRIDGIDAPTGLKLVAEIGLDMTRWPTEKHFASWLGLAPGSKVTGGKQFSGRTKPSANRAATALRLAAHSLHHSRSALGAFYRRLKGRLGAPKAITATAHKLARLIYRMLRFGTEYVDSGQDYYEQRYQSRVVAHLMRRAQQLGYQLIKNETVSVATSSPA

SEQ ID NO: 325606 - protein, 416 aa, unidentified
MVSRGSGWKLLFVGDDWAEDHHDVCLQDAAGRVLAARRLPEGVAGITRLHELVAGHQDGDDPSQVVVAIETDRGPWVRALVAAGYRVYAVNPKQAARHREVVAVSGKKDDAFDAAALADMGRTRRHQLREVAADSDEAEAVKVAARAHQKLVRERTRQALRMRSALREYFPAALDAYAPLTLTGPDTLELLAKAPGPAAAARLTIAQISAALKRARRHDVAGKARQIRAALREQHLGQPEIVTEAYAAGVRASAAVITVLNEQVKVMEAMVESLFRRHPDAGIYLSQPGIGVITGARMPGEFGDAPGRYADARARRNYAATSPLTIASGKKKTVHARFIHNDHLVNAMHDQAFAAISASPGARAYYDELRSREIDHTDALRRVANRQAGILHGCLKTGTGYDEHTAWGHRSQPAAA

SEQ ID NO: 325607 - protein, 549 aa, unidentified
MNPLFVGIDVSSKNNVAYLMKPDGSKHSSFSVQNNLGGAKLLSERIVSALGSMQLERVVIGLEATSIYGDSLVYALREDGRLGRFQRKIHVLNPKQVRKFKEAYSDLPKNDWVDAFVIADHLRFGRINREVYMDDYRYKALQTLTRARFDVIQNLTREKQRFANYLFLKCSGMAQDKDIQNTSATTIALMEHFETVDDLANADLEELTAFITETGRGKFADPDATAKAVRAAAKGSYRLPKTVNDTVNQAMAVSIASMRALKGQVKVLDKAIEQQFEIIPNTLTSIPGIGKVYSAGIIAEIGDIHRFDSQASVAKYAGLVWNRSQSGDFEAEHSRMIKSGNRYLRYYLLEAANSVRRCDSEFRRYYDLKFKEVCLHSAFYSVSLKIFLHHLLDFIPLDFLLFPRTGIIGSACNRLLEQPVLVAVMDGQMRLMNCGDQKLGIEDHPSSLPNVLRADWVHVMDEWPTVNLPSGNSQITPHVPGNHNIPDLLPLRGAIKDLIHVPVKAEGLLSDSTVQTKIAVALLEGGEKDQFRVTSNTHPRPPRPARCTA

SEQ ID NO: 325608 - protein, 343 aa, unidentified
MTKVTTVGLDLAKSVFQVHAADRDGRPVVRKKLRRGQIHGFFAGLSPCLIGLEACASAHYWARELQALGHKVRLIPPQYVKPFVKRNKNDAADAEAICEALARPTMRFAAVKSAEQQSVLTLHRARELLVRQRTMLINALRGHCGEFGIVVAQGASKVTALIEMIEYPEDERFPALARAALGPLVEQLRMAQIQILDLEKKLMAWHRTNEASRRLEAIPGVGVITATALVATIGDASQFHSGRQLAAWLGLVPRQHSSGGKERLGRISKRGDGYIRRLLVHGARADLRWSKHRKERRSIWQESLLARRPTNVVLVAMANKTARVAWAMLSRGEPFRSEARIAA

SEQ ID NO: 325609 - protein, 393 aa, unidentified
MRFVGIDVASETHTVAAVRGDGEAVLKPSSFAEDAEGYERLFEKLGSSEDTLVAMEATGHYWKNLFAALVARGFAVALLNPLRTRRFAEEDLERTKTDAIDALGIARFAAQKRPAVTRLPDAATEELRELVRLRDRIVQEIGDRVRQLHRLVDLGFPEFTRYVRTLDSSLATALLHEYPTARAFERVGPTRVSKLVYDGQHRVGKELASQLVEAARRSVGAHHGPAYQVQVRYLCEDLDVLRQRLRDVDGDLEQHLDAHEVGTLLTTIDGIGPLTAARLVAELGDPTTFESPAALAAYVGVIPALRQSGKRTSQRAGLTPHGHIRLRHALWMPTLTAVRRNPWLRAHYQRLRGNGKPTKVALVACMRKLLIAVYAVARDRKPFVPHLPAQAKT

SEQ ID NO: 325610 - protein, 355 aa, unidentified
MNKINSNFEGQTIFVGMDIHKSSWNLGIHLNDMFVRNVHQKPNPAIMANYLKQHFPGAQYKAVYEAGKFGFWIQRQLITFGIECLVVNPADIPKSQKDTLQKTDPRDARNLGLRLQSGVLHGIHIPDEQQEADRVFFRHRKRILKDLNRCKNRIKGMLAFSGIDIPEQYDNASWSHNFINWLKALDCKQQSRRRALDYMISQMEYLRKELLLISNEIRKMMREQRYKKNYYLLRTIPGIGPLTAASILVEIGDIKRFETFYHLNSFVGLLPMEHSSGQSENKLSLTVRKHRQLRSDLVESAWTARRTDPAMSLYFQEQIKRKDSKIVIIKIARKLLNRIRYVLINQQPYEMGIVK

SEQ ID NO: 325611 - protein, 402 aa, unidentified
MPEHKSYRRFCGLDVGKNTHTLCIIDAQQNTLTPARSFHNDRRGFQQLLESLQQTGRKHTVLIGMEATGHYWYSLHHTLTQQGYTVTVLNPIQTARQAKREIRKRKTDKLDAQRIAVLLKNGQYRSALIPGELAMTCRQVTRLRYRLVRQQSRLKQLVQAYLHPVWPEYETLFANPFSVTSRKLLAETPVPADVLQWDQEPLREFLRKASRGKHGPQLAQNIHQAAQQSVGMQRGLPGSRLAIQVLLEQMDNAEPLLKKLKEQIESLAQQIPPYLHTLPGSTTRLIVSLYGEVDPIETFQSPSQLVAFAGLDPHVYQSGQYDAPRRRISKRGSPFLRQTVWQMAYRAVYQEGDLRRFWLHKRAQQKHHLAAITTVAGKLCHIIWRIMTDERDYLPDRRSSQP

SEQ ID NO: 325612 - protein, 359 aa, unidentified
MKTNAIVPETTVGLDLGDRFSYFLFLDRDGEVVEHGRVATSEVALTRKFGRLPPMRIAIETGMHSRWVQKVLEAAEHEVIVANPRKVRLIGNNDTKDDRLDAERLARLARVDPKLLSPVQHRGARAHVDLTILRSRDILVAARTQMVNHVRGVLKAHGTRPKKCSTRCFESRVEENVPKELQPALFPVLETLGTLNIKIRDYDRKIKDLANNRYPETQLLTAVNGVGDLIGLSYVLTLEEPRRFKESRTVGAFLGLRPRQRQSGSKDPELRITKAGDRDLRRLLIQAANYILGPFGKDCDLRRWGLKLTARGGKNAKKRAKTAVARKLAVLLHRLWVTGEVYEPLRQASRQKNAGKQRA

SEQ ID NO: 325613 - protein, 368 aa, unidentified
MNEGITSFVGLDVHQDSIAVGLAPEGREEPRFVGTVAPHFAALAKSLGRLGGAKALKIVYEAGPCGYGLARELRSHGYACEVIAPAKIARAPGDRIKTDRRDALLLARAARAGELVSVTIPDERDEALRDLTRSREDTVRARLKVRQQLKAMLLRHGRRYTGKSSWTQAHERYLADVSFGQPAQEIAFVEYRSAVRDAHERVERLTQALRAQLEHWRMRPVVEALMTLRGIDLVAAMTLVAEIGDFTRFARAQELMGFLGLIPSEHTSGATRRQGPITRTGNGHARRVLIEAAWNYRFPARISRGLQQRQEGQPKALREIAWRAQLRLAQRYRRLATRQLPLNKICVAIARELSGFVWDIARQVKPLA

SEQ ID NO: 325614 - protein, 350 aa, unidentified
MDQQQHYVGLDVSLETTSICVIDNKGTVVWRGKCASTPESITEAVHTYAPAAVRIGLETGQLSNWLTLNLRRRGLPVVCLDARHAKAALSLQINKTDANDAFGLAQIVRTGWYREVAVKSMDAHTLRMLLVARAQLVSQRQTIANTIRGLLKTFGLIVVRGSGALFAVRVREQIAGNDVLVAIVEPLLVVWHAIREQIEMLDRQILGRARADAAARRLMTIPGVGVVVALAYIAVIDDPARFRRSASVGAYLGLTPRRYQSGEADTSGHISKCGDGLLRAYLFEAATVLLQRHSRASTLKTWGLALAKRIGMRRAKVAVARKLAVIMHRVWSDRSEYRWGDVPVAANHRR

SEQ ID NO: 325615 - protein, 392 aa, unidentified
MDVVIGIDPHKATHTAVALGDGEVELGRLQIPSGRAQLHRLLTWAEPFPQRRWAIEGAEGLGVLLAQQLVAADQAVVDVPATLAARTRLLGNGRTNKNDPNDARSVAVTALRHRELRAVTTAGYNELLRLLAKRHIDLSNQRTRLVARLHALATELSPGGIAKTLSSTDAAKFLATVTPTDAVAQLRCDLIADLADLARIEAQSKQSERRIRDAVAASGTTVTDIYGIGPVVAAMLIGNTGDIARFANRDRYAAYNGTAPVEFSSGGRIVHRVSERGNRTLNHALHLAAMCQLRQRHSDGRAYFDRRVADGNTNKEAIRALKRQISNNVFRHLVRRPTLTAKDPGGHQDTTHQPARPAFIPTDRLFGEVTPGPTISYDSTATRRRDAPATAS

SEQ ID NO: 325616 - protein, 347 aa, unidentified
MLTIGVDPHKQTHSGVAVDPLGVQVAQRTVAARREGFGQLVEWARRLDDERVWVIEDVRHVSGGLERFLIDRGETVVRLPPRLMANARQDVRERGKSDPIDALAIARAALREGVDTLPTARLAGVELEIRLLGLHRERLVDTRTRLINELRWQLHDLWPDWEIPKRVLIQQAWQTKIAQRLRRAPSTVQVQIARDMITRVRELTRTITQLYHQLATLVAQVAPQLLAEKGLGVLIAAKLIGEIAGIDRFTSDAQLARISGCAPIPVSSGRTDRHRLDPGGNRQLNHAFHMLALTKILHDPRTADYLAKQRRNGKSNREAIRSLKRHLVRRVYHLLRDPSQVPTSISC

SEQ ID NO: 325617 - protein, 346 aa, unidentified
MKHSIRCGIDIAKLVFQIHGVNANSGETTMVKKLARGEMLRYFANKPPMLIGIEACGGAHYWARELTKLGHTVKLMTPQYVTPYRRGGKNDANDAEAICEALARPNMRFVAVKSESQQAVLVMHRMRDQWVRERTSLMNQIRSYLHEFGIVINQGRSALGKVLPLVAEDETLPLLFRQSMTDLADRLTDLETRIDALNKRIESWSKQDSTAKALLELCGVGSITASAAVATAGDVSVFKNGRQFAAWLGLVPKQNSSGGKTVLGAITKRGDRYLRTLLVQGARTVMLAASRAKKSTQTNSMFDWIYKLQERRPNNVVAVAIAAKQARMLWAIMAKQQRQAQTGLAI

SEQ ID NO: 325618 - protein, 434 aa, unidentified
MTATDSSARPRILVAIDIAKAKHEVLVELPTGKRRKMIVHNQLSDFRQLAAYLKRLEGALEIALEPTADYHRNLAYFLKVQGFAVKLVSSIAVARTREALHNSWDKNDPKDAQVILHLLRNGNTQYFYDPVIEQTNDLQELSKTHFQVSLRKTRVQHSLLNHYLPLYFPEAERFLSTSRSSWFARLLFEFPTPQAITQLTENEFLERGSQLLRRKQSKAAVLRALYAKAQESVALPVPLESQAIATFRLTLAQHLELCRIRTELEETAHELLQDQLDYQILRSVPGVGPIIALTVLAEAGDLRRFHHERQFLKFCGLDLATSQSGAYRGRTQLSKRGNSRLRSALWMAARRATHMQENTFRQKFSRYLRADTTNTDLKRKAYTACTAKMARTIYGLIKHQQFYRAYREDAIPEPGGRTRSYGPLRQAASGGLTS

SEQ ID NO: 325619 - protein, 407 aa, unidentified
MEIICPRCAGLDVHKETVVACVRIAGDGPPLQEVRTFATTTSGLLTLADWLESFHVQQVAMEATGVYWKPVWHVLESHFELVLANAAHVKNVPGRKTDVNDATWLADLLAHGLIRASFVPPVAVQELRALTRTRKQFVRERSAHVQRIEKVLEDANLKLGVVLSDIMGQSGRAVLQAIIDGQDDPQLLASRVSVRVKATRTEVLEALRGHVSAQHRFMLKLHLDHIKTLDETITAIEQEVGRGLEPFRAAARLLSTIPGLRGVSAHVVVAEIGIDMSRFATPGHLLSWACLCPRNDESAGKRRSTRLRRGGNWLKTTLVQAAWAAIKVKGSYLQAQFHRIRARRGAKKAIIAVAASMLTAAWHMLRDGTEWHDLGAAHFDRADARKTANRLIRRLQQIGYVVTATPA

SEQ ID NO: 325620 - protein, 343 aa, unidentified
MYYIGLDVHKKTISFCVKDAAGRVHQEGKIGSSRRELDGWIRTLPQPRTIAMEATIFTGWIYDHLLPHAEKVKVAHPLMLRAIAAAKKKNDRIDAGKIADCLRCDFLPECHMASTEIRDRRRTLRYRNLVMRQMVQMKNRVSGLLLESGVSYDKQRLHKMGYFTELFSTNEEISESIRPLLRLSREHIQRGQRLDRALISSLERDPLLSERLRRLRTIPGVGPITALTWALEIGDYTRFQSVKEAISYCGLCSAEKSSADKVMRMPISKQRNKHIQHVLVEAAKLAPRYSHELALLREKETQRGNKNRATLAVAWKLVAYMLAVERRQQDFVPAEELTAKAVA

SEQ ID NO: 325621 - protein, 556 aa, unidentified
MPTAELSFVKNRQASDSQIVSSFPFGNALARATDTVSKVIPKRCKGHPKAPSSAPIGNNFAARENRVVKKSAARDNRGGGNAKSRTQSQATVSTRNEWRPLTGSSAHVQKSERTASHEVHCISSTGDKAKALRRKVTQRKKPMKAWQELTHFAGFDWAKGHHDVVIVDKGGSIVAEFQFTHDAPGWEQFRKKVASFEALGIVIETSTGFAVEQLLNVANCTVFPVTPRSAKSYRERKAPSGAKSDHLDAWSLADALRTDGRDWKSLSLLDPIIQELRVLCRDEEALIEERTALVNQIQQAIYEYYPIALKAFDDWTMPSVWAFVIAFPTPEALKKAGKRKWENFLHSHRLWRSNTAPERLAWFAKATEFHASDAVTRAKSRLALTRAKQLQTLETQLELYRKAIEELFSKHPDHNLFDSLPGVGPKLGPRLLSEIGDDRALFGDAESLQCVAGTAPVTKKSGATRIVKIRWCCNKNLRHAVHLWANSSLNFCAWARVYYEALKKRGMTHAKALRNLGQRWLKILWKMWQTSTCYDPEFHAMNQLKHGSWVLSIDSK

SEQ ID NO: 325622 - protein, 329 aa, unidentified
MDLFIGIDVSKATLEMAGCTAHAAVSELAASVANSETGLAKLVPVLVARSPSLIVLEATGGYERLAAATLALAHLPVVVVNPRQVREFAKAVGQLAKTDTLDAAVLARFAERIRPALRELPHMETGPLSEQILRRRQLVDMITAEGNRRALVSAPVRRRLEAHMRWLERELGGVESELQRAIEASPVWRARDDLLQTTPGIGPRVSHSLIALLPELGTLKRQQISALVGVAPFNDDSGGRRGVRHIKGGRAAVRTALYMAALVGIRYNPVLKTFYQRLRAKGKPAKVALVACMRKLLTILNAMVRTNSPWRTEGSSLSPEPNRLALAAT

SEQ ID NO: 325623 - protein, 343 aa, unidentified
MSEITVIGLDLAKHVFQVHGADPDGRPVLRKRLRRGQVLEFFASLSPCLIGMEACAGSHYWGRELQALGHEVRLIPPQYVKAYVKTNKNDAIDAEAISEALTRPTMRFTAVKSAEQQSVLMLHRTRELLVRQRTMLVNALRGHCGEFGIVAAQGLSRAGDLIKRIEDPADTALPDLARQALQCLTSQIRAIQEQIALIEKKLLAWHSSCEASRRLAEIPGVGLITATAVVASVGNATQFRSARQFAAWLGLVPQQHSSGGKERLGHISKRGDGYIRRLLVHGARAHLSWSRRKKQIRSAWLTGLLARRPTNVVLLAMANKTARIAWAMLSRGERYQEMIAAAA

SEQ ID NO: 325624 - protein, 265 aa, unidentified
MENIALIGIDLGKNSFHIHCQDHRGKAVYRKKFTRPKLIEFLATCPATTIAMEACGGSHFMARKLAELGHFPKLISPQFVRPFVKSNKNDFVDAEAICEAASRPSMRFVQPRTESQQAMRALHRVRESLVQDKVKTTNQMHAFLLEFGISVPRGAAVISRLSTLLEDSSLPLYLSQLLLKLQQHYHYLVEQIKDLESQLKRKLDEDEVGQRLLSIPCVGTLTASTISTEIGDGKQYASSRDFAAATGLVPRQYSTGGRTTDLTQQ

SEQ ID NO: 325625 - protein, 402 aa, unidentified
MNCVGIDVSKGKSMIAVMRPFGEVVVSPFEVRHTANELSELAGLLKSLDGETRVVMESTGNYHAPVAWLLHDAGLYVSVVNAMLVHDYGNNSLRRAKTDKKDAIKLANYGLDHWLTLPRYVPEEDTRLMLKACYRQYQQYSKVQTMLKNNLISLLDTTFPDANRLFTSPPRDDGREKWIDFVATFWHRECVCDLSEKAFAAKYQKWCKKYGYNFSEGKALDIYAAARGHFGVMPKTDTAKLLVEQAISQLRATSSALAALKQEMQSLAASLPEYPVVMEMFGVGPTLGPQLMAEIGDVRRFHSKKALVAFAGIDAPPYQSGQMDVRSRSISKRGSASLRRTLFLVMSVILQHAPMNEPVYQFMNKKRSEGKPYRVYMMASANKFLRIYYASVKSYLDSLEHD

SEQ ID NO: 325626 - protein, 309 aa, unidentified
MRQEAVHGTRHDRHRSGQEVFDLVGLNRAGEVVVRRRLSRPQLLRFTANLRVRLIGMEACSGSHFLGRRLREQGHEVRLIPAQYVKPYVKTNKNDYIDAEAIAEAVGRPTMRFVPIKSDERLDMQSLHRVRDRWVARRTSVINQIRGLLLERGITFRKGRRHAEACLPGILEDADNRLSGLLRMLLAQLQGELRQLQSQIDEADALVAKAAREHEPCQRLMAIPGIGPLTATAVVASIGSGAEFRKGRSFAQSPGLNMWLGQLASRAHTNIVAVALASKMARVAWAVLAKSEAYRPPLLVTPAEAMACN

SEQ ID NO: 325627 - protein, 419 aa, unidentified
MDHSIRWWCGVDWASQKHHAYLLDAAGSRLGERDVAHGGAGLAELRDRLVEKTGGAPGEIAIAIETSSGPVVETLLERSFQVFSLNPKQLDRFRDRFSVAGAKDDSRDARVLGDALRTDPRAFRRISLEDPVVIELREWSRLRDDLTAERNRLGNRLREQLWRYYPQALQVAGDDLTAAWFLALWQQAPTPAKAAKLRRSVIERILTAHRIRRWEAAQLLDVLSQKPLAVAPGTAEAASAHIRLLLPRLRLISDQLKAADRHLDELCARLEAPAEDEPGQACEHRDVTILRSLPGVGRTVAAAMLAEAPGPLRERDYHALRALSGQAPVTRRSGKSCFVLRRYACNKRLARAVYHWSRVAVQHDPLSRERYAALRQRGHSHGRALRGVGDRLLLVACTLLKRGVLFDPDYKTAHGAAAA

SEQ ID NO: 325628 - protein, 346 aa, unidentified
MMIIGCDYHPSWQQICWVDTATGETEEKKLDHASGEAEKFYRGLSGTALIGMESTGNCQWFVEMATTAGHDVWIGDAAKIRAGETRQQKHDRRDAALILRLLLEGRFPRIWTPSGAEKDLRQLLLHRYKLVRIRAQIKNELQHLAMNQGVTKKARLWSKAGEQVLRELPLKPWASRRREDLYKVRAMLHEQITALDLAAVEAAEKNEKAKLLMTQPGVGPITSLAFVLTMGDVRRFQRGKQVASYLGLIPREYSSGGKQRLGSISKQGNRFMRMLLVEAAQSAVRYDPQMRSEYLQRCHQKAKGVAKVAAARKLAVRLYWMLRSNTKYPEIVHVESSSRVPLVSAS

SEQ ID NO: 325629 - protein, 338 aa, unidentified
MKITTIGLDIAKSVFHAVGVDKAGKLIKKKMLRRKDLLPFLAQIEPCLIVMEACGGANYWAREFELLGHSVKLIAPQFVVPFRQGNKNDYNDALAIAEAAQRPNMRFVKPKSVEQQDVQLLHRMRERLTKQSTALINQVRGMLAEYGIVIAKSKTAFKLQFPEILANETNALTTKGRAIFYHLYEEFSDIEKRLKSCDAQVLTETKNNVICQRLETIPGIGPVTATAFYAAAGDGKDFSNGRHFSAWCGLVPKQHSSGGKENLLGISKRGNAYLRTLFIHGARAVLQHSQNKQDKFSCWAIQLAERRGFNRACVAVANKLARMAWVIAARNEEYRLPV

SEQ ID NO: 325630 - protein, 402 aa, unidentified
MDGIGRSAGIDWAKERHAVCIIDGQGSAISRFEVEHTDAGLRELVRRLTGVAGVAIERPDGPVIDALLEADIPVVVIASRHVKALRTRYGLAGNKDDRSDAFILADALRTDGQRLRPLHPATPETVALRALVRARKDLVQARVRLVQQLTAHLELVFPGAVDLFDDLASPIARAFLLRFPSVERAAWLSPKRMAAWLAAQGYCGRSTGAQLHARLEAASRGMVGDAAGTMAAVTLALVHAIEAIREQTGTLEGRIAEQLLAHPDGRIFTSLPRAGRVRAAALLAEIGDCRERFPTPESLACLAGASPSTRQSGQHRAVTFRFACDKKLRDALIDFAGDSRLGNDWAADIYGRARARGKRHPHAVRILARAWIYVIWRCWQDGVPYDPGRHQALQRVLLAPAA

SEQ ID NO: 325631 - protein, 305 aa, unidentified
MNALVAIDVSKDSLQIQTETDQWACTNDPKGLASLSRKLKPLSKPFVICEATGGYERLLLRTMQEKDIPICRVNPRRIRAFAQSEGIKAKTDPIDAQVILNFAKEKKLQPTLPLEPERQAVKDLLDRRSQLTEMIAREKNRLQNSPASIHASIKRILKTLGVELVRIEKDIQSQVDAHPLLKAQVHHLISIVGVGKVTAWTTLGYLGEIDKIKRNEVVALAGIAPFNRDSGKMNGRRRIMGGRAKVRKCLYMATQTASRCNPVIKPYFEHLRAKGKPYKCAMVAAMRKLLLHMRSELINLQLELA

SEQ ID NO: 325632 - protein, 362 aa, unidentified
MQKHIFVGIDLGDKNSVARIGVDLEKSERLGFVNTKAGRARLIEEVKRRGEQAGAGMVIMAYEASSCGFVLRDQAQAAGIECKVLAPTKMEKSVEQKRNKNDDRDADDVLEKLRGHVLAGNRLPTVWVPDLETRDDREVLRTRLALSERQTQVKTQIQMLLKRHGLERPSNLGSTRSKQYRQWLESLSQWESLGWGTRQSLASLLRQLSGIEGEMENLEKLIRQLGSQPRHKTIVEALMKEKGVGLLAALVYRTEIGQARRFHRGRHVGKFVGLTPTSHESGQQSDRKGHISRQGPPRLRKVLCQASWVHVRYDPYSREAYQRLVAKNPKKKKIALVAVMRRLAVRLWHRMREVELKLETSS

SEQ ID NO: 325633 - protein, 346 aa, unidentified
MTIVETRAVTGGVDTHADTHVAAALDPVGGLLGVQEFPATAAGYARLLGWLSGFGTVCLVGIEGTGSYGAGLARHMAAAGVRVVEVDRSDRQDRRRAGKSDPLDAVSAARAAQSGRAAGAPRGRDGAVEAIRALMVAKRSARAERTQTVNQARALILTGPDDLRARFARHTAAALVTEVALLRPRPGDAAGYATRFALRELGRRAEFLDDQIERLDELIVPLVSARAPGLLALYGVGPETAALLLVAAGDHPERLRCEAAWAHLCAVAPIPASSGKRTRHRLNRGGDRQANHALWRIVITRMSSHPPTRAYVERRSKEGLSKKEIIRCLKRYVAREVYPCLRERAG

SEQ ID NO: 325634 - protein, 398 aa, unidentified
MTESSDCESVQVFIGIDVGKDTHHAVAINRSGKRLFDKALPNDENKLRSLISDLKQHGQILLVVDQPATIGALPVAVARSEGVLVGYLPGLAMRRIADLHAGEAKTDARDAAIIAEAARTLPHALRTLKLADEQIAELSMLCGFDDDLAAQTTQASNRIRGLLTQIHPALERVLGPRLEHPAVLDLLQRYPSPEKLASLGEKKLAAQLCKLAPRLGKRLAADIAQALAEQTVVVPGTNAAAVVLPRLALQLITLRKQRDEVALEVEQRVLAHPLYPVLTSMPGVGVRTAARLLTEVACRAFASAAHLAAYAGLAPVTRRSGSSIRGEHPSRRGNKALKRALFLSAFAALRDPLSRAYYTRKMSQGKRHNQALIALARRRCDVLFAMMRDGTFYTPQGS

SEQ ID NO: 325635 - protein, 425 aa, unidentified
MNFKMQNKQNQLIERITDQHLVVGVDIAQHVHVARAVNFRGIVVGKPLSFENNEEGFTRLLNWIQELKQMKNLDTTIVGMEPTGHYWINLSKWLVKQNMDVVTVNPHHVKRNKENRDNTQSKSDKKDALVIADMVKNGYYAFVRSTSESFEKLRVLMANRDVIVKRLVSSINQINRWVDVVFPELRQVFKDVSCKGAIATLRLFPTPAELCFLQPQDIVTGWKSCMKRHSGHKKARSLLVLAKRSIGTKQALDAYKLHLGQLLEEYDLASFQLERVTQEVTKVLEQIPFVKQLLAIKGISEISLAGILGEAGDLSGFAHGNALLRHAGLHLAEASSGKWKGQIVLSKRGRSRLRRYLFLATMSLVMNNPEFKALHSNNVKVKKIKKMKSIMKLCGKLARVLVGIARNGSAYKPEMIFPLDEQLAA

SEQ ID NO: 325636 - protein, 373 aa, unidentified
MSREIIYLGLDVHKDSITIAVLPSGAPAPTRVERLPNDLTKLRRFCERLAAHGEVRACYEASGAGYVVHRAMRAWGYHCDVIAPSLIPTKPGQQRKHDKYDAAQLARLYRAGELTLIRIPSEAEERVRDVVRCRETLQREVLASRHYILKFLTRRGFVYREGTNWSTAHYNWLRRLAAASSPLAPEDQMVFGEYLGLLEYKLSRRDELDRRIGELALTPALAPAVNRLQCFRGIQRHVAMVLATEIGDWQRFDSPRQLMAYLGLVPRERSSGDRERRGSLTKAGNSHCRHALVQAAWAYRYQPKVGLALKARQQGQSPVVIAHAWKAQHRLHTRYRRLAFRTKPQIAVVAVARELVGFLWAVMQDPHAAAVAA

SEQ ID NO: 325637 - protein, 459 aa, unidentified
MRSSSGKAAGKKRPAADPTLQIVHPYAAGIDVGNEFHYAAIAPAQAGAGESVRRFGCFTANLMELAAWLKQSGIRTVAMQSTGVYWIPLFDILEAEGLEVYLVNPRQTRNLPGRKSDVQECQWLLKLHSHGLLQNSFHPDEEVRSLRTLWRQRGDHVRAAGRAIQRMQKALTQMNVQLSNVISDVAGLTGMAIIRAIAKGERDPHKLAALRHPRIEASRQQIAASLRGNWRPELLFLLKQELALYDGYQGCIEECDQEIETRLAQLASAPLRTNADTPPPPRKRQRAQGNAPKFDLRTELHRVTGVDLTRIDGIDVLNAHTILMEVGWDMSRFPTEGHFASWLGLCPNNRISGDKVLGRSTKRVPSRAAKAFRLAANALLRSDSYLGAQYRRLRSRLGAPKAITAMAHRLARLVYRLLKYGQEYVDRGTSNYEERYREQQIRSLRKKASELGITLPIQS

SEQ ID NO: 325638 - protein, 322 aa, unidentified
MEAVYVGIDVSKQWLDVGMWPGSESVRVANDAAGIAQLVERLRALSPRAIALESSGGLEVLAASELHAAGLTVAVVNPRQVREFARSLGTLGKTDRLDAVVLAQFAHSHHSHGRLAPMRLAEEAEVELRALVVRRRQLLGMLVAETNRRERAPKVVRKSVVQTIKGRKRALADIEQQLKQVLANSPTQQAKATLLSAVPGVGPQLSYTLIAELPELGQLGRRQIASLVGVAPHPHESGKFKGRRLIWGGRARVRTMFYMAALSAVRYNPRLRAHYRALLERGKAKKLALVACMRKLLVTLNAILRDSSPWKPNYIVDFQHSR

SEQ ID NO: 325639 - protein, 422 aa, unidentified
MRYIGLDVHREFCEVAIAEAGRVRSAGRIRTRRAELELFAQSLGSDDEVALESTGGAVAIARILEAHVARVVVVNTKKLRQISEAKAKTDRLDARRLAELLAAGYLAEVWCPDEPTRALRRLVARRAQLVRQRSRAKNEIAAALQRNLLDRPGVYDVAGERGRRFLEGVELPDDERQTVDGCLRQIDFLDEEIAAVNRALAEAAVASEQMRRLMTVPGVNLQTAATFMACVGDIGRFHNPRKLVSYLGLDPRVRQSGEEPARHGHISKEGAAEARHMLCEAAWVVLRYPSPLRAFGERIKARRGAGIATVAVARKLVVLFWQLLTKQQDYAFGRPSLTRKKLRQLELAAGAARGKGQPGVWAANKAQRESELELARQAETAYRRLVSDWQPKKGAGATAGRASSKPSSGKQRGRASVPDPAL

SEQ ID NO: 325640 - protein, 363 aa, unidentified
MKRKVYVGMDVHKETISIAYLTSNSKELVKEQQIKHNEVQIKKFVTKLKSEWNEIHCCYEAGVTGYPLYRYLNSLGVNCTLIAPGKIPRQSSDKIKTDKRDAIKLARLLRSGDLESIHIPSEEEEAVRDYLRSRDSLRLDLGRNRQRLMKFLLTKGNVYSATKYWTVSHYKWLNNLHFENEILQETFNDYYSRVKVQEENLKAMDQKIRGVAESEPFRERVGILRCFRGVDYLTAMFLLCEVCDFKRFKTAGSFMSFLGLVPGEYSSGSKRKQTGITTGSPRLRRILTEAAWQHRFPGTGSKIVTARRVGQPALVVALAEKASLRLHKKFRNMQQRGKTPQVMITAVSRELSGFLWAAMNLVA

SEQ ID NO: 325641 - protein, 345 aa, unidentified
MKKNLFFIGLDIAEADFAASIYKTPGESIVTKEAIPNNSKGFEILLLWLNDHHINKKNCRICMEATGVYSQAISYYLLFQDFPVSVEPPLKVKRAFDPVGHKTDPVDSKQIAEYAYRFQDELTSWQPKDEILEKIRQLLSVREQFTKQKVALDNSLQAYSKQRVQVALIKKAQKETLNQLKKQIARIDKELEKLIKQDPQISQRANNLDSIPGCGMLLAAHLLVITENFTKIQNFKRLAAFIGIVPYQHQSGTSVYKRAKIRHFGPGPSRKLLRLAAQSVATYNVTFRRYYLRKLDQGKPKPLVLNNIANKLLKIACTIIRNNTRYIKDYRSINPMYLKSAVKNA

SEQ ID NO: 325642 - protein, 440 aa, unidentified
MAVRKREDEVFPNAAGIDVGASSHWVAVPARSNDESVREFGAMTDDLNAMADWLLACGVDTVALESTGVYWIPVFEVLEQRGLQVWLVDARQMKYVPGRKSDVQDCQWLQKLMRLGFLRAAFRPDAEVCELRAVARQRDILLKEQASWVQRMQKALVQMNIQLTEVLSDVMGLTGALIIRDIVAGERDPKALARHRHSRVKASTEDIIKALTGNWRDEHLFVLRQSLGMYDDIARHLAECDTKLQAELTNLGQKKIDLGKPPRFGSKQRQDYDARQTLTNWAGVDLTRINGLGLAAVTKILTEIGPDLSRFPTVKHFCSWLGLSPGTKISGGKMLSSKTKRSVNRVRQVLKMAAMSLSRCDSALGAFYRRLCARMDKPSANTAVAHKLARMVYFMLTRGEEFVDQGQQRYEEQQLERNVAALKRRATTLGFVVTPVAAET

SEQ ID NO: 325643 - protein, 283 aa, unidentified
MEHELHYIGIDTAKEKLDVDVLRPDGRHRTKKFANTTKGHDELVSWLKGHKIDHAHICIEATGTYMEPVAECLYDAGYIVSVINPALGKAFAQSEGLRNKTDTVDARMLAEFCRQKRPAAWEAPHPLERALRALVVRHQALTDMHTQELNRTETAREVQRPSIDAHLLWLEAELKRLEKQIKDLTDDDPDMKHRRKLLESIPGIGEKTSAVLLAYIGLKDRFAHARQFAAFAGLTPRRYESGSSVRGASRMSKAGHVSLRRALYMPAMVATSKTEWGLSLIHI

SEQ ID NO: 325644 - protein, 342 aa, unidentified
MAIIGAFDVHRRQVTYDVLDTVSGQVRRGQVRPACRATLRQFLARYAGETDVSFAVEGCTGWRFIVEELERAGFAVHLADPAATAAARGRKRRAKTDRTDTRQLRQQLVEGRLPESWIPPTLIREVRAKLECYHDLREEHTAWVQRIHATLFHHGVPVIEGALSTVAGRARLEAGEGLSPAARQTMGVALRVADGLQTELDALYRELSRFARRQPGCRALAAQYGVGPITAVAIWAFMGDTRRFSSSAQAVRHTGLDVTVYSSDGKRSPGHLSRQGPPVLRWALYEAACSAARATSPDLDYYHDTKERIDHKRAAISVARKIARRSHHILRNLGNTAWQDAA

SEQ ID NO: 325645 - protein, 337 aa, unidentified
MKSHAAVALDAASGRSLGHITVGSDKAGCEALVAWARGLGAERLIAIEDCRHVSGRLERGLLPHGERLVRVPPKLMAKARASARTPGKSDPIDAECVARAALREPQLPEARLAGPEADVRLLADHRGDLVGERKRLQNRLRWHLHDLGLDLALPARALDRYVWLDRVEASLAVLPASMRVRIALEQVRRCRELTREVRALEREIAALVRTLAPELLALPGCSALSAAQLLGQVAGAGRFRNEAAFAMHVGAAPLLASSGKTARHRLNRRGNRRLNSVLHIIAVTQARMHPPAIAFVARKRAEGMSMREALRCLKRHIARTVFRTMRRAEQARPAVCC

SEQ ID NO: 325646 - protein, 356 aa, unidentified
MATYYIGADVHSNSTELAIEKRGKIVARYSVPTSIPAITNVLDSLQGKKYLAVEEGPMSGWLYRNLNKKLDQFISSDPRRNKLIASDGDKDDTIDSAKLASLLRGGFLREVYQCDDDSRAELKHWVSLYHDRVRDAVRGINKIRARCRMHGVTISRSTLRDPVYRLKWLLKKNHSPLDSQLKMLWIGYDATVQQVMFSKRQLSKLSKKYNIIEQWSQLPGIGFIRATTIFAFLDTPWRFKKKNKLWKYCGVGLQRTTSGTDKKGRPKPARLQLPWAVNRALKNAVLGAALSAINQKNNVFKDYYERMLKNGIIISNARHAVARKMLTVMWAMWKTNSPFNEKVVCNKLNMPTVSVI

SEQ ID NO: 325647 - protein, 388 aa, unidentified
MAILSTQSRPAKLPAATTSTNTDNCVFVGLDVHKETIVLAARKGNERSAWLAEMTFIVADGFDKLLKFLKKLAKHGELRCCYEASGAGFVLHRQLADWGFECEVIASSLIPSKPGDKRKCDRLDARRLADYYRSGLLTVVAVPSKELEAARGVVRCRQAVRTKVTQSKHQLTKFLQTKGLAYREGTAWTGKHRTWLSRVKLDELDQFTFDEYLSMLEYLEHRLETLDQKLEELAMSSLFRESVAILRGFRGVQTLTAMVLVTELGDIRRFPTPRHVMSYVGLAPSVSQSGESRNKSSCITKAGSARCRHVLVQAAWNYTRKPKAASRDLKERQQEAPAWLIEQSWKAQQRLYDRFKHLEATIGKNKAVVAVARELAGFLAAALLKVAL

SEQ ID NO: 325648 - protein, 404 aa, unidentified
MHDPTECFGGVDWATDAHAVCVVDAQGRVIVHFDVAHSAEGLSELCGRVRRAGARRVAIERPDGPVVDALLAAGLEVVVVTSRSVKALRERYGTSGNKSDRSDAYVLADCLRTDGHRWRSLEPDSPATVTLRGHVRARKDLVETRVATANQLRAHLRIVLPGAVGLFRHIDSSISLRFLERFPSATRAAWLSEKRLAAWLGANGYCGGKTAAELHGRLTSAPEGLAGEEGDARGAVTLAYVAVLKSLRAQIDELDTRLEELLDAHPDAVIFRSLPRCATVRAATLLAEIGDCRSRFPDAETLSCLAGVAPSTRASGRHRAVTFRFSSDKKLRDALCDFAGDSWRGNAWAEQRYRQLRADGKSHPHAERILARSWAHIIWRCWQDRSPYDPARHGGHRRLQQTAA

SEQ ID NO: 325649 - protein, 357 aa, unidentified
MKKHTKPMDWQQKPAVLIGMDLGDKESQLCVLGADNEIRQQVRVRMTTPALESWFGGVQGRALVVMEAGSHSPWVSRLLEGMGHGVIVADPRRLRLISASDKKNDVEDARMLARVGAVLPELLKVVKHRSAEAQRDLTVIRARARLVEARTKLWCSLRGLAKSLGHRLPRRVKEETLKELAILEPLWKAVQDVSQRIQEYDGQIAELEKKYPEVARLQQIAGVGPLISLTFVLTLDDHMRFQKSRQIGSYLGLRPRQRDSGESQPQLRITKGGDKYLRSLLIQGAQYILGKFGPDTDLKRWGQKLAARGGKNAKKRAVVAVARKLAVLLHRLWSDGSEYQPLRHSQVGMVGASEAVG

SEQ ID NO: 325650 - protein, 310 aa, unidentified
MKNNEDIIYCGVDVSKENLDALVGNKVKRYDNTVKGIELLMKDAGDMYYVFESTGGYEREAAWYLLKHDKKVSIINPKRVRDHAKSKGQLAKTDNIDARMITSYAESNDLRLTEIPSDEQVMLTGLVNRLGQVKGLISKEKNHLESAFEKKHVSYIKKNMRFLEKQKDLISKEICEIIKVSEEMTVKAESIQEITGLGPVCSMTLLAYLPEIGTVSRKRVAALAGLAPYNKDSGNSRGYRHIIGGRSKVRKALYMGAMSAIKHNPIIKEFYNRLVEENHRPKKVALIAVMRKLLIAANYSVKNSDFMLAN

SEQ ID NO: 325651 - protein, 335 aa, unidentified
MFLFAGGSVWMRPSTGSVYATRDTNSMTPSPKRLSERLHREYPGAEFKSVYEAGFCGFHLHRKLEEIGIHNIVINPADVPTSWKERNGKNDAVDSRKLARELANNTLIPIYIPSEENLRLRNLVRRETQVVRNRTRCMNRIKAHLTLNGMTLKSWSGGNLRQQRAEALNHGDITLCLLIDELLMQRQQHLETLRQERLCVRSLGLEELLKRLDSVPGVGFRTALMLLAEIWDMKRFHTGDQLTSFVGLSPRLYGCGDSERMTGTGTRKHAALQSLLIEAAWRAIGIDVELRAKYCSLSAKKKPQVAIFAVARKLLMRIRAVWLLEKNYNLNRVEK

SEQ ID NO: 325652 - protein, 422 aa, unidentified
MLKETQDGEQIIERVAALDIGKASLVCCARVPDPQRAGRRLQEVKTFSTMTRSLQVMADWLFDLGVTRVVMEATSDYWKPPFYLLEAHGFQTWLVNARDVKHLPGRPKTDRLDAVWLCKVAERQMLRASFVPPPAIRRLRDLTRYRADLVSDCTGEKNRVEKLLEDAQIKLSVVASNIFGVSGREMMAALITGQRDPDVLAQMARGRLRAKVPALAEALTGRFSGHHAYLLTRMLTRIDTLEADIADMDSRIEAEIAPFADAVARLDEIPGIGVVAARTIIAEVGMDMTRFPTAAHLASWARFAPTVKESAGRKRGNAKTGHGNRYLAGVLGTAAATAAKTDTFLGERYRRLARRRGKKRAVVAVGRSILTIVWHLLTEPDSRYQDLGPGYYESRRDPDRKKRTHIRELEALGYQVTLQPAA

SEQ ID NO: 325653 - protein, 399 aa, unidentified
MNAVGIDVSKGKSMIAILRPFGEVVATPFEVSHTAAELDKLVNFIQKLDGETRIVMEHTGTYYEPIAYALHEAGLYVSAIHAQLAHNFDNNTIRRVKTDKVDAIKLANYALQHWLDLPRYTPQDDIRQQLKFCSRQYDKYLKLKTMLVNNLISLTDSVFPGVNELFTSPPRKLDGHEKWLDFLLKFWHADCICELSPKAFTEKYRKWCSKSGYHFSAEKADDIYVSACGHVGLLPKNKVTELLIKQAVNQVNCICNSIAVISNQMTELSSQLPEYPVVIGFFGVGENLASRIMAEIGDVSRFKNKNSLVCYAGLEAPPYDSGKFESKNRKISKKGSPHLRNALFQVMSCILKHAPTDDPVFKFLDRKRAEGKHFYSYMNAGSAKFLRIYFARVTQYLGI

SEQ ID NO: 325654 - protein, 311 aa, unidentified
MEHSHFVGIDVSKAHLDVHVLPTGDSFRVSHDDAGLVTLIERLRPVAPVVLVLEATGGYEVTAAATLASAGLPVAVVNPRQIRDFARATGQLAKTDTLDARVIALFAEAVRPAPRPMPDEQARALGELIARRRQLVDMLGAEQNRRRLLHDRRLQRHVDAHIAWLEEALRRLDHDLTTLIRSTPVWRETEDLLRSVPGIGPVTACTLIADLPELGHLDRRRIAALAGLAPFARDSGAFRGRRMIAGGRAHIRRVLYMATLTAIKHNPAIRVFYLRLVAAGRPGKLALTAAMRKLLTVLNAMLRDRRPWQPA

SEQ ID NO: 325655 - protein, 448 aa, unidentified
MKPQEIEDEEHEQVLQRVAAVDVAKKAGVVCTRVPHEARPGRRRTRVWEVPATTKAILELGAYLAGEQIEKVTLEATSDYWRIWFYLLESAGLDVQLVSARDVKNVPGRPKTDKLDAVWQAKCTERGMLRPSFVPPPEIRQLRDYTRLRTDLTRDRTRHWQRLEKLLEDALIKVSSVASSLDTVSVRDMLTALIAGERDPRVLANLARARMRAKHDALVEALDGRFDDHHGELARMLLDQIDHLDAQVGRLTARICELIAAIPAAQGVNADGTTGPAAGLGEDAPVLPAVIRLDEVTGIGRDAAQVIIAEVGLDITVFPTAGRLVSWAKLTPRTIQSGARHRSGPTGKGNPYLKGALGEAAAAAARTDTFLGERYRRIVKRRGKLKALVAVARSILVIVWHLLADPTARYQDLGSGHYASRIDKDRKTRSHIRQLEALGYTVTLAPAA

SEQ ID NO: 325656 - protein, 323 aa, unidentified
MSIVGGLDIHRKQITFDYVDTETGEVRRGQICPADREHLAKWLARFAGQDAHFALEGCTGWRYVAGEIAAAGLTAHLADPAEAAHLRGPKRRAKTDRADARHQRVLLEQGRLPECWVPPSHVLECRALLETYLDLREQRTGWVQRIHAVLFCHGAPRIAGQQLGTAEGAAALRAAAAHCSPAGQLQLAIAAQMLAVYDERLHQVRRQLRGAAELTARLYGVGPVTGLALTCWLGGAGRFSSSRKAVRFAGLDITVRSSDGKGPPGRLSRQGPPSPRHLTPTNSPSMTRSPRTSPPSPGWEPWSWPTSPETWSAPCAATSPPTG

SEQ ID NO: 325657 - protein, 391 aa, unidentified
MIFVGIDVAKDKHDCFILNSEGTVLADVFTIANNRIGFETLLSRIQSCSQGESKIKVGLEATGHYSYNLLGFLLDSGLATYVINPLHTNLYRKSLSLRRTKTDRIDARTIAMMLMSDVDLKSYSNTAYHNEELKSLTRYRFDKVKERAKLKSSVARLVNILFPELEKLVSSLHIAVVYALLSNYPGASYIANANTEELAETLCTASKGRYTKSKTAEIQVAAGVSIGSKMPAKSMELKHTIALIRELDKEISEVESAIDKITSQMDSPIFTIPGIGRHMGAMILAEVGDFSNFASADKLLAYAGLSPSTYQSGQLQNCYAHMEKRGSRYLRYALFNAAKYVCLWCPTFSAYLEKKRSEGKHYNVAISHAAKKLVRLIFAMQHSGKAFLADY

SEQ ID NO: 325658 - protein, 360 aa, unidentified
MKVQRTSIGLDVHARSVVGCGLDGDTGEVFQRRLCPDHREILEWIGGLPAPVAVTYEAGPTGFWLARALIGAGIDCRVAAPSKLQRPAGDRVKTDARDAAHLARLLHLGQIVEVTVPSGVQEAARDLVRAREDCRGDLMTVRHRISKLLLRQGIVYSGGAAWTGKHQMWLRAQRFDNPALMLAYEMALDAMVAGVHRRDRLDEAIAAMAVESEFTPVVRALSCVRGISTLTAFGLAVEIGDWSRLTGRSIGAYLGLVPCEYSSGTSRVQGGVTKTGNGHARRLLVEAAWHHRAPYRPSRDLRRRWEAATPALRARAHQANHRLHRRWAGFDQRKKRPVVANAAIARELAGWCWSLAIMAD

SEQ ID NO: 325659 - protein, 347 aa, unidentified
MLHAGLDLSRRRVDVHVLNEAGETLVVDAFPPDADGLAHLVRHVASFGEEVHAVIESMNGARFVHDTLELHGWGVEIADALRVKGLAPLACKTDKIDAKVLAELSRRDLVPAIWLPTPSVRAERERARFRLHLVHHRVALKNRIHATLLAFGHPCPVSDLFGESGRALLDRLAIPEPWAGTVSASLRLIDELDDQIDAAERELRRLGANHPYMSLLQTVPGVGWVLAYTIASEVGDIARFESPKKLVGYTGLCPRVYQSGGTDRRGRIAKNGPTYLRWALIEASIHACKNPLYKPAYDRTKARLGRDRGGKVARVELGRKLAEAMWHMLTKGERFAPARSQTVALVA

SEQ ID NO: 325660 - protein, 359 aa, unidentified
MLNVTRVGVDLAKNLIQVCALDASGKVLVNKSLPRDKFLAWCTEQLPSECLVAMEACSGSHHWARELNKRGFAAKIISASLVEPYRMEGKGGKNDANDAFAVSEAAARPKMRFVPVKSRHQQGLLCVHRIREGFKEERTGIINRIRGLMAEFGLVVSKSPDKLRESLQDLLEDAENGLDWLARLVIQELSTHWEAINQKIDWCDLRINAHIAEDTQAKAAMQLMGVGPITASAVVASVVDFKQFKNGAQFGAWLGLTPRQNSSGGKTKLGKITKRGDTYLRTLLIQGAKSAVMSAHKREDPISKWLFELKEKAGWQKAAVAMANKNARILWAVMTKGTAFDPRHMSLKPTGEISPAMAM

SEQ ID NO: 325661 - protein, 364 aa, unidentified
MDVHTTNYTLCCYSMEDDRFFAEVQVEPDAKNILKYLARIEKQQSRDCRIVCGYEAGCLGYSLYHQLHAHGIDCVILAPTTMMTKPGKRIKTDRRDARLISKCLAFHTYSPVYIPTEVDDAVKEYIRMRDDANSALARVKQQIIAFCIRHGKIHDGKSYWTNKHLEWLSSLDLGNKILSEVLQEYLIRYYQLREQVDMYDMRINELAQAEPYRQKVEKLGCFRGIAAHTALSFCVEVGDFRRFATAQQFASYLGLVPGECSSGDKQQYTGITKAGNSHLRKLLVETAQVFGRSATKSGKSVALKERQAKCDSLTVAYADKANARLKKKYFKIAMRSKVNIAKTAVAREMACFIWGMMTDNISCA

SEQ ID NO: 325662 - protein, 414 aa, unidentified
MRIIYDNVAGMDVHKRTVVATTSVKQANGSWQEDRRTFGTMTGELLGLSDWLLGKGVTHVAMESTGEYWKPIFNILEENFEVVLVNAQHLSRVPGRKTDQSDADWICELMQYGLLKASFIPPPGQRELRDLVRYRTSFVRERATLVNRVQKLLEGANIKLASVVTDIMGASGRAMLEALVGGIASNEEMAELAKGSLRGKREELAKALEGRVKDHHRFVLTELLCQIDSLDETIARFDLEIEAYCRPFEEAVVLLDTIPGVARQTAEIIISEIGIDMSRFPTADHLASWAGVAPGNNESGGKRRSGKTRKGNQHLRTALSQAANAAARTKGTYLQAQYHRLAGRRGRKRAIMAVAHSILIIAYHLIVRKEPYRELGGDYFDNIHPERTAKRLIKRLEQLGFQVSVKEFAAPTVA

SEQ ID NO: 325663 - protein, 411 aa, unidentified
MDLMYARCAGLDVHKATVVACVRMPGPRPDARHAETTTFATTLRGLEALAAWLTAHGVTHVAMESTGVYWRPVFAVLEGTVQVQLVNARHVKMLPGRKTDVRDCEWLAQLLECGLLRGSFIPPAAVRDLRDVTRLRKALIRERGHHVNRIAKTLELANIKLGSVVTDIMGKTGRAILQALSAGLDDPEQLAACAQGSIRKKQAALREAVEGRLTPHYAFLLEQHLALIDTLDAHITTLDARIEAAMAPFAEAAALMQTMPGVATRAASAILAETGMDMSPFPTAAHFASWARLCPGNHESAGKRRPTTTGKGATWLRATLQEVAWAAVKTKKSYYRALYHRLKARGGPKKAIVAVQHAMLVALWHMLKRRVPHQDLGADYFAQRNTERTLRHHVRRLEQLGYQVLIAKEAA

SEQ ID NO: 325664 - protein, 342 aa, unidentified
MNHYAGIDVSLECSSVCVVDASGKILREARVASEPEALIAWFRQSGFEFERIGLEAGPLSQWLFAGMKAAGLAVELLETRHVRKAFEAMPVKSDRNDARGIAQLMRLGWFRPVHCKSISAQETRSLLTARKLVQSKLLDVENSLRGILRGFGLKVGKTTGQTFAGRIEELVHGHPHLQMIAKALLAVRAVLRTEFAAFEKQTRRMVRSDMQARLLTSVPAVGPIVALTYASAIDDPTRFKSSKQAGAHFGLTPKKHQSGETDYTGRISKIGDASVRTALYEAANVMLTKPLKGCSQLKSWAMRIKKRAGMSKAKVALARRLAVIMHRMLADGTPFNATAAAA

SEQ ID NO: 325665 - protein, 400 aa, unidentified
MRTVFGIDVSKASSEVAILVNGERVHGYTMPNDIIGFSRLLEDLKTVSNPEIIFEATGVYSRRLQAFLEENSYDYTRLNPLEAKKQLDSLRVRKTDKIDAEKLASSQFVLNRKPTYVQEEVYQNLHDLSRFYQNLTEDIVRTKNRLHKVLQVAFPEIENLLSTPTGEQYWNLVSIFPTKHWVLELSEVELKEAIRNSTSKRISENRVGNLAEKLVGLAKQSYSAISKTSPMIEEVKYDAQELIRLTNRREQVLQQLIALAEPLPEYKILLSIPGIAETTATSIIGELGDIRRFKSANQINAFIGIDLKHYESGDFLGQEHITKRGNPYARKIMYKCIHNIASASHTNPCHIADFYEKRKRQSQTTSTKPHTIASIHRLIRTMYYLIMHNKLYDYSLAQSH

SEQ ID NO: 325666 - protein, 359 aa, unidentified
MGHERTFVGLDVHARSVVACGIVGDTGEVVRARLTPDHEEIWSWLAGLEGPVAVAYEAGPTGFGLARFLGQRGVRCVVAAPSKISRAPGDRVKTDVRDAMLLARLLKLDDLTAVSVPSVEAEAARDLVRAREDCRGDLMSARHRLSKLLLRQGIVWSGGHAWTGAHDAWLRRQRFDQSARQLAFESAYESVAMTLARRDRLDDAIAAMAADSAFTPVVVRLGCLRGISTLTGFGLAVEIGDWHRFTGSTIGSYVGLVPSESSSGQSRSQGSITKTGNTHVRRLLVEAAWHHRRRNYAGAEMHRRWNLAPVEARQRGQDGNKRLHARWQRFDARGKRVTVANVAVARELAGWCWSLAVMD

SEQ ID NO: 325667 - protein, 324 aa, unidentified
MIDGILGIDVCKNTLDVSISSYTKVRTKSFTNSPDGWRHLLDWLIAQKIQRVHACLESTGRYSLGIACALYEADHVVSIINPAQIRDFVRTKLGRNKTDGVDASHIREYCELFKPSPWAPPSEAHRRLGELQTIRSGIIAGLTEWKNRKNSGIVDGEAQALADATISHFTSQLGAVDKAIALTIDNDCDLQSKRDLLLSISGVGETLAGVVLAELPGPDVLRSSAEVVAYAGLNPRQHQSGTSIDRATRISKIGNAVLRAALYMPALSAMRYNSAIVALVARLKSRGRLKPKQIVVAAMRKLLVLCFGVLKTGRPFDAAIAMGG

SEQ ID NO: 325668 - protein, 349 aa, unidentified
MTEQRRSYADECVYVGVEVHKETYTVTCVCHKQIVKTATVQAEPAGLAASLPRWFPGATLYSVYEAGFSAFVLHRVLTKAGISNIVVKPASIAVAANDKVKTDRRDSKKLAIDLADGRLRGIYVPTEAEELARLLPRTRAQIVEHRATIARQVKAKLHQFGLIAPSSRRMISNRYLREMATWSLPPELSVSLTLLAEQWRFATRQLIEMRRLLREQAQAQQEIEKVYRSVPGIGAVAARTLATELGDMTRFANERALFSYTGLTPSEYASGASVRRGPISRQGSSRVRHVLVEIAWRAMPRDAVLKEIFDRLAATRGKKRAIVAIARRLTGRMRACFRQGTTYAVGTYA

SEQ ID NO: 325669 - protein, 457 aa, unidentified
MSKRRKSAQSKSFNLQSLPKQLQHINLNAAGIDIGSERHMVAIPEGRDEVSVREFGTFTADLIALADWLQQCGVTTVAMESTGVYWIPLFELLERRGFEVKLVDARHVKNVRGRKSDILDCQWIQQLHTYGLLAGAFRPADELCVLRSYLRQREMLTQTASMHIQHMQKALQQMNLLLHNVVSDITGVTGMKIIKAMLAGERDPQVLASHRDNKCHHDSATIAKSLVGNYRAEHLFALRQAVDLYEIYQTKIRDCDEAIVTQVSAQPDVTDEPPPAEQKRTSARDRQRGGLNVRDLLFQKSGVDLFAIPGLAADTLLVLSSEVGFDLSPWKTVKHFSSWLSLCPGTKISGGKVLSRRVKRNPNRAAQAFRMAAATLSRSKSALGAFYRRIKARSGGKQAITATAHKIARIYFALLTQGTTYVELGQQAYEQKYQERRLKHLVAQAKSLGFQLVPSLT

SEQ ID NO: 325670 - protein, 411 aa, unidentified
MDVVVACCAGLDVHQASVVACVNSTGRDGRSHKEVRTFATMRDDLIALHDWLKDAGVTQVAMESTGVYWKPVYAALEDDFDTIVANAQHIKNVPGRKTDVKDCEWDSDLLRHGLIRRGFVPPRDIRDLREVNRYRRKLAQVQAGERNRLIKVLETAGIKLAGVASDVFGVSGRAMIRALIEGEATPEAMAGLARGKLRGKRTHLARALDAPLQPHQRLMLRTQLARIEQAETDLQRLDVALTEMIAPYHRQMRLLMSIPGVEWINAVTIIAEIGVDMSAFVSAAHLASWAGLCPGNNESAGKRRSGKSRKGNVFLKTALITAAITGSRRGGGSYLGEKYRRLTARRGKLRAAVAIAHKILVSIWHMLTEGTFYQDLGAAYLDRLDRTRTARNLVRRLAAMGFDVQLQEKAA

SEQ ID NO: 325671 - protein, 344 aa, unidentified
MKNSNVIGIDLAKNVIQVCKINKHGELISNKAISPGKLKELLAKSSPSLVAMEGCGACHYWARLAQKYGHDARVISPKKVKAFLQGHKTDANDALAIAIAATQFGMIFSQIKDEEQQSLQTLETSRKFLDKELTALNNHIRAYLYEYGITMSKGKKGLRETIVLVLDDLDTRLPQCLKGTLQLLWERYQLTVVQLKKTEKNKAALVKQLEPCKRLMDLEGIGNVCASMLYASIGDGREFKNGRQASVYIGLTPKQHSSGGKTYIRGIDKQGGNKALRAALYQGALSVISRLPSEPRTVKEKWLQALVERAGVKRACIALANKTVRTAWALLATGKSYKPVLLTQ

SEQ ID NO: 325672 - protein, 346 aa, unidentified
MEYYVGLDVSLKHTSICVVNPTGSIVQEGVVDSDPEAIALFVRSRAPGTVRIGIETGPTTTWLWTELNRLGLPVICIDARHAKAVLKMQINKSDRNDAAGIARIMQTGWFKEVRVKDIDSHAVKALLASRALLVKIKRDLENQIRGLLKNFGLVIGRGKFNVFAVRAAELIENRPELIAAVRPLLEARKAIEQQVDDLDRKVHKLARHDVEVRRFMTVPGVGPITALCFKATIDDPTRFKRSRSVGAYIGLTTRRHASGEIDWSGRISKCGDAMLRMYLFEAAGVLLTRVPKWSGLKAWGAKLTKRNGLRKAKVAVARKLAVILHRMWIDGTEFNWSTKKAAAQHA

SEQ ID NO: 325673 - protein, 408 aa, unidentified
MKVLHARCAGLDVHKDLVVACARLQDSAGVQREHRRFETTTKGLLELLAWLVELRCTHVAMEATGVYWKPVWHVLEGHAELVLANAAHIRNVPGRKSDVNDATWIADLLAHGLIRASMVPPTPIQELRDLTRTRRQLVREIGQHTQRVQRVLEDANVKLSSVISDVLGMSGRRILETIIAGENDPEKLAALGSERLRCSQEQLREALRGRVTAHHRFLLRQHLDTIDHLQRAVDQFDQQIARQLEPFRAQFELLMTIPAVRETAAAVLIAEVGVDMSRFPTAEHLVSWAGLCPRMDESAGKRRSTRLRKGASWLKPVLVQSAWGAARTKRTYTQAQFLRLRARRGPMKAVVAVAATILTAAYYILRDGVSYRELGPDHFVERDRTRIAQRLARQIRELGYEVTIREAA

SEQ ID NO: 325674 - protein, 316 aa, unidentified
MSSPGVFVGIDVAQAELVIALRPTGESWTVGNDEPGIAALMRRLRPLAVTLIVLEATGGYERAVVAALATAGFPLVVANPRHVRDFARGTGQLAKTDHVDAQILALFAERVHPTPRPLPDAATQALEALLARRRQLLDMLTAERNRLAHADPPIARDLRRHIQWLEHRLGDLDDDLDQQIQRSPVWRTKDDLLQSAPGVGPVLSRTLVAALPELGRLTHKQIAALVGVAPLARDSGTRRGRRRVWGGRAPVRAVLYMGALTAARHNPIIRAFYQRLVAAGKPKKVALTACMHKLLTILNAMVRANTVWRHTVAQTT

SEQ ID NO: 325675 - protein, 347 aa, unidentified
MNFYTKQHKFYCGIDLHTQNMFVCILDASGNVQVHQNIHTSPEAFLHIIAPFREDIVVAVECMFTWYWIADLCIQENIPFVLGHALYMKAIHGGKAKNDKIDSRKIATLLRGGMIPQSYVYPAKMRATRDLLRRRNHLMRKRAELFAHIQNTRSQYNLPDPLGCIAKPQNREGIAERFHDPSVQKSMAVDLEVIEAYDHILTQLERDIIACAKEHDLRSYALLQTISGVGRILGLVLLYEIESIDRFPSVQDFVSYCRLVKCIKESNGKKYGSTGKKIGNAHLKWAFSEAAVLFLKGNEPAKKYLQRLAHKHGKAKALSILAHKLGRAVYFMLKNKEAFNQKKFLGL

SEQ ID NO: 325676 - protein, 461 aa, unidentified
MQIIHRCCCGLDVHKKLIVACLISLNEAGEFQKEIRHFPTMTKDILALADWLTSAGCTHVAMESTGVYWRPIWNLLEGQFELLLVNAQHIKAVPGRKTDIKDAEWIADLLQHGLLRPSFVPPAPQRHLRELTRYRSTLLAERARLVNRLHKVLEDTNLKLTAVVTNIMGLSARDMLDALLQGETNPEVLAKLARGKLRKKREDLEQALVGRVDDHHRFLLTSLLTHIDFLDEQVADCNGKIEQFLSAPSDEKAELVSSASDDQRQEQALVSSTPVGTGSMLAQDQVPEEGPKVPLSYQQAIALLDSIPGVNQRIAEIFLAEVGTDMQRFPTAGHLASWVGICPGNHQSAGKQIRGTTRKGDRWLRHALIEAAQGAMRTKDTYLSAQGRRLTHRRGKKRAVVAVAHSILIIAYHVLQRQQPYQDLGSNYFDERERSAVARQSVHRLEQLGFKVTLEAAGEAA

SEQ ID NO: 325677 - protein, 476 aa, unidentified
MEHLWQITIWVFDVSKGYADFILIDQSKRIIEDVFQLDDTFKGHCALTGFLQRFVQKHTDTCIYAGFESTSGFENNWYMMLSHLHEVMNVHIVRLNPVGVKKHHEAGLSRNVTDGISAFNIASYLVSYSEKVRYNEAQDMVSLKKQWNLVQLLVKQSTQLRNHLGFLIYQSNPTLVQYGKKGIPKWLLSLLSHYPTAGKLARARAKSVAKIPGITAEKAEQIVADARKSVASGDGETDEFIIRNTIQQIQSLEAMIDTHKKHMEKNCSVAEVDIINSFKGIGMSSAIGLWLYIVSLSRFPTCKKQASYFGLHPVYKESGDKSWGIHISKQGHKQPRAILFMVALSAISQNQLIRSLYHKKLSEGMDKMAAVGFCMHKILRIVYGMLKSNTAYDPEIDENNRKKTQEKQAVNKKYSDADKRRRHQGIDVGALISKRQHRKRIEASGQEPQENIVHEYGVIPTVPVSKIQKVLLPEKV

SEQ ID NO: 325678 - protein, 337 aa, unidentified
MKYSGIDLHSNNCVVVVSDEEDRIVCKRRVPNELGKVLALLEAYRAELAGVVVESTYNWYWLVDGLQGAGYRVHLANPAAIKRYEGLKHGDDDTDAAYLAQLLRLGILPTGYICPPGERALRDLARKRLQLSRSRTSHILAVENIMARQTGARIASRAVKALTQDALQKLAQPEDVRLAMAANVAVIHTLNAQIDKLEARLRERMKPRAEFKVLTSTPGIGEVLATTIMLETGTIERFAAVGNFASYARCVEAKRLSNGKKKGEGNRRNGNRYLAWAFVEAANFARRYCPEAKRFYERKKAHTNNIVATKALAHKLARACYHMLKEAKPFDVKRCFA

SEQ ID NO: 325679 - protein, 334 aa, unidentified
MPSLYAGLDVSDKSTAVCVVTAKGATVLETETATAPDAIAAVLKPFKRQLKCVGQESGNLAPWLEHGLARAKFPMVCLDPAKAHASLNGRLNKTDVNDARGLALILATGIYSRAHVKSVEAVRIRSVLLLRESIVRKGQDLSRSLTATGKRLKVDQQKSGKRVSLRSESREALRAALGIVKASAAAMSADRLKLDKIITALAKENDVCCRFMKIPGVGPITALSFFAAIDDPKRFASSRNVGAYFGLTPRTFQSGESSRSGGISHRGDSMVRRMLYIAAFSMLVKSKSKCSVRRWGLKVARTKGPKVAYVAVARKLAVLMHHIWVTGQDFDPSR

SEQ ID NO: 325680 - protein, 391 aa, unidentified
MRFVGIDIGAERHMVASIDEQSTVLQRPTAFREDAEGYQQLIGLLGPPAGTLIVMEATGHYWQNLFAMLAAEGFAIALINPLRTRRFAEEDLVRTKTDAIDALGLARFGQQKRPPATLLPDVATRDLRELVRLRARFLQDFGDRTRQLHRVVDLSFPEFTRYVVQLDSPRATALLQAFPTAAAVRTASERQIASIRGGQRPVGRELARALKSAARTSVGHHDTEVYARQVRFFCEDLDLLRRRLGNLERDIEHLLAAHQVGQLLTTIEGIGPQTAAKLVAELGDPAAFRSAGALAAYVGAIPGLRQSGKQTWDRAGLTRVGHAKLRAALWMPTLVAVRRNPWLRAYYQRLRARGKLPKVALMAAMRKLLIAIYTVAKHRRPFIPIITMTTP

SEQ ID NO: 325681 - protein, 333 aa, unidentified
MLFVGVDGHKSTSQITVMDAAGKILKRQRVLSTPEHFRQSLAEFSGPMKAVLEASYCWGPMYDWLDGLTDEVVLAHPSKVRAIAEARIKTDKIDSEILAHLLRADLIPRAYAPSKEVRAVKRMLRQRLFLVQLRTMVKNRIRALLTQHSVELPKLSDVFGKSGLAWLQQVELPKPDDCILREDLQLLKVFAEKIASTEQLIEKLAAGDEAVPWLASLPGIGKFLSVVIRWEVDDINRFQEAKKFASYTGLVPSTYASASRVVHGRLTKRGNKWLRWAFIEAVTPAVRTSASLRAQHQRIKIRRGAKDARTAIAMKLAELAWTVWTEQRCYEPR

SEQ ID NO: 325682 - protein, 399 aa, unidentified
MVGPVAHAIVGYSGSLWPSEQSRHREDWSVNDATTIRYIGLDVHRDSIVIAVAVKDGKPADVLGPVPNDIPALIKRLLRLAPAESLRCCYEAGPTGLVLARRLQEVGIACAVIAPSLIPVQPGARVKTDRRDAPKLAQYLRSGDLTPIHVLDPATEAIRDLARSRDDAKRAERASRQQLSKFLLRHGRWFEGRSTWGPKHLAWLAAQHFDNLAQQDVMNDYREAVEMATARVGRLTARLAERVATWEKAPLVTALQALRGVELVTAATLVSEVGDFRRFRSASELMSFVGLVPSEHSSGQSRRQGRITRTGNSHVRWILVESAWHYRRQPRMSKAIRERNDKVSAAVRAIAWKAQHRLHKRMYRLMANGKPATQAATAVARELTGFVWAIAREEVLLAG

SEQ ID NO: 325683 - protein, 362 aa, unidentified
MGLLNVVNIGVVFEPICFHKKENAMNVVGIDLHKRTISVCVVSQERKVSARRTFRCAQPDGIRAYFATLGEFQAVIEATASYEWLWMLLDPLADRIVLAHPGKMRIIAESTRKSDKLDAEVLAAFLALDMIPQAYRPSPRERAHRVLVRHRRYLSKRSTALRNKMRRILSDYNADREDLFSAAGTEYLKQVAVSDSHRFVLDQLLASWLAQQAQLEQTNRKLRAFARQAAVREREARAVLSTIPYVGPVTIDVVLSELGQIERFGSQKQVCAYAGLAPGQRESAGRIKEQGITKTGSSLLRWALIETAWRLVSKTRRWRALFEPLAKRRGRKKAIVAIARRLLCMMTAMLQDGRPYRYAVVQ

SEQ ID NO: 325684 - protein, 343 aa, unidentified
MDHFAGLDVSVKDTSVCIVDGVGKIVREVKVASEPDALLAVLRNAAYRFKRIGLEAGPLSQWLFSALAEEDFPVICVETRHMRAVLKAQINKTDRNDARGIAQMMRVGLYRPVHVKTLRSQKLRMLLTHRKLLQSKAIAVDNDLRSTLRNFGLKVGIVGAARFEARIRELVEDLPDLAILVEPLLVVRRVLREQIAVLHRRLLAVVRDDEICRRLMTVPGVGPVVALTYRVTVDVPARFRKSKSVGAAFGLTCSRDQSGERDHPGAISRCGDEMMRMMLYEAAQTMLVHVKKWSWLKAWAMQIAKRRGMKRAIVALARKLAVIMHRIWVDGTEFRWTREAAAA

SEQ ID NO: 325685 - protein, 360 aa, unidentified
MQTQRTQLDFKGQNIFVGMDVHLKSWTVTILAEELTHKTFTQPACADTLSNYLKRNFPGGSYHSVYEAGFSGFWTHYKLKEMGINNIIVNPADVPTSQKEQLQKDDPTDSRKLARSLRAGELRAIYVPSGSTLEDRSLVRMRATLVKDMTRFKQRIKSFLYFYGVPFPPQFEKSNSHWSNRFMKWLMQEVVLQHDSGNQTLKILIQEAEQQRTLLLDVLRKIRLLSRSEKYAANVALLRTIPGIALITAITFLTEIENIDRFANTDHLAGFVGLVPNYHSSGEKNNNGEMTFRGQGALRKSLIESSWIAARFDPALMMSHHELLKRMEPNKATVRIARKLLNRIYFVLKNKQEYVSGVVK

SEQ ID NO: 325686 - protein, 402 aa, unidentified
MDMDERQRFKWFLGIDVSKETFDVCCIPSHGERLFNLSASMDRKGFEELIKQLSTLSIPQESVVVGMESTACYHVNLYSFLISLGYSVMVINPLLISNFVKLQLRKTKTDKKDASVIAQFLLLNRDSLSQTILSSDISDLRDLSRQRESLVDQMSSIKSEIKRLLTMTFPELEHISGIFTKSMLRLLCHYPSAASIKQAKRSKITKVLIPGSYGKQTDVSVDRILKAAQGSIGTSSATKEIILKQKASLLIQLGEHLQELTDILIGLCQGKIQGEMDILTSMKGIGEKSAVNFLIEIGGDIKQFESHKKLIAMSGLDPALYQSGKIDRKGRISKRGNRHLRRVIWLMATKVIQFNERFKQYYLKRIKDGLPYKKAVLATAHKLIRVIFAMLTNKTLFNPKMN

SEQ ID NO: 325687 - protein, 403 aa, unidentified
MKRDGKLFAGLDWASKTHMVCVVDDAGKIKVRFEIPNSGKSFTGLVKRLTKLGVEGVAIERCDGPLVEALLDAGLPVVVITPRQVKGLRSRYTGSGAKSDAGDAYLLADVLRTDGHRLAALTQDSDATVVLRALSRTRKQLVEARVGLVNQLQALLERVFPGAIGLFARLDSDVAIAFLRRYPTSHAATTLTPARLNAFLHRIAYCGRKPVAELFARVHQAPAAGLRPPQADGHAVCVLGLLRAIETVRREERELQAEIIERLDAHADAHIFTSLPRAGHGVRAAALLAEIGDVRSRFPDEESLAALAGVAPVTRASGKIHSVGFRWACDKKLRNAIIDFADDSRHASPWAANIYNDAINRGKRHPHAVRILARAWIRVIWRCWQDHTAYNPQLHGGATRLAA

SEQ ID NO: 325688 - protein, 345 aa, unidentified
MQPMYYIGLDVHKRTIRYCVKDGSGAIHTEGTLPATRLDLDRWMKTLPQPWTAAMEATVFTGWIYDHLHPHAAALKVAHPLMLRAIAAAKKKNDRIDAQKICDCLRCDFLPECYMASTAIRERRRTLRYRNLLVRQMVQMKNKISMLLMEAGVSYNKPRLHKAGYFRELLATNPDIPEGLRSLLRVCRETVVRLSKTESALVRSLEQDSLLRERVERLMTIPAVGPITALTWALEVGDVQHFSSIKKAISYCGLCGAEKSSGNTTQRTPLSKQRNKHLQTTLIEAGKMAPRYSPVLALLYDTEKRKGNANRATLAVARKLVAYLMAVDRGQRDFQVRETSNGVAA

SEQ ID NO: 325689 - protein, 409 aa, unidentified
MLFIGDDWAEAQHDIEIEDDAGGLLARRRLPEGLAGITVLHELVAEHLDPDGEPGQVQVGIETERGPWVQALLAAGYVVFAVNPMQVARYRERHSTSGAKSDPGDAHLLAEIVRLDRAHHRPVAGDSEIAEHIKVATRAHQTMIWSRVRQVNALRSLLREYYPAALAAFGTDLASSDALAVLAAAPSPDQGRRLSQARIEALLRRAGRQRNITVTAAKIKAALASEQLSARPGVVAAYAASASALIAVLTTMVAQTEVLAGQVEQGFGRHPDVEIYRSQPGLGVILGARVLAEFGDAPDRYADAKSRRNYSGMSPITKASGTKRVVLARYARNRRLGDALVLQAYSALRISPGARAFYDRQRARGTTHYQALRALANRLVGILHGCLRTHSCYDEHRAWHTDHQLPAAA

SEQ ID NO: 325690 - protein, 316 aa, unidentified
MDQEQVFIGIDVSKKQLDAATRPAMVHFHVDNDDQGITTLIQRLVKLKPQLILLEASGAFETLAAASLRQAGLPAQIINPRQVREFARSTNKLAKTDKIDAAVLAHFAQLLQPPLRPWPEAQQQELAALMTRRRQLVEMLVMEKNRLGTAWSPKVRKSLQMHLQALQEQLRELEEDLDDFIHRSPLYLEKDQLLRSVPGVGPLTSQSLMAWLPELGALNRKQIAALVGVAPFNRDSGQIRGRRTVWGGRKQVRPSLYMATIAACRFNPAICSFYQRLLQAGKRKKVAITACMRKLLTILNAVLKHQQPWRLATTGS

SEQ ID NO: 325691 - protein, 317 aa, unidentified
MHSNPLIGIDVSKRWLDACSSGQANVERIDNSSKAITSWIGRAKPSLVALEPTGGYENALCATLCRHGIHYVKLHPNAVLAFRKSRGVRAKTDRIDARLIAEYAADQQARGALRESVTQDETLRALIVRRRQLADSLKAERCRLEHADDKWVKRSLGAVIKALVKSFDGIETAIARHIEDNPQIRALARQLQTIHGIGPVTAATLLGDLPELGRLTGKQIASLVGLAPQTRESGQRKYRAAIGHGRPQVRQVLFNAARAAISHPSAMKEVFDRLIVRNGRPGKVALCAVMRKLLVIANAVARDHFSSLKSVESMPPS

SEQ ID NO: 325692 - protein, 400 aa, unidentified
MRVVFGIDVSKASSEVAILVNGEKVHGYTISNDAIGFSRLLGDLKTVYKPEIIFEATGVYSRRLQTFLEDNGYAYTRLNPLEAKKQLDSLRVRKTDQIDDEKLAQSQFVLNRKPTYVQEEVYQNLRDLSRFYQNLTEDIVRTKNRLHKVLQVTFPELETILSTPTGKQYWNLVITFPCKDLVLELSKDKLSESIRQSTSKRISDKRVAYLAEKLIALANQSYCAVKKTSPMLEEVRYYTKELLRLSEQRQAVLDEMVELAQPLPEYDILLSIPGIAETTATSIIGELGDIRRFQSANQINAFIGIDLRHYESGNFLAKEHITKRGNPYARKILFKCIHNIASASHTNPCHIADFYEKRKRQSQTTSTKPHTIASIHRLIRTMYYLITHNKLYDYTSTQNR

SEQ ID NO: 325693 - protein, 319 aa, unidentified
MNTTTQANIRNNERHVGIDIGKDTLDIHIYELEKHWLTDNTITGIKKLITQLKRYRLTRVLVEATGGYERKLVEACAERGLPIIIVPPIKVRQFAKAQGVIAKTDKIDARLIAQFGVVMQPEVRALPGKKVRLVRDLLSRKRQLNETRTQELNRLQKAPKVLQSSHRRLIKLIEKDIVWINEELKKEVSTIAEWQRTYNIVSSVPGIGDGIAYTLLGELPELGQLSNRQISALSGLAPFNRDSGYMKGRRRIKGGRAPIRTVLYMGMLCAIQHNPVMRQFYDKLVAQGKHKKVALTACMRKMITILNVMVRNDTEWKMN

SEQ ID NO: 325694 - protein, 284 aa, unidentified
MPPAAPTFVGIDVAKAELVIAIRPSGDRWTVANDEAGIQTLVKRLDRHAPALVVLEATGGYERAAIAALAAAQLPLVVANPRQVRDFARATGQLAKTDRIDADTLALIAERNRLEHALPAVRRGITQHIRWLERQLQDVDRDLDDNIQASPVWRAKENLLRSAPGVGPVLSRTLIGELPELGTLPRKQIAALVGVAPLARDSGTLKGKRLVWGGRAPVRATLYMAALVGTRCNPVIRAFYLRLLAAGKPKKVALTACMRKLLTILNAMMRTNTTWRQIDQSQTT

SEQ ID NO: 325695 - protein, 338 aa, unidentified
MYVIGIDPHKGSHTAAVLDVDEQLVGELRVVADRGQRDRLLRFAEPFTPRTWAIEAAGGLGALLAQQLVAVGETVLDVPPTLSARVRLLDVGRTDKTDPHDARSAAIVALRHSRLRTVTAVDHSAVLRLLADRHRDLVAQRTRVICRLHALLCLLIPGGLPRLLSAQRAANALRGLRPLTLVDIERKRMAGEMLTDVRRLDTQLAAIRTRIADAVESSGTTVTEVYGVGPVAAALIVGHTGDVCRFPTAGHYARYNGSAPIEASSGPRIRHRLNPRGNRRLNHALHVAAITQVSHDTPGRAYFDRKLAEGKSRKEALRALKRRISDAVYRQLLIDSRR

SEQ ID NO: 325696 - protein, 348 aa, unidentified
MKYIGLDCHKQYDHATMIDTETGEIKAKRLSHIKEEYKEFIGDRTGTRMVIESCRDWSRTYELSEDLVEEIILAHPLKVKAIASAKIKTDAIDSRTLAQLLMADLIPQAHLRKGDNRVKQRVIRHRAFMVVMRTRLKSRIHGLVDSQLLPPDVLQAKPTNLFSKKGMEWLTSLEWAKVEDKKLVESHLRIMEAINQEISTTNDMVKEIYEKDRDAQLLATIPGIGVTLAMLISTEIDGVERFRSPSKLCSYAGLVPSTHSSGGKTYHGRITSEGNRWIRWALVEAAVPASYADAEIKERLDTLRKKKGANVAKTAIARWLLKVVYHVLKERRPYIATYNGMVKAGAAF

SEQ ID NO: 325697 - protein, 383 aa, unidentified
MRIVCGLDVHKDSVFVCILSENGDKFESKYGVLTPELEELHQLLVNHGVKEVTMESTSIYWHPIWRILEDIEELKLVNPYFIKQLPGRKSDVRDAAWIAECTMKDLIRGSFVPAPLVQRMRQYNRRIFDLNKEKVYKLTKLDAVLQRCNIRISNYVSSTDSKSYKEVVRLLSEGVTDAVLLADAIHGRTVNRVGKDVIIASLTGVVSEVDIDLIRQYREEIELDDRHLQECQEKLTAICEKEFPKEFENLQTIPGVKERSATSILSEIGADMKMFITASALVSWCGLKPRNDESAGKIKSRKITHGNKYIRKTMIECAWGASRTQDCFYSQFSYIQTVVRRKNAMKVKVAVARKMLVAVWHVLNEGVPYRDYKMLQAQAGGNS

SEQ ID NO: 325698 - protein, 421 aa, unidentified
MKSQAPAAFAAFIGLDWADAKHDICLQAAGAERRECLVLEHRPEAIDAWVQTLRTRFHGQPVAVCLALNKGPIVSALRTYDFLVLFPVNPLTVAKYREAFTPSRAKDDPSDAELQVELLLKHRDKLTPLSPQSPTRRALAQLVEYRRRLVGDKVRLTNRLTSALKNYFPHVLQWFQDKDTAIFCDFLSRWPTLKAAQLARRTTLESFFRAHHVRSADVITTRIEAIKRAVALTTDAGVITPNVLLVQALVAQLRVTLQAIADFDTAIAQRAQEHPDFPLFDALPGAGAVFAPRLLVAFGEQRERYASAEELQKYAGIAPVTERSGKQSWVHWRLQCPTFLRQTFVEWAAESTRHSFWAQVYYQQQRDKGKAHQAAVRALAFKWIRILYRCWQTRTPYNEALYLQALKRRSAPLLHNLANVS

SEQ ID NO: 325699 - protein, 354 aa, unidentified
MSQTPNTAIAVIGIDIGKNSFHVVGHDARGAIVLRQKWSRGQVEARLANISPCLIGMEACVGAHHLSRKLASLGHDARLMPAKYVRPYSKGQKNDFNDAEAIAEAVQRPTMKFVATKTAEQLDLQALHRVRERLVSQRTGIINQIRAFMLERGIAVRQGIGFLRTELPTILATRTDALSPRMLRVIEELAGDWRRLDQRIDGLSGEIEALARQDQACSRLMTVPGIGPIISSAMVAAIGTGDVFSKGRDFGAWLGLVPKQISTGDRTILGKISRRGNRYLRVLFVQAAWVVLVRIKNWERYGLKSWIEAAKRRLHHNVLAIALANKLARIAWAVLAKGRAFELTRTDDAGVRPA

SEQ ID NO: 325700 - protein, 355 aa, unidentified
MNSVRYVGLDVHRDTISVAVLDESGRLIMQSVLATKASAILDFIHGMRSIVHATFEEGTHAAWLYDLLAGKVAKLVVCNPRKNALLKLGSKSDAIDALKLAELLRAGMLSPVYHGERSALEVQQLARSYTMLTEDTTRVMNRLKAVFRGQAVGCAGKKLYAKRHRDGYLTELGTGGLRRRAECLYQEFDALQQLRHVTKRELIVECRKHAATKWLQSVPFLGPVRAAVLIGRVQTPHRFRTKRQFWAYCGLALETRDSGEYRMVNGQVARRKKPVLIRGLNWNHNHAMKGVFKGAATSASICDGVFREFYLGLLNKGMLPEMARLTLARKIAAITLKIWKKGEAFDSEKMKIQAA

SEQ ID NO: 325701 - protein, 375 aa, unidentified
MSDHSEAFVGLDTSKLRNAVAIAEGVRGGEVRFLGEFENSAAATAKLVKKLAAKYRRLTFCYEAGPTGYGLYRQIKSLGHECVVVAPSLIPKKPGDRVKTNRRDALSLAKLLRADELTAVWVPDRGHEAMRDLTRARETAMMDLRSKRQQTSAFLLRQGLHYSERKKTWTKTHMNWLASQKLEHAEQRLVFEEMMLAMRQAQERLERLEQAIRVAVPDWSLAEVVTALMAMRGIDLISAATFLAEIGDLSRFQHPSELMGYLGLVPSEDSTGDRIKRGPITKAGNRRARRMLVECAWSYQHPPRVGQEKQEKVAAAPRAVREIAWKAQCRLHGRYRALVRRGKLKTVAVTAVARELAGFIWAVSRAITTARVVAK

SEQ ID NO: 325702 - protein, 347 aa, unidentified
MEQYAGLDVSLKAVSICVSDGAGTVLWRGEVLNDGAAVVAALGRHAPGLVRAVLETGSCGIHLYRGLKAAEVPIVCICARQAKGVLKSKVNKTDANDAEGLAHLARTGWYREVYVKSTDAHELRALLRARQQLGKARRDFENQMRAMLRVFGLKVGQVSRGRFEERVRELLIKVPALHIPLDQLLMARRSLLRAHDGLDDEAKRMARADERCQLLQTMPGIGPLSSLAFVAALDGAARFAKSSSVGAYLGLTPRGYQPGEVAWSGRISKAGDGLSRTLLYEAANSLLVRFKAKAPKTAWPPLKLWAHELAAKVGAKKARVALARKMAVILHRMLADGTAYRWTPNAA

SEQ ID NO: 325703 - protein, 342 aa, unidentified
MKQYVGLDVSQKETSVCVVNEAGRILFEGKAKSDPGALTALLRERAPHAERIGFETGAMASWLWHELRRVDLPVVCIDARHARAALSVRMNKSDQNDARGLAELVRVGWYREVKVKSEESQKVRAILVARSRLVAIRRDIENQVRSLIKEYGLLFPRAIGLQFRNQVSELLGEDHQLIGVIAPLLSIHEHICEQQSKFDDEVRRLAKSDETTRRLMTVPGVGVVTALTFRHTIDDPSRFRSASTVGAYLGLTPRRNQSGETDTNGKISRWGDRLLRSYLFEAATVLLYRTKKWSSLKAWGMKLAKRIGVKKAKVAIARKIAVILHCIWVDGTSFDWGQAKPA

SEQ ID NO: 325704 - protein, 369 aa, unidentified
MEKGTTYVALDDSKRKIVAGILRAGDTEPVLREIPNEPTLIRRLFSRLKREAPVSACYEAGVSGYDLYRQLTALGVACQVMAPALTPRRPGQRIKTDRRDAGKLVRLFRAGELTPIHVPDEAEEAVRDLVRCRDDVRRDVLRWRHRLLKLLARHGRVYLAGKHWTHPHWQWIRAQHFDLPALQRAFEATLFALEQALTRLAELDHELTAIAQRAPYQEPVGWLRCFRGIDTLSAMILLAEIVDFQRFHRPRQLMAYLGLVPSEYSSGDTQRRGTLTKAGNTHVRRALIEAAWHYRHRPMLSPALRARSQGQPPEVLTQAWRAQQRLHRRYRHLINHGKRPPVVVAAVARELVGFLWATMTRPRSAVRVA

SEQ ID NO: 325705 - protein, 339 aa, unidentified
MELYAGLDLHSRNTYIGIMDKAFNRVFKKRVPNHLEHIVQTLDPFRDQIKGFVVESTYNWYWLVDGLMDAGYSSAHLANPSAIKQYEGLKHSDDQHDAFFLAQLLILGILPQGYIYPKKDRPVRDLARKRMFLVQHKTAHILSLQSLIQRHCAMKVRANDLRHWTVKELEAWLKEEYLVLSAQASLDSINFLKQNIQRLEKAIRKKVKLKKAFHYLKTVPGIGDILALTIMLEVGDINRFTKVGDFTSYCRCVPSHRLSDGKSKGHGNRKNGNRYLSWAFTEAVQLGRRHNERFRAYYNRKVAQANTSLATKALGNKLARICYYIMRDQVPFREELFCQ

SEQ ID NO: 325706 - protein, 426 aa, unidentified
MDIVNQVCAGLDVHKQSVSVCVRKVEGNGKVSSVVREFSTMTEGILQMGDWMALQGVKRVAMESTGVYWKPIWNLLEDRFELMLCNARDVKNVPGRKTDTKDCQWLVQLLQYGLLSGSFIPPRPQRELRDLTRHRAQLTGEHTRVANRMAKTLEDANIKLASVASDILGKSGRLMLEAIIAGQTDSEQLADLAQHKMRGKIPELKKALLGRVNEHHRFMLQMLFDHLAYLEKGIDDLERRIQEVLSSDTLNKTPKENDALPFDQAVTLLSTIPGVDACTAASILAETGTDMKQFPSPAHLASWAGVCPGNNESAGKRKSGKTTHGNRWLKRALSQAAWAASHTKNTYLNAQYHRIAHRRGRKRAVVALSHTLLTIIYQLLYQQIEYCELGPDFLNTIDPKNRLRYHKKQIEKLGFKVTLEIPEMVA

SEQ ID NO: 325707 - protein, 410 aa, unidentified
MTEFGKRYIGLDVHKHYLIALGVDEELQVVLPARRVELAHLEVWMKKTLRKQDEVVLEMTTNTWQLYDALVAYAGLVTVVHPPHVALITRSQVMNDKIAASILARLLAKGWLVGIWVPPQEVRELRGLVAQRQKMTRLATQAKNRLHAVIQRHHLFAPEGNPFRQSHHEWWLGLPLGRLEKMNVQSDLETLQFAEKQQRCLTDEMTRVATEDEQVSRLLHLPGFGVIIAVTIWAAIGDMRRFTEAKQLVGYAGLGARVHDSGLTTRTGRITKAGRLDLRVVLVEAAQAVANTHPHWKKELARLAPRLGRNKAIVAIARKLLISVWHILSQRTTDRFAEPEAVAQKLLRFAYQVGKENRPAGQTAATFVRQRLDELQLGRELSSIAWGSKQPIPLPPSASEKERSDVPNTK

SEQ ID NO: 325708 - protein, 332 aa, unidentified
MYLGIDLHKRYAQVAVIDSEGQIVEEVRVKNANLDDLARRYAGSRAVIEATSNYYHVYDTLAEYLDVTVAHPGKLTLIAHSDKKTDRVDAKELARLLRLNSVPQSYVPTDEIRQARALVRGRQTLVEDRTKFANKIHGLLADNGITREVKPLSVKGREFLRELSLPSPWDALLESYLDVVETLTEQMTQLEAAIEERAGSLKETQLLMTIPGVSYYSALLIYAELGEVDRFDSHKEVVSYMGLNPTIRESGDSRIEGGISKRGSGRVRWILVQSAYSAVYTCKDEYLSRFFHRLNRRMNPKKAIVATARKLLVSMYYMLVREEVYDPPGVSA

SEQ ID NO: 325709 - protein, 365 aa, unidentified
MKISTVAIETIEIFKEHRLTIGLDLGDRWSFCCVLQEAGKIILEQKVATTPEAIQQTFAKILRSLIALETGTHSPWVSRLLTELGHEVLVAHAQKVQLISKSNRKDDRHDARTLARLARIDPKLLEPVRHRSAQAQLHLTVIRARAALVSSRTALVNAVRGLTRSHGQRLRKCSTEQMNREMAKGLSPELREVLDPRRGEIESLNERIAEYDGRIEQIAQEVHPEVALLRQVKGVGPLIALTYVLTLDDPYRFRHSRDAGCFVGLRPGRKNSGNSEPQMHISKEGDRYLRALLVQGAHYILGPFGEDSDLRRWGRKLAERGGKSAKKRAVVAVARKLAVLLHKLWVSGEVYEPLRNNHPLESAAA

SEQ ID NO: 325710 - protein, 339 aa, unidentified
MEKEVVTVGLDLAKNVFQVHAVGCDGAVLVRRKLRRAEVIRFFTDLPTCLVGMEACASAHHWGRELMALGHEVRLMPPAYVKPYVKRGKTDAADAEAICEAVTRPTMRFVAVKTVEQQAVLMLHKSRDLLVRQRTMLINALRGHLAEYGIVTRVGAGGVTASLKALHNEQDRLPVHARSTLHGIAAQMRALSSEIDRLETQILAWHRDNETSRRLATIPGIGSITASAIAAAVPDASLFRSGRQFAAWLGLTPRPHSSGGKERLGGITKQGDGYLRRLLVVGATAVMRMARKDASRQPWMAQLLDRKPTKIATVALANKTARIAWAVMARKEVYTPAAV

SEQ ID NO: 325711 - protein, 414 aa, unidentified
MSKGISYVAMDTSKRFFAVAALYADRAACVEWEVVNEPATTKRMVRKAQREAGGEVVFCYEAGPCGYALQRQIEAMGVRCVVVAPSLIPVKPGQRIKTDRRDARKLVELFKAGLLTQVRPPTVEEEAVRDLVRCREDVLEDLARCRHRLGKLLLRRGYLFGPGRSNWTLSHRRWMLAIRWEQEADRVVFSDYLLAVDQAQSRLADLTAQLEDFAQKEPYSMAVGALVCFRGISTVTAMTIVAELHGIERFTSPRQLMAYLGMVPSEHSSSEKVSRGSITKAGNAHVRRVLVEAAHQYRHSPSVGAILRKRREGKPASIIALADKAQQRLYRRYRCLFLRRKPYSKLIVAVARELVGFVWAARALRQRPLPTNHCHAGSTPHKGAIREYQSASSSKRPASSAASVSWKLPRARNP

SEQ ID NO: 325712 - protein, 421 aa, unidentified
MARTVEIVYPICCGMDVHKNFLVACVAVTNEHSHTEHHIRRFSTFAGDLRRLASWLASYNCRDVCMESSGKYWIPVFNALERANINVCLTHPKYVKAIKGKKTDKKDAKWISELFKCDLVRASFIPPPDIRQLRDLCRYYVKLTGFASGEKNRAQNCLTMCNFKLDDVFSDVFGKSATRVLDALLEHGNGNFELDGLISGKCKSSPEKIRAALDGELDPAQAGKLHLIRQHISGIDTLKSSLETLIYKLAAKYQPQIDLLMTVPGISTPLTAIRILAEIGADMSVFETAKQLVSWAGLTPQNQESAGKKKATRIGRAGAYLKPLLVQIALNCGKSDKCPELKNKYLALKKRRGGKKAVIAIARKILTAIWHILSKNEAYNAELYRKADKPPVAREFTTAQAVAFLRSKGFMVVDEDSGEVV

SEQ ID NO: 325713 - protein, 357 aa, unidentified
MTEVRIAYRTSRVVVGVDTHADVHVAAALDPLGRMLGRLEVGTSTRGYAQLLKWAHAFSPITTFGIEGTGAYGAGLARFLVDAGCEVIEINRPDRRARRGHGKSDPIDAEAAARSVLAGGPLCIAKRDHDRVGMIRTLRVARRSALKMRTQVGNQMHALVVTAPDSHRHQLRHLPLDKLVAVSAAARPGTVTTPIAASKLALRSLAIRHQGLTAELVVLDRELGRLTMEAAPAMCDLTGVGPDVAGALLVAAGDNPERLRSDAAFASLCGVSPVPASSGKTNRHRLNRGGDRIANNALWRIVMVRLTCDQRTKTYVARRTAEGMAKRDIIRCLKRYVAREVFHALLATAPALTRISA

SEQ ID NO: 325714 - protein, 359 aa, unidentified
MEYGAIDLHKKQSQIRILTEGGDVIEDRRIVTARERFTAVFGLRRPMRILVEASTESEWVARHLETLGHEVIVADPNYLPMYGDRSRRVKTDRRDVAALADACRRAVYRAAYRRSDQQRAVQAQLRVRQGLVNTRTRAISLARSLMRASGHHIRNGESASFLQRLAACEVPNDLTAILAPLRGVIEVVNDELASADTRFAALVENDPVIKRLTTLPGIGPLTASAFVAALDDVNRFRGAKAASQVTSYLGLVPREFSSGERQHRGHLVRSAQPQVQTLLVQAAWRVRRSTRSETAALRDWADRVSRRRGKNIATVALARRLARILFAMWRDEVDYQPRRIHANRQSQAATTEQPVARAV

SEQ ID NO: 325715 - protein, 420 aa, unidentified
MELEALRPSVFCGIDWAEDHHDVALVDAGGAVLARLRIGDDAAGYTRLLALLADHGDTTGLPVPVAIETPRGLLVACLRAGGRKVFAVNPMAVARYRERYSVARKKSDALDAAVLAHVLRTDMDAHRPLPCDTELAQAIAVLARAQQDAVWDRTQAHNKLRSVLREFYPAILAAFVDKRDGIMRPEARAIMTAAPTPAAAAKLTKTQLVALLKRAGRKRGIEVEAARLRVVLRAGYLHQAQLVEDAYGRQTLALLRLLDAACANADELEMAAATSFALHPDAAIITSLPGLAALTGARILAEIGDDRSRFADARSLKAYAGAAPVTRASGKSRHVMTRKVKNQRLAAVGYLWAFSALSNSPGARAHYDRRRKTNERHTAAQRNLFNRLIGILYHCLRTGQAYDEQKAFQTSPTAALAAAA

SEQ ID NO: 325716 - protein, 335 aa, unidentified
MEFEFFIGIDVSKGELDFAVRQGERLLFHREIANETRAITSFIKDLCKLNGFVLNKAVFCMEHTGIYNNHVLACLYKKKSHICLEAATQIKNSLGNIRGKNDKIDAIRIAGYAYDKRGKLRLWQPKREVVQQLADLAATRLRLITVKKQLKVPLQEHAAFSTKKNSRQNLQICSHSLKAIDGDIARADKAIGQIIAADEELARIFTLATSVSGVGKVTAVQVIIATNEFKDINNPKKFACYSGVAPFTDDSGKVVKKARVSHMANKKVKTLLHLSAIVAIQHNPDLKLFYERKVGQEKKNKMSVINAVRNKLILRIFACVNQNRPYEKIYQKAVA

SEQ ID NO: 325717 - protein, 344 aa, unidentified
MDIVVLGIDLGKNSCSLAGLDASGRVVLRRRMRRSSVESFVNGLGRCIVAMEACCGAHHLGRVFAAQGHEVRLMSPEYVRPYVKAQKNDELDAEAIAEAATRPTMRFVVVKSQAQSDIQALHRARERLVSERTALINHLRALLLERGIVAPQGRRKLEEELSVFADEDGVEALSPRIRLLIEDLRSEWRALDERIAAFDTEFVRMARDDEAIHRLMTIPGIGTINATALAAAVGNARTFGRGRDMAAWLGLTPRQMTTGGKPRLLGISKRGNRYLRKNLIHGARAVLPYLVARETPLGRWARGLLARAHKNVVVVALANKLARIAWAVLAHGCVYDAGCEAAAT

SEQ ID NO: 325718 - protein, 428 aa, unidentified
MDELDRNRLEQFRQLRQEVRHSEEYLIVGIDIAKEHHHAFFGTATGKTLLRRLVFSNDAEGFRKLLDQAEALRVRHGLKKVVYGMEPTGNYHKPLGEYLIHMGRAVVLVSGVTVKKNRESLDGRWDKHDDKDSANVADLISQGKYLYYEYPTAALRGLRGLLSLKKRLKRHEQSYRVRIRNHLIAQYFPELDSDYGRSEAQGLAIVRWCFPVSQITEIDVDPFIERVTSRRISMEKKRRLEAIWEKAGESIGCDAVPGVEHEAKVMVEGVRQIRETIKETEQKIEEVCQQFPEYPSLLTIPGFGPDVSAKVLGAIGDPDRFQNGKQVLTLAGLDLSANRSGKDSAKAIPQISKQGKADLRYALYQGVFIASTKNQGFMRYYTSKLRGREKEKGIHTKMLIKLSAKMLLIAWTVMRKKETFNPTYLKVE

SEQ ID NO: 325719 - protein, 400 aa, unidentified
MAQPLWAGVDAGKSDHYCMVIDADGKRLLSRRVANDEAALEELISTVITLADDGELTWAIDLNAGGAALLITLLVAAEQRLLYIPGRTVHHASGGYRGEGKTDAKDAAVIADQARMRRDLAPLRADDDIAVELRILTARRTDLVADRTRAINRLRAQLLEYFPALERAFDYSKSKAALILLTGYQTPDGLRRAGAARLAAWLRKRKTRNTDAIAATAMEAANAQHTVVPGQQLAAAMVARLAKEVMTLDTEIGDTETMIEERFRRHRHAEIILSMPGFGVTLAAEFLAATGGDISAFGNTDRLAAVAGLAPVPRDSGRISGNLKRPRRYNRRLLRACYLAAHIATRTDPASRAYYNRKRAEGKRHTQAVLALARRRLNVLWAMLRDHKLYQPTAPNAAAA

SEQ ID NO: 325720 - protein, 320 aa, unidentified
MLSFAGIDVSKDRLDVMVLPEEQCSSVSNDPTGWAKLVEQLRGSSIAAIGLEASGGYERGVMRSLLAAGMSVRQVNPFKLRQFAKASGVLAKNDPLDARMIASFVAIMPTRPAQPRAPALERLVEMLAVRRQLSAEKVAAENASRLLENAMLQRLSRRRIARLAADIDMLDERLVEIVVADAALAHRYRLLTSMPGVGPVLACTLIALLPELGRMSRKQVAALVGVAPYAFESGKLKGKRCVWGGRAPIRHVLFMAAMSASNWNPLLKSFHDRLAATGKLPKVVIVAVMRKMITTLNAMVRDDVVWADRHRGQHSVPTAR

SEQ ID NO: 325721 - protein, 344 aa, unidentified
MDHFAGLDVSVKETSICIVDDTGGIVREVKVASEPDALLAVLKSQSYHFKRIGLEAGPLSQWLFSALAEAGLPAICVETRHMRAVLQAQINKTDRNDARGIARMMRAGLYRSVHVKTLRSQKLRMLLTHRKLLQSKAIAIENDLRGTLRNFGLKVGMVGKLKFEARIKELVENLPDLTVLVEPLLIVRRVLREQTAVLHRRLLAIVRDDEVCRRLMTVPGVGPVVALTYRATVDVPARFKNSKAVGAVFGLTPSRYQSGEIDRTGGISKCGDEMMRVMLYEAAQILLVRSAKWSWLKAWAMQIAKRRGMKKAIVALARRLAAIMHRIWVDGTEFRWSRQEAAAA

SEQ ID NO: 325722 - protein, 456 aa, unidentified
MSKQSKSTIPAVHAKPTQRKHAAGIDIGATSIYVAVPVDRDPQPVRSFQTFTEDLHRLADWLQRCRIKTVAMESTGVFWVPLFQILEQRGFEVCLVNAHHVKNVPGRKTDVADCQWLQYLHSVGLLQASFRPAQQVCALRSLLRHRDSLVQTASTYAQRIQKALDQMNLQLHHVISDITGVSGITILDAILDGERDPFKLASLRDYRIKATEETVAKSLVGDYRPEHLFTLRQSLDAWRYHRKLVAECDDEVQRHLVQFASKVDPKQKPLPRPKKVSSSKVYSSHPDYDLRTEHYRILGVDLTEVPGINTLLVHTLLAEVGPDLSKFRSAAAFASWLGLCPDNRISGGKILSVRTRHVQNRAALALRIAAHTLHHNQSVLGYYYRRMRAKLGAPKAITATAHKLARILYHLLTTGQPYQESIFEERETQHQQRTIFSLYARARALGYQLLPLAPAT

SEQ ID NO: 325723 - protein, 483 aa, unidentified
MISSVGIDLSRTGRHQVRCLDEQARPCDSFTFDSTLEGLETLEKHVFSDGATPTIVFEPTGLAWIPLATYLRARHPDSRLVKARLQKVAALRKYIHGHAKSDRVDSVTLAKMPFIDAEQLEEAYLPPAEYHALQRLTRQRERLMKSITIRKNRIGAIVEGYLPGLRAAFTNEWSVHARAFYRSRLNPFAVVRDGKQSLQAFLAGVYARGSQSQSHRLYRTCQTLSEFYKRAEAAGMVNEDFFNDLQDEIASELRLMDAEETEVESVSKRVEELYRRLHPSDNLRTIPGIGVRTAQVFLAVIGDPHRFRSQSAFANWTGVVPGANQSSDSEGKGLRMTKAGPAMMKRALYQAGDIARRYDPQLAYLYYREMVHHGKTHLQAMGAVMSHLAARILTVLQDDRPYELRDIDGRPVSKTEAIKLIQSRFRVSEEIRQARRHRKPHEGRPQRRGTREAAEAPQSRHTPTSPMPVYSATAGQSMGQMRT

SEQ ID NO: 325724 - protein, 358 aa, unidentified
MVTYVGLDVHARSTHAAAIDVSTGELLRARFGPGVEEPVAWLAGLPGPVRACYEAGPTGFGLYRAASAAGVAVEVIAPGKTPRGPSDRVKTDRKDAELLARLLLAGSLTSVVVPPVEVEAVRELMRAHDACRRDLMTARHRVSKMLLRHGRVYPESSTWTVAHRRWLAAQQFQEAVSDLVFADLIASVDGLSARKAAIAERLSRLAEDEAWWPTVARLRCFRGVDTLTAFALHLELGGDWQRFARANALSAWLGLVPSLHQSGESSHQGSITKTGSGFARRLLVESAWHYGRSPRIGVTLKNRQQGQPEHILQIANRAQQRLHRVYHRMRGRGKPHNVTVVACARELACFLWAAATAD

SEQ ID NO: 325725 - protein, 353 aa, unidentified
MAKLKVSSVHRFVEAFRGEEIWIGVDVHKRSYSVGLLRPDGMMKDWTCPADNQALVRTILSLPVRLGAVSYEAGPTGFGLARALEQVGIPVIVAAPSRIPRPVAASNKTDSLDCRKLAELASSGLIRPIAIPTEAEEAFRSLQRRRHQLTDSLRKVKQRIRALFLSFNIQEPPGIDKWGKVAVAEIARIEFPHCANETKVSLLRELHYLKDAQREVDGLLRTHAKEQDEARRIAAMRSVPGVGEVVATAFAAEIYRPERFNRSEEVTAYLGLAPVIRQSGGGKGKSFIRPVGQRRLRSLLVEAAWGWKQRDEWAQGFYNRILSRHGIPQKAITALARKLAALLWKLSLPPATA

SEQ ID NO: 325726 - protein, 345 aa, unidentified
MKKIMAGIDLHSNNLVVGIMDQDGKRVGQQKLPCELKAVVKFLAPFKKRLEQVAVESTYNWYWLVDGLQALGYPVVLANPAAMEQYRGIKHAGDTHDAFFLAEQSRLKILPTGYIYEAKLRPVRDLLRRRLLLVHQRTALMLSFKSLYTRTTGQEMTLGDLKALESKEAQQLYDHPANQLIAGMQITHIAHLSQSIEKIEQAVLASARELPMYSKLTSLPGVGKILGMTITMEVGDIQRFVQAGHFASYCRTVQAQCISNGKKKAENNSKCGNKYLAWAFVEAANFARRYDEHCRQWYDRKAAKTSKVIATKALACKLAKAAWYVMIQDSEYDAQRMFGQLAKTK

SEQ ID NO: 325727 - protein, 314 aa, unidentified
MAAECFIGIDVSKENLDVHTLPDGNALQFVNDPDGIKAICRKFSKLRPNLIIIEATGGLQIPVATALSLKKFPVVVINPRQARDFAMAKGRLAKTDKIDAEILALFGKLMEPEVRPLKDEQAQEMSAFMSRRNQLIRMLVMEKNRFSRAYGSVRNDIEKNIDWLEERLSEIDTHLGRIVRASPIWRERDNLLRSVPGVGDVLSRALLSNLPELGTLNRRAIAALVGVAPLNCDSGKHRGKRRVWGGRSDVRSILYMAVLSAKKYNPVIRDFYNRLKDAGKPHKVAAVASMRKLITILNAMVRSGQPWAQCANAA

SEQ ID NO: 325728 - protein, 320 aa, unidentified
MSRKRAKLFIGIDISKQLLEVAAHQHDYQFRCPNKANAFGVLIAELIVLRPTLIVLEATGGLERAVVDALRSAGLPVAIVNPRQVRDFARALGQLAKTDRLDARVLAAFAAAIRPQPRPLKTNDERDLDALTGRREQLVGMLADEKNRRASTASESVRDEIQEHLDWLTDRIAELDQQLKHLLQSSAHWQVKDQILQSTPGIGPVVSYSLLAQLPELGRLNRQQISKLVGVAPLNRDSGQQRGSRHIFGGRAQVRRVLYMAALTASRCNPVIKAFYERLRARQKPFKVAITACMRKLLTIINFMVHDGSTWKAAPADISA

SEQ ID NO: 325729 - protein, 355 aa, unidentified
MDEYSMYVGLDLGDRTADVCVLDLGGEIEEVSQIRLERKALVRFFGGRERCAVALESGTHSRWVQDLLLELGHVAVVANARKVRAVFTNEYKSDRRDAEMLARLLRADARLLSPVVHRSRQAQADLAVIKTRDHLVRERSKAINYVRGTVKSYGNRLRSCSAESFHRRASEDIPGDLLPALQTMLDHIASLTQRIRELDRAIATIAKERYPETKRLMSVRGVGPLTALAFVLTVEDPNRFEKSRTVGAFFGLVPRRDQSGNRDPRLPISKCGDGYMRRLLVSAAQYILGPFGQDSALRDWGLQRAQGEGRGAKRAAVVGVARRLAVLLHRLWIDDTDFVPYPKKSKRQRVLATIT

SEQ ID NO: 325730 - protein, 324 aa, unidentified
MTDAVLGIDVSKNTFDTNLGAGTKARSKSFANSPAGWHHLIAWLGEHKVGQVHACLEATGRHGLGIALALHEAGHVVSIVNPAQIRDFARTKLGRNKTDQVDAVHIREYAELFKPRPWTPPSPAMRRLCELQTIRAGAVAGLTEWKNRRGSGIMDDLALSLAKTTIQHFTSQLEAVDQAIAETIDNDVELSAKRDLLVSINGVGEALAGIVLAELPGPDILGSSAAVTAYAGLNPQQHQSGISVNRPVRISKIGNAVLRTALYMPALSAMRYNPAVAALADRLKAQGRLKGKQIVIAAMRKLLVLCFGVLKTGKEFDPAMAMGK

SEQ ID NO: 325731 - protein, 320 aa, unidentified
MDQTEYVGVDVAKDKFDVATFINNRYKHSVYPNDAKGHAEFAAWLTQNSTSPWVCMEATGHYSEGIADFLLKKSIKVSVVNPYQIKNFAKASLARNKNDIIDGRVIREFCKCMQPRVYVTTSEAQKQLKGLMILLDMLKGQLVQLNNQLHSLHEGMATNLLIKWIKNLEKEVSLVEQKMTALINEEPMLNRNMRLITSIKGIGKLTAFRVLALMPDVSSFQTAKQFAAYIGITPKQHQSGKLFGKTTISRLGDSRLRKALYMAALVAKRHNKGLAAFVTRLQNNGKTPKTIVCAVMRKLAHIIFGVLKSKLPFNENLSCI

SEQ ID NO: 325732 - protein, 414 aa, unidentified
MDWVACVGIDWGDKEHAWVMRRREGGTMTAGRMGSSAEEIHQWMRGLREQIPSGRVVVAVEQGRGSLLYALMGYDFVALVPINPRASKAYRESRRLSGASSDPLDAELICEFAYKHIEELRVWQPDDALTRKLRQLVENRRTLVDRRTATTHTLAATLKEYFPQALQWFGGETSPLLWAFVARWPTLDRLRLVSIEEITSELRGQRRRKVPAAAQKLVEQIQVAIPLTDDRAIIEASAMYAQSLIAMLLPLSEQIAKYDQTIAALWKEHPDRSIFDSLPGAGPVLAPRLAVAFGLDRTRYEHAYEMQCYSGIAPVIEQSGNQRWTHARHGYPTFLHQTFHEFAQSSIPKSTWAKAFYREQRKRGAGHHEAIRTLAFRWLRILVRMWKSSKPYDEEHYIAVLKAKQSPLVAQLAA

SEQ ID NO: 325733 - protein, 405 aa, unidentified
MIFVGIDWSEEQHEVEVMAASGQRLRSLRIAHGVAGLAKLQETILEFASEPSEVVVGVEADHGLLVNALAGSGYQVYPINPLTAARYRDRHSLAGNKSDRRDAVMLANVVRTDRHLLRPLAGDSEAALEIRARARAHLRAIRLRSQLRNQLRSLLLEFYPAVLPLLAADDIRDALAVLAVAPTPMRGRGLSLSQLESTLRRHGRQRNVAARARAIQAQLRAPHLDLQRPRLIAAHGDEVASLTRVLLQVRQELAQLEAQMAAAFRGHPDAQILRSCTGLADILGARVLGESGDDPTRYADATARRNYSGNPPVTRASGKKREVTRRVARNRRLADATFCWAESAVRHSPGAGELYSRLRRRGQAHNQAIRVIANKLVGQLHACLRDRTLYDEQRAWPTELSQRAA

SEQ ID NO: 325734 - protein, 353 aa, unidentified
MNSIGIDLHKASISVCVMSPDRQVLARQRMACNDPAGIVAFFQDWGPFQAVIEATASYEWLFQLLEPLAQRVVLAHPKKLRIIAESTRKSDRLDAQVLAEFLALDMIPPAFRPAPRQRQHRQPAVGDRRLVRHRSYVSGRITSVCCKIRVILADYNADRKDLFTPSGLKYLAQVKVSEADRFVLDQLVAERKRLRNQLAAVEKQLRTFARSAPVAEAEARAVTDRWLAVVDSIPYVGPVTVDVVVSELGDVQRFRSQKRAAAYAGLAPGHRESGGRSKELGITKEGSPLLRWAMIQTAWRLVQRTQRWRSIFEPLARRRGKKRAIVAVARRVLCMIVSLMQSGQRYRHAMPSA

SEQ ID NO: 325735 - protein, 411 aa, unidentified
MENILLRCVGLDVHKASVEACVRRMEPSGRLHQQTRHWGTMTRDILMMADWMAAQGVTHVAMESTGVYWKPIYNILEGRFTVLLVNARHLKQVPGRKSDIRDCQWIAQLLQHGLLKGSFIPPRPQRELRDLTRHRTPLVEEKTRTNNRIEKVLEDANIKLGSVASEVMGVSGRAMIQALLEGEKDPAQMADLARRSLRGKIPELQKALEGHLTEHHRFLLRLLWKELTQQEALIAELEAKIEELTRCFAPEIERLDAVPGVDRRVAEVVLAELGGDMSPFPTHRHLSAWAGMCPGNEESAGKRRKRRITPGNRWLKRTLVQAAWAASHTKSSYLASQYRRLVGRRGKKRALIAVGHSILVILYYLLKDGRQYADLGSDFFDRLEPQRLTRYYVNRLQHLGHKVTLEPWVTV

SEQ ID NO: 325736 - protein, 411 aa, unidentified
MRLFAGDDWAEDHHDVEVMNEAGKVLAKKRLPEGVAGMAGLHEMIGRHLGEDADDAEVAVGIETDRGPRVAALVAAGYVVFGVNPLQASRYRERHGVSGARSDSGDAHMLADMVRTDSRQLRAVAGDSAEAEGIKVLARTHKTLIWERTRQVQRLRHQLREYFPAALEAFDDLDAPGALELLGKAPDPARAARLTRAQVSAALKHAGRRNITDKATAILAALRGEQLGQPAAVTAAYAVTVRSLIAVTAALNEQVKILQGQVEADFGRHPDAEIYRSQPGIGAILGARVPGEPGDDPDRYADGKCRRNYAGTSPLTRASGKKKVVAARFIRNDRLVDALNAQAFAALTASPGARALYDELRARGIEHNDALRRLANRLVGILHGCLKTHTLYDEATAWSHRQNLPQSSVAA

SEQ ID NO: 325737 - protein, 365 aa, unidentified
MATMRMAREGAVHVTVGVDTHKDAHVARAKDQLGRRLGEKIVPTTPNGYRALLGWAKSHGEVATFGVEGTGSYGAGLARYLRSEGQVVIEVIRPNRQARRRHGKSDPADADAAASAVLAGDATGQPKAADATVEMIRALRVARQTAIKARTQAGNAMKALVVTAPDDLRECLRELSTIALVRTCARLRPGKLVDPTTATKVALRSLALRHEALETEVKVLEAQLTRLTAGVAPELLAVFGLGTDSAGALLVAAGDNPRRLRSEAAFAMLCGASPVEASSGKVARHRLNRGGDREANCALYHIVMVRLRWHQPTKDYMARRTTEGKSKREIIRCLKRYVAREVYAVLRSMQMSDVATAGQAPGEVA

SEQ ID NO: 325738 - protein, 341 aa, unidentified
MYSIGLDISKATVSVHIPLNSLDLEIENSKSGLKSFYSKLKKIYKKDLEKVVFVYEPTGSYSALMTKFCASKNIKAFIINPKQSSNFAKALGYRSKSDKIDAKMLFLSISIAKESEIKVPVINATAEDIKELMSYYMFTVKQRVAVQNHHEALRVKDGNSYALKDLKKRVKELKQKEDEIIQKIDEIIKEDEKLLNSYNNIKTIPGIGTISAIVMLHLFIKYPQANQKQIVSLVGLDPVIKESGTSLNAKPKISKSGSRLYRGVLFMATMVSIKYNEQMKAFYTRLKANGKHSTVAQIAVMRKLIVIAHSLYKNGSQYDVEVYQKACGITESKSENKEVIA

SEQ ID NO: 325739 - protein, 358 aa, unidentified
MSQKLNAAIAVIGIDIGKNSFHIVGHDHRGAIVLRQKWSRGQVETRLANLPPCLIGMEACVGAHHLSRKLQMLGHDARLMPAKYVRPYSKGQKNDFRDAEAIAEAVQRPTMKFVATKTADQLDLQALHRVRDRLVGHGQRTGVINQIRAFLLERGIAVRQGLRSLRSELPGILATRTDVLSPRMLRIIEDLAGDWRRLDERIEGLSSEIETLARQDKACERLMTVPGIGPIISSAMVAAIGTGDVFSKGRDFGAWLGLVPKQISTGDRTILGKISRRGNRYLRSLFVQAAWVVLVKIGPKHWDRYGLKSWIEAARKRLHHNVLAIALANKLARIAWAVLNKGRAFECVKTEETASRPA

SEQ ID NO: 325740 - protein, 345 aa, unidentified
MEYFAAIDVSLELSSVCVVDGTGKIVREKKVASEPEALAEFFRGTGLTFTRIGLEAGPLSQWLHAGLTAAGLPAMLIETRHVKAALKAMTVKTDRNDARGMAQLMRMGWFRPVHVKTLPAQEVRALLTGRKLLLGKLRDIELGIRGLLRGFGLKVGKISKGNYEKRIRELVTGHPMLEPIAAAMLQARASLRAEFGKLHRMLLAIVRDDPVCRRFMSAPGVGPVVAVTYKTAIDDPGRFRKSRDLGPYFGLTPSKYQSGEVDWTGRISKVGDAMVRTALFEAANVMLSRVTRFSALKAWALRVAKLRGLKRAKVALARKLAVVLHRMWIDGSEFRWSKAPATVAG

SEQ ID NO: 325741 - protein, 460 aa, unidentified
MAPKNTKRNSTQALRVVNADAAGIDLGSLSHWVCCPPDEDGSIHVREFPSDTLSLEALADWLASRGVTSVAMESTGVYWIPLFELLAGKGLDVVLVDTRNLSRVPGRKSDQEDCQWIQQLHACGLLKGAFRPGDDIVKFRALARLKRTLVREQADWLRRMQKELDQMNVRVHRAVSDISGVTGMAMLHAIVAGERDPAKLAALRDPRCRLGLEAIQRELTGTWREEHIRNLAVGLKMYEFIVDRITEMDNLIMPLLDNFRARAQRPDEPAPEPANAGKAANLRKRGQEPLRQALYGMCGADLTRIEGVSVETAQTVLSEVGPDLTRFETEKQFVSYLRFSPGTAFSGGKPVRKSRRRLLGCSRVREALRMAALAIRNSRTALGAYYRNIAFRKGANVAVFATARKIAQHIYRMLRYGTDYADAGLDAYEERCRERRIRNLKNNARTLGYAVTPCEAVAGA

SEQ ID NO: 325742 - protein, 342 aa, unidentified
MGKATIIGVDLAKNVFQVHGAAADGSVLFRKKLSRPQFARFMADQPPCLVAMEACASAHHWAREMVRRGHEVRLIAPHYVKPFLKRQKNDAADAEAIVEAALRPTMRFVEPKSADQQARAVAFRTREQLVKHRTETMNALRAHLYEFGHVAPEGIGFLPRLARVVEDRETNLPELARDICRMLVEQVVHLTDRINALKARIAAMSTEADRPRRLQTMPGVGPITALAVETFAPPMDQFRRGRDFAAWLGLVPRQHSTGGKQKLGKTSKMGQRDIRRLLITGAMAVIRWALRRGSPKGSWLARMLERKPPTVVAVALANKMARGIWAMLTRNEDYRGPVLIGA

SEQ ID NO: 325743 - protein, 325 aa, unidentified
MQTNNTTNNTVVYAGVDVAKATLQLHLQGYQSEFKNTLKGLDQLCAHLQKVPSVHVICEATGGYERPLVKTLQQGQIPVSVTNPARVRAAAQAQGERAKSDQIDARVLTDYGQRYQPKATPPTSATQDQLVALTQWLKQLIQGRALAKTQTEHHQDPFVLRQHAKLMAHIESQIATVEKQIAALIKQDAALQQRVNCLDEIQGVGLRTAWMVLAHMPELGQLNRHEVAALAGLAPWTRESGMMKGRCCIGGGRPEVRLALYMAALSAARCNPVLRTFYKRLRAKGKLPKVALTAVMRRLLIYMNICIKALPSEPATAGAADLKIA

SEQ ID NO: 325744 - protein, 402 aa, unidentified
MEVVYQRCCGLDVHKDKIVACVITESKKEIRSYGTVTESLIELVDWLKEESCENVAMESTGSYWKPIYNLLELEEIPAMVVNAQHIKAVPGRKTDVKDAEWIAELLRYGLLKGSYIPNREQRELKEYIRYRRSMIEERARELNRVQKVLEGANIKLSSVVSNIDGVSSRRMREEIIKGTEDTEVLAALAKGKMKQKTDELKKALKGLIGEHQKKILSTMLRHIDFLDAEIEKLDAEVKERMRPFEEQVKRLDSIAGVGERSAQTIIAEIGTDMSVFPTANHLASWAWMCSGNNESAGKKKSGKTKSLRSTLVECAKAAGRSKNSYLSAQYKRIAARRGRNRATVAVGHSILVIAYHLIKNNVDYQELGADYFEQRRKQDIVKRSIKRLEALGFKVTIEENVA

SEQ ID NO: 325745 - protein, 408 aa, unidentified
MNTLYVGIDVSSKSNVVYLMLPNGDKHSNFSVANSHEGSTLLVKKIYSALTSHSLDTVLIGLEATSVYGDNLVYFLREDATLAPFNRKIHVLNPKQVKKFHDTYNDLPKNDYVDSFVIADCLRFGRINKEVYMGEYRYKALQNLTRARFFAVQNLVKEKQRFMNVLFKKYSTMTQEKVFSDDFSTTALAVYDEFESAEALANMDLHELTDFIIEKGKNRFPDPDAVAKAIQKAARSSYRLPKTVNDSVNQVLSISITSMKALESQIKEFDKAIKALMELLPNVLISIPGIGPVYSAGIMAEIGDINRFDNQASLAKYAGLAWKQHQSGGFEAEVTRLIPSGNRFLKYYLCEAAFSLVRCDKEYSDFYHLKYKEVNRCQHKRALALTARKFVRLVFRLLKDNRLYCPAK

SEQ ID NO: 325746 - protein, 344 aa, unidentified
MEISVLGVDLGKNVCSVVGLDASGAVVMRRKVRRETLIALAEKLPACIVGMEACCGAHHLGRVFSAHGHDVRLMSPEYVRPYVKAQKNDDRDAEGIAEAATRPTMRFVELKSQDQLDTQTLHRSRDRLVGERTALINQLRAILLERGFVAPQGKRKLEGFLALLMDEQGGAGLTPRIILLVADARKQWAELDRRIAAFDAEFVRWVKENDEARRLTTIPGIGAIVASALVAAVGRAESFDRGRDLAAWLGLVPRQFTTGGRPKLLGISKRGNKYLRKQLIHGARAALPYVAERDTPLGRWAKGLISRAHRNVAIVAFANKLARIAWAVLRRHERFAAIRTPTAA

SEQ ID NO: 325747 - protein, 410 aa, unidentified
MTAPPAAVQPQLFFAGLDWASKTHMVCVVDGAGQVRVRFEIANTGKTFAGLVKRLTKLQVQGVAIERCDGPLVEALLDADVPVFVITPRQVKGLRSRYSGSGAKSDASDAYLLADVLRTDGHRLTPLTHDSEATRVLRALSRTRKQLVESRVGLVNQLTAELDRCFAGAIGLFSRLDSDVAIAFLRRYPTQHAAQRLTPSRLAAFLRRIGYCGRKTVPELHARVADAPAAGLSPVEADGHAVCVLALLRAIETTRREERELAADIIERLDAHADAQVFTSLPQAGHGVRAALLLAEIGDVRARFPDEESLAALAGVAPVTRASGKMHAVGFRWSADKKLRNAIVDFADGSRHASPWAAKIYNDAIARGKRHPHAVRILARAWIRVIWRCWQNRTPYNPQLHGGAMRLNAA

SEQ ID NO: 325748 - protein, 405 aa, unidentified
MEIIVDRACGMDVHKATVVACIMGTGIKKEVRTFTTMTNDLLRLKAWLKDNRITHVAMESTGVYWKPVFNILDDAFEVMLVNARHVKNVPGRKTDVKDAEWLCKLLRSGLVRGSFIPPKEVRELRDLTRYKRKLIQTITSEKQRVEKILEDANIKLSSIASDTFGASGKRIIQELMKGELKPEAMADLSKGRLRNRKEELKEALVGNMEDHHRFMIQAHLTHIAMMEGLLSSVEQKIKEKIERHFKEEYELLKTIPSVKDSASIVIAEIGVNMDLFPTEMHLSSWSGMSPGSNESGGKKKPGATTHGNKHLKTILTEFGWIASKMKGTYLWSKYHSLVGRRGKKKALVAVGHKILIMCYHILKYKVPYKELGPRYLDERRKDRMAKSYIKRLTSLGYAVTVKEAA

SEQ ID NO: 325749 - protein, 416 aa, unidentified
MKSASNTLPDQPINDLTAGIDWAVADHAVCVVDGRGHRVDQTLVEHTADGLRKLIKFLIDHGVGEVAIERPDGPIVDALLQADLTVVVISPNQVKNLRGRYGSAGNKDDRFDAFVLADTLRTDRPRLRPLIPDTAATVALRRACRTRKDLVAHRVAVANQLRSHLGNVFPGAVGLFKDLDSKISIAFLTRFPTQDQADWLTPKRLGDWLTKQGYSGKVPPTKLHGRLAAAARGITGSDAETQAHITHALLAILTTLVEQIAALTAQIDRQLHTHADQHIFTSLPRAGRVRAARLLAEIGDCRARFPTPESLACLAGAAPSTRQSGKLRAVTFRWSCDKQLRDAVTDFAGDSRHANPWAADLYQRARTRGHDHAHAVRILARAWLHVIWHCWQNGVSYDPAQHHALQRILQAQNQPA

SEQ ID NO: 325750 - protein, 400 aa, unidentified
MISIDGVGVFLGLDVGKQTHHGHGLTPAGKKVFDKQLPNSEPKLRAVFDKLTAKFGTVLVVVDQPASIGALPLTVARDAGCQVAYLPGLAMRRIADLYPGEAKTDAKDAVVIADAARTMPHTLRTLDLADEVTAELTMLVGFDQDLAGEANRTSNRIRGLLTQFHPSLERVLGPRLDHQAVTWLLERYGSPQALRKAGRRRLVEIVRPRAPRMAERLVDDIFTALDEQTVVVPGTGTLDVIVPSLAKSLAAVHEQRRALEARIEALLEAHPLSQVLTSMPGIGVRTAAVLLATVGDGSSFPTAAHLASYAGLAPATRQSGTSIHGEHAPRGGNRQLKRAMFLSAFAALHDPTSRAYYDRCRARGKTHTQALLRLARHRISVLFAMLRDGTFYQPRSPRPA

SEQ ID NO: 325751 - protein, 348 aa, unidentified
MNALHYIGFDVHKKTISFCVKTAAGEIVEEGSLLAQRAVLRRWAAARPQPWRGALEATLFSNWIYDTLQPYGGQLEMAHPAKMKAISAGKKKSDTIDARTIADLVRCNLLPACYVAAPQIRELRRLLRYRSLVVSEAVRMKNKMAGLLMETGALYVKEKLHRKKYFASLLEELEEVPESVVDLLRLSRGALEMFESTQKRLVRELLAYPELAERVERLMTIPAVGEITALTWALEVGDPQRFHSSSDAMSYCGLTAALKSSAGKQQRGPISKQRNRWLQTTLIEAAKLAPRWNPQLAALHARELERGHRNRATLAVARKLVAYLLAVDKSGQPFQVRAPSEVPTQKAA

SEQ ID NO: 325752 - protein, 359 aa, unidentified
MKTRIPEVSKKAFTIGLDLGDKSSAYCVLDAEGTVISEQKVRTTPKALSDCFGAMAIGRIALETGTHSPWVSRLLSSFGHEVIVANARHVRLIAQSRQKDDRLDARTLARLARVDPKLLSPVTHRSAQAQADLSLIRARAGLVRSRATLINMARGLVKTNGERLQGSSSRIIKSNVSMDLSPALRVSMEPVLASIKALTLQIREYNRKIIELGKTSYPEVALLTQVHGVGPLVALTYILTLEDPHRFEKSRDAGCYIGLQPARRNSGTCQPQLHITKQGDPYLRSLLIESAHHILGPFGTDSDLRRWGLTLASRGAALGKKRALVGVARKLAVVLHHLWVTGEVYQPLHQATAAVTQAA

SEQ ID NO: 325753 - protein, 344 aa, unidentified
MQISILGIDIGKNSCSVVGVDDRGAVVVRRTMQRHTLIEFVEKLPTCVIALEACCGAHHLGRLFAARGHEVRLMSPEYVRPYVKAQKNDDRDAEGIAEAASRPTMRFVELKSQEQLDIQTLHRVRSRLVAERTTLINQLRAVLLERGVIFAAGRVKFESALDGLLAEADEVLSVRIRSLVIELRDEWQLLDKKIGALNAEFVVLARQNSAMRRLTSVPGIGVLNATALVAAIGDAGSFKHARDLGAWLGLVPRQFTTGGKARLLGITKRGNTYLRTLLVHGARAAMHTLSQSDTPIGQWLQTMLSRGIQRNVVIVALANKLARIAWAVLRKAQPYERAYGAAVI

SEQ ID NO: 325754 - protein, 410 aa, unidentified
MEIILRCCAGLDVHKDSVEACVRRMSGGGKVEHEVRHWGTTTRALVEMAEWLCSSGVTHVAMESTGVYWKPIFNILEAQFEILLVNAHHMKNVPGRKTDIRDCQWIAQLLQHGLLKGSFIPPRPQRELRDLTRQRTQLVDEASRISNRIQKVLEDANIKLGSVASNVVGVSGRLMLEAIIAGQDNPVELADLAQRRMRSKIPQLEQALYGKLTEHHRWLLRLLLDQFETSERFITRLDERIAELTRPLEPVLEKLDAIPGVDRRVAEVLMAEIGPDMTPFPSDAHLASWAGISPGNNESAGKKRSGKTTKGSRWLRQALVQAAWAASHKKNSYFQAHARNLMHRRGRKRGLVAVAHSLLTVIYHMLKGGTAYRDLGAQFLDRIRATQLVRFHVRRLQQLGLQVAIAPAAV

SEQ ID NO: 325755 - protein, 408 aa, unidentified
MDAIVERCAGLDVHLDTVVACVLYGKLDIKPKKEVKTFSTTTKGLLELLDFINQKECTHVAMESTGIYWKPVWNILESGAFDLIVENAKKIKNVPGRKTDVKDAEWIASLLRCGLIEKSFVPPERIRDLRDLTRLRKELLGEVNRNKNRIHKVLQDANIKISSVLSDVFGETGKSILNQIIGNQCITEEFIYSLYEGRGKSKLKSTPMEMYEALNGKIRGHHVILLGMHNSNIVFLEKQINELEKEIDILLQKERDSLELLETIPGISKISASSIIAEIGTSMDVFKTEKHISSWAGLCPKNNESAGKKKRSGIKSWNNWLRSMLCECAWSATKKKDSRFKNKYWSMVPRMGRKKALIAIANMMLRLIYHLLKTKSTYKELEIQYFIDKDKRREDRIIKELKSKGYLV

SEQ ID NO: 325756 - protein, 383 aa, unidentified
MRSVALDLAVKKISYCEIEVGHVVARRTVTSLSSLKELLGPGCLPARIAIEACREAWHVHAELTRWGNEVLLVDTTRVRQLGVGEHGRKTDRIDAEILAKAVEKGSLPKAHLLSKPRQQLRLELSVRRTLVETRSQYVTTIRGLARTHGVRLPSCDTNAFVSHLRKVKLDQDLQELIEPMSHVLEKVDEDLARAEMRLQSIVEKDSKIQLLMTVPNVNVVVAAVFVSVIDDAHRFRNAHQVGAYLGLVPSEKSSGEHRRLGSITKEGNSYARATLMQASWGLIRLGRSDDPLQQWAKAVAHRRGKFIAAVALARRLAGILWAMWRDDTAYDAARVGFRSAAGLERQAQETKFRATAMHSAAQKARRRARPHERKLEHLKEMNL

SEQ ID NO: 325757 - protein, 340 aa, unidentified
MDEYGGKQYVGIDLHRRRSVIVRMTPEGERIGPMVRIDSEPVELAQQIASWGEAPEVVLEATYGWYWAADVLADAGANVHLAHPLGIKGFAYRRVKNDERDASDLADLLRMGRLPEAWIAPPRVRELREQVRHRCKLVALRSGLKAQVHSVLAKQGVAVPMSDLFGAAGYELIADAGLDAPFHARVLSLLRLIDAFTFEIDVVGRRVTAELNHDRGFTAIQALPGVGPVLAAVFVAEIGDVTRFAGPQQLCSWAGMTPKHRESDTKVHRGRITKQGNKLVRWAAVEAVQRVHSGPLAGKKARLAVRRGNNIAKVAAARELLTLVYYGLRDGHIRALAKTA

SEQ ID NO: 325758 - protein, 345 aa, unidentified
MEQISRIGMDTSKHFFQLHGVNAAEKVVLRKKLRRKEMVVFFEALAPTVIGIEACGASHHWARILRSFGHEVKLIAPQLVKPYVKRGKNDTADAEALCEAMSRPTMRFVPVKTAEQQAALMMAGLRDRLIRNRTQLSNAIRGYAAEFGFTSARGMAHIDPLLDRIQADESVPVLARELFAAQAEEYAQLQAQIVEADAKLMAWHKADECSRRLANIPGIGPIGATLLLLKTPAPEMFRSGRQFAAWIGLTPKDHSTAGKVRLGVITRAGDEALRSVLVVGATAVIQHVRRGGRGSPWIVGLLKRKPPKLAAVALANKMARIAWKLMVTGNGYAAKSAPAALTGDA

SEQ ID NO: 325759 - protein, 347 aa, unidentified
MYQDNVIALDLAKNVIQVCILDKQNEVKTNRELRRQQVLNWLAKQAPSIVAMEACGSAHYWAKQARALGHQPILLSARFVKKFVEGHKTDKNDALAIGIAARQPNLKPVSIKSDDQLALQAMEKIRKHYQDTAIATSNLVRAIAFEFGIVIPKGEKAFRERLPDILEDAENGLPMMLREPLHQQYQFWISLKQQVRQAEKQLRVQLNTHEQCNELQKLDGVGPVNALNLYLALGTRGEAFKNGREAAACIGLTPKRHSSGGKVVMLGISRRIAKKQLRANLIQGALAKIKIVAKRAPRNTREVWMKQLIERRGLRRAAVALANKTVRMAWAMVHYQQPYQAPESVTI

SEQ ID NO: 325760 - protein, 526 aa, unidentified
MCAAVRRPRPGRRSRQRGHVGKPNGVFSPRVQKVGPQHFGVVSVDCAKDRSKWMLTDFYGHVVVPPTFVEHHRTAFDQAVAAVRSAVSRHGIKDLVVAVERTGRYHRPVQSAFAAAGFDTRVVHPSVSCYFREAGAYDTKTDDTDLEGIFRAAVNGFGLQEQPWDAVYGSLQLWSRQRRDLVDKTSQLRCQILEYLNEYLPGYQRCFDDVFISKVALLIACHYAAPQAIAAAGLSALVQLCRQAHVQVHNATLMRIMGWAQDAPAPEQSASFYQQWVCNLNEDRLTKEKQIAACEQQLVALLVQTPYVRLLALSGINVVLASELAGELGPMTYYATARVITGRAGLYPRRYQSDQVDHASGTLARRGNRRLRYVLVMSADTLMRCNQYFGVLRAKWAHQGRDPRDIRVRVAGRYSRISFQMVTGKGGFRHPACQGPPAVLSKLIEFHNEHDIDPYTARTNLQRAAAQLPRAEQAREKKALHAQLDAARQSWGRGPKQLCSILPAVLEQLGGVPTNLIKSIASGETP

SEQ ID NO: 325761 - protein, 385 aa, unidentified
MSDHSEAFVAFDTSKLRNAVAIADGGRGDEVRFLGEIDNTPAATAKLVRKLASKYERLTFCYEAGPTGYGLQRQVKSLGHECIVAAPSLIPKKAGDRVKTNRRDAVGLAKLLRSGDLTAVWVPDRQHEAMRDLTRARETAMLDLRAKRQQISAFLLRQGLHYPEDKRTWSKSHLNWLASQKFDIAEHRIVFEELMEAMRQAQGRLDRLEAAIRAAVPDWSLGKLVIALMAMRGLDMISASTIVAEVGDLSRFRTPRELMAYVGIVPSENSTGDKVKRGPITKTGNRRVRRMLVECAWSYQFPPRLSKDKQVKVDAVPQAVREIAWKAQSRLNQRYRALLRRGKLKNVAITAVAREFVGFIWAVAQAVGAAPAANNRTAPAPAAAR

SEQ ID NO: 325762 - protein, 313 aa, unidentified
MPVSLSKPIVGVDVAKNELVIYQADGDLLEEIPNTKTSIKQWLKALSGTVAIAIEATNIYHLDFADLAHEAGCTIYMVGGYELKHYREGVKIRAKTDALDAKLLARYLKNEAEELRPWTPPSPLYRQLLSLFRRRAALVQARVGLVQSWSNEPLLKAAFAEQVKSMQQLETLIEKTINDQLKEAGLLGQLKRCLKVEGIGFLTGARLITAFQRGDFRNADAFIAFLGMDLRVAKSGQKDARRSLTKRGDPEARRLLHNAAMSASRTKVWKGYYEEQRARGFSTTQALVMLARKLARVVFALLKGQSEYQPKAS

SEQ ID NO: 325763 - protein, 419 aa, unidentified
MTDMSIAQAEPVLVAIDISKARHEVLIAVPGKKRRRRLTVLNQLDDFIRLTAALSEYGHPVRVAFEATGNYHRALAFHLGSAGFEVKLVSSVALARTREALHNSWDKNDPKDAQVILHMMQIGNEQFYHDPLLSGTNDIQELSKTHDMVSRSKTELWHRVLTHYLPLYFPEADRFHRSSRSDWFFAFLERYPSPHIISAMGKEDFIADAWTVVGRRVSKERLLADVYETAKTSVGLPVDADSDALKMFRLVLAEGRGLIAQRNEIENRSIALLKDNTDYQLMTSIPGIGPINALTILAEAGDLRRFGHHRQFLKFCGMDLATMQSGMFRGQTKLSKYGNARLRRTLWLAGQVAILQRTNSFRDKFERYISKDRHNTHLRRKAYTAIAAKMARTVHAVVKGGEPYRPFFEGAIDSRRTFL

SEQ ID NO: 325764 - protein, 422 aa, unidentified
MERMIERCAGLDVHQASVVACILISERGKRRRKEVRTFGTMTHELEDLRDWLASEGVTHVGMESTGVYWRPVHAVLEEHFTVIVGNARHIKNVPGRKTDVKDAEWIADLVCCGLIRPSFVPPKPLRELRELLRYRRKLMEAQAAERNRLQRLLETANIKLASVASDVLGVSGRAILRALIDNTGTPAEMADLARGRLRRKRDELVLALNGRMDDTHRFLLSMQLRRVEGIETLVEELDQRIAEKLTPYQIEMALLMQIPGVDWVVAAVLISEIGVDMSVFLSVHHLAAWAGVCPGSHESAGKRKNTTARKGNVHLRTVLVAAAMPAVRTKGSYFKDKYHRLRARRGAMRAAVAIAHKILVAAYHMLARRTEYRDLGEAYLDQRDQTRTAANLKRRLERLGYVVSMTPRSPEPEAKPPTAVSS

SEQ ID NO: 325765 - protein, 329 aa, unidentified
MMANGEAVQGQTAKGDLGGYVGIDISKVNLDVVHRPSRKVWQFTNDQPGLLLLVARLQELQPELIVMEATGGIEVPVSAVLAEAGLPIAIVNPRQVRNFARAIGKMAKTDRIDAEVIARFAEVVHPERRALPEEAARDLGVLLARRRQLVEMLVAEKNRLHSAVVRVRQPILEHIAWLGSAIKSLDQQIDELIKSSPIWRGKDDLLRSVPGIGPTVSTTLLIELPELGTLTRQEIAALAGVAPFNRDSGRYRGKRKIVGGRAPVRSALYMAALVGTRYNPAIQQFYQRLIAAGKLKKVALVACMRKLLTILNAMLKSEQTWNADYASTH

SEQ ID NO: 325766 - protein, 315 aa, unidentified
MDNIVAIAGIDVSKDKLDVHILPSNLVFTVERDRRGLADLVRRLRKAGVGEVALEASGDYERIVIEELEANGFVVHLLNPARVRLFAEAAGILAKTDPIDARVIALYCRHFPDKGLTRRPDNARKLGEFLTVRAMLHKIIDEARNRLEHLRDPDLRARTERTLADAKAQLKDIDAGMARVIAEDQAMAAKAKLVRSLIGAGPVLAANLLAGVPELGTIGRRQAARLCGVSPTDNKSGKGRRRSKLDGGRDQLRPVLHMVALAAMRSNPAVSAFAKRLSANGKPKLLIIAACARKIIVILNAMLRDQTLWRSPKAA

SEQ ID NO: 325767 - protein, 351 aa, unidentified
MGKIITDLSSVTTVGLDLAKHVFQVHCVDASGRVVVAKSVRRNKLLEFFASLPSSLVGLEACGSAHHWARELVKLGHDARLMPPAYVKAYVRRQKNDAADAAAICEAVSRPSMRFVPLRSLENQAALMHHRVREMLVAQRTQVLNAVRGHLAEIGVIAAQGPKNARDLAKLIATDEDTLPYLVRAALAPLVRQLDRLDEDIGLADDAIKAMAKADESARRLMSIPGIGPVTASAIAASMQDVSSFSGSREFSAYLGLTPRQNSSGGKERLGRVSKMGNRYLRKLLVVGAHAVLYNRKGHDDALRTWACKLMETKPFKLVAVALANKLARIAFAVMRDQTPYSAKPFSPAQA

SEQ ID NO: 325768 - protein, 349 aa, unidentified
MTIVGCDLHTRKQQVAVLHTDTGEVVEQELLHAGDAVEQFYRTLPRPVTVGIESTGYALWFHELMQHLGHTLLVGEAAKIRAMVVRKTKTDRRDAQHLLDLLKHDRFPAVWIPDPATRDLRALVTHRMRLVRMRTMVKNGLHAIAMNRRLTLGPSLWSQRGLAQLQGLALAPHTTQRRDESLQLLTWLTARIEALDDRVAAAAQADPGARLLLSHPGVGPLTALTTVVVLGPVARFPDSKHVVSYTGLAPAVHASADTCRLGQITKQGSPLLRFVLGQAGLIAAHAEVDLNRHYRTLLRRRGRPKAIVAIARKLLVRLYIMLRDQTDYEEFRRRGRTPRGQEVPPPALA

SEQ ID NO: 325769 - protein, 380 aa, unidentified
MKKELYLGLDVHKDCISTAVAEEERRGEVRDTGALSNDLHAVEKWIGRLRKTHGKEVILRACYEAGPCGFGLARRLKQLGVECEVVAPSLTPKRSGERVKTDRRDARKLARLLRAGELTAVYIPEATDEAMRDLCRARSDAVDDRRRSRHRLKGFLLRHGYRYQGKSSWSAAHERYLRELVLPHPAMKVILEEYLQGIAAADERIGRCEAAMRDLLEQWRLAPAVRALMAMKGFRTVAAMILVSELGEVHRFSHPRQVMAYLGLVPTENTSSERRRQGHITKCGNAHARWLLVECAQHYASPPKVSKELSRRQEGQSAQVRAISWRAQNRLHRRYTRLLARRLQRNKAIVAIARELCGFIWELLRTQPCYQAQSQIGLKS

SEQ ID NO: 325770 - protein, 366 aa, unidentified
MKKPSTKTIRRTGRLQDQQLTIGLDLGDRSSFYCVLNGAGEVMVEERVTTSPEAMKKSFGKMPRSRIALETGTHSPWVSRLLSGLGHEAIVAHARNVRLIGESRRKDDRLDAQALARLARIDPQLLSPIQHRSAQAQADLSVIRARYALVRARTALICAARGLTKSFGERIRGRNPKGFKPAIGETLSPQLQVALAPLLSALETITARIRAYDAQIEKLAEESYPDVALLKQVKGVGTLIALTYILTLEDPRRFRKSRDAGCYVGLQPGRRNSGQSEPQLHITREGDSYLRMVLVQGAQHILGPFGEDSDLRRWGLKLAEHGGKSGKKRAIVAVARKLAVLLHHLWISCEAYEPLHNTRKRRLAAA

SEQ ID NO: 325771 - protein, 344 aa, unidentified
MTSVPLLFVGIDYHQDNVQVCALDQNERQILNRSLANDADVVRRAISGRGRVAGVAIEACCGAANLADELLDLTNWPVHLAHPGYVARLKQSPDKSDFSDARLLADLERVGYVPKVWLAPEQIRQLRRLIRHRQQLVNSRRSVKLRLRALLRENRIKASVGINAWTKAWLSWVANLAVLSEDDRWLMDQHLAELQHLTTQVKAVEQRLAARVQDDPVVEKLLTFPGVGFVTAVTLRAEIGYFDRFQTGKQLSRFCGLSPRNASSGHRQADAGLIKAGNPGLRTVLIELGHRLIRQRNSHWSKLGSQMLRRGKPRNVVVAAVANRWVRWLYHQMQPDQLFVPTSA

SEQ ID NO: 325772 - protein, 408 aa, unidentified
MNPLYVGIDVSSKNNVIYLMLPNGDKHSSFSLANSHDGSTQLVKRIFTAMTSNNIDSVLIGLEATSVYGDNLVYFLKEDTTLASFDRKIHVLNPKQVNKFKESYNDLPKNDYIDAFVIADCLRFGRINKEVYMDDYRYKALQNLTRARYFAVTNLTKEKQRFINVLFKKYSTMTQEKVFSDTFSTTALAVYEKFESAETLAKMDLQELTAFIMEKGKNCFPDPDAVAKALQKAARSSYRLPKTVNDSVNQVLAISITSIRALESQIKAFDKAITKQMELLPNVLISIPGIGPVLSAGIMAEIGDINRFQNQAALAKYAGLAWQQHQSGDFEAQTTRMIHSGNRFLKYYLCEAAFSLVRCDKEYSRFYHLKYKEVNRFQHKRALALTARKFVRLVFALLKDNRLYRPAE

SEQ ID NO: 325773 - protein, 459 aa, unidentified
MGRKQSQVSAWEGLKVIHPNAAGLDIGSEEIWAAVAPERTAEPVRKFGTFTPDLQALADWLIACGVDTVALESTGVYWIPVYEILEARGLKVYVVNARHVKNVPGRKSDIQDCQWLQGLHSVGLLRGSFRPAGEIVALRAYLRQRATLIEYRAAHIQHMQKALQQMNVQLTQVVSDITGVTGLTILRAIVAGQRDPQQLAALRQPGVKKTEAEIAKALTGNYRPEHVFALQQALALYDFYTAQMVACDAEIERQFANLKPVSDDLPPLPPSTKRDTHSKNAPRYDARSYLYRLTGVDLVAITGLNESTVQAIISEIGPDLSAFPNEKHFTSWLSLAPHNDISGGKLLRSRTLPGHNRAGQAFRMAAQSVAKSPNSAFGAFYRRLKARLGAKQAIVATAHKIARAFYHILKHRTPFHDLGGEEYERRAREREIKNLQKRAAKLGLVVTETPAAPALAGSF

SEQ ID NO: 325774 - protein, 360 aa, unidentified
MNSLPATVGDFYRYVVGVDTHAATHSYAIIEAPNGGLIDQNVFPTSPAGLRRAREWIARRTEGDLDGVLIAVEGTGSYGAVLSDVLQQVGYRVVEAPTPRRARARSKTDALDALLAARSSLVMPLTTLRDRRTGDLQSALQVLTGARDQQNADRLRCINALTALVRTHDLGIDARRALTGMQIATIASWRRREETLGTATARAEATRLAKQITTLERDLAENRERITHLVETTAPELLDLPGVGAVTAAVILTVWSHPGRIRNEAAFAMIAGVCPIPASSGNTTRHRLNRGGDRRLNRALNTIVLTRMRTDPATRTYIERRQSEGKTSREIRRCLKRYISRQIFRSLTVAHPVPDAAAAA

SEQ ID NO: 325775 - protein, 429 aa, unidentified
MQSTLQKRITRITPTTIIVGIDVAKDLHWARITDYRGIDLMKPVKVHNNIDGYESLMAKIEKQCQKHGCDQVMVGMEPSGSYWRALGWYLELHESKPVLVGVNPYHTKQAKELDDNSQTKSDPKDALTIAHLIRDGRYHDTYLAEDEYAELRQLNAERQRLMKQISRANNVLIVLLDEFFPEYATVWSNVTCPTSLELLKTYTFPSDVTAAPREELLEEIRRASNGTEGVKLQKEMIRAASRSVGVKQGLKSVRLRILSLIDELAYFEEKKTEVEAGLEAVMNTLQLGKILQSMLGVGPIISAAFLGEVGDISRFSNWKQVRSLAGLNLVENSSGKHKGKTKVSKRGRSYLRHMLYMAGECGCRCNPEMRSFYRYLRDRKNNPLNGIQAVVATGLKIMRILFHLAKTGEHYDPNKALGEVRLQQIASLG

SEQ ID NO: 325776 - protein, 384 aa, unidentified
MDQTTSTLSANTLHCALELSKNSWLLAIQFRDREQPSLYPIEGGNTDKLMAKLAAARDCWAKVNGALPAITLCYEVGHDAFWLARFLKARGIECLVIDPGSLQVNRRARRVKTDRVDVKMLLRTLIAWCRGERHVWSLVRIPSVDEEDLRRSHRERSRLVRERTAHINRIKGLLFAQGVRGINIKSQYKTLAVDQLVTGDGHRLPPRLVCEVAREIQRLAMVQEQIAKIERERDTAPTPCEATERKRRLLLRLKSIGPAISALLSREVYYRQFANRRQVGSFLGLTPSPYSSGEEERCQGISRAGSGHVRAIMIEAAWLWIRHQPKSALTRWFLERTAGQSTRVRKILIVAVARKLAIALWRYVEHGMVPQGAILNPPTTGNAR

SEQ ID NO: 325777 - protein, 356 aa, unidentified
MVMVLGVDVHKDTHTVVAVDEVGRADGERTVRATDTGHRQLLDWARRQVPQDRMWAVEDCRHVSTRLERALLAAGETVVRVPPKLMAGARSSARTRGKSDPIDALAIARAALREPDLPLARHDDTSRTLKLLVDHRDDLVIERTKMANRLRWHLHELDPELDIPARGLNRLNLLDRLITWLAEQSRPDRLGQVLARLAAELLTDIRAATVRINALEREINTLARQAASRLMTLPGAGGLTTAKIVGETANITRFRSEACFAMHAGVALIPASSGRTQRHRLARGGNRQLNAALHRIAITQVRITASPGQLYYQRRRAQGDTAMEALRALKRRLARVVFNLLQADTTIAINDLSTAA

SEQ ID NO: 325778 - protein, 379 aa, unidentified
MKKNSIARLQGTKSQIRRMAKKQRLTVGLDLGDRSSRYCILDEAGEKVSEDKLPTTKTGLSSVFGKMPPGRIALEVGTHSPWVSRHLAGMGHEVIVANPRKVKLITESVKKNDRMDAEQLARLARVDPKLLSPIQHRGPEAQADLAVIRARAGLVDVRTELINMARGLAKPMGDRLKKCDADSVKGTLADGVSGGVQNAIRPLLKSVEEINKQIGEYDKQIEEIAKRYPEMQLLKQVHGVGTLIALTYILTIEDAERFAHSREVGPYLGLTRKLRDSGDSEPELGISKAGDQLLRRLLVQGAHCILREGAPESDLKVWGMGILQPGGKKASKKRKKKAVVAVARKLAVLLHRLWVTGEVYDPQYNRKAAEAAKRKAKAA

SEQ ID NO: 325779 - protein, 420 aa, unidentified
MELVVERCAGLDVHKDLVVACVRYPGPDGVRRTEIASFSAFTADLLALRDWLCSYNVTRVAMEATGVYWKPIFYVLEDAMECWLLNARHMRNVPGRKTDIADAEWICQLTEHGLVRPSFVAPKEIRDLREFTRYRRTLAEERTREAQRLDKVLQDAGVKLSSVASDVLGASSRAMLAALVEGTRDPAALADLAKGKLRSKLPALRTALEGRFGPRHAVLVSEILSHLDYLDEAIGRMTSAIEEAIAPFAEARDRLCSIPGIDRRIAEAVIGEIGVDMGRFPTAAHLASWAGMCPGQHESAGKQKRGTARHGDSWLQRHLAVAAMAAVSSKDTYLRAQYRRLSPRRGKQRARKAVGHSILVACWHVLASDDATYLDLGPDWFDRRNAPAVRARRKLSELRALGCQLYINDDGTTTVVLPAA

SEQ ID NO: 325780 - protein, 461 aa, unidentified
MAGQEDVREHESRRRQLQGLPVIQRNAAGIDLGSEQHWVCAATVDGSGREITSFGGTTPELIRMAGWLKARHVESVAMESTGVYWIAPHEVLEGQGLQVLLVDTRQLARVPGRDKKTDRSDCEWIQRLHSCGLLRGSFRPEEAVCMLRTLVRDKANLVAERGDWVRRMQKSLDQMNVRVHRAVSDIDGMTGMAILRAIAGGERDAQKLAKLRDRRCSKTEEEIAEQLSGHWREDHLFSLQQALKMYDAVQERIAAYEKEILRKLEELEREDRRGQTPPPLPNPSKAKTIKQRGQEPKREAFYRISGVDITQIDAIGVETVEVVLSEYGSDLSRFPTEKQFVSHITLAPHVAKSGGKPIKKKKRNSASTRVAAALRMAALSLRHSRTALGAYYRKIAQRIGGDVAVFATARKLATLIYRLLRWGQPYVDEGAEAYENRYRQQRVRSLMMRAKELGYQLAPAL

SEQ ID NO: 325781 - protein, 453 aa, unidentified
MTDTKKNSKKFVEPVQIVYPNAAGLDIGSREIMVAIPPDREGETVRGFGTYTPDLKELANWLSQNNVTHVAMESTGVYWIPIFELLEERGFEVIVVNARQAKHPPGRKSDVQDCQWIQRLHCYGMLSGSFRPGADMCTLRAYLRHRDNLIEDRAKHILYMQKALVQMNLQLGQALSDLTGKTGLEILRAIVAGEHDPHELAKLRNGRCEHSQEDLIKALTGHYRKEHLFVLKQALEMFDSFTQRLLECDKEIEQLLNEIKPETPDDFPPLPPDPKPNSHSKNAPNYDARASMYELAKVDLTAISGMNESLVQKILSEVGTDMSRFPTVKHFCSWLGLAPHNAISGGRVLYSHTLKNRNRAGQAFRLAAQAVARGKTIYSEFYRRVRARSGSKEAIVATAHKLARTFYFMLVRKTPFNLLDLETYLDAQRKKDVQRLQSKAAKLGFSLQPSPTV

SEQ ID NO: 325782 - protein, 354 aa, unidentified
MEKITTVGLDLAKQVISVHAVDARGMLVIRRVLRREALLAWSAALSPCVMAMEACGGAHHWARELVRQGHTVRIMAAEFVKPFRKSGKNDANDAEAICTAVRQPNMRFVAIKSVEQQAALCVHRLRQGLVEERTALINRLRGLLTEFGVVAPLSPEKLRRELARCQDPEDLRLPAAVRELVGEQVAALDQLEARLATYAEQIAAQAKQSDVAKRLQAIAGVGPTTAAAMVATVGAPQEFRNGRQFAAWLGLTPKQHSTGGKTRLGRITKRGDAYLRTLLILGAKSALQAALRKPPEARHRLQQWIVAVFSRIGYHKTLVAIANKHARIIWVLLVKGEDFDLQRLAPKVVAVAAA

SEQ ID NO: 325783 - protein, 404 aa, unidentified
MIFVGVDWAEAHHDVDVRDEQGGQLAARRVNHGVAGLALLHELVGEFAETPAEVYVGVETDRGLLVSSLTAAGYNVIAVNPRAVDRYRDRHSLSGAKSDAGDAMVLAEMVRTDRHHHRPVAGDSEEVGGLKMIARAHQNLIWARTRHVLQLRNVLLEYYPAIVAAADGKVGSRDALAVLAAASEPTQGARLTDARVVSILRRAGRERYLKQTANRFVEHLRAEHLEASPSITSACAATARALVNVIRAFDTEITELEAELTERFDSHNDAAIIRTMPGLGTILGARLLAEFGDDPDRYTSTSARRNYAGTSPITRASGKSKAVLARFIRNRRLADACDRWAFASLSSSPGARRYYDELKAAGKTHGQALRALSNRLVGIFHGCLDHRCAYIETTAWQRYQPAAA

SEQ ID NO: 325784 - protein, 459 aa, unidentified
MNRKQRREMMRKMQSEDLSLEVVHPDAAGIDIGNESHYVAVPPSRDRQAVRRFGCTTAELKAMADWLQQCRIQTIAMQSTGVYWIAVYDILEAAGLEVYLVNARDTKNLPGRKSDVQESQWLMKLHTYGLLRNSFRPPQEIRTMRTYWRQRNDLVRAAGAHIQRMQKVLTQMNIQLANVLSDVSGMTGQAIIKAILAGQHDPHKLAELRDPRVQASHAEIAKHLEGNWQEDLLFVLKQEQEGYEFCLQQMAECDRQLEQYLQQREDRSQGACLPKETRKGRLKKNKKGKPAFDLRAELFRMTGTDLTQIDGIDVMTATTVMSEAGWDMSKWETENHFVSWLRLCPDNRISGEKIIGRGRLRTNNRANIALKMAATTLRLSNTYLGAQFRRLRTKLGAPIAIKAMAAKLARLVYRMLRYGMKYADRGAAFYEVEHQRLQIKHLKWKAAKLGYQIVQAPSA

SEQ ID NO: 325785 - protein, 371 aa, unidentified
MEQPTRFIGMDVHKETIVVAVTAAGDAGKATPYGTIPNTTAALEKLVKRLRKVGTGPVKFCYEAGPCGYGVYRTLTRIGEDCLVAAPSMIPRRSGERQKNDKRDAGSLAVLHRGGLLTSVWVPDAAHEAMRDLVRARLAAVRAVRTARQQLSAFLLRHERLYAAGRRSWTGAHRGWLADQRFERPAQQIVLEECIEAVRLAEQRRDRMDAHLHAELPSWSLFPLVQRLCALRGFDVIAAAGAVAAMGDPTRFINARDFMAYLGLVPSEHSSGQRRRLGAITKTGDVHARSVLIEAAWSYRFPARITRAKLPAIEAVPETVRQIAWKAQTRLCHRYRRMVARGKPKPLAVTAVARELAGFVWAIAQLPDDVV

SEQ ID NO: 325786 - protein, 406 aa, unidentified
MIFVGVDWAEAHHDVHVEDQDGRRLGGGRLAEGVAGIARFHELVGGHAGEAAEVVIGIETDRGLFVAALVAAGYQVFAVNPMSTSRYRERHSTSGAKSDPGDAKVLADMVRTDRHNHRPVAADSDTVEAVKVLARAHQSMIWSRGRLTNGLRSSLREFYPAALAALDDLASSDALEVLKVAPTPTLGAGLSRAKIAAALRRGGRQRRLEERAVEIQTALRSPQLQAAPATATAMGATVTASVAVIATMNAQIAQLAGELTAGFESHPDAEVIRSLPGLGTILGARVLGEFGDAPNRYVTTKSRKNYAGTSPITRASGTKKVVLARYARNDRLADAIYLWAFAALSSPGARAHYDAHRAAGNTHHAALRALGNRLVGILHGCLEHHTLYDEHLAWSHRTDQKISQAA

SEQ ID NO: 325787 - protein, 434 aa, unidentified
MRGCRCSGIMGIAKPIDSKSNTKEGENVNQLFVGIDVGSRDNAVYIMMPDGSKHSSFPVQNNLGGAQTISKRVVSALEEKKLSAVTLGIEATSVYGDNLMCFLREDGALGRFERKLFVLNPKQVNKFKASYSDLPKNDPVDAFVIADSLRFGRIGSPVYMDDYRYKALQNLTRARFYAVKNLTREKQRFMNYIFMKCSGLAQDKTFSDNYGTAALAVFEGFETPDDIAEMDVEELASFIAEKGNNRSPRPDEIAKAVQAAARGSYRLPKTVNDSVNQVLSISISSIRAMQAQIKVLNKEILRQFENIPNTLTSVPGIGPVFSAGIIAEVGDINRFEGQACLAKYAGLAWTENKSGMFEGQNTRLIKSGNRFLKYYLCETANSLVRCDTEYRRYYDHKFKEVNKYQHKRALALTARKLVRLVFRLLKDNRLYRPV

SEQ ID NO: 325788 - protein, 457 aa, unidentified
MRRKGKRTKGMEEAHPFAGMSQVNPNAAGVDIGAVEIVACVAGDASTQIVKAFGNYTVDLQAIGRWLKEYDIKTVAMESTGVYWIPLFEELERQGFECLLISSRSLRRVPGRKSDIQDAQWIQTLHSYGLLESSFRPQGELVALRTMLRHRAQMLEHRAPHILHIQKALLQMNVQLSQALSDVTGETGLAIIRAIAAGERDSQKLAAMRDRNCKKSAEEIAKALTGTWREEHLFIVKQSLEMYDFYTRQVEACDAEIDRMYATTRPEWEAGELKPLSERKRNSHSKNAPQKQAEIRKHLKRISGVDLSVVDGFGVSLAQTVITEVGTDMSKFPTEKHFCSWLGLAPKHEISGAKVLKNRTLKTKNRAGQAFRMAAQSVKRSDCVFGSLFRRLRSRLDNRQATVACAHAIARVVYRMLKYQVEYETISVEEYEAKYKEQQIKYMRKKAAKLGFQLVPA

SEQ ID NO: 325789 - protein, 345 aa, unidentified
MEIHTIGIDLGKTVFHLVGLNLRGEVVVRKKFSRTQLLRFTANRQVQLIGMEACGGAHFLGRTLREQGHEVRLIPAQYVKPYVKTNKSDYIDAEAIAEAVGRPTMRFVPIKTDDQLDLQSLHRVRERWVMRRTAVVNQIRGLLLERGITLRKGRCHLDAALPGILEDATLKLSGALRLLLAQLKLELDQLALRMEEADGLIKKTAQDSEVCQRLDAIPGIGPLTATALIATIGNGAAFRKGREFAAWVGLVPREHSTGGKQTLLGISKRGNGYLRRLFIQGARAVLQFKEKQSSGLSAWLAQLTSRTHHNVAGVALANKLARMAWAVLAKNELYRPPVLASAAAS

SEQ ID NO: 325790 - protein, 420 aa, unidentified
MEVLYPHCAGLDVHKDTVVACVRHAANGLAKHEVRTFKTTTKNLLALSDWLAGEGCTHIAMEATGVYWKPVWHVLSDGEFALVLANAAHVKNVPGRKTDVNDATWLADLLAHGLIRGSFVPDQQTQEMRTLLRTRKQLVRERSSHIQRLQKTLEDANIKLDSVISDIVGLSGRRMIEALIAGETDPGALAALAHRRIKATPDELEAALRGRITRRHRFLLRLHLQQIDAIGAAIEEIDQEVDADVEPFRAAIALLTTIPGVSVLSAEIILAEIGRDMSRFPTAGHLISWAGLCPKNDESPTGQARGLKAHGKRRSTRMRKGAPWLKTTLVQCAWAASRRKASYLQAQFHRLRARRGAKKAICALAASILTTVYHMLISGELYHDLGPDHFDRRANARQTMRLVARLQNLGYAVQITPLPA

SEQ ID NO: 325791 - protein, 442 aa, unidentified
MQFQNLQMKRHFVSGKFIVGIDPSKEKYDAAVINPNGILQRTTFTFKNNHDGVQSQLWFFIRQRIKSCSPEDTIFAIEASCNLWQKLAGYITSQGFTVVMINPLSTHKARVLINHSFSKTDAKDALVIANAGREGYFDLYRIHPDPVKAMHELSITYDKLKKSLSQAKLRLRALVEQVFPEFCVILKLNTHTALYLLERYIIPQDFLNANILEAIQGMGKVSRKQHGLKTLKKLQEAAKNSIGLSMDEEQIRAVRMSRDAWVAMIRTLQIQQGRILEQLITMTKSCPYFEILTSIKGISDISAALFIAETRGLDGFQHYKQIEAFAGLGLKHSDSGKYRGYRHISHIGNNRLRSIIYLMTVETKNHIPEIRIKYLNRQLRQDRYRRNIVSCSSNLLKLIMALVKENRRYEFREESVKELEKLENKIQSIQEKKTKKQYKKAS

SEQ ID NO: 325792 - protein, 459 aa, unidentified
MNRNRSKSRVARTMPLINPNAAAIDIGATMHMAAVGADRAPEPVRSFGTFTADLYRLVDWFTECGVETVVMESTSVYWIPIFELLDARGFTVFLVNARDAKHVPGRKTDVSDAQWLQRLHSFGLLRASFRPKGQIAELRSYVRQRERLLEYAASHIQHMQKALTEMNVQLHHVVADITGATGLRIIRAILAGERDPEVMASLRDSRCQASAETIAKALTGNYRSEHLFALEQALALYETYHEKTSACDVRIEAVLKELCIHRGRGHGAVPPPRRRYRTDQANALAFDVRAALFALLGRDITVINGLGAYLSLKLIAECGDDLSSWPSSKHFTSWLGLAPSNKISGGKMLSSRTRRSGGRAAALLRLAAVTVGRTDTALGAFYRRLSSRIGKAKAVTATARKVAVLFYNAVRHGMEYLDPGASSYETRYRTRVVNNLHRRAKAFGFVLQPMQPKAGVAVS

SEQ ID NO: 325793 - protein, 355 aa, unidentified
MKDQAIHYLGLDVHQATTVATSRNESGAIVLKATVPTEAKAIVGLVRGQGPRVHVAFEEGTQAQWLHDLLQPVAERVIVCNVRGKNELVNKNDDIDSGLLSERLRLGSLKGVYHGAASVLALKELVRSYGNLVEDTTRVMQRIKAMFRARAIPTPGTGVYGTRRRATWMSKLKGRGVRLRAESLFAQLDALLPLRRKAKEAMIAEARRQPAWKILRSIPFLGPVRVAQIIAIVGTPFRFRGKRRFWPYIGLGVVTHSSADKEIVAGTIRRRRRAPLTRGLNRNHNPVLKDVFKGAATAAAHKDGPLKNLYKQSLDRGVDPDMALLTLARKISSVALRLWKKGELWDPAKLTTQAT

SEQ ID NO: 325794 - protein, 312 aa, unidentified
MTEHCYCGIDVAKDRLDVQVLPHRQRFSVDNSATGWAELVERLHALAIAAVGIEPSGGYERGIIRTLLAAGLSVRRINPSKLRQFARARGILAKNDRLDAQLIAEYVSIMPTRVVQRAAIAERLAEVVTMRRQLCDEHVAIENQAAHVEDAILRRLNKRRLARLNADIHLLDKRMAEIVAADAILAQRYELLTSMRGVGPTLAFTLIALLPELGQMSRKQIAALVGLAPYDFDSGKLKGHRCIYGGRMPVRNILYMAALSAARYNPVLKIFHNRLAATNKKPKVIIVAVMRKMITTLNAMVRDNAAWQPRAA

SEQ ID NO: 325795 - protein, 350 aa, unidentified
MVVIGVDAHKRTHTLVALDEVGRKLGERTVAATSEGHFAAVRWAGQWPARRWALEDCRHLTRRLERDLLAAGERVVRVPTQLMAGARRGGRQPGKSDPIDAEAVALAALRHPGLPAAELDGPAREIKLLSDHRHDLVTERTRLCNRLRWHVHELDPGLVIPSRGLRRYCVIDRLAAAMEAFGGVVARIARELLARCRDLTAQINAIERELGHRVRQVAPSLLNIPGCGVLSAAVIIGETARASRFRSKDAYARFTGTAPIPVWSGNPVRVRLNRGGNRWINCALHMIAVTQARGIGPGKAYLDRLMARGKTRTEALRLLRRRISDTVFAALLADETPGRGTNSSPLRRAA

SEQ ID NO: 325796 - protein, 441 aa, unidentified
MACRYAGIDWAGEKHDVLVAEEAGSEVLAATFAHDENGLTALCAALVRFEVGLVAIERPDGLLVERLLDAGLRVLPLHPNKVAAARDRFRVGGGKSDRFDAFVLCELARTDNHRFRVLEPDSDQTKAIRALTRSREDLVRTRTAVVNQLRAELERFWPGPLGLFSHMDAEILLAFLERYPSPADAHGLGVARMQAFLKREHYSGGQKPAALLTKLGSAPLGRVGEIELAARRQLVLSFVAMVRTLNAQIKGLEREIRTQVRAHPNGPVFLSLFKSPASVITAAELLAEIGDCRERYPTRDALAADAGHAAVAKESGKRKTANFRWGCNKRLRVAFCRLADSSRHWHPWAQTLYAKARQRGHEHPRAIRTVGRAWCRVVWQCWRNHTTYDPARHRALQRHITVTIPTASGPRTDLAATHRMAGPSFWRPDLSKPASLQPAGG

SEQ ID NO: 325797 - protein, 315 aa, unidentified
MQTPLDIGADISKDYVRVSCATGSLPSIGLANRRASLLAWLKRLPAGSRIGMEATGTYHELLATLAHRLGLVVYVLNAKHVHHYAQATAQRGKTDRVDAELIARYVAKEHSHLHIWHPASPAQRQLQRLMRRRGKLTRARAALRSTLQGVPSLRTDVRVLLKHFDALIAKLDTQARALLKASVEREQAFQRLDAIPSVGSAVGIGLLAALERWSLPRADSFVAFIGLDPRPDDSGKRSGRRRLSKDGDPELRRLLYTAAMSASRTRVWAPVYQRALARGLSRIQALVILARHIARTAWSVYTHKTQFDPARVHSS

SEQ ID NO: 325798 - protein, 423 aa, unidentified
MPYRIAGIDVHKKKLAVVVTDVEIDDEYQFERRWYGANPEQLELLAQWMIEQQVEEVVMESTARYWTPVWAALEQHWRPVCRKRERAARMSGTLHLAQALSNRGRRGRKKDFRDAERLVKRLISEELVLSFVPDAEQRLWRSITRTKYQLTRNKVRLQNQLEALLEEAHIKLSSLVSDLLGASARRMLKAIAEGETDPMAVAALADQRLRATSAELRDALGACTDLNPVYRRLVRMALEQLHLIEQQIGQLDQEIAGLLRQHQDAVERLAEVPGLGVDSAQQIIAEVGATAATFPSAKNLVSWVGACPGEEESAGVNYSKRSPKGNRQMRRILNQAANAAVKRKGSIFEILYRRLVPRLGHHKTIGAITHRLCQLIWILLHKGVRYEERGPAVCEKSKRVRTLRMIRTLRNLGYRVEPLANLA

SEQ ID NO: 325799 - protein, 444 aa, unidentified
MGRRCIGLDVHREFAQVAVWEDGLVRQAGQIALTAEGLRVFADSLGPEDEVAVEATCNTHAIVRLIEPHVRRVVVSNPMKTRAIAEAKVKTDKVDARILCQLLAADYLPSVWVADEATQALRRQVSRRAHIVRQRTRLKNRVQAILQRNLAPRCPAADLFGVKGRCWLADQSLPADEEFAVEALLRQLDFHGQELRIIDAALGRIALQRDEVRRLMTIPGVDATVALSIVAAVGDFRRFRQPEQLVSYLGLNPRVRQSGSQPATHGRITKHGRAHARGMLVEAAWAAAKTPGPLRAFYERVRGRRGMQIAVVATARKLACLCWTMIERGEDYAFARPSLTEKKLRALELRAGLPSRRGRKGTAAAYSLKEVRQRERELAEQGERAYRQLVSDWQANAPAKGAKPGVAAANGTRLTRPSTGQAAWQGSVPEPALRSGVDHAHLEA

SEQ ID NO: 325800 - protein, 482 aa, unidentified
MKSKPQAKTSNNSSRPKPGHWHDMNRKQRRETIRKIQSDELSLEVVHPDAAGIDIGNESHYVAVPPMRDTQPVRRFGCTTAELKAMADWLKQCGIRTVAMQSTGVYWIAVYDILEQASLQVYLVNARETKNLPGRKSDVQESQWLMKLHTYGLLRNSFRPTREIRMMRTYWRQRNDLVQAAGRHIQRMQKALTQMNIQLANVLSDVTGMTGQAIIKAILAGERDPHKLAEFRDPRVKASLEQIARSLEGNWQEDLLFVLKQEQKSYEFCQKQMAECDRQLEQYLHQREDHSQGAPLPEEKRKERLKRKKGNKPQFDLRTGLFRMTGVDLTKIDSIDVVTATTILSETGTDMSKWETEDHFVSWLRLCPDNRISGDKIVGKGRLPTKNRVSIALKVAANTLRVSNTYLGAQFRRLRTKLGAPIAIKAMAAKLARLVYRMLRYGMKYVDRGANFYEAQHRDLQIKHLRWKAAKLGFQLVRPAAT

SEQ ID NO: 325801 - protein, 404 aa, unidentified
MSYLVGINFTTSALETLMEARTVNNLPPAPHDDAARCLLAIELSKKSWIVAVNTPLSDKISRYTLESCDWKGLLDLCERIRTRVAREMKKPVEIISCYEAGYDGFWLHRLLEAHGIRNYVIDPASLQVDRRARRAKTDRVDVERILRSLLAYLRGEPKVWSVVRVPSIAEEDDRRLHRERDRLINERVQHVNRIKGLLAIHGIYDYQPLRGDRVQRLEQLHAADGQTLPPRLKAEILRELQRLELAIRMIKAIEAERDAIASAKTGHTSAKKIQHLAKIKSIGPEFATALVGEVFYRSFDNRKQLASYVGLTPAHFQSGAMSRDQGISKAGNAKARTVMIELAWLWLRHQPESPLSVWFRERVGNLKGRIRRITIVAVARKLLIALWRYLENGMVPEAAILKVK

SEQ ID NO: 325802 - protein, 323 aa, unidentified
MSSSSPAVRSCYVGIDISAERLDVQVWPVEQRHSVVYESSGVAQLIGVLQPLKPARIVVEATGKLEIPLVAALAAAELPVVVVNPRQIRDFARALGLLAKTDRIDAYVLARFAESVQPPPRPLPTEQQQALQELVSRQRQLVEFRGAESNRLRRTRTLAVRHNLQIHLAWLDKQIQDLDRQIRQLITESPCWRQKDQLLQSVPGVGPKLSSVLVAHLPELGQLNRREIASLVGLAPFNHDSGQWRGKRFIAGGRAKVRCTLYMSSLAAAYHNPVIRSLRQRLQHQGKPFKVVLTACMRKLLTILNAMVKNGTPWNSALCCNLS

SEQ ID NO: 325803 - protein, 389 aa, unidentified
MLQLSDLGRSFTALDQDSTLIVVIEMGLSNWLVSGMVPGLERQPLKKMNTDENELLKLLGRWRDEAVAAGREIQRIVVAYEAGRDGFWLARWLRERGVEAYVIHPSSVAVSREHRRAKTDRLDTQLLMRSFLGWLRGERRHCSMAAIPTIEEEDAKRPNREREKLIADRTRIVNRVKSTLFRFGVRGFKPTLRKAEQKLGDLLTAEGKPLPENTLAELRRDMARLRIVRDQIKEIEQERLRKLEAAPVAENGPHSMIRLIARVVGVGVETADMLVNEILTRRLRDGKAVARYAGLTGSPDESGRRRREKGLARAGNARVRRGMIQLAWRFLMFQKDSALAEWFRRRAADGRRGTRKTMIVALARKLLIALWRMTKTGEIPEGVKLRPAA

SEQ ID NO: 325804 - protein, 313 aa, unidentified
MTITLRYIGIDVSKRHLDIFDEGIGVSERVANAPHAITELVARWRCDALVVFEATGVYDLELREALRAAGIRFARINPARARDFARASGQLAKTDPIDARMLAVFARAMRPAPEQVSTPARNALARLAKRRDQLVHMRAQEKNRRSEAGDRAMVERICRLIEVLDREVAEIEADISALIKAEPEISHDAQLMRSLPGVGPVACMQLIAQMPELGQIGPKQAAALAGLAPFNVDSGTYRGKRKIGGGRKRVRDALYMAALNAVRRADRFKAFYAKLRQAGKPAKLALIAVARKLLTILNAIMRDRKAYIPTQQT

SEQ ID NO: 325805 - protein, 358 aa, unidentified
MNNVKSSRLDFTGQPIYIGLDVHKKSWSVSIFSEQIEHKTFTQPPEVDKLVNYLRRTFPGALYHSVYEAGYSGFWIHDRLKEKGIDCTVVNPADVPTKDKERVTKRDRIDCRKLARGLRSGEIEGIYVPSRTKLEDRSLVRTRQSMVRKQTRCKNQIKSMLLFYGIHLSEELTLSHWSRRFLGWIENIRMERASGDMALRVHLEELKHLRQFIASLNRAILLLARMEEYRVPVALLKTIPGISTLTAMTLLTELYEITRFPSLDELSSYVGLIPETRGSGEKEYTGEITGRRHSQLRCLLIEASWVAVRKDPALLMAFHQYCKRMRKTKAIVKIARKLLNRIRYVLKNRMEYVPAVVQ

SEQ ID NO: 325806 - protein, 371 aa, unidentified
MRFYQGQHRFYCGIDLHARSMHVCVVDHAGNLVFDKKLASRPEVLLRALEPFRDGLVIGVECMFAWYWVADFCVTHDIAFVLGHALYLKAIHGGKAKNDRIDATKLARLLRGGTFPTAYAYPRGMRETRDLLRRRTYLVRQRAQLLTHLQILNAQYNLAPFPQRLCYAANRAEMQVAERFADASVQRSAAANLAVIDRLDEVIADVERYLRRTAQVDGVQTYHRLQTIPGVGKLLALILLYEMHQVQRFASAGQFLSYARLVRCVHESAGKKLGTGGRKIGNAHLRWAFAEAACLLVQHSERAKRWKQRQGAQRGNGKALAILAARLARAVYHMLRKGEAFDEDRFWAGRPRPSATGSSSLSRPEVEHARA

SEQ ID NO: 325807 - protein, 477 aa, unidentified
MAIKHKAATEAKPNRKQRRGQQRKIWADNPGLDMVHPNAAGIDAGNSEHYVAIARDKSAEPVRRFGCFTADLRELASFLKEHGVVTVAMQSTGVYWIPLYDVLEEAGLEVYLVNARDTRNLPGRKSDVQESQWLLKLHTYGLLRNSFHPTSEIRVLRAYWRQRAEHIHTATECVQRLQKALTQMNLQLANVISGIMGDTGQAILRAIVAGERDVEKLAKLRNWRIQASYEEIVASLTGNWREELVFALGQEVARYDFCQEQIMECDRKIERHLGSLPARPQEAGQPGEAALPPQKWKKATGNEPAFDLAGALVRIAGVDITRIDGISVLTTQTVISEVGLDMEKFKTEGHFASFLGLCPFNAVSGGKVLRRGTRKVVNRAATAFRIAALTLKNSNSYLGAQYRRFRSKPGAPKAITAMAHKLAVLFYRMLRYRQEYAGRGQQFYEEKYRQQQISLLNKKATRLGFSIVPVVNAQVTA

SEQ ID NO: 325808 - protein, 370 aa, unidentified
MIRLARAMQYLINTELSSHEETRFEFNRSTGAIKLGIDVHQDFYVVVEQVEGGNPKPPQRFDKQAFLHWASKLKQRGAEVHAVYEACGFGFSLQRNLTALGIKCHVVCPQKLDERNKRVKTDGLDAKALCLKLDRFVQGNRDALALVRVPTEEEERSRAIHRQREQLVGARKRLEAQGRSLMVNHGVDPVQNWWKPRTFATLPVPHWMRELLLNSQPILLALQEKIAVLTLQLQNAAAPNQARGLGKMTSVVIDREIGDWHRFNNRRQIASYTGLCPGEYSSGNTRLQSCVTKHGNPRLRAALVELAWRLVRFQPNYKPIVKWRQILAKGALATGAARKKAIVAVARQLAVDLWRIKTGRLRAQELGLIT

SEQ ID NO: 325809 - protein, 347 aa, unidentified
MTKFWAGLDVGVETTSLCIINESADVLHEATCPSTLKSIHQEIKWLRRRRSARVGMETGPGVSLARGLRSLGYSVDLYEVRQLSKFLRCRRNKTDAGDAFGIAEAGRVGTPLISKVYLKSLESQILQSRLTIRRRLIRHRVSATNLLCRQIELYGGRIRRCKRSMQLREQVEAELRNLFGKTPNPLASALRLLLDHCEQLLAYQSTIDRELTRFASNNEICRRFMEIPGVGTHCALTFYATVDDPHRFRRSADIGSYFGLTPKLYQSGLAMRHGRISKMGNSAMRTLLVHAALSFMRWSSTDSLLRTWASSVEERRGRGKARVALARKLAVIMLAMWKSGANYEPAR

SEQ ID NO: 325810 - protein, 347 aa, unidentified
MNYIGVDCHITSLDFAVVNEKGHTTRKAKVETSVKEFVKFVKDVPKPRRIFIEEGELASWLLETSLTFGEELIITDPKTNKWIGKAGQKDDAIDAEKLAQLARGRYVKEIYHPVNNRRRFKELVYAYHDTVKSQTRIKNKLKAKFRREGIRCSGDTVYSVKYREEWRKKLPGNKVVHLIVNELWGQLDQIQNVREGLKRNIRIHGKQYPEIKRFRNVPGIGLIHASTISAIIETPHRFANKKKLWMYAGIGLAERRSGEKIYSRRLTREYNRLLKNSVKQASEAAIYSKDNQFRRQYLRLTIEKGIPSHKAKLTVARSLLAALYGMWKKGEAYDPEIDNKRGKGNKK

SEQ ID NO: 325811 - protein, 357 aa, unidentified
MRYSTAIGIDAHGMTNTICALDTNTGEMRETELSSEPEVLIEWINKQSFPYPIMTAYESGPTGFGLARCLIAAGIPCMVAASSRLLKDAKKKKNDREDARNLAKGIIAFEVYPVWIPSVEQEAACNLSRLRNEISLDLRRAKQRVTSFLLKMGVRYTKGKRWTGKFRKWADTYEFPLETDTYVFREKLACVYQAESRLTPIEERLHRLIEADPNLKRLYDRLRCLHGIGPVTACALVCEIGDFNRFKKGSHLASYLGLVPSEDSSGEKNSNGKITKAGNCHLRRLLVEAAGSYSKRSKLEKSNDPNVDPLVREHAHKGSVRLYKRRQVFKKRNKQHNKAKVAIARELAEWVYHIAVM

SEQ ID NO: 325812 - protein, 354 aa, unidentified
MKVQGRIYQNITQMKRGIKKMKYQYIVGMDVAKDSVQASRFDGTTFSDFSFPNQEKSFLKEIQKSIPKSDPSQILFVMEATGVYHLKLATALYKKGYPVAVINPFIIKKYAEMLLKKAKTDKNDARLIAQFGFYQEVTLFVPKEGVAEEITQVLKGLDQLNKARTNLKNYHEALTHRSKINPVVRDIYQKQLEEVEKAIKTLEAEAKRLVSQYAPKEYQLLLSIKGIGKYSATALLGFLQKMDHFSRGKEVASFLGLAPQISQSGKDKGKAWLSKKGNGYLRRLLYLAALSASRSNAQCRELYQRLLAKGKPKKVALIAVANKLLRQAFAVLKSGCPYDPQYLNQKSNLEVVLT

SEQ ID NO: 325813 - protein, 344 aa, unidentified
MSTIRVVGIDIAKSVFQVCVWMVDGSVAWNKKISRSKLLDTIRQFEPGTLVAMEACATSHFWGRTFASMGYCVRLIPAQHVKAFVRSQKNDANDALAICETAFRPGIHFVSVKTTEQQDIKALRNTRQLMVEQRTALANQLRSLLAEYGFTIPVGILRLQQQLPELIEDASNSLTFTLRRLLSSLREDMQALNERITSLDSEIAALSSQQIAYHHLLTIPGVGPLIAAAFISEVDATQFSSGRELSARCGLVPRQHSSGGKQRLSSVTKNGNRSLRTLIIHGARSVMRCVKKRDDSLSIWQQRLEARRGFLKTTVALANKLTRIIWRVLTDGIDFNMQKAVAIN

SEQ ID NO: 325814 - protein, 434 aa, unidentified
MNCNTKLEVITEDTLIIGIDVAKYSHLARMFDHRGAELCKRIIFENSRNGFTSFIKAIEELKSLHMKKDIVIGLEPTGVYGHVLIAYFKDRGYNVVYVLGIQVKRTKELEDNSPSKNDFKDAKIIASLVRSGYYFKIRNHAEEITELKDATSFAYQLTKKIVRVKCQIQDCLTEYFPEFPTVFKCFNSHNSNRPNQWGNKTAMITLHQFPLPDQINELTAEQIVSAWRTSGVIKGIGIKKAVELKQLAKDTIGLKPNASVHMHFKCLMDELDLLTSQENEIWHRIKALVEKNPDFNTIMRIPHMTMKMAAYLLAEVGDFRDFDHPQQIVRLAGFNLKESSSGGSRGQSQITKRGRSLLRRVLYFIVLEQLKHAAPGWHQLHKYYTTRKNRPLKKMQSVIALCCKLLRVVWSMIKNDTPYDPDLLLPKKELLKTA

SEQ ID NO: 325815 - protein, 369 aa, unidentified
MNYNTVYVGMDVHKESFTLCSCKYEDEKASHYQRTQASYKNVLRYLEFLRTIYGDDTRFVCGYEAGCLGYSLYRQLESFNVECVILAPTTMLEQRSKRRIKRDAEIIARSLAQHNYSPVHIPTETDNQTKEFIRMRDDHKAELKKIKQQILSFCLRQGYQYDGSGNWTEKHVKWLRSLKPVGLYKEILDEYLLTYTTLTDKLNRLDHRIEELASKEEYKESVSKLTCFLGIRTHTALSVIVEVGDFQRFASARKFAGYLGLVPGQHSSGDDRNGLGITKAGNTHVRRLLTESAQSYTRGKIGYKSRVLRLRQAGNSPQVINYADRANERLRRRYYKMVLKDGKKYNIAKTAVARELACFIWGMMTDNIY

SEQ ID NO: 325816 - protein, 408 aa, unidentified
MIFVGVDWAEAHHDVHVADDAGTRLGKARLPEGVEGVARFHELVGALVEDPAEVVIGIETDRGLFVTALVAAGYQLYAVNPMSTSRYRDRYSTSGAKSDAGDAHVLSDMVRTDRHHHRLVAGDSDDVEAIKILARAHQTMVWSRGRQTNLLRSTLREFYPAALVAFDDLASSDALAVLRVAPTPTLGAGLSRSKIAAALRRGGRQRRVEERAVEIQTALRSEQLHAPAAVAAAMGASVAASVAVIAEMAAQTERLAEELSSGFEQHPDAEVVRSLPGLGTILGARVLGEFGDDPHRYADGKARRNYAGTSPLTRAPGKKKVVAARFICNSRLVDALNAQAFSALKASPGARALYDELRARGIEHNDALRRLASRLVGILHGCLKTRTLYDEATAWSHRQNLPQSSVAA

SEQ ID NO: 325817 - protein, 346 aa, unidentified
MKNKSIPDIVYLVIDIGKNSFHIVGLSSSGKPVFRARMTRERLIDFFSRSPSMTIGMEACPGSNWLSRKAKAYGHLARIVPAQFVKPFVKSNKTDIVDAEAIAEAISRPTMRFVAPKTEAQLDLQALHRVRQRLVSHKTSVINHARAFLLEYGITIGTGATYFVRDVPDKLTDENNELTPEMRTVLNELWIEYKAIEERLLLLRKRIEHHASADDTATRLTSVPGIGKLTATAITAFAGNGNQFKSGRDLAAWLGLVPREHSTGGKQRLLGISKRGNPYLRKLLIHGARTCVLNLNRTKDRLGAWIDKMEARGIHRNKVIVALANKLARVVWAVLTHKSTFYLPQV

SEQ ID NO: 325818 - protein, 320 aa, unidentified
MSTKKAKSFIGIDVSKQLLEVAAHESDYQLRCANKTSGFAELIGELTRLRPVLIVLEATGGLEIPVTAALQAAGLPVVVINPRQVRDFAKATGQLAKTDRLDARVLAHFAAAIKPPLRPIKSANELELDALVGRRGQLVEILTAEKNRRGSATTDTVREEIDQHIDWLDQRIAALDKQLKGLLKTSAVWQSNDAILQSVPGIGPVVSVSMLAELPELGTLNRQRISKLVGVAPLNRDSGPQRGSRHIYGGRKRVRSMLYMATLSATRFNPVIKAFYQRLLAKHKPFKVALTACMRKLLAIINVMIRDQTHWKTEVEPLSA

SEQ ID NO: 325819 - protein, 363 aa, unidentified
MKEEKRRYVGIDLGKFDYTMAIIGKNGKMTIHKGKTSLQGRASLYGLLEKSDKIALEAGNLAFLMTREIQQQVGSEVRVLNSAKLPFIWDAPTKTDKEDAMKLARLVEERRDEKLPIVPLPSEEEMERREVVSNYSREMRSRTRVINTLHSLFVKQGITTVVRKDLATVQKASEAIEVLKGQLREDAEYQLQHLALYEKRIKQLKGKINQEAQKDEDMQQLQSIAGVGPIVAYAFVAYVGDGSRFSKGAQVSNYLGFVPRLDYSGTIQRHGHITKRGNSYLRGLLVQAAWCMVRSRKGGSLKERYIYQTKVQGKSKKKTIVSVGRRMAELMYSILRDKTLYEVRRWKVPQNNPAGLAGEAMSA

SEQ ID NO: 325820 - protein, 366 aa, unidentified
MTNNNITWVGMDTDADKAEVALYRGWEREPSAEFRIEMDSKGVKKLIEKLKKEGGEVRTVYEAGPCGYPLARRLRQAGIACDVIAPSLTPTKPGDRVKTNRRDARNLARLYRAGELTVIDIPQESDEAVRDLTRAREDVREDLTRRQHRLSRFLLRHGYRYREGEAWTQKHWAWIRKIRFDDANLETVFDESIRAVEQSREQLKTYDARVEEVARQPQYAVKVARYQVLRGVRTITAMTIVSEGADLRRYATAPQFMGSTGLVPSERSTGDRERRGSITKTGNAHLRRVLVEAAWHYRHRPISGAPVKRRRKDQAAALVTIAERADQRLYRKFRKLVDRYNKKPAIAAVAVARELAGFIWAIGQLE

SEQ ID NO: 325821 - protein, 406 aa, unidentified
MTITTGYIGIDAAKTFHKICIKNQHKRTLIPIFEIEDSADGFDALRSTMDALKEQHQLSMFMVGIESTGTYHVHLLDWLRQQADVIASLLNPLQTHHYLRSDMRRASTDSVSAELIAQFMVERTPKPTKFVGMDYETVKRLASHLHGLTKQKSATMNRLRELVSLQWPSFERTFHNFNAKQVLALLTVVQTPKEFLTYSPDSLKHVTVLGTSYTLRSNFLKTVTTLAEHERTTITSLQPAYIIRSLAEQVMFFLQQIDQVTEELKRTFANTTDQEVPLLATINGVGTVSAMVFTAAIGDPHRFSSTKQIVSYFGLSPRIKQSGTSVVGRGYVQKKGSPLIRFYLFNCVLSMIRNPKHPIGVFYKRLVDEGKEKMVAIIACMRKLAILMLAILQSNTPFHFQSQLPV

SEQ ID NO: 325822 - protein, 387 aa, unidentified
MEARIVNTPSAALDNEPARCFFAIELSKTSWLVAAQGPTGNVRRYQLPGCDANALLELIERIRARVERETGRPVEMVSCYEAGYDGFWLHRFLVARGVRNCVIDPASLQVDRRARRAKTDRIDAERMLRALIRYLRGEPDACSVVRVPSVEEEDAKRLHRERHRLVAERVQHVNRIKSLCALQGIYDYQPLRPDRMERLDHLRTGNGQALPVRLKAEIERELERLQLVLEMIVSLEAERNAITKDKAPTAHLHADKIRKLVRLKAIGPEFSTALVGEVFYRQFANRRQIGSYVGLTPSPFSSGAIARDQGISKAGNPKARTMMIELAWMWRRHQPGSALTVWFNERVGNLKGRPRRIAIVAMARKLLVALWRYLETGLVPTGAVLKA

SEQ ID NO: 325823 - protein, 320 aa, unidentified
MSGYIGIDVAKSELVMAISGIDGVRSFPNSEHGHAEATKWLKKLDAPPVLIVLEATGGYERGITAALGNAKLPVVVVNPRQVRDFARGMGKLAKTDKLDAAVLAEFAARVRPEVRELPTEEQEDLRELLIRRDQLKQMLLAENTRLLQAAGKRYHRRRKEIKSHVSDLEKRMRMLESDLDDTLRRSSLWKEHDDLLQSAPGIGKQTARSMIGFLPELGTVNAAQIASLVGLAPRNRDSGMMRGQRHIGGGRSRLRATLYMATLAAIRTDPVVKGWYEHLLAAGKPKKVAIIACMRKLLVILNAMTKTNTRWQPQTQPLPA

SEQ ID NO: 325824 - protein, 354 aa, unidentified
MRTYYVGMDVHRASIAIAVLNGAGKVVEQIVIETSAERVRRYLKQLSGRVYVTFEEGTQATWLHDVVRPLVTGVVVCDPRHNKLLGAGNKSDRIDAQKLAELLRNGSLKAVYHKDHGTRQLKELVRVYDCLVSDTTRVMNRLKAIYRGRAISYRGHNIYRYEGRAQWLAKLREPGARQRADFLYQQLAGLKPLRQEAKQLMIKAARRQPAYRWLITIPLLGPVSVAQLIAIVSTPHRFRSKRQFWTYVGLAVVTVSSADHEVVKGVLRRTRRPGATRGLNRNHNHVLKRVFKNAAVGACHRDPFQAGYQARLDQGMAASLARLTIARQLSAITLAVWKSGVAFKSERMKQSVTA

SEQ ID NO: 325825 - protein, 395 aa, unidentified
MVGPQLQVAVDVGCQRHRVAVGDVAGQLFEEFDIDHSKAGLADFFTRIERHQAKRGWPVAVAMEGYNGWARPLDRQVLSRGWRLYNVNNLKLARYKEIFPAPSKSDAIDTRRMLELFRLQGELRVARNVLQEVAPVAVENEQLKRLTRRRRQLINEKGRVLNRLQADLQAVCPGLLSITGEADNLWFLSLLSCRDDLRKIAGLRRGTLLSLQGVGQKYASVIQGWQKQASFSTETQWVGPMIVADAQRVLELKGQIRVLDASIGSLVKRSEIAARIDTIPGFGPTCSGELAGEMGALERFASEASLAVYLGMAPLDDSSGDYSGTKCPRQINARAKAAMMVAVARHIQQVESSRAYYERKRSEGKRHNRAVRALGRQLVRVIWSMLKHGRDYELR

SEQ ID NO: 325826 - protein, 387 aa, unidentified
MQTDTSATVVATTARVNNITLFASLELGKSKWLVTVNSPGSEKFSKHVVEGGDSVRLLDLLSRAKAKAEQRFGLPVGAIVIQEAGLEGFWIHRLLVANGIVSHVVDAASIAVDRRHRRVKTDAIDGDTLLRTLMAWARGERRVCSMVCVPSPEEEDRRRLSRERGTLLKERIQHTNRIKGLLSGQGIRDYDPLWRDRFERLEALRTGDGRPLPPKLRAEIRRELDRIELVTTQLTSVERSRDTLVRAEAVEQNNPAAQLLKLRGIGPEFASLLWLESLFRGFGNRRQVAAYAGLAPSPWQSGSIDRDQGISKSGNRRLRHTMIELAWFWLRHQPESALSRWFQARVGAGKGRIRRIAIVALARKLLIALWRYVTQGAVPEGAVFKAA

SEQ ID NO: 325827 - protein, 414 aa, unidentified
MSVTDTSLVTRAVAAGIDWAETNHAVCVIDADGEAITRVELAHSRAGIAGMITVLSRHRVQAVGIERPDGPVVDALLSAGISVYVIAPAQIKALRRRYGTAGNKDDRFDAYVLADTVRTDRRRLTALQRDSDATVALRQLCRVRKDLVAHRVAVTNQLRAHLLTVLPAAVGLFSSLECPISRQFLVRFATQDAVDQLTCRRLTAWLKRAGYNFRTKPEVLHQRLIDAPRGAIGTHTAALAEITRAYVATLTTLCAQIDALTDQVSQALDAHPDKDIFTSLPKAGTLRAARLLAEIGDARGRFPTATALACLSGVAPSTRESGTHRVVSFRWAVDKQLRDAICDFAGDSHHANPWAADLYAKARARGHDHPHAVRILGRAWLDIIWKCWTTNTPYDTGRHKALQRVVNRDQQSEG

SEQ ID NO: 325828 - protein, 347 aa, unidentified
MRKVAYLSMDVHARNCVMGDMDGNGNFRGNRSFITCENNIINALKTIKAKKKYLVMEAGPLSYWAAQVANDHVTEVIISDPRENALIYNSSKKRDKVDTRKLSRLLRLGEFKAVYRPENDQRAIFKAAVQHYLDLRDQLIALKQKIKAMYRQWGVIDVFTDSVYSGTGRDKFLKQVNHRPIYLQLQRLYALLDATAAIKQEAQKSMQSLGRNYPEIKEFEKIPGMGSIGAHTFDAYIQTPHRFAKRSRLWKYCRLGVTDRSSDGKPLGYKRLDKSGIGELKALSYRAFISAMKGDNEVKRFYLNSLQRTHDRKHARLNTQRKILSMMLSIWKKGKPYRAELFLDPSI

SEQ ID NO: 325829 - protein, 433 aa, unidentified
MHDVEDEPLFADRVAGIDIAKAGIEVTIGVPSDTRAGGRQQESRSFATTRRELMALADWLRVWDVTKVGMEATGDYWKPVYFVLESQGFDCQLYHAAQVKALPGRPKTDRADSVWLARITERGSLPSSFVPPEPIRRLRTHTRYRRHLTQARTAEKQRVEKLLEDAHLKLSSVISDIHGMSGRAMLEAIIAGERNPGVLAQLARGTMRGKIARLEEALDCSFLTSEHVAILAMMLEAIDRFTAQIDELTARIDALTEPWLHQIEQLDAVHGVGKISAQDVIAEIGADMTVFPTASHLASWARWCPQLRQSGGKRTGTTASGRGNPYLSAALGEISISAARTHSFLGARYRQLVKRMPKKKALVATGNSVLTIFHALLSDPHATYHDLGPDYYEQRANTRRQARNHIRGLQRLGYHVTIQAINPDTGELLPATT

SEQ ID NO: 325830 - protein, 354 aa, unidentified
MSKYNTQSFVGMDIGDREIQFCILDPEGSVMDSGSLETTVRGLNAFLDRFDTPKTVLVALETGTHSPWISHLLEAREFHVLVGNARKLRAIWDTDNKFDDRDAEMLARIARFDPSLLYPIHHRSRKAHADLAVIKARDTLVRCRSTLIAYLRGICKTAGTRLPSCTAEAFARRVVEHLPKDLLAAAIPCVNTIQKLDSEIRQLDSHIEKLCAEAYPETKTLRQIAGVGPITALSYLLTLEDPNRFLKSRDVGPYLGLTPKRDQSAQSDKPLPITKAGDTYLRRLLVGSAQYILGPFGADCHLRRYGMRIASRGGKAAKRRAVVAVARKVAVLMHHLWKYNVPYHPWYQPNAKAA

SEQ ID NO: 325831 - protein, 462 aa, unidentified
MKSGKVASKKEKPRRRKVDWKALEIVHPDAAGIDIGGREHWVAISPDRDEDPVRRFDCFTVDLQQMAKWLVERGVRSVAMQSTGVFWMPVYEVLEQSGLEVYLVNARHTKNLPGRKSDIQECQWLLKLHTFGLLNNSFQPTDEIRVARTMWRHRSNLVAQAGSAIQRMQKALTEMNVQIHNVLSDLSGVSGMAIMKAILKGERDPWTLAAFANPAVKASPADIAKSLHGNWREELLLVLRQEMELYQTYQDKIAECDQQLRRHLQSLAPRVDLQTQPLGPRPRGKKGPRSNAPKFDLRSELYRITGVDWTQVNGIDVQVAQTVITEVGVDLSSFPSERHFASWLGLCPMNEQSSGKILNRRTPKVVNRATVAFRLAASGLLRSQSYLGAQYRRLRTRLGAPKAITAMARKLACLFYRLLRHGQPYVDKGTQYYESRYREQQIRSLAKRAKKLGLELVEPNAA

SEQ ID NO: 325832 - protein, 411 aa, unidentified
MDVLIERCAGLDVHRDTVVATVRRPGPGGARRSETRTFTTMTGQLEALAEWLTAQEVTLVGMESTGIYWRPVYYVLEDRFPVWVINAEHLRNVPGRKTDVADSMWIAQLIEHGLVSPSFVPPRNVRLLRDVTRHGRRLTEERTRTIQRLEKVLQDAGIKLTSVASTILGKTGRAILAALLAGEEDPTVLAELAKGRLRPKIPALREALTHRFRLEHHGALIAQMLAHVDFLEASIAETHQRTEVLLRPVADIVELVMTIPGVGRRTAEVLIAEVGLDMTVFPTAGHLASWAGICPGNNSSGGKRRAGRTRHGSMWLRIALTEAAQVAARGKGTYLAAHHAQIRGRRGTQKAIGATRHDILIAYYHIVRDRVPYQDLGPDWNDRRRSAAQQARRLVRQLERLGVTVTITPGA

SEQ ID NO: 325833 - protein, 381 aa, unidentified
MKKNTTGTKTRKAQVKAKQQLRKRAAAERLTIGLDLGDRTFHYCILDEAGEVVSEGTRPTSRAGLSSLLQKMAPSRVAMEVGTHSPWISQHVSRMGHEVIVANARRVKLISESIQKNDRIDARTLARLARVDPKLLAPIQHRGEKAQQDLAVIRARAGLVEARTKLINTVRGLVKPMGERLKKCDAEQVGEGMLEGMSEAARRTVGSLMRCIEKVNEEVGKYDEQIEEIGKEYGELKLLTQVHGVGMLTALTYLLTIDDANRFVHSRDVGPYLGLRPRQKESGQSRPELGISKAGDRLLRSYLVQAAHCNLRKNAPESDLRTWGTNKAGTGKRAKRRAVVAMARKLGVLLHRLWVTGEVYDPHYNLKAEEQRTAKKAKQAA

SEQ ID NO: 325834 - protein, 398 aa, unidentified
MTESSDYESVQVFIGVDVGKDTHHAVAINRSGKRLFDKALPNDENKLRSLISDLKQHGQILLVVDQPATIGALPVAVARSEGVLVGYLPGLAMRRIADLHAGEAKTDARDAAIIAEAARTLPHALRTLKLADEQIAELSMLCGFDDDLAAQTTQASNRIRGLLTQIHPALERVLGPRLEHPAVLDLLQRYPSPEKLASLGEKKLAAQLCKLAPRLGKRLAADIAQALAEQTVVVPGTNAAAVVLPRLALQLITLRKQRDEVALEVEQRVLAHPLYPVLTSMPGVGVRTAARLLTEVACRAFASAAHLAAYAGLAPVTRRSGSSIRGEHPSRRGNKALKRALFLSAFAALSDPLSRAYYTRKMSQGKRHNQALIALARRRCDVLFAMMRDGTFYTPQGS

SEQ ID NO: 325835 - protein, 450 aa, unidentified
MARNAKMIKSPDGNKLAIVNPDAAGIDIADTEMQVCVPEDRDGDNNRRFGSFTCELTNIVSWLKECHITTVAMEATGIYYLSLFLKLQDAGIEVILVNPLDVKNLSGHKTDSADAEWLMLLHRYGLLKPCYQPGNAARQIRNLTRQRNNLLRSAEKQILYIQKSLELMNIKLSTVISDVTGLSGRRIISAILAGNRVPEYLASLAMSNCKASKEEIALSLEGTWDADLLFTLKQSIEAYDFFMKQITDCDQEIEKLLKRYQAQMDTNVENLVRYKRKKNSRSKNAPVIDIELYAFSVWGVNVFDIPGLKDTAVMQLVGELGHDFTEKFETAEKFSSWCNLVPNNKISGGKLLSSRIMKKKNIVGQIFRTAASPMARDKSEMGYYYRRIRAKSGALQANVATAHKIAKIFYTMVKTKHAYDSSKVGLVEKEITEKKIAKLERALARLRNAS

SEQ ID NO: 325836 - protein, 426 aa, unidentified
MNIEEDIRFSQFRQLKKEIRGSREYLIVGIDVAKERHHAFFGTATGKTLLRRLIFENRSEGFRKLLDQAEAIREAQGLSKVVYGLEPTADYHKPLGEYLWSYGQTVVLVSGVAVKRNRELLDGRWDKHDSKDSANIADLIAQGKCQFYEHPGIALRDLRSLLSLKRKLKKQEHSYRVRIRNHLLAQYFPELDCYSGRSEVEAIVRWCLDPSRIAGFEKDQFIDLVSPNRKSRALRQRLQAIQELATDSIGCRMGEGAAFEAKVMVDGLRQIRKAIQSTADQIKEVCQRFPEYGYLLTIPGFGPDVSAKVIGALGHPFRFQNRKQVLKMAGLDLSAERSGKTSDTAMPVISKKGKADLRYALYQAAFIASTKNGDFMEYYNRQLRGREKEQGIGTKRKVKLAAKLLIMAWTIMKKQEPFDPRYFNQA

SEQ ID NO: 325837 - protein, 391 aa, unidentified
MPQPNDLSRSLTALDQDSTLIAVVEMSQSSWLVGAIIPGVERRPAKKLDASEGMLLALLHRWRDEAAKAGCTIDRITVAFEAGRDGFWLARWLRQRGIEAHVIHATSIAVSREHRRAKTDRLDAALLQRAFLGWLRGERGHCTMVAIASLAEEDAKRPSREREALVGERTRIGNRMKSTLARLGIRGIRPGLRKAAERLEQLRTPEGAPLPPNTLAELRRDLARLRLINDQIGEIEAARLERLRQQPDEARHPMILLLARVIGIGIETADMLVQEVLSRKLRDRRAVARYGGLTGSPEESGARRREKGLARAGNARVRRGMLQLAWRFLMFQKDSALAQWYRARTADARGATRKTMIVALARKLLVALWKLVTTGELPNGVVLRPAIQAVL

SEQ ID NO: 325838 - protein, 354 aa, unidentified
MSRKTTNLEAVATIGIDIGKNTFHLIGLDEKGAIVLRQKLLRGQVVTRLANMPLCLIGMEACVRAHHLGRQLKALGHDARLMPARYVRPYSKGQKNDFRDAEAIAEAVLRPTMKFVAIKTVEQLDLQALHRVRERLVSQRTSVINQIRAFLLERGIAVRQGLRALRTEIPIVLAMTDKLSPRMIRMIGDLCTDWHYLDERIETVSDEIATLSEEDEGAKRLMTVPGIGPIISTATVAAIGRGDVFSKGRDFGAWLGLVPRQMSTGGRTVLGPISKRGNRYLRMLFVQAANAVLLHPQSWEKHGLKSWIEAAARRLNRFKLAIALANKLARIAWGVLQGGRNFEVRSMKSAAQAA

SEQ ID NO: 325839 - protein, 398 aa, unidentified
MQVGWDWATEAHDVTVMDDAGAVVDRWAPAHDEAGIEASLRRLAAIGDPAALPVAIEATHGLVIDRLLAAGHPVVPVHPNAFHATRPRWGASRAKSDPGDSFKLADYLRTEGHRLRRLEPPARETAELRALVRMRDDHVVAKVAAANQLGALLARHWPGAAAVFARLDSEIALDFLDDYPTPASAARLGEARMAMFCRRHSYCGRRSPAALLERLRAAPEPVAVLGPEALAELVRAQVRLLRALLGTIADLDRAIGAALMEHPKAALLAAMPRIGEVNLAQVLAEVGPILDRAADAAHACAEVGVAPVTRASGKSAGVSFRWAVNTRARFAITTFADNSRHSSPCAARLYAEARARGKRHPHAVRIVARAWLRVMWACWHSGVPYDPSRHGGEQRLAA

SEQ ID NO: 325840 - protein, 358 aa, unidentified
MLPTPNAPVPGTTVVVGVDTHTDTHHAAVLDLNGRLEGDAAFPATPAGYQALVDWAGSYGIIDRIGVELTSSYGAGLTRALTGAGIHVLQVNTTDKATRARRGKDDRSDAIAAAQKVLAGMATAIPKDTTGVIESIRMLTLVRNSAVKSRTQALNQIKDLLVTAPTPLREQLRRFSLPTIAKHAAALQPDTGRYADPAHAAEHALKRLGHRVAALNDEITAADQELRALTTATAPTLLARPGLGVHTTAQFLITAAENIDRITSDAAFARLCGAAPGPVSSGQTHRMRLHRGGDRQANRALHMIIIGRMKNDPDTRAYITRRLTEGLSKRDTIRALKRYVARQVFNDLKTDLTKNRHP

SEQ ID NO: 325841 - protein, 397 aa, unidentified
MKQYICVGADVHDRSLVLKVALGQRQPERLSFANNPEDRAHMIRELHKRSHAAGEAEVVLAYEASGLGFGLYDELTEAGITCHVLAPTRIARSPKQKRDKTDDRDAEQLLQLVRAHVLAGNDLPTVWIPDLQTRDDREPVRARLDAGDKLTRVKTQIGCLLKRNQVRRPDGLGDGWTERYRGWLKSLSTSGQEPTAGLGTGGRVALGTLLRQMESLEGEIAELDQAIQALSLAPRYILAVEELDALMGVGVLTAMVYLTEMGDLSRFRNRRQVACYLGTVPSKTESGNDKDHKGHITRQGPARIRKVLCQASWARVGHDPQTAACYNRIVEKNPKHKKIALVAVMRRLAVLMWHRGLEAQRKTRAAPTAHKRVSSGDSTGPLRSAAAATSDDRCNTG

SEQ ID NO: 325842 - protein, 338 aa, unidentified
MTCIGFDHHKKWTQAAAVDDQGKIIREMRVLNDNSSLKGFLKGLPQPLKGVVEAGPTWGWIYDTLTELGVKMIVANPSAVRAIAAAKIKTDKIDARMLASLLRVGLIPEVYVPTEEVRSQKMLWRERIWLVRMHVRLKNRIHRLLNHYHLEVPEFSDLFGAAGRRFLEELKLPEPGNRILNAQLKLLQSYRLQIEEVQRWAVKATQGHPNRAYLESLPGFGKVFAPIVALEIDDPKRFASPGKLASYCGLVPSLYSSGGKSWQGGIGKEGNHWLKWAFIEAAWAAIRSSAYFRVVYQRLRQRKTAQVSIIACARRLCEIAYHLLKERRCYEERPYRCA

SEQ ID NO: 325843 - protein, 414 aa, unidentified
MTFKVVRFICGGMDVHKNLIVATIGTTDRQTLITEYIQQSFSTFYSDLIRLKEWFISHDCYDVCMESTGKYWIPIYNILETELNICLTHPKYVKAIKGKKTDKRDSKWICDLYKCDLVKHSFIPKKEIREMREIARYRCKLVYMRSSERNRYQNCLTVSNISLASAVSDPFGKTATNIMKELMQSEVIEDNKILKLIHKNCKDKILDSLQGYHIESDQRFKMDTVMNHIEYLDKQIQACEAELIKRAYPLRDYFQHITHIKGISALSAILIVSEIGTDMNQFESDKQLVNWAGLSPANNESANKKKSVRISKAGQYLKPLLVQCALSSIKDKNSYFGIKYCRIKKRRGHKKAIIAIARMMLVCIYHMILTGEEFNPCDYESLTNPKPKKEPIMTVESALQFLKDSNFDFSSIQL

SEQ ID NO: 325844 - protein, 392 aa, unidentified
MQAAADRAEAPTAIQTDLRAIFVSLELSRSTWLITSLSPSGGEKMSKHSVPAGDIAGLLRRFAQLKEKARARTGRDFPIIVIQETGLDGFWIHRMLQSEGIESHVVDAASILTSRRGRRAKTDRIDGETLVRTLMAFKRGEPRVCSMARAPTPQEEDRRRVCRERRTLVGERVTHVNRIKGLLFAQGVFGYQPLRKARREQLEELRTGDGRPLPVHLMAQIVRELDRLEVVLEQLKTVEAERNALLKPATGAAASPPAMLLELKGIGPETAAVLWSEGLFRQFDNRRQVAAYAGLAPTPWQSGSIDHEQGVSKAGNPRLRTTMVELAWLWLQNQPASALSLWFHERVRRLGGRMRKTTVVALARKLLIALWRYTTAGVVIEGAVMKAAPATI

SEQ ID NO: 325845 - protein, 406 aa, unidentified
MKQIVSVGIDVSKGKSTVCAMIHPNTIIKESFEVLHTVEEMSMLADYIGSLDGEIRIVMESTGHYHLPVAQFLYQKGFFVCVENAYIIRQFSRIMLHGAKTDPLDAKKLAKYGLAYWSELKPYQFHPSCYTELSLLSKQYQTYIKLLIAAKQNVIHLMDEMLPGFKEALDTASSVQFSKVKYVDFAKEFYHVDMIKSMGKEIFRENYKQWCKEKGYRFQSEKADELFHLAEDGIPTLPTEFPSTRLCMEVATEQVSQLGYALEQILSQMQNLAKTLPEYQTIRQMGGMGEKLCVRFIADIGDVRRFHNGKALVAYAGIDAPPYQSGQYTGTKRRISKRGNSVLRKTGYEVMKSLKSHPPKTDTRVYDFIIKKENEGKSKKQAKIAGLNKFLQIYYARVMEIYKNIV

SEQ ID NO: 325846 - protein, 461 aa, unidentified
MAKKAKKVKSAKGAELRIVNPDAAGIDIADGIMQVCIPADRSKDNNRAFGAYTSDLHAISAWLRECGIKTVAMESTGVYWIPLFCRLQEDGLDVVLTNARDVKNITERKTDESDAEWLMLLHQYGLLKASFQPHNDAKRMRTLPRHRDTLSREASSMVLRMQKAMQQMNIKLTLVLSDITGKSGIRIIEAILAGERDPKKLAELADIQCKTPKEEIAKALEGNWEEDLMFVLRQNYDTFKHYCTQLGECDAELEKLMENYRAEVAKVEDTSYSPAKKRRDYKKTRHTVSFDVERKAYEMWGVNVFEIPGISHLTALELMSELGHDFTRKFPSSKQFCCWCNISPNTKISGGKRISSHVPHRRNNVGLIFRSIASSLANAKNQLGNFYRRIRSRAGGKAAVIATAHKVAEIFFAMVANQTTYNPERVGIDEKVLLEKRITRYKRELERITGTHIEIGNACVP

SEQ ID NO: 325847 - protein, 371 aa, unidentified
MNSIIYVGMDVHKESYTLCCYDIEKDELLYKQTIQPDYRLILKYLGQVRNRYSEEVDFVCGYEAGCLGYILYHQLVDHGVKCIILAPTTMGITNTHHIKTDKRDAGNIARCVAFGTYSPVHIPTAEDESIKEYIRMRDDQKKALKVLKQQILALVLRQGKRFEDGKNYWTIKHVTWLKSLDLGGTTQEALSEYLISYEYLAGKIERLDQRIEELGSTQRYRENVQKLCCLLGVKTHTALAVIVETGDFARFAKAGNYAAYLGLVPGEDSSSDKKVRGGITKAGNGHVRKLLVESAQSYARGAVGYKSKALKARQRGNAPEVIAYADKANERLRRKFYRMTLSNNIKRNVAVTAIARELACFIWGLMTDHVA

SEQ ID NO: 325848 - protein, 371 aa, unidentified
MSRKHTAKEFDKSSKWLAIGVDLAKYDNTVVGISEDGEVQIIERISTADLLELASEIQPTTFAIEPCNGANILSLNLQAQGHEVKTISGAAVKDWVKVHLAGQKTDRNDALALAHLSRDTMLKPIRTKTVAEMRMQSIYAARKQLVKCRTSILVSLKGMSQAWGILFSAQRRNLKKMKESLEDKVELLSQPVVNALIQMIDSVACLDKEIEALEIVMKEQLSQDVRAQRIQSTLGIGFVGTHRLLSTCGDPNRFKGPKSFAAYYGLVPNNKSTGHNYRVGKCSCHGDAEMRSCLYQSAAVLYMQNVKNMLPDCALKQWIDKKVSQKMIWGKMIIALAAKLARILWALLKYDTYFNLSKAGLSRTMLTQQTN

SEQ ID NO: 325849 - protein, 355 aa, unidentified
MTGTKYIGMDVHKESISIAVMNGFGKVVMESVIETKASTILQFIDGLRGELCVTLEEGTWAAWLYDLLKPHVSKVVVCDPRRNALLKDGNKSDRIDARKLAELLYLDKLHPIYHGEHGLRTLKELVRSYLTLTKDLGRVMTRVKAIYRSWSIPCTGKQVYAPRHRSEWLAKISEPAVRRRAEFYFEQLDALRTLRQQARRELLAESKKQPAWRRLCQIPSLGPIRAAVLMGIVQTPHRFRTKRPLWKYIGFGIETHSSADHRSVHGQLQRSRKKISVRGLNRNCNHDLKNLFKGAAIVASSKPGPFQEFYAALLAKGMRPEMARLTLARKIATIALIVWKKGASFDAQYLKPQTA

SEQ ID NO: 325850 - protein, 449 aa, unidentified
MRPHFKQKEEAMGKDKKRKKHRNVDTSHLEQLNINAAGVDIGAELHYVAVPNGRDPEGQDVRHFSTFTTDLHKLADWLIQCKIDTVAMESTGIYWIPLFEILDSQGFNVRLVNPRNIKNTPGRKTDVVDCQWIQQLHTYGLLQSAFRPENQICELRAYLRQRAMLVSYASHHIQHMQKALEQMNIKLNQVISDITGVTGMKIIRAIISSERNPVKLARMRNPRCNNSETIIAKALEGNWRSEHIFALQQAIELYDFYKKQIIECESRIQRHLESFDDRSNGSPLEKPLRKSGGSSNKFNFDARGCLHRITGVDLTRIEGIEAPAALNIIGEIGIDMSPWSTEKHFASWLGLCPGSKISGGKVLSSKTKPSANRAAHAFRLAAYSLQRSKSAIGAFLRRKKAQIGAPKAITATAHKIARIFLKCSNIAPNMLTLASNIMSNAIKSEWLQT

SEQ ID NO: 325851 - protein, 408 aa, unidentified
MEILYPRCAGLDVHKDSVVARVRCVSEPAIDETRSFATTTAALIELQEWLSACTVTHVAMEATGVYWKPVWHLLEEHFTPVLANAQHIKNVPGRKTDVNDAAWIADLLAHGLIRSSFVPPAPIQELRDLTRTRKQLVREISQHTLRIQKTLEDANVKLSSVLSSVVGASGRAILEALIRGETDPAKLADLAQGNARKKRAELIEALNGRVTPHHRRLLRLHLDLIAALERALVEVDADVGKLLAPIQDCARRLTTVPGISEITAHVVVAEIGVDMARFPTAAHLLSWATMCPRNDESAGKRRSTRTRKGSPWLKTALVTAAWAAVRVKNSYPQAQFQRLKARRGAKKAILAVAASLLTAIYHMLKNGSDYRDLGADHFSRRDKSKAILRLVRRLNDLGCDVTVTPQAA

SEQ ID NO: 325852 - protein, 392 aa, unidentified
MFYVGIDIAKQNHEASIIDLDGKFLCESISFTNTQKGCEKLIALMEKFSATPENAVVGMEATGHYWLSVYSYLLEKGYDLKVINLIQSDSFRKIYIRQTKNDSKDSFVIAQIMRFGQYSSTYLSDENILALRQLSRYRLALVDECSDWKRKIIALLDQVFPEYESFFSDTFGVTSKELLLKSSTPEDMLSVSTCKLSNMIDKCSHGRHGRAKAKEIKNAASNSFGIKIAKDAFSFQIKQMMSQICFIEEQPEELELEISKLLHETNSVITTINGIGDVLGAIIVGEIGDISRFDSAPKLVAFAGLDVKVSQSGQFNGTQMSISKRGSPYLRRAIWTAANRAAFSDPALSEHYQSLRARGKHHLIAVGAVARKMCNIIFAVMRDNKPYVPNCK

SEQ ID NO: 325853 - protein, 351 aa, unidentified
MLMIGVDYHPSVQQIAFTDMETGECGERRLNHSDGEAEKFYRELKQRGVSVRVGMEATGYARWFERLLAELGFELWIGDPAEIKTKRVRKQKTDRQDAQLLLRLLLENRFPRIWRPSPENRDLRQLLWHRHRLVQMRTRIMNQLQAVAMNEGKRWKKKLFSAQGRAQLEELPLAPWASRRRHDLLELLDRLNPTIETLTAAIEQEAKRRPEVLRLMTVPGVGPITALAFVLIIGTPERFQCGKQIGSYVGLIPCEDSSAGRQRLGHISKQGNTLLRFLLVEAAQAAVRWDPDWRRRYLHLAMRRDRRISKVAMARRLGVRLYWMWRNGWEYSQLVKFGSHAGQPVHVHGVR

SEQ ID NO: 325854 - protein, 385 aa, unidentified
MKKITTVGLDLAKSVFQVHGIAEEGVVIVRRALRRSQVLDFFRTLQPCLVGMEACGSAHYWAREIQALGHTVRMMPAAYVKAYVKRNKTDAADAEAICEAVTRPTMRYVPAKTQDEQAAGMVLKARDLLIRQRTQTINALRAHLAELGIVRATGLVGIISLAAIVRDDSDLRLPGEARMALEELVEQIETVTARIERLDRKILEAVRKDDSARRLTAIPGVGPIIAATIRAVVPDPAGFRTGRDFAAWIGLTPRAHSSGGKERIVSISKRKPATANATCRWSDVDPQARSSWPPGITRDSGHDVAPPVQGCRCRTRKQDRAHYRRSSRSWRYLSGSEDDRPGLDIRAFRPTSRRERQGANCDDPTGRHPEANQTEKSQAHESARS

SEQ ID NO: 325855 - protein, 391 aa, unidentified
MVCVGIDVAKDKHDCCILDSDGTIRADCITIPNNMDGFKQLLQTIRDCTKRLDKIKVGLEATGHYSYNILGFLLDNDLAVYVMNPLHTNLYRKSLSLRKTKTDRVDARTIATMLLSDVDLKSYTDTAYHNEELKSLTRYRFDKVRERAKLKQSVSRLVTILFPELEKLVPSLHIASVYALLSEYPGAKQISEIHLTKLTNLLATASKGRYGKDKAIQIRDAARTSIGSVMPAKSLELKHTIKLIRELTSEIDEIEVSIQKIMDELNPPILSIPGVGIQSAAMILAEIGDFSNFESPDKVLAYAGCSPSTYQSGKLTNCYAHMEKRGSRYLRYALYNATKYVCYWNPVFAEYLAKKRAEGKHYNVALSHATKKLVRLIYALQKSGKAYLTAA

SEQ ID NO: 325856 - protein, 410 aa, unidentified
MDVMFDRVAGLDVGKESVTVCVRTPGSRRGRHSETRTFKTMTGSLRVMRDWLVESGVTIAAMESTSTYWKPPFYCLEEVMEVWLLNAGHMKAVPGRKSDVRDAEWIAQLLEHGLLAPSFVPPPEIRRLRMLTRYRVQLMGDRAREIVRLELMLEDASIKLSSVASSLKTVSARAMLTAMINGESDPLRLADMAKGKMRRKIPDLAQALTGHFDANHAQLAHSMLRRLDLVEQALVELDQVIVAACRPWQHQIELLQTIPGVGPKVAETIVAETGADMTRFPTAAHLAAWAGVAPAMNESAGRQMPARKRHGNKWLTAMLVEAAGSVGRMHGKNYLAAQHARLMRRRGMGRAQVAVAHSMLVAAYWMLKRDEPYHDLGADWHRRRNDQAHTRRLVAQLERLGHKVIIDPAA

SEQ ID NO: 325857 - protein, 423 aa, unidentified
MKFKAQAKQNQLLEHISTQHLVVGIDIAQQSHVARAVNFRGILLGTSLHFSNDDAGFSLLLQWMKDLQETHQLNDAIIGMEPTGHYWLSLAAWLKDRSLEVVLVNPHLVKKNKENRDNTPSKSDVKDALVIADMVKNGYYTFIKETSEVFMELRVLMANRETIVHRLVSVKNQIHRWVDIVFPELRQVYKHLLGSGSLATLRLFPTPADLRKLTVRQVVDGWKTVMKRHSGERRAGELLMLAARSVGAKHAEKAYKLHLQQLLAEYDLAMEQLQVIEDAVAVALARIPLAKPLLAMKGMSVLSVAGILGEAGDLSGYAHGNALLRHAGLNLAEASSGKWKGQMSISKRGRPRLRHALFMATMALIMNDEAFKRQHESNVKTRSMKPMRSVMKLCGKLARLLVAMAQSGEAYEPDRALPMKQAA

SEQ ID NO: 325858 - protein, 399 aa, unidentified
MNSVGIDVSKGKSTVAIMRPFGEIVASPFEINHTEEDFEKLVSRIKSLKGESRIVMEYTGRYYEPLANYLYNSGLYISVVNAILIHDYDNSSIRKVKTDKKDAIKIANYGLNRWLDLPEYIPEEELRQALKIYNRQFTQYTKLKVAMINNLIALSDQTFPGIDGLFGKTPRKDGHQKWIDFIKDYWHKDCITTKTIKSLERSYQKWCSKNGYHYQSNKVNDIYQLANQTVASIPANANTKLIITETAKELISLIDVLEKIRQEMNRIASQLPEYPAVMSLPGVGTTLGPQLIAEICDIRRFHSRKALIAYAGIDSSPYQSGTIDIKSRGISKRGSSALRKTLFTVMDCILRHQQIDDPVYQFFYKKRAKGKHYYVYMIAGCNKFLRIYYARINAYLNSI

SEQ ID NO: 325859 - protein, 381 aa, unidentified
MSPKLNSGIAVIGIDIGKNSFHVVGLDRRGAIVLRQKWSRGQVETRLANLPPCLIGMEACVGAHHLSRKLTLLGHNARLMPAKYVRPYSRGQKNDFRDAEAIAEAVQRPTMKFVATKTAEQLDLQALHPVRQRLVSQRTGIINQIRAFLLERGVAVRQGLRFLRAERPRILATPCDGLSPRMVRVLEELACDWRRLDERIEGLSSEIEVLARRDAGCKRLMSVPGIGPIISSAMVAAIGTGDTFTKGGDFAAWLGLVPKQISTGDRTILGKISKRGNRYLRVLFVQAAWAVLSSRRAGLGTGSSLGSKRPRSGCITTSSLSRSPTSSLALLGASWLMVAYSRQPRFRPRDLNASRRNVLPAEVCERMTRWRIGLPGACEHW

SEQ ID NO: 325860 - protein, 371 aa, unidentified
MEHTRFIGLDIHKERISVAVAESGRSGAVEYLGEIANEPGAISKLCDRLRRPGKPLAFCYEAGPCGYGVHRQLTSLGHRCDVVAPSLIPTKAGDRVKTNRRDATMLARLHRAGELTPVWVPDADHEAMRDLIRLRSVVRQIVTRARQHLQGFLLRHGRKHGRGTAWRMAYRRWLSTLAFEHPAQQIAFQDYVDAVMDAEQRLQRVEEQIFSLLPEWTLRPVVDALQAMRGIALINAVVLVTEVGDFTRFSNPRQLMAYFGLVPGERSSGETIRRGGITKTGNTHARRALVEGAWAYRMKARIGRHKIDRIEALPKVVRDIGWNAQVRLCARYRRLRARGKTANVVNVAIAREMVGFIWSIACTIQSAPRTT

SEQ ID NO: 325861 - protein, 341 aa, unidentified
MKLYGGIDLHSNNSVVALLDEEDRVVYRKRLANDAGLVLESLAPYREAITGLVVESTYNWYWLVDALMDAGYRVHWVHLANTAAIVQYSGLKYSDDDSDAAWLAKLLRLGLLPEGYIYPKEQRAVRDLLRRRSRLVQQHTANVLAVQNLFSRNRGRSLSANAIRRLTPESVGELLPDVHLALAVQSTLLAMRGQEAAIDLLEHEACAQVKGRPEYRHLLSTSGIGQVLGLTILLETGPIERFARVGNDASYSRLVGSERLSNGKRKGRGNTKSGNKYLAWAYLEAANFAVRYNPAIKRYDQRKRAKTNGVVAIKTVAHKLARACYYMLREGTDFDVNRAFA

SEQ ID NO: 325862 - protein, 316 aa, unidentified
MTPQECYVGIDVSKKHLDIAVRPGDEHWTVANDEDGIDELVTRLRSIGPRLVVLEATGGIELAVTGGLADAGLLVAVVNPRQVRDFARAIGKLAKTDRLDAQVIARFAEVVQPTPRPLRDAEAQALSALLSRRRQLVGMLTQEKNRLHAAQPSVQHDIRGHIVYMEKRLAKLDDDLGSTLRKSPMWRERDDLLRGVPGVGQVLSVTLLAEVPELGKLNRKQIAALVGVAPLNRDSGLLRGRRTVWGGRARVRATLYMATLTATRYNPVIRVFYKRLCASGKAKKLALTACMRKLLTILNSMFRHHTAWQPDYALNA

SEQ ID NO: 325863 - protein, 338 aa, unidentified
MTIKTIGIDLAKNVFEICGLDGSGEIQLRRRVRRETLLRVVGEIPACVIGIEACTGAYFWQRQFEAFGHEVRIIAPQHVKPFGRRQKNDRNDAEAIAIAITQPRMRFVPKKSVTQQDIQSLHRARRRMVNHRTALVSQMRGILLDRGIAFGQSITRARRMIPEVINDGSNDLTDLCREILSSLMDLMREIDKRVREFDQRIDQVFRSTEACQRVGRIRGVGPKTATAVIAAVGDGKDFDNGRHMAAWLGLVPRQHSSGDRTILMGISKRGDQHLRTLLVHGARAVVRTAAGKSDQFSQWVNALRERRGMNRAIVAVANKNARIIWAVLAKNEEYRPAI

SEQ ID NO: 325864 - protein, 356 aa, unidentified
MQTQVTKKIDFTDQNLFVGLDVHKKSWSVTIIVDGIEHRTFTQPPDPGSLCNYLHRMFPGASYYSAYEAGFCGYGIHRELNSLGIKNIVINAADIPTTQKDKLQKRDPVDSRKIARSLEKGSLHAIHVFDRELEELRTLNRTRFYLMRDLRRSKNRIKSFLHYFGEPIPLEFDNNQWTLKFVSWLKQVKMQTTSGQDSFSHLIESYEHHRRQLLDLSRLVRQRIREYDNELYSLLKSISGIGPLTSSALITELGDINRFNNIDQLGSYVGLIPRIRESGEITHTGGITFRCNSFLRTLLIESSWQAIRNDPAMMQYYHKHLVNSKGHKVVIKVARKLLNRIRYVMKNRQPYRTGVA

SEQ ID NO: 325865 - protein, 409 aa, unidentified
MRLFVGLDVSSFDMKVCFLNGEGEKLDSFSVSNDLPGAQVLKERLLQCTTNQEVETLKIGLESTSVYSFHPSMFLHHDEDLKRFGTKVFLLNPKQVANFKKSYSDMNKTDEIDAFVIADYLRFGRNQMSIVKESQYVALQQLTRSRYQLVRMLTKEKQHFLQHLSYKCNTFSQEVDSSIFGNAMMELFLEKFSLEELADMPLEELAEFLQEKSKNRFGDPKCVASTIQKAVRTSYRLDKVVEDSIDILLGTSIEIIRTYQKQIKELEKSIKRIMAGLTQTLESIPGIGPIYAAGIIAEIGQIERFDDETKIAKYAGLYWRTYQSGRFTAENTSLSRNGNHYLRYYLVEAANSVRKHVLEYQEYYAKKYNEVPKHQHKRALVLTARKFVRLVDALLRNHQLFTPERCVKV

SEQ ID NO: 325866 - protein, 348 aa, unidentified
MRYYDGLDVSLAETSVCVVDEEGNILREAKVASEPEALATWLGAFGLPFTRVGLETGALAGWLCEEMTELGVPNVICMDARHARAAMVAMTHKTDRNDARGLAQMLRTGWFRQVHVKARRTMELRTLLTSRKTLVLKIGDVENQIRGSLCLFGIKLGTAKRRTFSERVRELTADLPRVAAILDVLLQAHAAMLLSLDRLNRMVLEIAREHAVCRRLMTVPGVGAVVGLTFIAAIKDPARFAKSRSVGAILGLVPRKHQSGEVDRNGRITKTGDTEARAALFEAAHVMLHRVKKWSGLKVWATKVAQRQGNKRATVALARKMAVVMHRMWVDGTTFRFSAIKAPAAAAA

SEQ ID NO: 325867 - protein, 462 aa, unidentified
MPGREDSETGESSRRQLQGLPVIRRNVAGIDLGSERHWVCAPTRDGSGREIASFGATTAELLRLAGWLKARQVESVAMESTGVYWIAPHEVLEAQALQVLLVDTRQLARVPGRDKKSDPSDCEWIQRLHSCGLLRGSFRPEEAVCMLRTLVRDKANLVAESGDWLRRMQKSLDQMNVRVHRAVSDIDGVTGMAMLRAIAAGERDAQKLAQLRDRRCSKTPQEIADQLTGHWREDHLFSLQQALKMYDAVQERIAAYEQEILRQLGEMEEPGQQGQTAPPLHNANKTKAIKKRGQESKRQALYRMSGVDITQIDALGVETVEVVLSEYGPDLSRFPTEKEFVAHVTLAPRVPSSGGKPLKKKKRNSASTRVAAALRMAALSLRHSQTALGAYYRKLAQRLGGDVAVFATARKLATLIYRLLRWGQPYVDEGAAAYENRYLQQRIKSLTAKAKQLGYELTAVNA

SEQ ID NO: 325868 - protein, 342 aa, unidentified
MFYIGSDVSEKSSYVYVTDGRGRKVESKEIPTDKDGYRQYFKRWMNKPVKVAVEAGGHSRWIHDTLKKLGISVYIVNPNKVKLIAKNKKKTDKVDAAFLAKLLRIDELPEKVYVAEGDSRELRDLLRSRHQLLKSSTCLKNHLRGMLRQEGIKLKAKAFDDGTIFVRLRENTSIPKHLGPIIESYEKTIAELQKQKRALDDAIADYQNTDIELLKSVPGIGEVSSKTYYAAIATIKRFKRAKQLTSYCGLVPSVHSSGERADYGHITREGRSEVRHVAVQSAQAILRSTNSESKPLRKWHERVARRRGFKTAVVALARKITEIIFYVLRDRRPYDARLLQLK

SEQ ID NO: 325869 - protein, 390 aa, unidentified
MIYVGIDVAKDKHDCCILGSDGEILFSPFTFQNSLHGFDELYEKISSLTSDLTEIKVGLEATGHYHLNLLRSLLDNGLPSFVINPLHTNLYRKGQSLRKTKTDKVDAASIAMMLLTDRTLKPYSNTSYHNEELKSLTRYRFDKVQERARLKTSVSRLVSILFPELETLVPKLHMASVYALLSEFPGASFIASAHLTRLKHLLYDTSKGHYGRDMALAIRGAAASSIGSVVPAKSLELKHTIHLIQILSAEIDEIENAINAIMDILDSPITTIPGIKNRMGAMILAEIGDFSRFDNPDQILAYAGLSPSTYQSGQLTSSYAHMEKRGSRYLRYALFNAAIYVCHWDPTFKAYLAKKRSEGKHYYVAVSHVCKKLVRVIYRMQLTGEPYRSV

SEQ ID NO: 325870 - protein, 320 aa, unidentified
MTMITETAPTIVGIDVAQATVDVWVRPTAATWTARTTPAALRQLAQRLAALEPVVVVVEATGGLERPVIAALLAAALPVALVNPRQVRAFARAVGQLAKTDRLDAQVLAHFGHAVRPTPRAHQMQATAALRDLVARRAQLVRLHTAECNRHARCAHPAARASVRRVLAVLAAEQATIEQALDAAIAACAAWRARALLLQTIPGIGAQTARALLATLPELGTLNRRQLARLAGLAPCNNDSGLFRGRRTIQGGRAAVRTALYMAALSGVRFNPRLRAFYQRLRADGKPPKVALTACMRKLLCICNRVITTNTPWQEARPTP

SEQ ID NO: 325871 - protein, 456 aa, unidentified
MESSESSRRQLKGLPLIRQNVAGIDLGSERHWVCAPTPNGNGREIADFGATTPELVRMAEWLKARQVETVAMESTGVYWIAPHEILEGQGFQVLLVDTRQLARVPGRDKKTDPTDCEWIQRLHACGLLRGSFRPEETVCMLRTLVRDKANLVAESGDWVRRMQKSLDQMNVRVHRAVSDIDGVTGLAILGAIVGGERDAQKLAKLRDPRCRKSEKEIAEQLSGHWREDHLFSLPQTLEMYDAVQERIAAYEKEILGKLGDMERDELRGQTASPLPNAKKAKAIRKGGQEAKRQALFRMSGVAITQIDAVGVETVEVVLSEYGPDFTRFPTEKQFASHVTLAPHVPTSAGKPVKKKKRNSASTRVAAALRMAALSLRHSQTALGAYYRRIAQRRGGDIAVFATARKLATLIFRLLRWGQPYVDEGADAYENRYRQMRIARLHDTAKQLGYHLAPINP

SEQ ID NO: 325872 - protein, 370 aa, unidentified
MSVKVANIEADIVAALATVTDLADQVVWAVDIVGAPSALILALLARAESPVCYASGRVVNTMSAAYTGEGKTDAKDAYVIAETLRLRRDLPMVDTVTDLTRELALLTAHRSDLIADRVRMINRLRDVMTSVFPTLEQQFDYSSHKGALILLTEYASPKRLRRLGETRLTQWLRRRQVRDAARVAARALAAARGQDIELPGQQVAEMIIAELAASLLQLDQRIHGFDQQIAATFRRHHQAMIIESMPGFGPILGAQLLVAAGDLRGYPSAGHLAAAAGLVPVPNDSGRRSGNLHKPRRYSRPLRHVFYLSAQTSMMRAGPNRAYYLKKRVGGHTHAQAVITLARRRIDVLWALLRDDRTFSIDPPRPAAAA

SEQ ID NO: 325873 - protein, 306 aa, unidentified
MTKRSQEILRKEKVFVGLEDSKKTWQLCVRSDGVIVNETSMPAKLDVLSNYFSNKFPECQIQVIYEAGFKGFGLHDELEAKGWDCVVTPPHTVTEEKCQRKKNDRTDCRRLAKNLENGDYHSCFVPDKELREDRQISRTYEQVQADIRRVCNRIRRTLEFHGLDEGLSPGSWNRAMYIRVKLYLEDLEISASLRFSMKVMFNELEQLRQLRKEILQQLRTLAKSDRYKESVELLQTTPGIGTFTAIRLLLEWGDVSRFKRKEEFASFLGLVPSDYSSGEKERQGHITKQGNAQCAIMAGRVLLDGY

SEQ ID NO: 325874 - protein, 326 aa, unidentified
MRKPGSHTPKIKTQVALDVSSKALDVHFKSDGQAFSVPNTEEGLNCILKTFTAYDVSLVLMESTGGYEDLAACFFQDHGFDVVVVNARHARNFARAMGKLAKTDRIDSAVLADMAFMIDASHDRDRYIKPLTDEQRKRLSVMTVRRRQVVGLISTEKQRLTRADDWTRASIKKTIKALTTELRHIEQQISAHVKKNFVDLSKMLLSIPGIGEQAMTILIGEVPELGKADRRTISALIGVAPFNHDSGNFRGRRRIWGGRQSVRNVLYMGIISATRFNPVIRSFYNRLVSAGKPKKVALIACMRKLLTIINAMMRTGKPFDVALHGV

SEQ ID NO: 325875 - protein, 367 aa, unidentified
MSLRFQGQSETIQGRGAGTKAYSTEAFMDKFDPCGIEVSAQELIVAVSRDGREERLRSFPNTAEGHAALRRFLESGGRRVRVVLESTGLYGLDLACALCQAPQIEVMVANPRAVRHFASALMRRSKNDWLDAVVLREFAARMPFQPWTPPAASAFALCALARRLETLTEQATAEKNRQHAAQLSVAVPLAVRRDLQRSLRSIQRAILRLTREALRLLQGDPLLHGSYHLLLSVKGIGPTSALRLLAETALLSQDLDVRQWVAYAGLDPREYQSGTSVHRKTRISKTGNRHLRRALYMPALVAAQHEPHLRAFYQHLLARGKCKMQALVAVMRKLLHAVYGMLKNRQPYDGAKLYTLPAPKLSVPEAA

SEQ ID NO: 325876 - protein, 418 aa, unidentified
MTRREDSRIIRIVHPICCGLDVHKESVSACIIFPDDKGEEQSDVKIFGTFTDDLIRLRDWLAEHKCPVVAMESTGVYWRPVHNVLEDSVTVVLANARDMHNVSGRKTDIGDSKWIAGLLRHGLLKSSFIPPQDVRQWRDLTRLRKKYVYTVGDYKQRTHRLFESANIKIDSVVSDLFGVTGRNLMQLLVADRELTLSAIQTCVRGKLKGKEEELFRSIQGFFTDHHRFVFKMLLSTIATLEAQIEALDLQIRGAMKEHDALLDRMKQAPGIADVASREILAEIGPILDSFPKDTSLVAWCGLCPGNNESAGKRKSGKSPVRKNHLKTIMTEVAWAAVKKKGSYFKDKYYRLKARRGAKRAIVAIAHRILLGLYHVIKDGDDFRDLGADYLTLKNKSQKVFHLRKQALALGFHLVPQAV

SEQ ID NO: 325877 - protein, 342 aa, unidentified
MQETIYVGLDLGSSHCCQSIIGADGSLRSSRIVRTSEQQLRDAFTGLDGEVRVHMEAGELADWAGSVIGPLVSQVVVSHPRSLAWIGKDSVKDDRVDAGKLAELLRLGRVHEVYREEDAKRRTFKHLVMHHEQMSREQARRKSKIKARLRCLGIIRKDAALFTSAGQSVLLDAIESIEIKVMIAQSFSVLNRMIEIQREAKHAMVEYSKRFPEVHMLQSAPGVGAITACRFVGYVQTPRRFSNKRKLWRYCRLGITRRESNGKRLSHPRLDNAGVGSLKDVSRKVFEAARRCKGDNSFKRCFEQSLDNTKNAVHARLAAQRKILAVMRAMWAHNQPYRDNLG

SEQ ID NO: 325878 - protein, 361 aa, unidentified
METIDKNSALYIGIDVHRFGHTAVCANRFEEELGLLSFPNTLSGIERFRSWLLTIDNPEKPRIIGIEGSNGNGKLLTSIISSDYQEIYEVNPVYTKQRRDHGTTGDKSDAVDARLVIEVLTRKLDKLPKVTLQDQSRDIAILDQLTTFHDDLIRQQTRLKNQLHRLFHEDNPSYQSGHGSSFSLKALKGWKSYLRKQTNNTSSMTPSGTRRMIIRDKIKQFEQLRLLLKKADGHIHDLLGNNNLLTLPGAGVITTAKIITKTKGVKRFNLDGFIKYAGIAPIERQSGKTQKHKQNKSGNRQLNNALYTIALTQLRCCPKAKAYFEKKIKEGKTKKHAIRCLMKRIACIVYGMLRTGEKYRG

SEQ ID NO: 325879 - protein, 387 aa, unidentified
MPQQLDDLSRSLTPLQQDSTIVAVIEMSQASWLVAGIVPGIERHPLKKLEPSEVELLRLLMRWRAEATQNGRTITRIAVAFEAGRDGFWLARWLRARGIEAYVIHPASVAVSREHRRAKTDRLDTGLLKRVFLGWLRGEPDHCHMVAIPTLAEEDAKRPNREREGLVRERTRLVNRVKSCLVRFGVRTFKPTLRNAPDRLATLRTPEGVPLPPNTLLELRRDMARLRFVMDQIKEVEEARAQGLNQVPPDKTHVMVRLLARVIGIGLETADMLVQEVLARTWRDRRAVARYAGLTGSPDESGSRRREKGLAKAGNARVRRGMIQLAWRFLLFQKESALAQWYRARTADARGSTRKTLIVALARKLLIALWRMVTTGEVPAGVVLRAA

SEQ ID NO: 325880 - protein, 404 aa, unidentified
MNAVGIDVSKGKSMVAIIKPFGEIVKMPFEVTHTVKELDELANFILSLEGEARVVLENTGKYSEPVVNALCKAGIFICPVNAKLMHDYGGDTIRRAKTDKIDSLKIAGYCLDKWARLARYTPENEQRKMLKVYNRQLSEYAKLKVMLKNNLIALLDQSFPGANALFTSPARESDGHEKWIDFVASFWHCECVSSLSHQAFSIRYEKWCRKNRYNFSSAKATQVFHFATNHFGTLPKNDFLKTLIVQAVEQLNSLCETVSTLKAQMSKIASLLPEYETVLAMHGVGRVLAPQLIAEIGDIRRYPKRSSLACFAGIEPPENQSGSYNQHSRRISKQGSPHLRRALFQVMRCVLQLSHINEPTFQFIDRKRAEGKPYKVYMIAGVNKFLRIYYARVKECMDKLETEA

SEQ ID NO: 325881 - protein, 429 aa, unidentified
MEEIDDTDLVVERVAALDLGKAGLDACVRVPHTHHPGRRMQELRSYGTTTAQLLELAAWLRHWHVQRVVMESTSTYWKGVYYLLEAEGFDCWLVNAREVKNVPGRAKTDRADAVWLAKVAERGMCRPSLVHPPDIRRLRDLTRYRRALVQDRTRERQRVEKLLEDAQIKISSVLSDLHGVTGRAMMDALINGQRDPHTLARLAKGSARKKTARLEEALRGFFTDHHAMILQMMLANSDRLSSQIAELDGRIEEAVSPFCAQSARLADIPGVDVMAAAELIAEVGVDMTRFPSAAHLGVVGQVLPADHQSAGKSKSQGRGKGNPWLAGTLGRVVFANSRSETFLGARYRRLARRRGKQKAIVATGNSLLTVVYHLLLNSDARFCDLGPGYYESRINKHRRARDLATQLQALTGQHIVIRDGKAVITDTAA

SEQ ID NO: 325882 - protein, 313 aa, unidentified
MYYIGIDVSKKALSVFDGKTSLEFENIAGLKPFYLYLKKHYKNFDNLVLIFEATGIYSDNLKEFCNLHQIKAYILNPKQSHNFAKSLGVRSKTDKIDAQTIWRYQSLIPHERIQIPVIDPEVKMLASYLTSYQFIQVQRTAISNHLESVTDNPLRKLLEKELLRKQQLEAKLLSDIKSYIQEHPGLAKDYQRLMTISGIGEKLAFSLLFLFRHYQGTNRAQITALVGLDPTYKESGTSVKGKIKISKNGNRYIRKMLYLPTLCAIKNNQKIAVFYHRLIDNHKPKKVAVIAAMRKLLLVAHAVYENKTEYVPG

SEQ ID NO: 325883 - protein, 348 aa, unidentified
MEYYAGIDVSLECASVCVVDASGKIAREGKVASEPEALIAWFGSLGFGLARVGLEAGPLSQWLYARLREAGLAAELLETRHVKAALSAMPVKTDRNDARGIAQLMRLGWFRPVHCKSMAAQEVRALLTARKLIQSKLHDVEMSLRGILRGFGLKVGPTTPKRFAGRIGELVAGHATLEVIAEALLAVHAVLLHELGSFEKRVRTMARDDARARLLMSTPGVGAIVALTYVSAVDDPKRFKSSKAAGAHFGLTPRKYQSGETDITGRISKIGDAAVREALYQSAHVMLTKAVKGCSQLKSWAMRIARRAGMRKAKVALARKLAVIMHRMLADGKPFNPAAQAKTMAGAT

SEQ ID NO: 325884 - protein, 388 aa, unidentified
MTQAPGALPTPTVLDYERTLILAIELSNTSWVLAAQIPGLPGVKAKRSIEPTPEALMAAIEDYRTRAVKAGQNVERVVAIYEAGWSGFWLARWLAQYGIETHVIQPSSVPVDRRARRAKSDGIDAELLLRTLLAWLRGEPRVCSMVPIPAEADEDARRRVRERAELVAERVGLVNRIGAVLATLGVGEYNPLRRDRRQRLDELRTALGGSLPTHARAKIVRMLDRLELLLIQITELEKSRDAVLEDENPDKAASMIQQLAKLRGVGVQSATVLVREGFVREFANGKALGSYVGLTSTPYSSGGTEREQGIGKAGNVRLRTLMVELAWLWQRYQPDSAQVSWFRERVSGTGRRMRKVMVVGLARKLLIALWRFATQGVVPEGAFMKPAT

SEQ ID NO: 325885 - protein, 337 aa, unidentified
MKRSLFIGVDISKATLDVSILSPTDISLIHYHQFTNNSKGFTQLLKWIKQKSEGVKVENWKACMENTGMYSMELNCFLQQKGIWQCLENALQIKRSMGILRGKNDKADSKTIVLYAYRFSDKLKPYVFPSNVLLRLKALFSQRERLVNMHRQVQLGMESLSGYDQKLVRDIKKQSEALLQNLTTQIKDIDQLLKQCLKEDASLCRKAELMQSVPGIGLQTAVYMLIASRGMQSFDSPRQFACYSGCAPFEHQSGVSVRGKSRVHFIANRKIKSLLHMAALSAVAFNEELKTYYKRKVQEGKNKMSVLNAIRFKLICRVFSVVKRGELYQLNYNKLVA

SEQ ID NO: 325886 - protein, 361 aa, unidentified
MKKISTVAKRGNEIFEEPKLTIGLDLGDRTSHYGILDEAGNVILEHNLPTTPKGIQQVFSRIPRSRIALETGTHSSWVSRQLTELGHEVIMAHARNVRLGGESSRKDDQFDARTLARLARIDPDLLGPVRHRSAKAQIHLTVIRARAGLVSARTALVNTARGLAKSYGERLRKCGTGQVGRALAGGLSAALRDALDPLLQGIESLNERIAEYDRRIEQIAKEVYPEVALLKQVKGVGTLIALTYVLTLDDPHRFRRSRDAGCFLGLRPGRRNSGMSEPQMHISKEGDRYLRTLMVQGAHYILGPFGEDSDLRRWGLKLAERGGKNAKKRAVIAVARKLAVLLHKLWVSGEVYEPRGCPGFS

SEQ ID NO: 325887 - protein, 407 aa, unidentified
MQVLYPRCAGLDIHKDIIVACVRCVSAPAHHEVQSFCSTTKGLLALSDWLAAHGCSHVAMEATGVYWKPVWHVLEGSFELVLGNAAHIRNVPGRKTDVNDATWIADLLAHGLIRSSFVPPAAIQELRDLTRTRKQLTREIAQHCLRIQKLLEDANLKLGSVLSDVLGGSGRAILKAIISGENNPVLLAALAQGHARKKTGELREALRGRITSHHRTMLALHLQLIDALEHALTDLDAAVGLALTPIRQHVQLLKTIPGVGDLTARVLVAEIGVDMMRFPDSAHLISWAGLCPRNDESAGKRRSTRVRKSGTWLKTALVTAAWAAVRTKNSYLFAQFTRIKARRGSKKAIIAVAASMLTAAWHLLRNGVEYADLGADYFARHDMQNTVKRLLKRLTDLGYPVQPASPS

SEQ ID NO: 325888 - protein, 458 aa, unidentified
MKPISNDVEEIDGDEVERVLTCAAAIDVAKASGMVCVRRPHPSIEGRRSSRVWEVGSTTHSILALGEELVALGVERVVLESTSDYWRPFFYLLEAAGLTVWLVNARDVKQVTGRPKTDKLDALWLAKLNERGMLRPSFVPPKEVRALRDYTRLRTELVEERSRHKQRLEKLLEDALIKLSSVATDLLGVSARAMIEALIAGQRDPKVLANLARGKLIAKRAALLEALNGRFDDHHADLARLLLDQIDACTDKIDRLTAGIERLVGELPEPSPPTDRRPRPSPASDVPVAQDPEVRRLSAVERLDEIPGIAERAAQIIIAEVGLDMAQFPTPAHLVSWAKLSPQTIQSGPRIRAGKTGKGNRYLKGVLGEVATAAAKTDTFLAARYRRLVRRRGKQRALVAVARSILVIVWHLLNDPDARYIDLGSDYHTTRLDPDRKARDLVRQLQALGHTVTLAPAA

SEQ ID NO: 325889 - protein, 425 aa, unidentified
MKNTFLSTLFVGIDVSSKTNVLCALDFQGNKLLNEKVLNNRPGAIAILDSILGCLSSNDLKYVVIAMESTSFYSTHVANFLSSSEELLPFKPLVYCLNPKTVANYRKSFVDMDKTDPLDAYVIADFARCGRITSSPWRGAQFLALQRLTRHRLHLVECITREKAYMVSNIYLKFSELAVLDKGDKPFSNTYGATSAAVLTDFLSLDDITYAPIENLVAFVREKGKNRFSNPHETARILQKAARDSYRLDKVLYEPLNVAIASSFNVIKAMENEVKAVDKAIEKNIKGLNTAEYQSLTSIPGIGPVLASGILAEIGTIISFGSNDALAKYAGLTWRVNQSGDYTSDNTKMTKTGNRYLRYYLIEAANSVKNHIPEYKDYYYKKYGEVTTHQHKRALALTARKLIRLIFGLLTRNQIYSSDKVGEIK

SEQ ID NO: 325890 - protein, 398 aa, unidentified
MHGVVIGIDIAKDFHWVLALDRRDSEVLVSRRVENSPAALDEFVDELIGLAQRGPVTVGIDVVGGIASLLTAMLLEAGIEVVHVSGLAVNRAREGTTGGEHKSDPRDAAVIADQVRHRRDLRPVQALTELDAEIRLLVGRRRELVTDQTRRINRLRDLLSSIHPGLEHVVDPTTKASQQLLARYVTPKEIRRAGRRRLIEHVLKAGRISRRHAEKLADAALTAAQAQSISVAGERVAADLIRELAIEAAHTRTRLSELDTALEAALTRHPDAALIRSLPGMGVTLTAEFIAEAGSIDRFATPDQLAAAAGLIPVLKQSGKVRYLQRARGGNKTLKRVFFQSAFCSLSHPTSKAFYRRKRNERKTHHQAVLALARRRVDVLHAMLRNRTLYESDHVRAA

SEQ ID NO: 325891 - protein, 392 aa, unidentified
MIIVGIDVASEKHDCFMLQKETGLVFRASSVTIGNTEEGYKKLHADIQSFCGATGDSDVRIGLESTGIYHTNIITFLIAQNYKVMMINPILTNMARKAAKVHSAKNDNLDAKTICRYLVDHPDEFSPYTPTLYHTSVLKSIARKRYFITEDLRKAKMAVNNIVQLIFPEFKKLFSNIYGESALAILKEYPSVKKLAKARVSKLAALIHGRCKCTAEQLIDAAKHSIGLSDDWYTFELEDAIAELEHIQKRIAAFDAQIKRYVDEICPNILTIPGVGYVTAGLILGEIGDISRFRSPDALVSFCGLDLTVYQSGKYKATHVTPSKKGSVYLRYALFQVSRVIWQCNSTFRDYYGKKQAEGKHHYVILGHIQKKLARVIFSVLKNNSAFQERPA

SEQ ID NO: 325892 - protein, 413 aa, unidentified
MDMFCGIDWSEDHHDVALVDATGQMLAQRRIPHSAAGFVELLDLLAAHGDTAQAQVPVAIETPRGLLVSGLRATGRPVYAINPLSVARYRDRRTVSRGKSDPGDALILAHLLRTDRAAHRPLPEDSEQARAVAVLARAQQDAVWDKINTHNRLRSLLLEYYPALVEAFTAKRGGIMRPEARALLAAAPTPAAGGALTRPQLVRILRSAGRRRLLHAHAEDLHTALRSDQLRQPAAVEQAMGRHAVALVALLETACRNAADLAVAAEEAFNAHPDAVVIGSFPGVGTLTGARLLAEIGDDHRRFADPRGLKAYAGSAPITRASGRSRSVTTRRIKNQRLAAAGYAWAFSALTASPGARRHYDRRRVAGDSHTAAQRHLLNRLLGCLHHCLTTGKPYREDIAFPTGEHADQPAAA

SEQ ID NO: 325893 - protein, 403 aa, unidentified
MQNASFPLHDAVDVFIGVDVGKGHHHAVALDRNGRRLYHKARPNDEAQLRALINELKTHGQLLFVVDQPATIGALPLAVARDAGALVAYLPGLAMRRIADLHAGEAKTDARDAAVIADAARTMPHTLRSLRLADEPLAELTMLCDFDDDLAEQVNQTSNRIRGLLTQIHPALERVLGPRLDHPAVLDLIERYSSPAALASAGQKTLANRLIKLAPRIGKSLAADIAQALTEQTVVVPGTHAATLVMPRLAQQLAALRKQRDEIAAELERLVQSHPLWPVLSSMPGVGLRTAARRLTEVAHKAFASAAHLAAYAGLAPVTRRSGSSIRGEHPSRRGNKVLKRALFLSAFAALRDPISRDYYSRKIQQGKRHNQALNALARRRCDVLFAMLRDRTFYQPKVVPST

SEQ ID NO: 325894 - protein, 328 aa, unidentified
MFYLGIDVAKAKLDCCLLLDEIAGRRKTKVVNNTKPGIIDLLAWAAKQNISPEELHVVMDATGVYHEQAAMALSDAGVMVSIINPAQVKDFGRSLAVRTKTDGVDSFVLARYGALLKPAAWAPPPPEARMLQALLARREAIAQDLQRERNRQEKADATDTPELIQKSIEDSIKFLVTQLAQFQQDIDDHINKHPSLEKDMNLLQSIPGVGPQVGGNMLSVLSGHHFESAEQLAAYLGLVPVEKQSGSSVHGRAKLSKAGPARMRAVLYMAAVVAKRCNPHVKAVYDRLLARGKTKMSALGAAMRKLVHLCFGVIKTQQPYQHDYSKIA

SEQ ID NO: 325895 - protein, 355 aa, unidentified
MTYSRKDLILGVDTHKDFHHAAVINHVGKSIADRKFDATSAGYSDLIAWATGVGRIGRAGVEGTGSYGAGLTRELTRRGIPVIDLIAPDKQLRRLRGKTDQIDAYNAARAVLNELATAVPKTQDGFVEALRVLRTSRRLLVKQRTESMNQLQCLIVSAPADLRVSLAKLKAKNLALRCSKIPVRKADDLVMTETKNVLRSLGKRYLELLKEADRLMKRLGAIVKEHAPELLAVHGVGPDVAATMLIVAGENVDRLNNESAFAHLIGTAPIQASSGKTNRHRLNRGGHRQGNSAAYRIVMVRMKSHEKTRDYVVKALARGKTKREAMRLLKRYVAREIFQILITIRERHQQAAISA

SEQ ID NO: 325896 - protein, 430 aa, unidentified
MEVIYPKACGVDVHKSFIVAVICDSTSVKPQYLRKRFSTFPNALIDFRNWLLANDCQNVCMESTGKYYVPVYNALEGHISNVVVANPKWVKCIKGEKDDNKDAKWIADLFKLGIVRGSFIPNKDIRILRELTRYLYKLTNMRTSEKNRFTNALTVGNCKLDLVFSDIFGKTSSAIINTILSQNEYNDEDILKNIDKHCKSSNEDILNSISGVSWESFQKQRMNVIQEHIDYLDKSIKTVREIIDSMIAPYESAINLLCSVPGVDRKSAITIISEIGTDMSQFSSHYRLASWAGLAPGCNESAGKKKSVKISRAGVYLKPALVEVAHCAVKDKDNPYYANKFNVLSKRRGKKRAYIAIARKILVAIYHMLSTGEFFNPSDLSKVETSDKDKIKFTKNNFMQSTKQLISLGLTIDELQALILSKISESTPVI

SEQ ID NO: 325897 - protein, 366 aa, unidentified
MKKISTVQVFGNDIFKGPKLTIGLDLGDRWSFYCVLDEAGKIILEQKIPTTTEGMKQAFAKIPRSLIALETGTHSPWISRLLTEWGHEVLVAHAQKVELITKSNRKDDRHDARALARLARIDPELLGPVRHRSAKAQIHLTVIRARAELVSARTALVNGARGLAKSYGERLPKCGTYQVSRELAAGLSIELRDVLEPLFREIESLNERIKEYDGRMEKIAKEVYPEVSLLQQVKGVGTQIALTYVLTIEDPHRFLKSREVGCFLGLKPGRRNSGQSEPQKKISKEGDRYLRTMMVQGAHYILGPFGEDSDLRRWGRKLAERGGANAKKRAVVAVARKLAVLLHRLWVSGEVYEPLRNSNKAMRAVA

SEQ ID NO: 325898 - protein, 366 aa, unidentified
MVGIDLHSNNLFCGITDVQGRRLWDKKLPCELGGVLNALQPYRERIDTVAVESTFNWYWLVDGLQDHGYQVVLANPAAIVQYEGLKYTDDQSDCFFLAELLRLKILPLGHICDRKIRSVRDLLRRRMGLVHQRTALMLSLKSHHARLLGQPLATGRVKAMTPSEGAELFSDSADRLVAEVQLRLMRQFDQEIDTIEKTVRARASGMPCYHLLQSLPGVGKILALTITLETAGIERFADAGHYASYCRCVDSKRVSNQKKKGSNNVRNGNAYLAWAWVEAANFARRFDEPCRRFHDRKTAQVNAIVATKALACKLAKAAWHIMSQNLPYNPQQMFPQKSICCLGRGDKKPLDNAAQPHLSPGQNHLP

SEQ ID NO: 325899 - protein, 373 aa, unidentified
MPKYSTAFGMDVHLRSTTVCALDADTGEAVTRRFPGNPWGEIAGWMDGFPGPSLAAYESGYLGFAPQRELAGLGVECVVAAVSKIPRSAADSASKNDRNDAARMAKAILAHDISPVWVPSPEVEGIRDLAGAYDGATARLATARQRLLAFLAKRGFVYGGTTPAGNPRKYWTYDFLRWLDKVRPGDDGGVRTLAALRNEVEAAAEARADLLSEYRAAVDASPIAAEVAALQSIKGCAFALAAAFSAEVGDFTRFRSGRQVTAYFGLAPSQRSSGDSVRLGGISGAGNALVRKLAVEGSWCYAAARHQPKLMPRDTGVPLEIRMHGRKGSERLLRRREEMLARGMPAAKANAATAAELVRWLWALGMMCREGAE

SEQ ID NO: 325900 - protein, 455 aa, unidentified
MTRTTTCDRPELKPVNVGAAAIDIGSTMHMAAVDPACADTPVRAFGTFTQDLHELAGWFKVCGVTSVAMESTGVYWIPAYEILEQHGFEVILVNARYAKNVPGRKTDVSDAAWLCQLHSYGLLRGSFRPDAEIATLRAYLRQRERLVEYAAAHIQHMQKALMEMNLQLHHVVSDITGATGMRIIRAIVAGERNPDVLATYRDVRCHASIETIRAALVGNDRDEHVFALTQSLELYDTYQAKMLDCDRKLESLITALTNKGAKPVGKLFGPRVKTKQVNTPSFDVRAALYGVLGVDLTEIHGLGPSLALKLIGECGTDLRAWPSAKHFTSWLCLAPGNKISGGKVLSSRTRRSSSRAAALLRLAATSIGRSDTALGAFYRRLSSRVGKAKAVTATARKIAVHFYNTLRHGMTYRDPGADHYEEQYRSRVLANLKRRAKSLGFVLQAVPCDAEVAVS

SEQ ID NO: 325901 - protein, 344 aa, unidentified
MTVDYYVGIDVSLEASSICVVDGAGKVIKEAKLSSEPEAFIAWFKALPFSLARIGLEAGPLSQWLYAALKESGFAVELLETRHVRDAFKSMPVKTDRNDARGIAQLMRLGWFRPVHCKSAPAQETRALLTARKLVQGKLYDIEMSLRGILRGFGLKVGRTKKAGFASRIMELTEHHPALKAIAKALLTVHEVLLKELNRFENQVRKLARGDARARLLMTTPGVGPIVGLTYVAAIDDPARFSSSKMVGAHFGMTPKKYQSGEIDVTGRISKMGDKNVRAALYEAAHVILTTPVKGGALKSWAAKLARRAGMRKAKVALARKLAVILHRMLADGSVFDVTKAAAA

SEQ ID NO: 325902 - protein, 439 aa, unidentified
MSDSGSPSSSVDASPFQYVVGIDIGSQTCRFCALKPDKSQVVKPTEFANAEAGFGLFLEKIEQLGAAPERILIGLEATSRYGEKLYHFLETRGYQLCLLHPRQTHQFAQQRGLRAKTDKLDATTIARLLVSGEARRGYVPTELIATYRELVRLHTHLADEAARYKNEIQALLAVVFPEFGQVFSDPCRATALALLQLYPSAPAIVTAGVETIAATLHELAPRNYGRHTAHQLVSLAKRSIGSGLAISARSTSLKILCDQLAHTQKNLAQLESEIDKLLDSDTGAKGLQSVPEFGHKTVAVLRAELGDVMRFQNTNQVVAYAGLDLEVKESGKWKGQTKLSKRGSGRLRRILYMATVRCIRLKDSAFGAYYRRLVARGMKKREAMMAVMRKMVIIAYRLLRTGEMYDPTKVGALLVAQAPVLEPPAVHPPSSAKLVAARA

SEQ ID NO: 325903 - protein, 342 aa, unidentified
MSQVCTIGLDIAKNKFQVHGEDARGNRIFNKQLRRDEVLNFFANLPVCLVGLEACGGSHYWARELIKLGHNVKLIPPRQVKPFVINNKTDAADARAICEVVRRPATRFVQVKTVEQQRLASLHRVRERLVGNRTALANQIRGFLQESGIVIPQGIANLRKALPSIISANDERLCAASKILFTEMQDELTLLDKKIKNIEIQITQLAKTNDACERLMKIPGVGVLTATAVFAHMGDAKQFKNGRQFAACLGLTPKEYSSGGKQKLLGISKRGDTYIRKLLIQGARIICRWWNRKMAHEKEWRILWLQQLTQRRGKFVAAVAQANKTARIIWNILAKGAEYNPI

SEQ ID NO: 325904 - protein, 336 aa, unidentified
METQHFIGIDISKATLDWAVYSTQKGIIYQTQSANSQAAIKAILKIIESLPSFERSKSVCCMEHTGIYNAHLLAYLYQLHFPIWLENSLQIKRAGGLQRGKSDTIDAVRIAEYAFRFKDKTRLWQPPRQVIQQLAALSSVRHRLLGARQQLQQPLQEQQEFVSPSLQKQLTKTCQASLKAINLDIEKIEKQVKNLIDKDPHLKELFELITSVPGVGSATASEVLIATNEFTNITDPKKLACHAGVAPFEYQSGSSIRGKTKVNHHARKRLKSLFHLGAMSAIRVKGEIQDYYLRKVAEGKNKMSVLNAVRNKLIHRICSVVHHQQKYDKNYTRTLA

SEQ ID NO: 325905 - protein, 398 aa, unidentified
MLSIGIDVSKGKSTVCGMKPGGEIVYTPFEIQHTREGMSELVSLLRGSGEEVRVVLESTGSYHCPVVAALLENGIFVSVVNSLRMKRFCSQSIRRVKTDQIDAMQIALYGLAYWQELQPTRLPENTYRELQLLARQYYQMTSLLIKAKVDFNALCDQVLPGMQELMNDHAGRHKLSDFVLRYRHTTHILEMGETRFRKDYCKWAEKKGYRNRERMAALIFATAQNGIPVLPNAPSTQIVITEAIRVLHTVEASRDAILTQMQALAKTLPEYSLVREMPCIGDTLAPRLIAEIGDVRRFHSKRALIAYAGIDAPPYQSGKFSANNRHISKRGNRYLRKTGYEVMQSYVMHKPANDPIFTFIEKKRSEGKSGKLAMVAGLNKFLRVYYGKVTELYRSLPQ

SEQ ID NO: 325906 - protein, 360 aa, unidentified
MSCNGTSVGLDVHALSVVAHAVDEESGLVERARLCPDHGEVLRWLGQLRGPLRVAYEAGPTGFGLARALAEARIECVVAAPSKLIRPAGDRVKTDISDAAHLTRLLRLGEITPVTVPEADVEAVRDLVRAREDARADLMRVRHRLSKLLLRQGRVYSGGQAWTGLHETWLRQQRFTDAHTAAAFDHHFDAVLSATAARDHLDEQIVGVAASPRWADTVDRLGCLRGISALTGLALAVEIGDWSRFTGASIGAYVGLVPTEYSSGASRVLGSITKAGNAHVRRLLIEAAWHHRASYRHPGPTMRARWAKVDPALKARGHAGNRRLHQQWFRFLERKKHPAVANVAIARQLAGWCWSLATLD

SEQ ID NO: 325907 - protein, 381 aa, unidentified
MKTKQRLTPISNKQTEAKAEVIKLGIDIHQHKYVVVAQTDNETLRSPRSFTPDAFVCWAKQLRKKAKRVVACYEAGCFGYVLYRRLQACEIECLVVAPRKWEQGVKTDARDARDLCSNLDRYLNGNHKALTVVHVPGEERERRRSLSRQRESLSQELQRIQNMGTSHGRYYGERVPSNWWKPRVFAKLRESLPEFLIELLTPWQQVLEVLNRNLKEATAREEREAAMQELPIGLGALTASILDSEFIDYERFNNRDGVGSFTGLCPSEASSGGKKRQGSVTKQGNSRIRHYLLEAVWRMTYFQPDYKPIKAWKEKVLKEGKLSAARKKKMAVAIARRFAVDWWRIKTGRSDPSELGLRMSLPAAYAARAFREGRITKCYDC

SEQ ID NO: 325908 - protein, 457 aa, unidentified
MNLYVGADISKGYADFCVMDGEGQLRREVKLDDTRRGHDRMAGLIDELSGMVSAEEELLVGMEATGGLEANWMQLFENLAEKVDLTVYRINPFVLRKFAEQQLHAGKTDRISARRVAEYLRSGSAQESHPSSGKEPDPGLRTLSRKTMRMVEESVDLQNELHALLQRAHPELVQYVRGHLSQWVLKLIKEHPTPDQVLEAGPEKLAEIPYVSKEKAESIVAAARTSVASQTDEETGLTLSLIAEDLLRLEKRIDQLKERLWDRIKDRQAPHLLKSIGGIGKWGATVLYCEIGDITRFDSADQLIAYAGLDPQWEESGDQRTEKSISKQGNRRIRSILYGCVISALRDGTNPPVRDLFDRLKQKGKHQKVAEVACMRKLLAIVYGCWSKEEWFDPTFEKRLKARQREKSEPEGQSDDSPAQQGDLAAPVSRKEAKQRRKATSPQKSGSSSERGQGAFP

SEQ ID NO: 325909 - protein, 412 aa, unidentified
MDETEVGRIEAWVGLDVGKAEHHATVVSAAGEPLFERGVRNDEAAIEQLLDRALEVGRCALVIDQPGSIGSLAVCVARRRGVPIAYVPGLVMRRASELYPGEAKTDRRDSFVLADTARTHARRLHWLAVGDETLERLRVLGGYDDDLAHDVNRAANRLRDMLLAVSPALERVLGPRLDHPVSRALLARYPTPTALRAAGRRRLGPLAKRHAPRMGARLIDEIQAALAAQTVTAPAEETAGRVIRELAEELDRLAARRDRLAAEIEQTFTSHPQAPVLLSIPGIGARTGARILTEIGDINRFPTSGHLAAYAGLAPVTRQSGSSIRGEHRSRRGNHRLKNAMWLSAFCSLHHHRSRDYYARKRSEGKLHNAAVVCLARRRCDVIHAMLRSGLTYGELPRPATPAPEPELAIAA

SEQ ID NO: 325910 - protein, 347 aa, unidentified
MKILALDLGKFKSVSCCFDTEAQTTEYWTLSTDRPYLTTVLQKHQPELVVIEACSIAAWVHDLCGELGFRILVCNPNQEAWRWKNVKRKTDRDDALKLAKLAALGQLTPVHIPARATREHRWLVKYRKTIVGRTNRVQNILRALFQQHGLALPVGARCWTHASLDAIAAQSRPLTDCGPEELWRGQLAQELAAYHQLHSELAELEKKLTALAEQDERIGLLETIPGVGRVTAEIIATHLDRPERFTNARQVSSYAGLVPRQYQSGLMDRQGGITRRGSRLLRSALVECAWVMLRYNAWAREHYLRLVRGQKNRKKKAIIAVARKLLVRCWAMLRDKQPWTAPAPAAA

SEQ ID NO: 325911 - protein, 364 aa, unidentified
MAPSKDKDPSKPKPNYHFYAGVDIAARTYTIATCYRDEKPTKAHTLPQTPEGYADLKELLLHSGYSPDQILVVMEATGTYWIELATYLQGAGFAVSVINPKQAHDFAGATGLKPKNDQLDAQTLARLAATLQPASFTPPPQIYRELYQRLTHRASLLEARQQFKNQLHALSVARPVEGVVTSLENLIETLTTRIKQVDEEIKDLSKLDQEWAASISLLQTITGIGLLTACWLVVVSLNFTSCSSAEALTLYAGLAPIERSSGTSVRGRPMIGHGGHSALRAMLYMAAGSAMRFNPVIKAYCTRLREKRGKAYKEARCAAARKLIHLSFAVVKSGKAFDPAYVPGQDRAVQSSSNVTGTEMALAS

SEQ ID NO: 325912 - protein, 323 aa, unidentified
MNKDIKYFGIDISHLVFDVTDSDGNYYHFKNNPVGFKKFVKFLESDSHCVMEATGYYHYQLAYYLLESGIKVSVENPLAVKRFIQMKLSKIKTDKSDSKLICEYAKQVELKLWQGNSKHQTECLQMTRLLSVYTKQSTMLKNKLHGESVLGNPSKAVLSSLKRSLKQVQKEIKTLEEKLMILVKQVHQDVLTRLKSIPGIGNKTALMLVVLTDGFERFTSGSELCSYAGLTPVIRKSGSSVNGRSRISKIGNQKLRNLLFMCSFNACKYNKACREIYERIVAKGKSKKLALIAVCNKLLKQAFAIAKSGLTYDDSYRSILVKN

SEQ ID NO: 325913 - protein, 326 aa, unidentified
MEHELHYIGIDTAKEKLDVDVLRPDGRHRTKKFANTTKGHDELVSWLKGHKIDHAHICIEATGTYMEPVAECLYDAGYIVSVINPALGKAFAQSEGLRNKTDTVDARMLAEFCRQKRPAAWEAPHPLERALRALVVRHQALTDMHTQELNRTETAREVQRPSIDAHLLWLEAELKRLEKQIKDLTDDDPDMKHRRKLLESIPGIGEKTSAVLLAYIGLKNRFAHARQFAAFAGLTPRRYESGSSVRGASRMSKAGHVSLRRALYMPAMVATSKTEWGRAFRDRLAANGKKGKVILGAMMRKLAQVAYGVLKSGVPFDASRHNPVAA

SEQ ID NO: 325914 - protein, 353 aa, unidentified
MNDSHSIAWLGLDAHSKNCVLGQLDDHGTEIKWWGFPTKPEQLVQHIKAIPATEKHLMLEESNLARWLSQLLKPHVQQLVVCDARRNRLISQDHHKHDKRDAFALARLLRLNEFKPVWQPTEDQRVLFKRVAKSYENAVQRQTRLKLQLKSLFQHWGLFPTGATIYSKPGRVAWLKQLPYDTLRAQALLLYELLDQALAGQTQFRRLMCQTGRQFPEIQRLSTTPGVGLVGSHLFVAYVQDPKRFPKFGRLTRYCRLGIRDRTSDDKPLGYQQLDREGIGTLKAISYRAYLQAAKRRTGPVWEFYQLSLRHTGSTTHARLNTQRKILLTLWTLWLTGREFDPDQFSRAQPLDV

SEQ ID NO: 325915 - protein, 350 aa, unidentified
MLIGVDYRPSFQTIAFVVEETGEYGDQELNHSDGQAEKFYRDLKQRGISVRVGMEATGYSRWFERLLAELGFELWIGDPAEIKAKRVKKQKFDREDARLLLRLLRENNFPQIWVPDPENRDLRQLLWHRHRLVQMRTRMMNQLHALAMNEGYRWKKKLFSEQGRVLLEKLSLAPWASRRRQELLELLDRMNPTIEELTAAVEREARKRPEALRLMTHPGVGPITALAYVLIIGTTDRFQRGKQIGTYVGMIPCENSSAGKQRLGHISKQGSSLLRYLLVEAAQAAARALPDWRRRYHRLAMRRHRSIAKVAMGRRLAIRLYWMWRNGCEYSPSSEFGSYAGQLGTRHDAK

SEQ ID NO: 325916 - protein, 346 aa, unidentified
MMIIGCDFHPSWQQVCWLDAETGETGERKLVHAEGDAERFYRQMPAPALVGMEATGNSHWFVDLLAEIGHELWVGDAAQIRASYVRQQKTDKRDAAHIMKLLAEGRFPRIWMPSSEVRDLRQLLLHRYKLVIIRTRVKNELQHLCLNQGVQRKRKLWSQAGQKLLRELPLRPWAARRRDDLLRLMAMLDQQIEPLDAALKAEALRDKMALLLQSQPGVGPVTSLAYVLTMGDISRFPRGKQVASYLGLIPREHSSGGRQKLGAITKQGNRMLRMLLVEAAQTTVRCDPGFRKQYLHRCHQKPKGVAKVAAARKLAVRLYWMLRTQTGYPEIVRIESSPRVPLVGAS

SEQ ID NO: 325917 - protein, 338 aa, unidentified
MNKRFYVGIDVSKQTLDVAFISMIAGEKIHPQWKVFDNTDAGLHSMKKWLENQAVDMGSDTLFVIENTGLYHRRLVSFCNKHQLELCIENGAQVKWSLGIARGKSDKVDSRRLATYAIRFADRLKPAAALHEGIQSIKDLITLRNRHITQFSALRTNLKELKVTTNGQAVKELEQIHKPLLAAMKKTILKIEAAIIKKIQDNELTATQYRLLLSIPCIGPVTAAYLIACSNAFTLCNSGKQLACYCGVVPFEYQSGISVKGKHRVHKMANKNLKALLHLCAVSSLRYVKELRDYYDRKVQEGKHKMSVINAIRNKLLLRVYAVIKNGEPFVNNYRPAN

SEQ ID NO: 325918 - protein, 355 aa, unidentified
MSQTPNTVIAVIGIDIGKNSFHLVGHDARGAIVLRQKWSRGQVEARLANIPPCLIGMEACVGAHHLSRKLASLGHDARLMPAKYVRPYSKGQKNDFNDAEAIAEAVQRPTMKFVATKTAEQLDLQALHRVRERLVSQRTGIINQIRAFMLERGIAVRQGIGFLRTELPTILATRTDALSPRMLRVIEELAGDWRRLDQRIDGLSGEIEALARQDQACSRLMTVPGIGPIISSAMVAAIGTGDVFSKGRDFGAWLGLVPKQISTGDRTILGKISRRGNRYLRVLFVQAAWVVLVRIKNWERYGLKSWIEAAKRRLHHNVLAIALANKLARIAWAVLAKGRAFELTRTDDAGVVRPA

SEQ ID NO: 325919 - protein, 428 aa, unidentified
MPYKIAGIDVHKRMLAVVVSDVEVDREYAFERRQFGSNPAQLRLLADWLLEQQVEEVVMESTAQYWKPVWAALERYWTPTCKKREGAGAMSGTQHLAQAQSNRARQGRKNDFADAERLVKRLVANELTLSFVPDPEQRLWRTVTRTKYQLTRNRVQLQNRLEALLEECHIKLSSLVSDLLGVSARRMVQALADGETDPAALAALANNHLRATQEQLRDALGACQELNPVYRRLLKLALEELQLIEKQISQLDQEIADLLRPYQDQVQRLAEVPGLGVDSAQQIIAEVGPTAATFPSAGNLSSWVGACPGDDESAGVSHSHRSPKGNRQMRRLLNQAANAAVKYKGGIFEILYRRYVPRLGHKQTIGVIAHRLCRLIWKILYQGVRYEERGPDVRKKSQRYRAARMIRELQSLGYRVEQTNSQSADVPA

SEQ ID NO: 325920 - protein, 367 aa, unidentified
MSSANSAASKTTWVGLDVHRDSITSAVLSPKSETPVVDRWFHDEPSVRRFISGLGSPRAVRLCYEAGPTGYELARLLGRLGVAAEVIAPSLIPVTPGARVKTDARDARRLVHLYRAGELTAVHIPTPGEEAIRDLARSRSDLVIDRTRSRHRLSKFLLRHNEIYRGGVQWTQAHETWLSQLRFDDAALSRTYAHYRAIVAGLDAHLAAVESDLKVYVDKGPFAEAVGRLCAYRGITELGALTLSAEVCDWRRFARATSLMGFCGLVPSEYSSGERTQRGRITKSGNIHLRSQLVESAWAYQHRPAVGTTIKKRQERCSHETVTRAWAAQLHLCGKFRRLAERKSSRNIVVTAIARELVGFLWAEMAA

SEQ ID NO: 325921 - protein, 333 aa, unidentified
MSRFWVGIDVSKRKLDVALLNDAGKVKSKSLANDPAGFAALTIWLNERGADLASTHICMESTGSYSEGCATALSDAGWLVSVVNPAQPKSFGQSELNRNKTDEMDAALLARYCSKMEPAAWQPPPLEYRKLRSLVERVQALKDMRQQESNRLEATAEAAARQSITEHLTWLDARIAELDRDIDDHIDGNKETLGKDAQLLTSIPGIGKTTAAKVLGLLGDLRRFSSGKALAAFIGVTPRRHESGTSVRGRSSIGRAGHPRIRHALFMPTLVAAKHNPLIKAFRNRLVAAGKPKKSAALASMHKLVHLMHAIVCNGVAFDSRFSRLALDVQDGI

SEQ ID NO: 325922 - protein, 391 aa, unidentified
MIYAGIDVAKDKHDCFITNSDGEVLFKSFTIPNNREGFETLCQKILSVSDDLTKVKVGLEATGHYSYNLLGFLLNKGLTTFVINPLHTNLYRKSLSLRQTKTDKVDARTIASMLMSDVNLKSYSDISYHNEELKSLTRYRFDKVQERAKLKTSVSRLICILFPELEKLVPTLHMTSVYAMLSEFPGAKHVANAHLTKLSNLLSEASKGHYGKETAITFREAARISIGSNMPAKSLELKHTIKLIQELTSEIDEIENEIKIIMDKINSPILSIPGINYRMGAMIIAEIGDFSRFDSPDKILAYAGFSPSTYQSGQLDGAYSHMEKRGSRYLRYALYNATKYVCHWDSTFAEYLAKKRAEGKHYNVAISHAVKKLVRVIYHLEKTNQQYIKVA

SEQ ID NO: 325923 - protein, 371 aa, unidentified
MEPTTFVGLDVHKRTTSVAIAEGERGGEVRVFGEIASTPEALQRLVQRLQRNHRRLDFCYEAGPCGYGVHRQLRGLGQDCSVVAPSLIPRRPGDRVKTNRRDAAQLARLHRAGELTPVWVPDDAHEAMRDLVRARASARRVLGKARQHLQGFLLRHGRIYSGARGWTKAYRCWLTTVRFDHPAQQIVLQDYIHAIEDAEARLTRLESQIRDLLPTWSMAPVVEAIQAMRGVALIVAVTVVAEVGDFSRFASPRQLMAYLGLVPSEHSSGASVRRGGITKAGNVHARRVLIEGAWTYRMQARVSRKLHDRLEGLPRAVRDVAWRAQLRLCNRYRRLVAAGKPKVVVTTAIAREMVGFIWAIARLVQPQPAIQ

SEQ ID NO: 325924 - protein, 331 aa, unidentified
MGRTRKEQNMSTNAVFAGIDVSKAHLDVAVRPDEIEWRSPNTDTGAREVADRLKDLDPDLVVLEATGGMEIPAASALAVLGVPVVVVNPRQVRDFAKSTGRLAKTDALDARVLAHFAEAVRPEPRPLPDEQARQLSALLSRRRQISEMLTAERNRLQSADSTVCRRLNVHIRWLERELSDIDNNLDEAIKASPLWRVKSDILKSVPGIGPVVSFTLLSELPELGQLNRKEIAALAGVAPLNRDSGTLAGIRTVWGGRARVRAALYMAALVASRYNPVIKDFYLRLCARGKPKKVALTACMRKLLLILNSMVKNKEKWNASNTRDRGVLISA

SEQ ID NO: 325925 - protein, 309 aa, unidentified
MEHLVGIDVSKDRLDVHLRPSGESFAVARDGDGLAALVERLQALAPALVVMEATGGYETIVASALGAAHLPLAVVNPRQIRAFARATGRLAKTDRLDAAAIAHFAEAIRPPARPIADTEAQALGELVARRRQVIEMMVAERNRRRTATQRRVLRAIDRHLELLQAELSELEGDIDGAIRNSPAWQADADLLTSVPGIGKATLRTLIAELPELGRLTRRKIAALVGLAPINRDSGTMRGRRTIAGGRSAVRAALFMPAMVASKKNPLIAPYYKKLRAAGKTAKQALTACMRKLLVILNAILRDRKPWQPA

SEQ ID NO: 325926 - protein, 273 aa, unidentified
MDHFAGLDVSVKDTSVCIVDDAGKIVREVKVASEPEALLAVLKSPAYCFKRIGLEAGPLSQWLYSALAEAELPVVCVETRHMQAVLKAQINKTDRNDARGIAQMMRVGLYRPVHVKTLRSQKLRMLLTHRKLLQSKAIAIENDLRGTLRNFGLKVGMVGKVKFEARIRELVENLPDLAALVEPLLIVRRVLHEQIVILHRRLLDIVRNDDVCRRLMTVPGVGPVVALTYRATVDVPSRFKNSKAVGAVFGLTPCKYQSGEINRTGAISKCGTR

SEQ ID NO: 325927 - protein, 408 aa, unidentified
MRIIGLDIHRAFAEAVAWKDGRLSRLGRVIMRREALEEFAKQLSNSDIVVIEATGNAASVAAVLAPHVSRVVIANPKQVRLIAHAKIKTDKIDAAVLAQLYASGFLPEVWIADDTTQALRRQVTRRNQIVRQRSRLKNIMQSILHAHLIPSCPHQDLCGPMGRAWLCEQILPGDERLAVERHLREFDRLTDDLKGIERDLAQSALADDRATRLMTIPGINMVVALALIAAIGDIKRFAKPEQLVGYLGLNPSVRQSGPGPAYHGRITKQGRGHARGMLVEAGWVAARCPGPLRSFFLRVQSRRGQHVAAVATARKLAILIWHLLTKNENYLWARPALHARKLRDLELRAGHRAARGQKGTAHAYNLKSHRDQEQRWVEQAETAYARFVADWNARGPKPRSGAAKEERQ

SEQ ID NO: 325928 - protein, 410 aa, unidentified
MRYYLGVDWADQTHAVWVVDEQGAKVASRAVPHTAAGLSEWGRELDEWRAQGIELWAAIERPEGRVVDFLLDHGVVVYPVNPKALDRARDRFRPSAAKSDPFDARVLADFLRTDHGHLQALQPSSEAAQELKYLTEDYRRHVRQQTRLVNQLTATLKAYYPRALEVSELTTALARQFLQAYPTPGAVAALTKKRWQRWARAHRLSDARAQELWGFLQRPQLPVPDHVVRAKARLMLTLVEELTAVVAAVGQYREAIDAFFAGLPEAQWIRTLPIGDHGVTAPTLWALLGDAPRRWESWQHLQGHAGAVPVTIRSGQQRVVRFRFACDKALRYVVDQVAFLSLGKSEWARAYYDQQRARGHDHRPALRALGAKWLKIIFVMWDRQIPYDEQHHLATMTRQQLRQRGQKKVA

SEQ ID NO: 325929 - protein, 387 aa, unidentified
MYFVGIDISKYKHDCFITTETGEVIKENLSFSNDKDGFQKLLDLLKSLNNNQEIRIGFEATGHYHMNLMLFLEENNFSFMEFNPALVKKFISTQTLRRTKTDKADAIAIASYLMYVDYKPHPKQFYHKYSLKSLCRSREALAHQRSYYKVRLTNILDLTFPEYKPFFKNKFATTSLFILSKYKNAEKISKMKDYDSIRKFSRGKFTFPQFIKLKELAKDTVGTNCDIFNTQLDCMLSMLSDTDRQITILDDKISDIIKELNPKSLGIRGIGYISCASIISEFGNFSRFKSADACVAFAGVEPSVIQSGTASYSGRMVKHGSPHLRATIMNVADYVFMHEPIFTVYYYKKRDEGKSHRVALSHVAKKLIRVIYKLETSNINFDPAKLR

SEQ ID NO: 325930 - protein, 358 aa, unidentified
METELDRTSFFENILLFIGIDVHKSKWVVTVRTYDLELKTFTMKPSAEELENFLLKNYPGAEYRIVYECCFSGFWIYDYFAEKGYKIIVTPTNRIYKDGNTNKTDKIDSRKLAFQLSRELLREVLLPKKRVREYKYIFRIYDKQKMRQGQILRQIKAFLEQKNHPLKWSRWNKGLLEKLKEIKFEDKLFDLKIGNLLKEYEYIVEQIKDSEKIIGKIKEDEELGRRISIIEKINGIGIISAVRMSINLFDEKKRFESDEKLNHYLGLTPSERSSGDKIKRGRSGMCGNRQLRSIIIQLAWMTVRKDGSLLDKFDRVYKKSGSKQKAIVASARKLMTKIYAAIQKEEDYIINIRTVKAA

SEQ ID NO: 325931 - protein, 368 aa, unidentified
MQNASTFVGLDVHKNTISVALLRPGQPHLEWSLANETAAICRLIRKLEREAEGALRCCYEAGPTGFVLQRQLTQAGIDCRVIAPSLIPVRPGARIKTDRRDARKLAELLRAGLLTEVKPPTEEEEAVRDLTRSREDAQRDLTRARNRLSKFLLRRGCVYAVGRRPTWSAKYRTWLRALTFERRADQIVFEDYLLAVEQVEGRLEGLNEEIAAVAEQQPWRERVQALRCFHGIDTVTAVALVAEIHDPRRFPHPRQLMSYLGLVPREHTSGMRERRGGITGTGNRHVRRLLVEAAWHYRHKPVVGRALRLRRREQWPKAIALADRALRRLTLRQRRMLYQGKHPNLVNIAVARELAGFVWNVLHPATAN

SEQ ID NO: 325932 - protein, 377 aa, unidentified
MSKIRFVGLDVHADTIAVAVAEPGGEVRSVGIIPNRLESIRKLVGKLGPVQHLKVCYEAGPTGYVVYWQLTQLGVGCEVVAPTLVPTKAGDRVKTDRRDAEKLARCYRAGELTAVWVPDAAHEALRDLVRAREAAKKDQLRARHRLGKFLLRHGQRPSEAGKAWTKKYLEWIKTHVRFDQPALEATLAHYLHEVDHAAEQIFKLEKAIDEAVAQAGPEIGAVIEALQALRGVAQMTAATIVCELGSLSRFQSPRQLMGYSGLVSREHSSGSRIQRGAITKTGNAHLRRVLVEAAWAYQHRPNVTGFLLRRQKSLALSDEVKQMAWKAQYRLHKRYQAFAIRGKNKNQIVTALGRELLGFVWAIAVHTEAQLEPAKAA

SEQ ID NO: 325933 - protein, 455 aa, unidentified
MASLQVRCNRDGQEAMDRGDRVWDVALRPDRWRLGVDNHWEGQIFRCERRNVVLRYYGAYRWNRRRESSMPKMNDLSRCLIPFCQDETLVAVVEMSKTSWLVAGIIPGVERHPLKKLVSDETALLQLLVRWRDEAIKAGKTIRRMVVAYEAGRDGFWLARWLEARGFEAYVIHSTSVAVSREHRRAKTDRLDSEMLKRVFIGWLRGEQDHCRMVAITTLAQEDAKRPNRERETLVSECTRIVGRLKACLARLGIRNFNPKLRNATERLEALRTPEDMPVPANTLCELRRDMARLRFVKDQIKQIEKARLEQLEQAPEQGTHSMVRLLARVLGIGIETADMLVHEILSRNFRDRRAIARYAGLTGSPDESGNKRREKGLSRAGNARVRRGMIQLAWRFLMFQKNSALALWYQARTKDAGGASRKTLIVALARKLLIALWRFVTTGEVPVGVNLRAA

SEQ ID NO: 325934 - protein, 359 aa, unidentified
MASKVKNNKVNFKGKTVSVGIDMHKISWRVTALVEGDTVLAVTLARPSYDAFKKIISRFEGNHVRIVYEAGPGGFDLYDKLTEDGIECIVTPPSLIPTESGSRVKTDKKDSYKLARFLESGMLKEVWVLSPEERAHRQLTRTRRQIVNHRSDVMRQIKSLLLFNSIDVPFKSTQHWRGPFMNWLLKLDLGYETLNRSLKALVDLFNYLSAEKKRITEDVLELAKKEKYAKRVALLESIPGIGTLSAMEILVEIQDITRFKTADEFAAYLGLTPSQYSSGEHIRMGHITHAGNTRARTTLVESSWTLIGKDPEMKGKYQRIKEKRGGKRAIVAVARNLSGRIRRMLLDHVPYELNFQKAA

SEQ ID NO: 325935 - protein, 324 aa, unidentified
MVGIDVSKATLAVTWVNGQTRQVEWEASVPNTVAGVRQLLSATPAQLPWVLEPTGRYSLAVARQAQAAQRTVLLAQPKAAKAFLSALRPRAKTDRLDSRGLALYASATPLPPYPIKSVLMDELQQLLTARKGLAGALSRLHQQAGELPAAASALRPALTALRAQRAALDRHLAARMTQSPVWALTQELQRIPGIGPVTASTVALCVQSKAFPHPDAFVAYCGLDVRVRDSGQRRGHRTLTKQGDAELRRLLYLSAQASLRATQSPFKAQYERERAKGLSTTAALCAVARKLARLCWSLARHGTSYDPQRVYRQPTHEKALDTQP

SEQ ID NO: 325936 - protein, 338 aa, unidentified
MSIATLGIDLAKNVFHVHGRDVAGRPVFQKRFSRAALVTFLANLPRCRVGLEVCSGANHWSRTLQALGHDVRLISPQFVKPYVKSNKNDFNDAEAICEAVLRPTMRFVPPKTVAQQDLQNVHRVRRRLIGARTALVNQIRGLLAEYGIVVSQQVGRLRRALPGLLDDPTNTLTPLARMTFMSLHEELRGLDTRITAIDQELTRHCVGDERCRRLVAIEGIGTLTATAIIAAVADPHAFKNGRHLAAWLGLVPRQHSSGGKPRLLGMSKRGDRYVRTILIHGARAVVARAATKSDARSRWIADKRYQRGTNRACVAVANKNARIIWALLAQGTSYRHAA

SEQ ID NO: 325937 - protein, 415 aa, unidentified
MEGLSPRYTVGIDWASETHALCILQPDGHAHDAFPVSHTAEGLAELVRRLRRLGPPERTAIAIERPSGVLVDTLVEAGFRVVPIHPNALKASRPRYAAAPGKSDPGDAYILADLLRTDGHRFRPLRAPSDATKALRATVRTRDDLVATRVQLANQLRSLLETFWPGAAAIFADVDSPIALAFLQAYPTPQSAAFLGEKRLERFLKRAAYCGRRPASELLCRLRSAPVGLAGELESETKGQLVRALVTVLRPLVDQIRELEGLLTGQLLQHPDGPLLQSFPRTGTVNAAQILAELGDDRLRFQSPDQLCAEAGVAPVTKSSGKHRAVVCRFACNKRLRQAVTTWADNSRHQNAWANHVYAHARSRGCDHPHAVRILARAWLRVLWRCWQEATPYLPQRHGRALPFLPPLQSASAAA

SEQ ID NO: 325938 - protein, 388 aa, unidentified
MIYAGIDVAKDKHDCLIVDSNGVVLSNTFTIPNNRQGFDELFANLKTHSKDLSGLKVGLEATGHYSDNLLEFLIANNLPTTVINPLYTNLYRKGLSLRKTKTDKVDAHSIVTMLRTEDLKPYSQSSYHVRELKSLTRYRFSLVQDCARLKSSFARLCVILFPELEKLVPSLHIASVYALLAELPNARAISECHLTRLTNLLSEASKGRYSKDKAIEIRNAAKVSIGSYSEVKSLELQQTLQLIQMMEKQIAQAEARINPIVDSLHSPIMTIPGIGYRMAAIIIAETGNLANFDKAEKVLAFAGLEPSVYQSGQLTSTHAKMVKRGSKYLRYALFNAAKYVCHWDEGFRQYLAKKRAEGKPYNIAVSHAAKKLTRVIFHLVKTNQSFSR

SEQ ID NO: 325939 - protein, 338 aa, unidentified
MKLYGGIDLHSNNSVVVLIDEQDRVVYEKRLRNDLELIVRELAAYRKRLTGLVVESTYNWYWLVDGLMEAGYRMHLANAAAIKQYEGLKHTDDAHDARWLAHLLRLGILPEGYVYPREARAVRDLLRRRHQLVRQRVANLLSIQNQLARLGLRGFNAERLKRLEPADLSGLIAEANVRSAIVANLAIVRCLNAEIARLEREVLTQVKLAAQFAPLMSVSGIGKILALSIMLETGEISRFGRVGNFASYARCVNSQRLSNAKKKGANNQKCGNPYLAWAFVEAASFAIRTSPRVKRFFDKKCARTNKIVAFKACAHKLARAAFYVMRDRVAFDEARAFS

SEQ ID NO: 325940 - protein, 449 aa, unidentified
MPRGRHATRVVTTPILHPHAAGIDIGATEIYVCVPLDRDPQPIRRFGTFTPDLWALAAWLQQCGVTSVAMESTGVYWVPLYQILETRGLEVCLVNARHVKNVPGRKTDVQDCQWLQYLHTVGLLRASFRPPETVCAVRSLLRHRDALVQLAATHIQHLQKALNQMNLQLHHVLSDITGVTGLAILDAILAGERDPRVLAQHRHRTVKASPETIAKALVGDYRPEHLFTLRQSLDCYRHYQRLIEACDREVQGLLGSFAAAGLPAPVRPSGPGAGRALRFDLRAELSRILGIDLTQVAGLNTPTVYTLFAELGADLSKFPTGKHFVSWLGLCPDNRISGGKVLSVKTRHVKHRVAQALRMAALGLSRSRSTLGAFFRRMRAKLGAPKAITATAHKLARIVYHLLTTREPYEETQLAKAEQEHRQRTESRLRSQARALGFQLVPVIEQSVS

SEQ ID NO: 325941 - protein, 292 aa, unidentified
MIAAKVLIGIDVSRDWLDGFLLPDGQRFRLPNSAEGHAHLIEILKSGPSAPKVGFEATGGQEWALWKALVGAGINAVQLPPAQIKAFARSHGIRAKTDRIDAKLIASFMAFRPEAGRALPTEKLQILRTLTTRRAQLVGMRKRLVLQISARTRQAIPAHVDSMDDELKALLDAQILELESRIERVITQETTLADKAVRLRSIPGIGPVSAAMLIAEMPELGKMTSGEAAAMTGLAPVPYDSGTMRGKRMIAGGRRALRHVLYQAALAAAYHNPALKSVAQRENQSTNDRNQY

SEQ ID NO: 325942 - protein, 404 aa, unidentified
MKFCGIDWANDHHDALSIDEHGRQLGRIRVAHSPEGLSQLDGYLEQIAGPGGKDQVACIVETTHGWLIAHLLEQGWAVYPVNPRTVERRRAPSGAKTDLIDAYLLAKTGRADFADLRRLNPDSEQIQELKTLTRDQDGLVQMQTRLVNQLTAGLKASYPVVLEWFGKIQQPSTLAFLRAYPTLQAARSASVEELAATLKQSRYAGARQKAQQIATHLQLPCLQASEVTTRTKSRLMLALLDQLEPLLKQIAEYDKEIERLFLRHEDRELFQALPGAGLRLAPRLLAELGDDRSRYDSAASVQALAGTSPVLFQSGTYQKAHRRLGCIKPWRNALQQFAWQSTHQEAWAKEYYQRKRAEGKSHTVALRALANVWARILYAVWKTKERYQTTTFEQAQQAHAQRGA

SEQ ID NO: 325943 - protein, 371 aa, unidentified
MGESSKTLYVGLDVHKESIAVAYAPEDRGAEVASLGSIGTRQCDIDKLIRKLQSKGATLVFVYEAGPCGYWLYRYLTRKGLSCHVVAPSLIPKKPGDRVKTDRRDAITLARSMRSGDLTAVYVPQIEDVAIRDLSRGREDAMRDLKATKHRLKAFLLRQDIRYEGRANWNAAHLRWLSEVVCPTRAQQIVFQEYVRAVTEQHERLQRLETELHEEVKGWRLYPVVEAIQALRGVELTGAVIVIAELGDLTRFDTPRKLMSYLGLTPSEYSSGERRRQGGITKAGNSHARRALVEGAWAYRYPAKVSRHLQLRLEKLPAEVQAISWKAQVRLCKRYRQLTARGKHVNQVVVAIAREMAAFAWAIARTVPLAP

SEQ ID NO: 325944 - protein, 412 aa, unidentified
MKRIRDRVAGLDVHRDMVVACCRVVDPDGEVEVTKQSFATTRKGLGELAVFLSDAAVTTVAMEATGVYWRSPYYALEGMFDELWLCNAQHVKNVPGRKSDLSDAEWLADVAAHGMVRPSFVPPPEIRELRELTRYRKTQVDARAREIQRLEKVLQDAGIKLTSVASAVWSVSSREIIEALISGTRDPIVLAQMAKGRMRGKIDRLEEALSGHFGAHHAVVCRQIIDHIDFLDHSIAALTEEVTTRLVPFEAAVTIVTSVPGISRRTAEVIVAETGADMSRFPTPGQLCAWAGVAPASYESAGKRRPAGTRHGSQWLRRALIESARAAARTKNSYYSAQYARIARRRGANKAAVAVANSMLFTIWHLLTTGALYDDPGANYFERRHDPAVEAKRLARRIEALGFDVSLIEKAA

SEQ ID NO: 325945 - protein, 382 aa, unidentified
MITMTRTSESTAPTGGLLLAFELGQRSWKLGFTGGMGQRPRIRQIPAGAVSALVTEIERAKKRLGLSADAPVTSCYEAGRDGFWLHRYLVAHGIINYVVDSSSIEVNRRARRAKTDRLDLAGLLSLLARYVLGDRRAWRVVRVPTVAEEDARHLPRTLEALTQDRTRLMNRLKSLLATQGVSLAIDAQFLNRLEGAHLWDGGPLPPGLQERLTRTWTQLQEVDKQIRGLKALRLTRPELLTPATSRALAQLLTMRAIGPIGASVLATEIFGWRRIRNGRELGALVGLVPAPYQSGETDHDQGITRAGNAHVRRVIVQLAWGWIRHQPDSALTQWYQQRFGAGGNRLRKIGIVALARKLLIALWRYLETGVVPDGAQLKPMEG

SEQ ID NO: 325946 - protein, 402 aa, unidentified
MTYDYVIGMDACKYFHHACVLDIDGTQVLSKRINQNEQSLRALFSAFSAYDHKVLVVVDQPNNIGRLTVAVAQDIGIDVRYLPGLAMRQLSRIHAGNAKTDIRDAYIIAHAAKNLPESLRSVDRVEEAFLQLKVLNDIDEDLARSYTRLINQIRSALVGCYPQFEQALRGQIIHRKWVLHLLARYGGPTKIKRLGKAKAAAFARRYKARNPEPVLDAIFAAISEQTVTIAGAHYAEMGVAMSAKDALLKLEHRQQIEKEVIELINDIPHTQFLLSMLGIGPKTAAQILMTAGDMSDFPSAGHLASYAGLSPRTNQSGTSIMSNSLNRAGNKKLKNALWQSSFASIRFHERSRQFYERKRREGKRHNAAVVALARRRLNVLYAMMRNHEHYHDPAPSQEDLAA

SEQ ID NO: 325947 - protein, 387 aa, unidentified
MPQPNDLRRSLVTLEQDSTLIAVIEMGQSSWLVAGIVPGIERQPLKKLAADQDGLLQLLHRWRKEAAQAGHPIKRIAVAYEAGRDGFWLARWLRAREIEAYVIHPSSVPVSREHRRAKTDRLDTELLKRAFLGWLRGEPKHCSMAAIPTVEDEDARRPSRERESLVGECTRIVNRVKANLARLGIRGFRPRLAHAPKRLETLRTPEGTAVPANTLAELQRDMVHLRFVKQQIKEIETARAKRLEQASGGGRDAMVRLLARVVGIGIETADMLVQEVFSRKLRDRKAVARYAGLTGAPDESGQKRRERGLAKAGNARVRHAMIELAWGHLLHQKDSALAEWYQKRTVDARGGTRKTMIVALARKLLIALWRLVTTGEAPAGLLLRPAA

SEQ ID NO: 325948 - protein, 344 aa, unidentified
MRIASIGIDLGKTTFHLVALGERNKVLVRKKFSRGQLLAYTANLPSSLIGLEACAGSHFLGTTLREQGHQVRLIPAQFVKPYRKSNKNDFLDAEAIAEAVTKENMRFVPIKSQDQLDLQAMHRVRDRLVQRRTALINEIRGFLLERGIIFAAHPIHLRNNLPGVIEDAEQNLSPRLRWLLDRLWQEWKQIESDVQAISQEIERISDEDVRCRQLRQIPGFGPLVSTATVAAIGNGAAFRRGRDFAAWVGVVPRQYSTGGNARLYGISKRGNIYLRRMLIHGARAVLFRIKHDTGGFGQWVHRLAQRAPRNKVIVAIANKLARIAWAVLSSGKDYRHQPLRPAAA

SEQ ID NO: 325949 - protein, 344 aa, unidentified
MSKVTIGLDIAKSVFHLVFMNQSGRVLRKKKLRRHQMLSYFSQLEPCIVVMEACGSCHYWCRELTKAGHEVKAIAPQYVVAYRKGNKHDYNDAEAIAEASQREGMRFVPFKSQDQQDIQLMHRIRERMIAQQTALSNQIRGLLSEYGIVYARGVATLVKELPLTLEEADNGLSMLARRQFQGLLNDLRELREHIKEMDKELKAFSQSQPVCERLMSMTGIGPLIATALYAGIGQGQAFNSGRHLAAWLGVVPKQHTTGDNPRLLGISKRGNTYLRTQIINGARAALRHIGDKTDKVSEWCRACLARMSFNKACVALANKMVRMAWAMLHYQQDYQPGLINKAAA

SEQ ID NO: 325950 - protein, 369 aa, unidentified
MKEKQESSGFIPREYDVFTGMDVDKKSIAITFINHEGERRSLKIPYNTEQLIRYINKHYSGQRVAFAYEAGPTGFSLYDEITEKGYFCLVASPSSIPTAPGNRVKTNRLDSKKIAENLRGGQLKGIHIPDQSYRDLRQLTQMRDTYVKQLVATKLRIKSLLLYAGIPFPETSSNSQWTSSVIKELQDLKCSGGTRIKLDQLILSLKFFTQNIVDLTKAIRKFCDSDDEIKQNIEYIKSIPGIGYITASQLLARIGDWRKLERADQLGSFLGLVPREKSTGDDINKGSITKTGNGRLRSKLIQCAWSNIRRDSELKDFYDRMYVRHYGKFASKKAIVAVARKLTMRVYAVLTQQRKYEISYRKDSVSLLH

SEQ ID NO: 325951 - protein, 352 aa, unidentified
MMEFRCTIKKREKTVSKVTTIGLDLAKNVFHMVCCDARGKVVSKRMLKRPRVLAFFGNLERCLVGMEACAGAHYWGRELEALGFEVKLIPARYVKAYVRGNKNDYNDALAIAEAVVRPEMRFVTTKSPEQQDIQALHRMRKGCIGGRTALCNQMRGLVGEYGLVAPKGVAALRRRIPEWLEDGDNGLSEFFRRLLHEGLERLYELDSHIAFYTRELERLSEGNEACQRLQTLPGFGPIVASAFHGQLGHGEAFRRGRDASASLGLVPRQHSTGGKDTLLGISKRGDRYVRSLLVHGARAVVSRAAHKDDRLSRWVNKIRARRGFNKAVVALANKMARMGWAVLANKTVYQRA

SEQ ID NO: 325952 - protein, 343 aa, unidentified
MEHFIGIDVSLESSSLCVVDTTGRIVREAKVASEPEALAGFCRGLGLAITRIGFEAGPLSQWLHAGLAKAGFDVVLLETRQVKAALSAMTVKTDRKDARGIAQLLRMGWYRPVHCKAVPTQEIRALLTGRKLLQGKLLDVELGIRGLLRNFGLKVGTVSKGRFAARIRELIAGQPMLERVIEPMLRAREALNAEFHALHRAMLAIVREDAVCRRLMTVPGVGALVALTFTSAVDDPTRFAKARAIGAHFGLTPKRYQSGETDIVGRITKIGDGMVRTALYEAAHIMLTRSSPFSTLKRWALEVAGRRGLKRAKVALARKLSVVLLRIWTTGGVFRFGKEAIAA

SEQ ID NO: 325953 - protein, 338 aa, unidentified
MTVVTVGIDLAKNVFAVHGVNAAGKAVLVKPLVRRAKLLELIATLPACLIGIEACTGAHYWAREFQKMGHTVRIMAPQLVSPYRMGGRHGKNDAADAAAICEAVTRPNMRFVPIKSVEQQGQLFVHRAHQGYVSERTALINRIRGLLSELGIVLPQAFKAFLSGVAQVLEDLPGYCNQVIGDLLNELYHIEEKIKNSEKLIQQLARDNSAAQLLMQFRGIGPMTATAIVASIGNGHDFKNGRQFSAWLGLTPRQQSSGGKARLGRITKAGDSYLRTLLVLGARSVLLGAAKNDDPVSRWALQLKERRGYGRALVAIAAKNARMCWAMLHLRDEFRFPA

SEQ ID NO: 325954 - protein, 358 aa, unidentified
MSKVLSVQQETGLSITFNSFKSMETFTFFIGIDISKATLDWAVVMANKLLFHYQSSNDQRGIESFVKHLKQQYPAASFDNSLYCMEHTGIYNNHILSLLQVNKANVWVEHPIHIKESLGMIRGKNDKVDAQRIALYAYKNREEVHLWTPKQEVIQKLDRLTATRSRLVKVRKMLQSPLTDSDGFIFKKDHTEEKKSCQKTLDALTKDIKQIQADIADTIANDPYLKELYGYVQSVKGIGPAIATELLIITNEFKAITDPKKLACHAGVVPFVYSSGQYRGKAKTSNKANKPLKALLHNGAMSAIQHSQDLKAYYVRKTAEGKNEMLVINNVCNKLIHRVFACVHRREKYKDFYASAVA

SEQ ID NO: 325955 - protein, 346 aa, unidentified
MHYIGMDCHITTLDFAVVNDAGRLVKANSVATSVNNFMEFVKKVTPPRIVYMEEGTLAAWSLEVCVRYGEKLVITDPKENRWIGSSGQKDDSIDALKLAQLARGGYIKEIHHPIGQRRRFRELMIAYHDTVRSETRIKNKIKAKFRQNGIQCTGDTVYSKTHKEEWKIKLPQDSTLLLILDGLWLQLEQLEQTEKKLLAAAKAHAKQYPEIRLFEDIPGIGFIHAATVSAILETPHRFADKRKVWMYAGLGLMRRSSGGKLYSEKLTTDYNRLLKYSIKQAAEAAVRAKDNPFRRKYLDMTLLHGITPHRARLTIARNILAAMLAMWEKGEKYNPELREKAIHKQG

SEQ ID NO: 325956 - protein, 410 aa, unidentified
MEVLYQRCCGLDVHKETVVACLRVASGDEVIREVRTFETTTASLIALSEWLAANGCTHVAMEATGVYWKPVWHILDDGDFQLILANASHVKNVPGRKTDVNDATWLADLLAHGLIRASFVPDNQTQELRTLLRTRKQLVREKSSHILRVQKTLEDANIKLDSVVTDIMGMSSRAMIEALIAGESDPAKLARLANYRLKAPQEKLREALRGRVTKHHRFLLRLHLNQIDALDASIATIDEQVEAGIAPFRVAVAQVMTVPGIKDISAQVIVSEIGTDMSRFPSEHHLISWVGLCPRNDDSAGKRRSNRLRKGAPWLKTTLVQCAWAAVRKKDSYLKAQFLRIKARRGPKKAIMAVAASILTAIYHMLKDGTLYQDLGFNHFQTRSKGQQTKRLVKRLADLGYDVALTPLAS

SEQ ID NO: 325957 - protein, 389 aa, unidentified
MVETTLFVALDTSKNALDVALAEPLPGGEVRFWGTIANQPAALDRLVKQLQKGGRRLEFCYEAGPCGFGIYRRLNAKPGVSCQVAAPSMIPRRPGDRVKTNRRDAKTLVKLFRAEELTWSWVPDEAHEAMRDLIRARSTAVQSLTRCRQHIRSFLLRQEIRYAGKPWTKKHRVWLGRLEFAAPAHRLMFGEMLGELDQGQARVARLEDHIRELVPTWSLAWLVDAVQALRGYRLIAAVSLVAEIGDPRRFESPRDLMSYLGMVPSEHSTGDKVRRGKLTKTGNRRARKILVEAAWPYARPIKTAAAHPSEAVRMIADKARHRLGRRYRALLARGKIANVAIVAVARESIGFIWAIAHAAAPGATSGQPGEHRHRSALAKVGAGARSSHG

SEQ ID NO: 325958 - protein, 358 aa, unidentified
MNYIGCDCHISSLDFAVVNERGKTTKKQRVDTGVKGLMEFVKSIPKPMKIIIEEGTLASWLLEICTDYGEKLIITDPKTNRWIGRAGQKNDSIDATKLAHLARGGYIKEIHHPIGDRRRFRELVMSYHDTVKSQTRIKNKLKAKFRQNGIRCSGETVYSTKHRKEWKKKLPKNKVVQVIVEGLWQQLDQIHEVQEELLSHIRRQGRNYSEIKRFKKIPGIGTVHAATISAIMENPHRFAHKKKLWMYAGFGLAEKTSGGKVYSRNLTRDYNRLLKNALKQATEATIIAKDNQFRRQYLRLTIEKNIPSHRAKLTVARSMLATMFGIWKSGEDYDPDIDKRRLESDKTQVSAYHLVRSG

SEQ ID NO: 325959 - protein, 423 aa, unidentified
MVTDTQYLKGDEQVESIPITAVGIDVSKGKSCVAVRRPGGEVVIEPFVVDHNQADLKNLVMIVSKLEGNVKIVMEHTGMYWRQIAFALKQAGFFVSVINAMLIHNFSDNNLRKVKTDKADAIKIANYALTYWTELPEYSVEDETRELLKTQCRMYERTLKMACSIRNELISVLDQTFPDINRMLCQNAGSNGHIKWVDFVKRFWHKECVATVPFHTFADSYQKWCKRNNYHFSLVKAEKIYVAAKNSFATFPKNNNTKILITQCVNSLTAILESLQVMRDEMYTMAKSLPEFEVVMSMYGVGKITGPFLIAEIGDVRRFKNKGALVAFAGMDAPPFQSGVFESKSRHVSKRGSPHLRRALFQTISMIWQKGNLDDPIYNFMYKKRNEGKHYYVYTVAGCAKFLRMYYAKVKEYFSSQSEATIA

SEQ ID NO: 325960 - protein, 361 aa, unidentified
MKCVQSNKLDFSGQNIYVGIDVHLRSWSVAILSDHSVLKRFSQNPEPEALHKYLVSNYPGANYFSVYEAGFCGFWIHERLTDLGITNIVVNPSDVPTMSKEKLRKTDAVDCNKLARELRSGSLVGIYVPGVETLELRSLIRMRNLIVKDSTRAKNRIKSLLRFHGVDIPEEFTRCSIGCWSKRFLSWLQALELSTEYGKKTLGLHLEQFIRLRMILLQETRAIREISRKAPFEKPIRLLTSVPGIGVTTAATLMVELDDIARFKNSDRLASFIGLIPMCHSNGESNGTGDITVRRHFMLRCLLVEAAWIAIRKDPAMTLAYTEYRKRMSPQKSIIKIARRLVNRIYYVLKHEKEYVPCVVQ

SEQ ID NO: 325961 - protein, 345 aa, unidentified
MEITTIGLDIAKRVFQAHGADAAGKAVLRRKLQRVEVLTFFTSLPPCLVGIEACGTAHHWAREIRALGHEVRLMPASYVKPYVKRGKTDAADAEAICEAVTRPSMRFVPVKTAEQQAVLMLHRMRDLLVRQRTMLVNALRGHMAELGIIAPQGISRVGDLVAALLGEDESKLPKLARYALCGLASELETLGERVKEVEGAILAWHKDNEASLRLATIPGIGPITASAIVATVTDPTQFHSARQFAAWIGLVPKQNSSGGKERQGGISKQGDRYLRRLLVLGATAVIRHARTKVTAETAWLRGVLDRRPVRLASVAQANKTARIVWALLARGESYHSPAVVPAAAA

SEQ ID NO: 325962 - protein, 345 aa, unidentified
MKYYFIGIDVSKEKLDATLIHYESESDSEQQLAYTTVENNPKGFRSLVSWSKKNAGRGVKTDAMLFCCETTGGYDRALCDWLYGNGLNIWRESALQIKRSMGLRKGKDDKADSEMIAYYALRFRSKATLYKPLDGNMRSLRDLFLYRQSLVAERRAKMVSAKEKQYISSKSKSDNFIYRDAQKAIDLLTKSIQECERRMLEIIKEDEEMYRNYLHLISCKGVGLVTSVMLIVYTDNFKGWNAKKMASYCGIAPFYESSGSSVFHKANTSGYSNRRLKGILTQAARSAITHNPTLRQYYLRMKAQGKPYGVILNNVNNKLVHILFSLVLHDCDFELDHEAKRALRA

SEQ ID NO: 325963 - protein, 423 aa, unidentified
MKYALVRVLPEVPPGGVCAGIDWASADHAVCVVDLAGRVRDRFTAVHDRAGIAGLIARLRENQAGEVAIERGDGVLVDALLAAGLTVVVIGSRQVKNLRSRYGSSGAKDDRFDAFVLADTLRTDRARLRPLVPDSPATLALRAAVRARRDLVAHRVSACNQLRAHLQVAFPGAVGLFSELDSPLSLAFLAAFPGQQAAARLDEQALAAWLATVPRRGNTAPAGVLAARLAAAPRGAAGADAAQAAVTTQLAAATAGLAGRVRALEAEIAAQLAAHPDQHIFTSLPRAGTLRAARLLAETGDCRARYPDPWSLAGLAGVAPVTRRSGTCISHEFRWNVNRQLRDAICDFADGSRHASPWAATVYAAARDRGKDHPHAVRITARAWVLIIWRCWQDGTSYDPAKHRALQDILTRQAAAGTPQPHR

SEQ ID NO: 325964 - protein, 350 aa, unidentified
MQIHTIGIDLGKTVFHLVGLNLRGEAVVRKKCSRTQLLQFTATVQVELIGMEACAGAHFLGRALREQGHDVRIIPAQYVKPYVKTNKSDFIDAEAIAEAVGRPTMRFVPIKTDDQLDMQSLHRVRERWVIRRTAVVNQIRGLLLERGITLRQGRRHLEAAVPEILEDPTAKISGALRMLISQLKHELEELANFIGEADGSIERTSRENETCRRLMAVPGIGPVTATALIAAIGNGAAFRKGREFSAWVGMVPRESSTGGKQKLMGISKRGNPYLRKLFIQGARAVMLRGTKQSIGLRTWIDNIALRKHHNVAAVALANKMARIAWVVLARGEAYRPPLLVDSEASCLACR

SEQ ID NO: 325965 - protein, 368 aa, unidentified
MSKQSHYKVGCDAHKHYSLFAVLDHRGRPVEQTRVNHEPGAIRAFVSRFPPGTPVALETVGNWYWIVDEIEQAGCVPLLAHAQMAKKMMGHVHKTDKLDAQGLAILQHLGSLPTVWIAPGEIRDERELPRTRMALSKMRTALKNRMHSTLAKYALSLDTQSDIYAPKWRPQLMQLIGSFPNETRRCMEQELELLDQVQEQIHRLEARILERVQMTPTIQLIQSVPGPAKILSIVIDREVGSIDRFPSPHHFASYSGLVPKVKASGGKTHYGKMIKAANNYLKWAFIEAANVVVRQQHHPNWRQKYVVALFERTRQRKGHAVAVGAVARYLAEATYWVLKKGEPYREPTPQRPVGRKSAVSFEQGQVRT

SEQ ID NO: 325966 - protein, 419 aa, unidentified
MTTNYPVAAGLDVHKKFIQATILWINETKKQRQFPRTHTGLLGLKDWILEHKCDVVACESTSDYWVNIYDLLISYVLVIVGNAHDIKVLAHKKTDKIDSEMIALLALKGMIAPSRVMPRYHRDFRKLVRLRHFLVGKRTDIKNRIHSILDSELFHLSTILTDIFGISGQRVMQGICEGSSIDTILQSIPNRVRAKKEAELRELIEHNLSPGALMQLGHCLRVIKQLDEEIDMLTDEARAYTLRKHPREYRILKTVPGVGDIAAITLIAEIGNFKDFISGDKLASWLGIVPKVYQSANHIVKCSITKRGSRIARWIMTQVAHGAVKTRKNVFREWYEVKKAVIGTGKAIIALARKMITIIWHLIVNDEEYIDKYSEPEQPESKKVHTIRIPTSTNYTLEQVIVLVSDAINFLNKRGPDPA

SEQ ID NO: 325967 - protein, 419 aa, unidentified
MSKSMFCGCDVSLENNTAWLMLDDGSQPAKLFNADNNQLGAEALVERIYSIAKEHCVSDILIGTEATSMYDWHLLEYLAESKLALEFNLKLYRFNAKWIKNFKKSLAPRGKTDPIDSFAIAERLRMGRLPKEYIPDTKYQPLRKLTRFRFHLMQQIAREKNFFLANLFLKASAYSRVSPFGSTFSATSLSVINDFFSVDELAAMPVEELTEFILEKGKSHFSKPAEIVDNLKRVARESYRLKPELAPTVNLILASTFNNIRCYKEQVKLVDEAIAENLKAFRHTLDSISGIGPVYAAGILAEIGDVHRFLNDSSLAQFTGLTWPKHQSGRFQAEETRMSHAGNQYLRYYLVEAANSVKRCDATYKTFYEKKYAEATKHHHKRALVLTARKLVRLVWTLLTRQTLYQPGYCSFEDLSKIG

SEQ ID NO: 325968 - protein, 428 aa, unidentified
MKYNTQNAKIKSITEKTLIVGIDVGSETHFARAFDWRNYEYSKKPLEFSNTEAGFMTLKAWMADFAEKYGKNVVIPGMEPTGHYWFNLGAYLQDNGMKPVHVNPHHVKKSKELDDNNPNKNDRKDPKTIAALVNEGRFSYPYIPTGIYAEIRSLSNLRLQTQEEITRIKNRIARWFSIYFPEIKDVYRNPDSVSGLMILKEAPLPQDIVKLGVDGINKIWRDAKLRAAGLKRAKTLVSAAEHSVGSQEAPDSARIELKNLLNDYEIYKNREEDLMSLTEEKLSEIPHIDKLLEIKGVGLKTVSGFVAEVGDITRFDNPKQLQKLAGYAIVECSSGKHKGESHISYRGRKRLRYVLYEAAISLIARNEEFKEVHRYYRTRKENPLKKMQSVIAVACKVLRIFYTILTKGVTYDGAKMMQDIKRPQMLAA

SEQ ID NO: 325969 - protein, 340 aa, unidentified
MEAISVIGIDLAKSVFQVHGIDTQGQVVVRKRLSRAKLLPFFAKLPRCLIGMETCASANYWARELMGLGHEVRLMPPQYVKPYVKRSKNDASDAEAICEAVTRPTMRFVGVKSREQQSVLMLHRTRSILTRQRTQIGNAIRAHLAEFGIVAPVGRQGLDRLIAVIGDEQDARVPIPARRCLAMLVEQHRLVLAHLLDTDRAIRADSRASELGRRLQEIPGVGPLVASALVATVPDPHVFKTGRGLSAWLGLVPRQNSSGGKERLGGITKAGDTYLRKMLFVGAMAVIRHAARYGTRRPWLTKLLSRRSPRVAAIALANRIGRTAWALMTSGERYREPVVA

SEQ ID NO: 325970 - protein, 409 aa, unidentified
MDVLFDRVAGIDVGKATVTVCVRTPGTGRKRNSETRTFRTMTRSLVVMADWLEECGVTLAAMESTATYWKPVFYRLEERMECWLLNAAHMKAVPGRKSDVKDAEWIAQLLEHGLVSPSFVPPPQVRTLRNLTRYRSQLMGDRTRDAGRLEKLLEDASIRLSVVASNITGTSSREMLHALVDGERDPAVMADMAYSTLRRKIPDLTEALTGRFDEHHAVLVGALLTRLEHTEAALRQIDAELAVRMMPFARQLELLQTIPGVGVVTAQVFIAETGGDMSRFASPEQLSAWVGLAPAIHESAGKRTPAGTRRGNKFLTSMLVEAAYSASRTKNTYLASQFTRIASRRGRGRAAIAVVHSMLVSAYWMLVRDEPYQDLGPDWLAKRNDEAHARRLVAQLERLGHTVVLDPAA

SEQ ID NO: 325971 - protein, 337 aa, unidentified
MYYTGIDLHKFTSYLTTVDSSGAIVKQENLKNAAHNFVQYFGSIPGEHQAAVESTMTWYWLNDLLVSLNIPLVLAHAKYVKAIAYAKVKTDKVDSHTLAQLLRMNYIPAAHKISNENRLLRDALRARLKILQRHTSVTNSMGLLLAKYNFNSPTQLTGIPKFQYEQLSEVEQLLDEQMLDLEKQLYPFLIPNDDIQRLLWIPGVGKMNAFTILLEVDDINRFPDLKNFFSYSRLTPSARNSARKSKQRSSKDGNKYLKTAFSDAAIHAVQYYPVIRKYHNSLLRKKNKQIAKTIIAKEIASIVFYVLKNKSDFNNTFKGHQLEEKSLQWPRVVSPCA

SEQ ID NO: 325972 - protein, 370 aa, unidentified
MKATDKYVGLDVHQDTTVIAVADGGRVGEVRIYGTIPSDLQALAKVLGKLGGEGVRLHVVYEAGPTGFVVYRRLRQMEIDCIVVAPSKTPQPKGVRQKTDRRDALQLARLHRAGELTGINVPDEVDESIRDLTRARADAVHDLTRAKQRLKALLLRQGYRYPGKANWSEAHQRDLRKLTLPLPALRSVLEEQILAVDQATERVKRLDDLIEAQVPQWRHYPAVQAVMCLRGFRLNAATVIVSELGDVRRFAHPKNVMAFLGLVPKEETTANTRRLGSITKAGNAQARWCLIEAIQKALTPPKVSSHLSLRQEGQPAAYKELAWKIQVRLHKRGWHLLQRGVMKAKVNVALARELAGFIWDLLRQVPAPEA

SEQ ID NO: 325973 - protein, 499 aa, unidentified
MCPLYAWCPVPVAEYGFDGMVHFLVTRRTVSIPFGSSTPYPSIGHAAVGIFCPTFMSTAMKLPIHHAHAAGIDLGSAWIFVSVDGVAVERFPTFTADLQRAVAHLQKHGCTTVAMEATGVYWVSFYELLERSGIDVCLCNGAHAKNLPGRKSDVQDCQWLQRMHTYGLLRPSFVPPETMRLLRTYTRLRDDHIEQTTMHTLRMQKALEQMNIKIHLVLSQLHGESGIRMVRAMVAGERDAERLLALCDRRIITRKAEAMRAALEGVYRSDHLFVLRQALESWDFYQGQIRVCEGEMRQLLTTITDDLPPSSTPSAPHPTRHHQPDIDDLHERVTRLCNGENPAAITGISDILALKILAETGVDYSHWKTAKHFTSWMHLAPRQEQSGSKTRKARAQGMNRAGQLFRQAAQSLANSKYTALGAFYRRLKAKHGPRVAMKAVARKLAVQFYNVMVHGVAYVEAGVESYQQKYEETVKRHMARQAKRFGMELVAVGSMTPTS

SEQ ID NO: 325974 - protein, 410 aa, unidentified
MSLFCGIDWATGHHDVAVVDGDGRVVVRGRVGNDAAGFAQLLTLLAEAGDSAKQPIPVAMETDRGLWVAALRETGRVIYPINPLVASRYRSRYAVSGAKSDATDAVLLANIIRTDPDAHRPLPADTELAQVIRVLARAQQDAVWARQQIGNQIRDLLKEFYPAALVAFDQLPSGGLARADARTILAAAPTPAEAAKLTPARLRRLLGKAGRRRDLDRDVERLRQVFTDTYLHQPPIVENAMGIQLGALLRQFDAACAAAEELAEAAIAHFEQHPDAAIITSFPGLGNLTGARVLAEIGDDRARFADARGLKAFAGSAPITRASGKKTVVTHRHIKNRRLAAVGSIWALTSLRASPGARRHFDARRTAGDWNRQAQRHLFNKVLGQLHHCLQTGQLYNEHLAFPPPSLLAA

SEQ ID NO: 325975 - protein, 358 aa, unidentified
MNDTNVVLDRSGHVVIGVDTHKHIHVAAAVDPIGGVLSTLTIPTDTGGFAALLEWALTFGRIIAFGVEGTGSYGAGLASYLRRQGHRVIEVSRPDRRMRRMNGKSDTLDAENAARSVLAGLSTATPKTMDGASEMLRELKVAHDTAVKARTQAMITLKALLVHSDESLRKTTEKLTQIKLARHCAGLRPGGLSAPSDANRHALKRLAKRWLFLDEEAQDLERMIQSIVREHAPQLLDAFCIGPDTAAEILIAVGDNPERIHSEAALAKLAGISPVPAGSGMSSGRHRINHGGHRQLNAAIYRVVIGRMRFHQPTIDYVARRTSEGKPKRDIIRCLKRYVIREVYQLINTNPATGEIAA

SEQ ID NO: 325976 - protein, 357 aa, unidentified
MHERTFIGLDVHARSTQAGVLDGLTGEVRSLAVPVATKALVAWVCTQPAPAVAYEAGPTGYELARALAAAGVPCLVAAPSRIPRAPGERVKTDRRDAVRLARLLRLEELTPVRVPGLAEEAARDLVRAREDARGDLMRARHRLSKLLLCRGIVWEEHAWTGTHELWLTRQRFAERPLQIAYEEALAAMFSVRDRRDALDAAIAVEALEEPWAETVARLSCLRGVSTLTAFALTVEIGEWRRFSGRSLAAFLGLTPSESSSGASRRQGAITKTGNAHVRRLLVEAAWQQRRRPGKSLRTHLARSAQPAAVRERAVAAERRLRRRWLRFDERGKRSTVAAVAVARELAGWCWSLAVMDA

SEQ ID NO: 325977 - protein, 433 aa, unidentified
MQEAEDEPLFADRAAGIDIAKAGIEVTIRVPSDTRRGGRQQETRSFRTTRKELLALADWLRCWQVTKVGMESTGDYWKPVYFLLEAEGLDCVLYHAAQVKALPGRPKTDKLDSVWLAKITERGALPGSFVPPEEIRRLRTHTRYRRHLTQARTAEKQRAEKLLEDAHLKLSSVISDIHGVSGRAMLEAIAAGERNPKTLAQLARGTMRGKIARLEEALDCAFVTGEHAAVLVMMLATIDYYTARIGELTAKIKILCQPYEHQIAQLDAVPGTGVITAQDIIAEIGTDMTVFPAAARLVSWAKWCPQVAQSGGKRKGANATGRGNRYLSAALGEAAVSAGRTQSFPGAKYRRLVKRMPKRKALVATGNSLLTIYHALLSDPEAAYTDLGTDYYERRANTRRQARNHIRGLERLGYKVAIEPIDPATGELEAAAS

SEQ ID NO: 325978 - protein, 387 aa, unidentified
MKRDDLSRSLVAFDQNSTLVVVVELGLKSWLVGGLVPGVNRQPLKKQKPDPDSLLALLARWRGEAIKAGHTINRVVVAFEAGYDGFWLARWLRARGIEVYVIHPTSIPVSREQRRAKTDRLDTALLMRAVLGWLRGEPKHCSMVAIPTLAEEDARRPHRERETLVKEQTRVVNRMKATLVRYGIRNFKVKLRKAASHLEKLRGPEGELLPPNTLAELLRHIARLRMIREQIRAIETARLQHLKGAPHQGTHPMMQMLARIMGIGIETADMLVHEVLSRKLRDQRAVGRYGGLTGSPDESGTKRREKGLARAGNARVRCGMIQLAWRWLMFQESSELTQWYRARTAGAKSAVRKTMIVALARKLLIALWRYVTTGEAPRGAILRPATA

SEQ ID NO: 325979 - protein, 341 aa, unidentified
MAIKVIGLDIAKSVFQVHGVDEVGQAVLRRRLRRTEVLKLFAGIEPTLVGIEACHTAHYWAREIAALGHEVRLMPPQFVKPYIKSQKNDAADAEAICEAVQRPTMRFVPVKSAEQQAVLLMHRTRDLLIRQRSSLISAMLAHFAEFGIVIHRRVRDIDRLLLLLGETQEGLPELAREMLGILATQLREIEARVQMVEAQLMTWHRSNEVSRRLATIPGVGPITASAIVATVADARQFKSGRQFAAWLGLVPQQRSSGDKERLGGISKRGDGYIRRLMIHGARAIVGWRKRSARTSDHWIDGLMGRRHINVVTVALANKSARVAWALMVRQSVYNHRLARAA

SEQ ID NO: 325980 - protein, 316 aa, unidentified
MPNTAAAIKSSFKSLQKEHDVEKSVFLVCAEHTGQYTYPLMCACEEIGFDLWLDNPAQIKQRSGIKRGDNDRLAARNIADYVARFQDKAQLFSLPQKNIASLRQLVSERDLYVSDRGKYQGQLTDQKRFMNEDDYAKKSKRLKSLIEGLDEAISNVEKEIEQLIKSDDVLSNQYDLLSSIDGVGKQTSVKMIVETNAFNDFDNGRKFCCHAGVAPFQYTSGTSKRSRNKVSDRADKSIKTLLHMAALSVATRKKDGELREYYLRKVAEGKNKMSVLNAVRAKLVLRMFAVIKNNKKYDKNWNEKKVDKVDKVDKVD

SEQ ID NO: 325981 - protein, 448 aa, unidentified
MAAVIIGVDPHKGSHTAVAIGGDEMPLGQVRVRACDGQAGQLLDWARAWPQRTWAAGGARGMGYLLAQQLVAAGEKVLDVQPKLGARVRLLAAGDVNKNDPNDARSVAVAALRAPGAEVRADDHAAVLKVWSKRHRDLGRLRTQAACRLHAVLCELIPGGVSRRITAGQAERILGPLAPADAVAAARIELAAGLIEDLRRIDAQIRETRKKTDTAVRASGTSLTGLFGIGPIVAATVIGESRDVARFPDRDHFAAYNGTAPIEVSSGSRRTYRLSRRGNRRLNHAIHMAAVTQVSHRHSEGRAYYDKKIAEGKTPKEALRSLKRRVSDAVFARLRADALRAAARAGEDPGGQTGNGSVPGAAGSHPACRLFGKATPGSPAHPTTITAAPEPVCTAGLSSAAANSPPAAKTRVQVERPQRSEDERPGRGARRRPHSAARKGTGKVGPAP

SEQ ID NO: 325982 - protein, 343 aa, unidentified
MKLIRVGVDLAKNVFQVHGVNRSEKAVWRRKLTRENWLKVLRQSVEPGCEIGMEACGGAHHWARQLQQQGFKVRLLAPQFVKPYVKSNKNDANDAEAICEAMSRPHMRFVSVKTVEQQDIQAVHRIRAELIKQRTAKANQIRGLVAEYGLVAPKELGHLRRALPCWLEDAENGLSARLRRLLHGLWGDLQALDERVSELDREITMIARSDPVAKRLQQLRGVGPIVATALVAAVGNGEQFAKARQMSAALGLTPRQQSSGGKERLLGISKRGDVYLRALLIHGARAAIRTANNKDDRLSQWVTRLAARSHVNVAAVALANKTTRMAWAMLKHGTDYQPAMVTS

SEQ ID NO: 325983 - protein, 379 aa, unidentified
MEIITQNEKILYIGIDVHKDTYSLCSFDFHKNELSDEMTIKATTKAVIKYLEAIKKKHREEILFACGYEAGPTGYGLCRGLQKAGYGCVVMAPTTMSNPDGKKRVKTDRIDARAIARILAYKSYSQVHLPSEEMEALKEYTRARDAKKRMFKKAKQELLSFLLRNGKSYPESGNYWTEKFFKWVKTVQFSEKWMQEAFNEYLAEVYSLKHKIELMDAKIKEIAGLKIIKDKVDKLVCFSGIDIITAVETVMEIHDFTRFATAAQFVSYLGLCPGEDSSGKTKNMLPLTKAGNKRVRALFCESAKAIKRTNPYGQKSKRILERQKNASPEIVAYADKITKRIRTKMKHLEERGKNYNVSSAAGARELACFVWGMMNGKIA

SEQ ID NO: 325984 - protein, 356 aa, unidentified
MNKYIGFDMDCNKTVCCIVESGKNDLYQTIGSDVGSMRQFLISQKQPGCKIHLAFEISGQAGFIYDSLSDYADEIKVVNPTKMTWIYRTAKKNDRIDARKMAVLMSINELPTVYMPNKEVRQWRETILHRKKIIDRFVQVKNRIRATFKAHGFNRPENKGSWWKKSNRRWMKSICEQNIGLSDLWYMQLNNLLDELELLDIQLGRVTDYLDGYLSNKAGGKLLMSIPGVGPRTAEAVLAYTDEVSRFGSYKEYCSYFGLTPKLDESGSCRRIGHISKHGPSVVRWVLCESSWKVIRYNKGMRGFYERVMAGQASRKKIAIVAVCRKLLSIMRAMLLTGELFNERLVEKTDKLIEAA

SEQ ID NO: 325985 - protein, 409 aa, unidentified
MDVIVERPAALDVHKEQVTACVRVPGPGGVRSEEVVQFQTTVRGLLTLHDWLAAHGVRQVAMEATGVYWKPVWAILEDEFECLLCNARHVKQVPGRKTDVSDAAWLCQLLEAGLLRASFVPPKPIRALRNLTRYRKTQIAERQREANRLHKALEDTGIKLDCVASDILGVSGRAMLDALVAGTTDPDVLAELARGRLRQKLPALREALEGRFDPLHAVLIGAILAHLDFLDEQIERLSEAIQDQLRPFAPAVELLRSIPGVETRTAQTIIAEIGLDMSVFASERQLASWAGQCPGNDQSAGKRRSGRTRKGSKWLDQALKDAAMAALRTNDSYLQAQYQRLRPRIGHGRALGAVKHTIICACWHMLTTGELYHDLGGDYFRRRNPERQTRRLVAQLEALGHTVTLQEAA

SEQ ID NO: 325986 - protein, 412 aa, unidentified
MVPLNPSTLASEVFAGIDWGGSFHQVCLINAHGEVIVQQRVQHDLAGLAELDRLLLVHRNAAGRLRVAIERADGLLVEHLHKVEVEVFCVSPKISARARERYRLAATKSDAFDAFVLADTLRHEHRHWRALTPPSPVLAELRAISRDRDRIVIAQQATENRLRAVLEAYHPAPLHLFSTLDRDITLDFITDYPTPEQAGRVGTARMDGFCRRHGYSGRTQPEVLVERLRPHLLSAGEGTVAGKAFSASLFTEQLRMLNTHLRAYDKRLDELLERHPDTPIFTSFPGVGPVVAATLISEMGDDRHRFPAPGALLAEAGLSPVTRASGRTRQVRFRYASNRRMRHMIDWWMFTAIREDDWTRQAYDHARARGQGKYRALRGLGSRWTRILWRCWTDHTRYDPAIHHRNPEPTTA

SEQ ID NO: 325987 - protein, 363 aa, unidentified
MVESTRVTVGLDVHARSIRLAAVRADELLEERTLPYDEEQVERLLRRWPAARCCYEAGPTGFGLYRHLIARGIECSVVAPGLVPQRPGDRVKTDPRDARKLARLHAGGLLEPIYVPSPEVEAARDLVRVREDARLDRMRDRHRLSKFCLRHGRLLPTSGWTVLRRKWLGEQRFEHRAEQITFDSYLRTIDLVDARIEQLERAVSEAAEQGPWHDTVARLRCLRGIDTLTAFALVAEIGDFSRFETAAEFMAFVGLVPAEHSSGEYRRQGAITKVGNAHVRRLLVESAWHAHRRPTVSYELTRRHRGQDPAVIERAWRCQTRLHQRWQRMAGRGKPHQKIVVACARELAGFVWATATNQPLRSL

SEQ ID NO: 325988 - protein, 388 aa, unidentified
MDVLYQSCAGIDVHQATVVVCILHGPITSTRPKREMAQFDTTTKGLKACHDFLTQFHVEAVGMESTGVYWRPVWHELCDDFELILAQPAHMKAIPGQKTDKKDAHWIAQLTRIGLLPRSFVPDETIQELRELTRQRKHYVESRNRETNRIHKILQSGGIKLTTYIEDIMGASGRNLLQLLIDETPLTPRMIHQSVYTSLKRKVPQLLEALDGYFSAHHRFMLGQSLEIYDFYQKQIDCLEERINGYLNLYERPVEILDSIPGMDLITASVIIAEIGVDMSQFPTAGHLASWAGLCPGNNESAGKKRSTKIRHGNSYLKRCLCQAVFAAKRQKGSPLAERYYQIQSRRGSQKATIALAHQLLKIAYILLKENLTYQEFVLQKRLLETSQ

SEQ ID NO: 325989 - protein, 344 aa, unidentified
MNIATMGIDLAKNVFQLHGVDGHGKVLVRRQIHRGQVRGLFVNLPPCLIGMEACASAHYWARTLESYGHTVRLIAPHFVKPYLKTHKTDATDAEAICEAVSRPNMRFVPIKSIEQQSALSLHRVRQGFVRARTGQACQIRGLLAEFGLVMPRGIANLKQVPKLLQVAAKELPAPFCRLVERLLAHLKELDRQAQELEEQIVDWHQRSEPSRRLAKIPGIGPITASALVASISDVRSFKNGRELAAWLGLVPRQHSSGGKPMLLGISKRGDRYLRTLLVHGARSVILRARKRDDENGVWLKKILERRHVNIATVALAHRTVRTVWAMLAHDREYCPNYKSLPVAA

SEQ ID NO: 325990 - protein, 375 aa, unidentified
MKEKVRFLGLDVHAQTIAVAIAEPDGEVRSLGTIANRAESIRKLVKKLGPTEQLKACYEAGPTGYVLYWQLAELGVACEVIAPTLAPVNAGDRVKTDRRDAERLARSYRSGDLTAVWVPDEGSEALRDLVRARESAKQDQLRARHRLSKFLLRTGQRPAAGVKAWTLAYMAWVRQLRFPQVAQESTRLDYLHEVEHMGERVVRLEKAIVEAVKLAAPAVQEVVKGLQALRGIAQISAVTIASELGNVSRFAGARQLMGYSGAVPSEDSSGKRTKRGSITKTGNAHLRRIAVEAAWSYRLRPGVGPALRKRQEGVPEEIKEIAWKAQQRLHKRYCRLAAAGKDQRKIITAVGRELLGFVWAIGIKAEAAAKQQMAA

SEQ ID NO: 325991 - protein, 334 aa, unidentified
MKSDTVHIGVDVSKEKLDIYVPAKKEGSRPLTKEVDNDIKGFRELRDLARKAKATVCVEPTGGYELELIAFMHKFDVPIAYTDALRVRQFARAEGSLSKNDTIDAALISRFADKIGVRVLEAQEVEAVELKRKAKFRQTMVDSRTAMINRLETEIDPEMKALLKEQIRLAGRIIDKAEKLCLDTVKKNERMDSLRERFTTIGGVGDLTAISILSSLPEIGTLSDGKLNRLVGIAPEEKQSGTKEWQRRIWGGRKDVRNALYMAAVASIKWNAILGSYYHKKRAEGHPHKWAIVPTMRKLLSLLNRIARDPGFTPMPEPESTKQNANVGRRKKAA

SEQ ID NO: 325992 - protein, 400 aa, unidentified
MLSIGIDVSKGKSTVCGMKPGGEIVYAPFEVQHTREGMSELVSLLRSSGEEVRAVLESTGSYHCPVVAALLENGIFVSVVNSLRMKRFCSQSIRKVKTDRIDAMQIALYGLAYWQELQPARLPEDTYRELQLLARQYYQMTSMLIKAKVDFNALCDQVLPGMQELMSDHAGRHKLSDFVLRYHHTTHILEMGETRFRKDYCKWAEKKGYRNCERMAVLIFATAQNGIPVLPNAPSTQIVITEAIRVLHIVEASRDAILTQMQALAKTLPEYSLVREMPCIGDTLAPRLIAEIGDVRRFHSKRALIAYAGIDAPPYQSGKFCANNRHISKRGNRYLRKTGYEVMQSYVMHKPANDPIFTFIEKKRSEGKSGKLAMVAGLNKFLRVYYGKVTELYRSLPAIE

SEQ ID NO: 325993 - protein, 342 aa, unidentified
MQIAVLGIDLGKNSCSVVGLDAAGRVVLRRRLRRDGVIKLAAGIAGCVMAMEACCGAHHLGRLLREHGHQVRLMSPEYVRPYVKAQKNDDRDAEAIAEAATRPTMRFVELKSEAQLDMQSLHRARDRLVGERTALINQLRAVLFERGIVVPQGRRKLERYVDALPAEEGIRFSPRTRLLVADLRAEWRELDRRISAFDDEFAAQARTDETARLLTSIPGIGPVNATALTAAIGNAQTFTRGRDLAAWLGLVPKQVTTGGKPKLLRISKRGNGYLRKMLIHGARAALPVLSKAETPLGAWLRGLLARAHVNTVVVALAAKLARIAWAVIRSGKKFDMAAAMAS

SEQ ID NO: 325994 - protein, 415 aa, unidentified
MSDPKRWYAGVDWESQSHCVFLTDNEGRKLGQKFFNHSGEGLAEMADWLLKTSGVETAGQVFVAIEVPHGPVVEALIERGFAVHAINPKQMDRFRDRFSMAGAKDDSRDAEVMASSLRTDPRCFRRLVAGDPIVVELREWSRIADELGAERNRLANRLREQLWRYFPALLELEHDCGAEWLLDILVIAPTPAKAARLRGARVAQFLKQRRIRRFDAAAILKAGRATPPKLAPGTVEAASAHVASIIPRLKLVNRQIREADRKIAALIDSLAASQESEPGQEKQHDAAILASLPGVGRTVLATLLAEAWEPLQRRDYPALRSLAGVAPVTKRSGKSCIVVRRQACDNRLANALYHWARVAVQHDPRSRAKYAELRKRGHSHGRALRSVADRNLNVACAMLKTGTLFDPSLAAQKAA

SEQ ID NO: 325995 - protein, 522 aa, unidentified
MSSTSSSTGRKGRRSKRKPDVLHRPRGTFSPRVQNVGPERFGIVSVDCAKARSKWMLADFYGKVLVPPTVVGHTRAELDAALEQVRKAQALHDLRDMLVSIERTGRYHHPVREAFRSAGYDTRIIHPFTVKQYRLPADPGTKTDDTDLAANFRATVNGFALGEQVRDLFWGGFQLLIRHRRDLVQKTSTLCCQIKEHLQTAMPGYAEAFSDLWENKVALKLALHFGSSHAILQAGLAGLEQAMRQPNLRFQKRSLEQALQWAHRAAPAEVAAAWHVRLAGAYEEDRAGKARQILLLEGQIAQQLAATPYVLLLSIPGLNVVSVGEFAGEAGPIENYASSRCITGRAGIYPSRYQSDEVDHRNGVMVKCANRRLRYAILQAADCLINNNNHFGGLASIWRSQGKDARLIHTRVACRFARIAFQMVAGRQVFRHPAARDRHYILEKLLRFHTEHGTPSDQVQADLQAARQWLAPAEQPLEAIPLQRQLDELRQRRRGAQAVGQVLSLVLAELGAMVVQSVPSGH

SEQ ID NO: 325996 - protein, 322 aa, unidentified
MSTGSVFVGIDISKDTLDVAVRPTGQAWRVGSDSAGLADLVARLQTMRPEVIVVEATGGYEVPVVAALAEAKLPVAVINPRQVRDFAKAAGKLAKTDRVDAEVLAHFADAMKPSPRPLPDAQHRELEAQLARRRQLIEMTVMERNRLRGAMGRVKVRVEAHIEWLEKELEGQDRGLRALLQASPVWREKDDILQSAPGVGPVTSLTVLAALPELGTLNRHQIAALVGVAPFARDSGQLRGKRAIWGGRAAVRASLYMATLSAAKHNPVIAAFYRRLLVVGKPKKVALVACMRKLLVILNAMLKHRTPWASHHLSRSPVPVPC

SEQ ID NO: 325997 - protein, 343 aa, unidentified
MIEVSTIGLDLAKNVFWAHGVDASGQAVVARSLKRRQVIPFFKTLSPCLVGIEACATSHYWARELSALGHEVRIMPANYVKPYVKRNKNDAADAEAICEAVTRPTMRFVAIKTATQQSLMMLHRSRSLLIRQRTMLVNALRAHLAEFGIVAPVGVRGLKALLAVVSKPKDERLPTIARACLVSLMTALSTVEQEIATGERRIHMWHRSSEASRRLESIPGIGPIIATALVASVTDPGVFKSGRDLAAWIGLVPKQDSTGGKVRLGRISKQGDRYLRRLMVVGAMAVIRQGRKTNFANRPWLADLVQHKPTKVAAVALANKNARTAWALLATGDTYRQTATSAT

SEQ ID NO: 325998 - protein, 454 aa, unidentified
MAKARGRRGTLDGFAEINRDAAGIDVGNAQHWVAVPCGRDVESIRMFGCFTTDLHALANWLERCGIKTVAMESTGVYWIALYEVLESRGFRVCVVNARQAKNLPGRKTDVKDCQWLQQLHTYGLLTASFRPQGEIIILRRYLRHRETLVQEAATCIQRIQKALTEMNLQLANVISDISGTTGLRILHAIVDGERDPQCLAAMRDWRIKATPDEVAKSLLGNWRDELIFVLGENLVLFEVYQQKIERCDYRIEQHLKSMSAQVDNNTNPLPKPRKGKRPHGNSPSFDLRSELYRVTGTDLTQIDGINVVTAQAILADTGTDMSAWKTEKHFVSWLGLCPDHRISGGKVLQRATRKVTSRAATAFRLAASSLRRSQSALGAKYRRLQSRLGAPKAITAMAHHLARLFYRMIKYGSAYVDHGVAAYETRFREQQLTWLSRKAAELHLCLAPLPNSAG

SEQ ID NO: 325999 - protein, 308 aa, unidentified
MKEEVVYCGIDVAKSRLDVALSGQRWEVPNTKAAIARLVQGLEGRAFKAQVICEASGGYEQTLLRALHRSGLAVTLVQPNRVRQFARASGILAKTDRIDAAVLVRFAQAIKPAATAAQPLPLLRLRELDTQRAHLTWLLVREENRLAQLNCAAQLRRFTRSLMHKVQKQIATIDQRIKELIREDETLRCKAQKLISFNGVGERTAALLLAQMPELGQLNRRQVAALAGVAPFNRDSGTMRGKRCIFGGRRALRSGLYMSALTAVRYNPVLAPFYRRLLAAGKPPKLALTAVMRKLLIALNSALTPHPA

SEQ ID NO: 326000 - protein, 443 aa, unidentified
MKQLPILDTRAAFCDVGSQSMHVSIAGAAPKVFGTVTSQLHELRDWLLGENVNSVAMEATGVYWLALYSILEEAGLEVVMVNGRQTRNLPGRKTDMLDCQWGATLHAHGLLKPGFVPPAHIRKLQDYQRLRTDHIGLAASHVQHMQKALERMNIKLHHVISSLTGASGLAVVRAILDGQRAPEKLLALCHAQIRDNKAEQVTQALRGTWAPEHLFALKQALQSWEHYQKQIVECDQQIQTLLQDITIDDTPDAGMDHKTMTGAGKGRSVNAPQIPGLHQMLVKLCEGKDLTSLPAHTDYSVLQIISEVGTDLSKWHTEKHFTSWMGLSPGSHQSGKRHGSVKRSRNRVGRLFGVMARSLARSKDIALGAFYRRLAARRGGLVANIALARKLAVMFWRVMVKGLDYVENGLAAYEAKMQEAKQRTLRRLAKELGQTVSPIKNAV

SEQ ID NO: 326001 - protein, 440 aa, unidentified
MNEEDRTRLEEFRQFRKEVRGSSEYLLVGIDVAKDKHYAFFGTAQGKTLFRRLVFENNIEGFRKLLGQAGAMKVQNGLKRVVFGMEPTANYHKPLGEHLIRCGHLVVLVSGVAACENRKTLDGRWDTNDTRDAANVADLVSQGKCLFYEFPVGVLQDLRNLLSLKRRFKRVEQGYRVRIRNHLLAKYFPELDRYYEQSPSTSLAIVRWCLDPSVIAGLEYKEFVQRVGTGQRRVSQEKRLQAIWKLAVDSVGCEAGPVVEFEAQVMVEGLKQIRESIRQMDEKIQELCSPFPEYEFLLSIPGFGPDVSAKVLGAIGNPFRFQNRRQVLKLAGFDLSAKRSGKNSESVIPVISKKGKADLRYALYQAAFIASIRNQDFIVYYTNQLRGREREPGIKTKMRVKLAAKLLIIAWTLMKKKEPFHPSYLRAAGPSVSTGDGRER

SEQ ID NO: 326002 - protein, 406 aa, unidentified
MQVYIGIDWSERKHDVVFMNAAGAALAQFEILHGPEGFLRLDEIRRRMKLALEDCVVGLETAHNLLIDFLWSRGYSNIYVVPPTTVKSNRKRFSSSGARSDPSDALVIADSLRTDHGRLQPWRPDSLLTRQIQAKVSLINHLTSSTTRLSNRVRAVLLRYYPAVLNMFSSWPTKIAMEFVRAFPTPGEADNLSLDEFQRFARQHRYPNPKRLPGCFARLQAPQPEAAQETVEVYKDEAVLLAAMLLTAMRAKKEALRELKTLFREHPDHAIYDSLPGAGDFLAPALLAKFGDDRKRFPAPASVQALAGTCPVTDQSGKRRIIKFRRACDREFRAIAQQWAMASLNQSTWANAYWQRARPSCRFSSLAYRRLANRWLAILWKLWQTGQVYDEAYHLQQRALRSKRRS

SEQ ID NO: 326003 - protein, 402 aa, unidentified
MNAVGIDVSKGKSMVAIMRPFGEIVSTPFEIKHTSSDINSLVKLIKSIEGESRIVMEHTGRYYEVLAHQLSEANLFVSAINPKLIKDFDNDSLRKVKSDKADAVKIARYALDKWHNLKQYSVMDELRNQLKTMNRQFSFYMKHKTAMKNNLIGILDQTYPGVNAYFDSPARSDGSQKWVDFASTYWHVDCVRKMSLNAFTCHYQNWCKRKKYNFSKSKAEEIYGKAKELVPVLPKDDITKLIIKQAVDQLNSASITVESLRTLMNETASKLPEYPVVMAMKGVGTSLGPQLMAEIGDVSRFTHKGAITAFAGVDPGVNESGSYEQKSVPTSKRGSSDLRKTLFQVMDVLIKTHPQDDPVYQFLDKKRAQKKPYYVYMTAGANKFLRIYYGRVKEYLASLPKS

SEQ ID NO: 326004 - protein, 423 aa, unidentified
MRFIGLDVHRDFCEVAIAEAGKVRLAGRVLTEPEALALFAQSLGVDDEVALEATGNALEIARIIAPHVGRVVLANAKAVKGITRAGAKTDKIDARTLAQLLAGGFLPAVWLPDEQTRILRRRISARAQLVRQRTRAKNQVHATLVRNLKGKPPVSDLFGGRGRRWLAAQDLPADEQETVAACLRQIAFLDGEISLIEQALAEQVLASPEMRRLLTLPGVNFVTAAALLAAIGEIGRFPTARQLVSYLGLDPRVRQSGSEPARNGRISKQGPGETRHVLVEAAWHAARAPGPLRAFHQRIDSRRGGNIATVAVARKLAVIAWHMLSRGEDYAFARPSLTREKIRRLELMTGAEHQKGKRIGVFASKEQHQLDKELAAQAELAYRRLVQDWQPTTKGAGAAPGRASRRPSSGQAARQETAPPPAL

SEQ ID NO: 326005 - protein, 322 aa, unidentified
MSLPNPLCVGIDVSKATLDIAASHEFAQFTASNDSDGFDAILAALRTHSVALILMEATGGLEAAVACSLQAEGFDVAVINPRQARDFARAMGYLAKTDRIDARVLAQMAEVINRHPERERFIRALPDAERQILAAMVVRRRQLITMLVAERNRLYPSHPQNRKSINIIINALESELARIDTDMNQHLKSHFKALSERLSSVKGVGTMTVAALLAEVPELGHLSRREISALVGVAPVNRDSGTMRGRRTIFGGRAGVRTALYMSALVAARFNPVIKAFYMHLLAAGKAKKVALVACMRKLLTILNAMLRKNEEWNESYHHVAP

SEQ ID NO: 326006 - protein, 409 aa, unidentified
MIEAIVKRCAGLDIHKMVVVATVLIESEDGALEQHTRSFGTFRGDRQALCQWLQTHRVDLAVMESTGNYWKSIYAALESAPIETYVVNARHVKQVPGRKTDVSDSQWLASLARCGLLKPSFVPPVDLQQLRLIGRYRLKLAAQRASEKNRLHKVLDDAGIRLGGVVSDIHGVSAQAMIRGLIAGESVAQLLRCSRGRLKAKQAQLAQALDEPLSERHRFLLQQLHRHIDVLDEQIQLLDEQLFAAMSAYAQPWQWLQTIPGIDRFMAAVLISEIGTDMSRFSSAEQLASWAGLCPGHNESAGKRKNARTRKGNRVVRQLLCEAANAARRTRCQFKGKYQALVIRRGHKRSIIALAHKLLRVIYAVLDQQQPYHDPEIDSQALIVQKNAPRWIKALKHYGYLPDNTPAAN

SEQ ID NO: 326007 - protein, 445 aa, unidentified
MTFRTIGIDLAIRGDHLAQIYDDGRPNGRAIRFRHDQPSLAAFVQTAVMGLRADDHIQAIMEPTGMSWFPVAHHLADAGVTVARVKGKRVKALRRYLSEHAKTDMADAQILAAIPSFGGPRLDPVHIPDPRSHALQRLTKQRSRFQNEIADARRRLLDLIRWASPRLEAVLPDLGTRLSLALLQKWFHPSDVLKARRTTLAKYVGAHAGGNHPRSGPFVETLITGLREAAQYAQNLHGTHIDFSELQFEIATEIENVLKKIQIVGNLEQHIADLYKHLDPQALLLSIPGVGRHLAPTLIGLLQNIERFHSEKHLRGFCGLFPRRADSGGVERAGQTLTQGGNNRIKHALYLAADTARKTDPELAELYWRLMTAKGHHHKQALCAVANRIVNRIFSVLKRGKPYEVRDREGNGITMCEAKAIILERYTVGENIRAGRRSNRIEKNS

SEQ ID NO: 326008 - protein, 337 aa, unidentified
MEDIIYDHYIAIDWATKNMAIARMTKKSNKITAIDVPSDIVELQFYLKNLKGTKILAIEETTTSQWLYTELKDYVEKVLICDPYRNSLLQEGPKTDKIDATKLVQLLKAGLMKEVFHSTDKFIYLRRIVSGYEDLVKSGVRLKNQRYSMLRVCGKSGYEKKGIKLASRDEQYVLECLDRQIQNYEEEKKGYEKEFARLARKHPEIRHQKSIPGIGLINAVKIVARVVTPYRFSGKGHYLSYSGLIKHEKVSGGRSYGKKNPRYCRMMKCVYKSGVIAAIGGNNPINDYYEYLISEKGYPAYNARNKACRRLAILSFGIFKSGKKYKPYRRDHVKKGK

SEQ ID NO: 326009 - protein, 360 aa, unidentified
MTATMTWVGLDVHARSTHAAAIDRDSGELIRARFGTGADPVVEWLLQLPQPVHACYEAGPTGYALYRAAVAAGLRVDVVAPSKTPRAAADRIKTDRKDAELLVRLLLAGSLASVAVPSAESEAARDLARAREQVRADLARLRHRVSKLLLRYGRVYDGGGTWTQAHRRWLAAQRFEHVATELAYLDALAAIDGLLARRAALDERLSLLATEPQHWPTVARLRCFRGIETLSALVLHLEVGDFARFQRPGQLAAWLGLVPSLHQSGESETRGSITKTGSGFARRILVEAAWHYLREPRIGATLRDRHAGQPDHILQIAWRAQHRLYRLQRRLRARGKPGNVAVVAAARELACFLWAAAVAD

SEQ ID NO: 326010 - protein, 334 aa, unidentified
MKELTSCIGIDISKDTFHVCVKQLVSERGVVKRTRSFENSHKGFAEFLHWSLSKATTPVFVMEATGIYHEELTHFLYENGKDVAVVLANKIKHFAKSLNVKTKTDKADAAVIAQYGLERNPQLWQPMIPQMKTLRDLCRERLSLKKDLVRCKCQMHNFRHAYGTLEFVSQMKQNQIAFLEQSVQSIENEIKRMTEQDKDFNERVNKIATVNGLQMLTIVTVLCETNGFALFGNLRQVVSYAGLDIAERQSGLFKGKTRITKKGNARIRQCLYMPALSATNHNAHIKDLYQRVVERNPTIKRKGVVAGMRKLLILIFVLWKKNEVYDPSHPWNIK

SEQ ID NO: 326011 - protein, 309 aa, unidentified
MIPSVGVDVSKDHLDWAASAQSAVERIPNHAAGIRRLVKGLRELEPERIVVEATGGYERALVEALVRAGLPVVVVNPWRVRRFGEGLGVLAKTDRIDAQLLALFGERARPPIRSLLRGPAAVLIARRRQLVGMLVAERNRLGLAPPAVRRDVASLIRILERRIARLDQRIDGLLEADPERQETAAILQSTPSVGPGVARSLLVDLPELGRLSPKQIASLVGLAPFARDSGRKRGQRSVRAGRAAPRTALYLAAMNGARFNPLLRRFYERLRTAGKPPKLAFVALARKLLTILNAMVRDRTTWRGDSLHA

SEQ ID NO: 326012 - protein, 372 aa, unidentified
MGHHTEAFVGIDTSKLRNAVAIAEGGRGGEVRYLGEFPATEAAIQKLVAKLAAKYRHLTFCYEAGPTGYGLYRLLKSLCHECLVVAPSLIPKKAGDRVKTNRRDAVSLAKLLRAGELTAVWVPDERHEAMRDLSRARQAVKKDLQGKRQQISSLMLRLGRIYPGKTTWGPAHMRWLMEQKLEHREQRIAFEELLEGIRQESERMERLEGAIREVVPEWSLAEVVAALQAMRGIDLIAAVGVLAEIGDLSRFQNPRELMGYLGLVPTENSTGDKVKRGGITKAGNGRARRILVEAAWSYRYPPRVSRDKQPKVEAAPRRAREIAWKAQTRLCGRFRSLERKGKRRTVIVTAIARELSAFIWAINRELMPLRQA

SEQ ID NO: 326013 - protein, 352 aa, unidentified
MKILAIDLGKFKSVSCLLDTENNQTEFQTIPTLRWAFEQLLNTTHPHQVVFETSAVSGWVHDLCQSLGYRVLVANPNADAWQWRNVKRKTDKDDALKLAKLSALDQIQSVHMPTPAARQYKRLVKFRKTIVRQINQLKNGIRALFCAQGMTMLTGAKAWTLEGLAKLEKHRKSLSECNMEELWRGELDVDLTLLNTLSEQLNQLEKYLTQRAKQEERVQLLMSIPGVGRCLAEVIVTCLDDPHRFQNARQVSSYAGLVPRQHQSGQTNRLGKISKRGSRLLRSTLVEAAWLSLQYNPWAVEIFNRISGGQKTRRKTAIVAVARKLLVRCWAMLRHNQPWNPMLMQQLVEKAA

SEQ ID NO: 326014 - protein, 341 aa, unidentified
MISYVGLDVSLSETSVCVLDDHGSIRFEGRVPSQPEAIVRCLRQHAADAARIGLETGPTAGVLFRALTAAELPVICLETRHAHRVLSARPNKTDRNDARGLAELMRIGWYRAAWVRGASATYVRSLLQGRRLLVQTKRTLENTLRGGVKRFGLIMTKTAGRTFTHRAAAVLDRDPAYAAFAQPLLAVLRTILEQIRSYDRQLRALARTDPNAVRLMGVPGIGHLTALAFIATIEDPGRFRRSTEVGAYFGLTPRVHQSGEIERMGRITKAGDNLTRSYLVEAANVLLTRIKRSTPLREWGLKIVRRAGLKKAQIAVARKLAVMMHAIWSDGTEFEWRTTMA

SEQ ID NO: 326015 - protein, 385 aa, unidentified
MGSQAFIARDYDVFAGLDVDKKSISVTFTDHQGLLKSMRMPYSVDHLVNHVRKHYGDKKVAFAYEAGPTGYGLYDGLVAQQYPCLIASPSMIPKAPGQRVKTNRLDSLGLAENLRGGQLKSIHVPTTLYRELRHLTQLRDALVSEVVAMKQRIKSLLLMEGLEFPPAPPGSQWSFLVKAKLRKLPCSSVVRFKLDQLLDNLEFGEKQVLKVTREIRRFCQNDPELSQCIDYLKSLPGIGWIVASQMLARIGDWRQIKNIRELPAFLGLVPTESSTGERTTRGSITHNGDPRLRSKLIQASWSAIRQDGELLKFFRTVAKKHPRHLGPRVAIVAVAHKLCMRAAVVLMKQRPYEIREKVQSAPLTQEETVPQGTTRRRRVPGEKIS

SEQ ID NO: 326016 - protein, 342 aa, unidentified
MEHYAGIDVSLESASLCVVDATGRIVREAKVASEPDVLIGWFRGLEFAVTRIGLEAGPLSQWLYAGMREAGLPVELLETRHVRNAFKAMPVKTDRKDARGIAQLMRLGWFRSVHCKSLPAQEVRALLTARKLLQTKNHDVEMSLRGVLRGFGLKVGRTTPRTFVGRIRELVAGHATLSTVAEALLAARGTLFEQWQKLEKRLRSLAREDRRVRLLMTAPGVGTIVALTYASAIDDPGRFRSSKAVGAHFGLTPKKYQSGETDVTGRISKIGDGGVRTALYEAANVILTRPVKGSTLKSWGMRLAARTGMRKAKVALARKLAVVLHRMLADGTSFLANKAVRP

SEQ ID NO: 326017 - protein, 427 aa, unidentified
MPYRIAATDVHKRMLAVVVSDVEVAEEFEFERRQFGTSPAQLRLLAEWLVERQVKEVVMESTAQYWRPVWEALEQYWKPICQKWEGASAAWGALHLAQAQSNRGPRGRKDDFADAERLVKRLVASELILSLVPDPEQRLWRTVTRTKYQLRRNRVQLQNRLEALLEQAHLKLSSVVSDLLGVSAWRMLKGIADGETDPAVLAGMAEASLRATPKELYDALSPAQELHPVYRRLVKMALDELQLIDQQISELDQEMAGLLRRHQDQVQRLAEVPGLGVDSAQQIIAEVGATAATFPSPGNLSSWVGACPGKEETAGVNHSRRSPKGNRHMRRLLNQAALAAVKQQGSIFQILYRRYVPRMGHQQTIAVIAHRLCRLIWKILHQGVRYQERGPDVTERSQRQRTARMIRQLRRLGYRVELVSPPSPVPA

SEQ ID NO: 326018 - protein, 400 aa, unidentified
MLSIGIDVSKGKSTVCGMKPGGEIVYTPFEIQHTREGMSELVSLLRSSGEEVRAVLESTGSYHCPVVAALLENGIFVSVVNSLRMKRFCSQSIRKVKTDRIDAMQIALYGLAYWQELQPTKLPEDTYRELQLLARQYYQMTSLLIKAKVDFNAICDQVLPGMQELMNDHAGRHKLSDFVLRYRHTTRILEMGETRFRKDHCKWAKKKGYRNCERMAALIFATAQNGIPVLPNAPSTQIVITEAVRVLHTVEASRDAILTQMQALAKTLPEYSLVREMPCIGDTLAPRLIAEIGDVRRFHSKRALIAYAGIDAPPYQSGKFCANNRHISKRGNRYLRKTGYEVMQSYVMHKPANDPIFTFIEKKRGEGKSGKLAMVAGLNKFLRVYYGKVTELYRSLSAIE

SEQ ID NO: 326019 - protein, 388 aa, unidentified
MNYAGIDISKYKHDCFILSDFGEVIHAGFSFANNVEGFKTLEQELRKCGEGNVRIGLEATGNYGINLKLFLEKIGFDYMEINPMLIKQHIKSTTLRRTKTDKLDTKAIADYIKEREYRPNPEGFYDLFALKQLTRLRSRLVGIRSRYLVRLTNVLDCIFPEFKPFFGNRFSLTALYILANYKTPEAIAKMNSRSYDTLRRKSRGTFSMDKFVTLKDLAKNTVGVSHKCYVVELDSLLDLYCQIDAKIEELETEITQMMETINSPTLSVKGIGPVSVAVIISEFGGISRFAGPNQMLSFAGLEPGYFQSGTSEHKGHMVKRGPSHLRCVLINCCRSMRLHNEVFATYYRKKVAEGKPEGVVLSHMAKKLVRLIYTLETTGVAFDPEKLR

SEQ ID NO: 326020 - protein, 353 aa, unidentified
MLIIGCDFHPGFQQVAIFDNQTGEYRERRLGHRAEAEQFYRSLAGQSVRVGMEACGHYPWFERLLAELGYELWLGDAAAIRASVVRKQKTDRRDAEHVLDLLRQDRFPRIWVPSLEERDVRQLLVHRHKQVQGRTRVKNQLQAMALSQGVQKRRKLWTAAGRAELEKLELLPYAAQRRQQLLEALDGLEAEIEQLNRRVEEEVAQRPAAVRLQTHPGVGPVTALAMVLTLGPAERFASGKQVASYFGLIPSEHSSGGRQQLGHISKQGSSFLRFLLVEAGQTAARHDVELGRFYRRLAGRKHRALAKVAVARKLAVRLYLMLREDWTYAQLCRAVVQASPSHPVVGRQHRALE

SEQ ID NO: 326021 - protein, 428 aa, unidentified
MDFEVKHLICAGLDVHKKTIVAAVCMTDPVTLEAAYKVKSFSTNNSQIAAMRDWLLSYNCHDVCMESTGKYWIPVFNILETHMHVVLTHPKYVKAIKGKKTDKRDAKWIANLFRFDIVKASFIPPADIRALRELSRYRLRLSYMRSAEKNRFQNSMTISRIRIDCVLTDPFGKTASSIMDYLLSDVPFDETECAKLIHGRVKASNEEIFDSIRGFEILSEQRFKMSHAKQHMELLSSYMDDIETELFRLSRSYDKVIKRISGIVGFTERSALFVISETGADMGVFESAKHLCSWAGLTPANNESANKKKSTRCSKAGQYLKTLLIQCALAAVKSKKNPYYAIKYKRLVKRRGRKKAVIAIARMMLTGIYHMILNNEEWKPDDYEAIIHPSKPVKVALTLDNVIQFLGEQGADPETLKLLQQQCAVTPG

SEQ ID NO: 326022 - protein, 349 aa, unidentified
MKTYYVGMDVHSATIRIAVLNGAGKVVMELVIETGAERVRSFLKQLRGKVYVTFEEGTQANWLHDIVRSLVTEVVVCDPRHNKLLQSGNKNDRVDAQKLAELLRLGSLQAVYHGDNGVRTLKELVRTYDCLVSDTTRVMNRLKAIYRGRAIACAGHEIYRQDRRVQWLAKLSEPGAKQRAGFLYEQLAALKPLRRKAKLAMVKEARQQPAYRWLMSVPKLGSVSVAQLLAVVGTPHRFRSKQQFWTYVGLAVVTRSTADHEVVNGVLRRSQRPVSTRGLNRNHNHLLKRVFKNAATSACHSGPFKAGYDVRVARGMAPSLARLTIARQLAATTLALWKREEQFDPERKK

SEQ ID NO: 326023 - protein, 386 aa, unidentified
MARKRTLSTLDTSIAYEAVGLDLAKTDVALAAFDSDHKEPYLIDRIPYDKLYELLANMAPTLVAMEPCSGAHQIAEQIQELGHEVMMISGHVQAWVKDHCNGQKTDLNDAFAILNLAYDRWLTPIRGKTREECRLLALQASYRQLKGQRTKTMVHVKATLHAWGFPIRAGSFNQKALHELIDANREAFGDEVVETLHLMINRVHDLDHDIATVLKLLTEATQRDPRASLLRSIPGFGVLTTSRWCAVVGDIARFDSPKQTMAFIGLVPNNRITGHHTETSSGREARGQGKMSKRGDKMLRSLCILGAGALCLMVRNDRLPDCPFVASIKERLASPRPWFKVLVYVAAKLVRIATALLKYGETFSFEKAGISKAVLKQWELEQAKAA

SEQ ID NO: 326024 - protein, 385 aa, unidentified
MFYVGIDIAKNKHDLACINETGEAVIANFRFANSYQGFHQLKLKLKQLSPITQDVQIALESTGHYNYNIVVFLRELGYNVFAYNPFIIKQFAKSQSLRKTKTDRKDALLIARKLRSDVTPEYYQTDKSMDELKELTRYQNRLIQSRSKCKNLYIRLLDIIFPELHRVVSNLHNHFVYELLTNYPSPQKIARARFSSLLKIKRLTADKANQIQETAKQTIGNASTVLSLELVQLIESIQHYDKQINQVQEEINLLMIKLNSPITSIPGIGSRLGAIILAEIKNIHNFKNPNQLQAFAGLDPSIYQSGQMDNTGHMVKRGSSYLRYALIQAAKLISMYSPHFKAYLRLKISQGKHYNVAVTLVAKKLIRIIYHLLKNNQTFDEAKLR

SEQ ID NO: 326025 - protein, 421 aa, unidentified
MTQSAPHTFAAFVGIDWADAKHDVCLQAAGSAKRECFQLEHTPEAIDAWVTTLRTRFNGQPVAVCLELNKGPLVFALRQYDFLILFPLNPLTLARYREAFTPSRAKDDPTDAALQLELLLTHRDKLRPLNPQSPTMRALAQLVEHRRRVVGDKVRLTNRLTSTLKNYFPHALQWFQDKDTLLFCDFLSRWPTLKAAQLARRSTLETFFRDHHVRSSDVIDKRIHAIHAASPLTIDEGVIAPHALLVQALVSQLRVTLQAIETFDNAIAPRAQSPPDFPLFQALPGAGPVFASRLLVAFGEQRDRYASAAELQRYAGIAPVTERSGKKSWVHWRLQCPQFLRQTFVEWAAESTRHSFWAQVYSQQQRDKGKAHQAAVRALAFKWIRMLFRCWQDRTPYNESAYLQALNSRGSSLLHNLAKEA

SEQ ID NO: 326026 - protein, 409 aa, unidentified
MGIDWADTKHDICIQAADSEDREFDCIQHKPDKIEEWALATHKRFGGPIAIAVELSKGPIVYALQKYDFLVIFPIHPLTLAKYRQAFRPSGAKDDPTDAEFGLDLLLHHPDRLQPLQPQSVVMRSLMLLVEQRRNLVNDRVRITNSLRYALKQYYPQPLEWFDRSIGSVMFCNFIARWPTLKQVKRARKNTLITFFSDHRMHRSQILETRLTAIKAAQPLTLDEAVINPYSLQALVLVDRLRVILQGIEKFEKEIAEVAKQHEDFVLFESLPGAGPAYASRLLVAFGEQRDRYASAAELQKYAGIAPVIERSGKKNWVHWRYQCPKFLRQTFVEWAAQTINKSYWAGEYYRQQREKGCKYQVAVRALAFKWIRILFRCWQTHAPYDESAYLKALKRRGSPLVNPEIVEG

SEQ ID NO: 326027 - protein, 335 aa, unidentified
MRYIGLDVHYRSSTYCVLEENGREVQCETVRGHWPQLLDQLRTVEGPWRICFEATCGYGYLYRELSGLASQVVVAHPGQLRLIFRAKRKNDRVDARKLAKLLYLDEVPAAYVPSQEVQSWRELIEHRRRVMDRQTTCKNAIRSLLRSHGKIAAKGLWTKKGLAWLRQEEMPTAAARLKRDLLLDELGEAKRRVRTVTKALDEIGERHAAVLLLRTIPGVGIRTAETMCAYLDNARRFVRSSQVGAYFGLVPCQDASAGVNRLGHITRQGPATARKYLVEAAWQGVYRSATIRAYFERVLHGRPERRKIALVATAHYLLRCMYAMLIRNQPWHEAA

SEQ ID NO: 326028 - protein, 344 aa, unidentified
MEYYAGIDVSLESSSVCVVDAKGQVLREAKIASEPEALVGWFNQLGVELARVGLEAGPLSQWLYAGMRDAGLAAELLETRHVRDAFKAMPVKTDRKDARGIAQLMRLGWFRSVHCKSLPAQETRALLTARKLVQSKKHDTEMSLRGILRGFGLKVGQTSQRTFASRVRELVAGHPTLQLVAEALLATRAALGEQLSKLEKRVRMLARSDPQVRRLMSTPGVGVIVALTYAAAIDEPTRFRSSKAVGAHFGLTPKKYQSGETDVTGRISKIGDASVRTALYEAANVILTRPVKGSSLKSWAMRLAARAGMRKAKVALARKLAVVLHRMLVDGTTFSAERAAATRA

SEQ ID NO: 326029 - protein, 429 aa, unidentified
MRTESTPGARGPVFCGVDTHADSHWLCVLDWRGRKVLSRQFPADAAGYEALAGAIAAAGEPACVAMEGTSSYGAGLTRHLASLGMPVREALSPARMQRRRPGQGKCDEADAERAARAAMSGSKLGTPKSQDGWVDGVRCMLAARSGAVKARTSAINTARSLLTTAPEGLRSRFRGMGGPRLMGELPSVRAEGALGAALGALADLWAAARDAALDMERAIEASLEENCPALLAMYGCGPVSAAKLAVAAGDNPGRLRSEASFAAICGACPIPASSGKTVRHRLNRGGDRQANSALHEIARQRVMRDPETAEYAERARARGKSDREVMRCLKRYVAREAYRALMRPHEIRRPEDASELVAARRAARVSQVRAASILGTSEKYISMLERGQRELKPIRRAYEAWVEAGLPLDWDRQAFEAERKTDSKKHLAK

SEQ ID NO: 326030 - protein, 472 aa, unidentified
MRYIGLDLALTAAHKAVILDEKGQAITNVMSVKTTATALEELFQCAREAAPADEPLVVVMEPTGMAWFPVAVFCQRQGVQVYLVNSQQVADLRRYYRKHAKSDRIDARVLARLPIVSPEKLHALQLICAAQLACQRGCKELDRLSDLTTAIQNRLRAIDRFAWPGLEQVLPDNASTLTRWFREHWYDPSQVIALGAAGLQQAWQKSGLKSTEMPPSDEWAAELVQLAQAVLALYGSKAEFLDYAYLQAEVSREQALLAMLEAEHKRLQLKTVRPLYRQLHPSRNLESLRGVGQDGAAVYFSFIGNPERFPNHAAFRGWTGMIPRSSQSGSSEAKGLHISQAGPDLIKKFSFMGAETARQWDPQIAAIYYDQIVQHGKHHTQALCACATHLLDRIWTILKEDRPYELRDVDGTPVTARQARQMIDLRYTVPKEVRQRSNQRTRRTRREQQAEKKHMRESRPNMVRGKSQTSSE

SEQ ID NO: 326031 - protein, 360 aa, unidentified
MDKYIGFDIDSKKTIACVVQRGKKDRFTTLKTDINRMKDFLNGQRRDGEKLHLTFEISGEAGYRHDALINLVDSITVSNPTKMTWIYRTAKKNDRIDSRKQAVLLSIGEVPKVYIPNREVRQWRVTIQHRRKMVSSITQVKNRIRMLLKANGFVKAAYKGSWWKVANRVWMRGLCEQAEINSEELWRMNLIDMLEGLWLLEGQLKRTTKYLDGYLDKQPGSRLLMSIPGVGPRTTEAVLAYTDDINRFQRGKQYCAYFGLTPRLDESGSVRRLGHISKQGPSVVRWLIVESAWRAIRKSPGLRAFYERVMCGQKGRKKIAIVAVARKLLSIMCAMQMTGELFNEQLVCRECGMTGMRRMA

SEQ ID NO: 326032 - protein, 338 aa, unidentified
MDRQYVGIDFHRRRSVVVCMSAAGEKLSSVRIPNDPVAIAAAVEDAGAEPEVVIEATYGWYWVVDLLQASGARVHLANPQGLNWGRRRVKNDERDAIDLADMLRLGRLSEAWIAPPATRELRELVRYRAKLVALRSGLKAQVHAVMAKEGVLPAQGRMFGPAGNAQLDALAMAPSYTSRVASLRDLVELYDREVGMLEGQIHRQLRGHRGYQAIQAINGIGPTIAAILVAEIGDVARFRSAEALCSWAGLTPKHRESDTKTVRGSITKQGSKLVRWALIEAVSRYHGGARLAADFRRIAQRRGTNKARVAVARKVLTLVYHGLRDGQIRCLAQAQAAA

SEQ ID NO: 326033 - protein, 356 aa, unidentified
MTGLAGTIDGVIGVDAHRDTLAAAAVDPVGGFLARTSVGADAAGYRRLLDFAGARVPGRRCWAVEGAGSYGAGVTAFLRAHGERVVEVGRPKRPRRRTGAKSDALDAVRAAREALAQDHLGAPRRRGDREALRVLLATRHSACVAKVCAINQLKALVVGAPEELRAELRGLTTNRQVVRCAALRDRPARSLEHRMTVRALRSTACRIQLLDAEAAELRAALDRLVAAVAPWLLELPGVGPISAAQVLVSWSHAGRLRSEAAFAALAGVSPIPASSGQVTRHRLNRSGDRQLNRALHTIVLARLRDDPRTRAYAARRRSEGKSARDVRRCLKRMVARQLFKLLERLDRPGVELGSIW

SEQ ID NO: 326034 - protein, 345 aa, unidentified
MTEAYDGRQVVGMDLHRRRSVLVRMTEDGRKLETARIVNSPLALRGVIARAGHRPRVVVEATYGWYWAVDVLEAAGAEVHLAHPLGVKAFSYRRVKNDERDCADLADLLRMGRLPEAWIAPPPVRALREITRYRHKLVQQRTSCKDQVHAVLAKSGIPVTRSDIFGPGGGIWLDGLPLPQPYAGKISSLRALTGVLDSEIARLEEQAAALLAGDRGYAAIRQLPGIGPVLGAVIAAEIGDVTRFRTPGQLASWAGLTPRHYESDTKVIRGHVSKQGSRMLRWALVEAIQHQPAGTRPRQVKDAIIARRGAEARSIAKTAAARQLLTLVFYSMRDGYIRRAASQAA

SEQ ID NO: 326035 - protein, 450 aa, unidentified
MSNGNGVSRGDRNRNARLVRLRSLVPVSNAIVGIDLADNKQMVVVCDHDSKVLARRTFRCKAWDLGVALDWAAERAVAKGFAGVTVACEPTGHRWRVLGELAGRRSMPFVCVQPALTSAARRTEDLTMDKTDEKDAVLIARLTAQLRCYLPEQADETWARLRHLGARREQLITESTGQVQQMRDLLECVWPAVLETAQQPFRSHTWIAGLAVVVDRDGGDLARTRRLGAARFEHAIRREITKRGGLKPCLRIVRVLFAALTDPAGVTAHRRGALERVQLLLLDWIHAQERLTDTETRMVAVLEELQLTELVCSIPGISAIGAAAILAQTGDPRRFATARALVKHAGLAPREKLSGTFKGRTRLTGQGRPGLRLAAWRAVWGAQRANPVYAARYRHLTTRQDNRLKPTQAQSVIAAAILRQLHAVITGRQAWDPTIATHGNRSPMTTPLAA

SEQ ID NO: 326036 - protein, 435 aa, unidentified
MKTYILRPFPAVEPQRTRSDNRSLARPKVSPPDALRGPALFIGLDVHSDSIAVCLAPSDSFEVRPYGVIGGRHHDVLNLLKKLSAAHPGYQLKICYEAGPHGYPLCRCLRAHGYDCIIVAPSKVPRKPGDRVKTDRRDAEQLARLYRAGELAAIYVPDPQDEAVRDLIRARFQVSRQQHRARQQLKMFLLRHNIRYAGKTSWNAPHLRYLAQIKMPFPVQQIVFQEMLNVISEAAARLEHLDQEIERTVPGWRWAPVVRALMALRGMALLHAATLVAELGDFSRFDHPSQLMAYLGLVPSEDTTGNDRRQGGITKMGNGPARRALIEAAWNYRAPARITPQLQKRLEGLPKAVIQISWKAQKRLHHRFCHLSRIGRKKSQVAVTAVARELSGFVWAIGRLIQPRTSTANSGSDTTPTSLADVSSRRSSPRGIHRR

SEQ ID NO: 326037 - protein, 371 aa, unidentified
MNRTTLQMNPRTKTPTLYLSMELSEKSWGLLFSDGQQLSAHSVKVGDMSGVLAHAKSSAKRFGLPPGAQLVSCQEAGRDGFWIHRALEAAGARSLVVDATSIEVDRRMRRAKTDRLDAERLMRLLIRYCAGETQALRVVRAPSEEEEDVRRDGRERDRLVHERTGHICRIKALLVLHGVRDAELDLLDEVVCANGKPLPPRLLRELEREYQRLELINEQLKEIEKERRETLEKPSRLTQCITTLMQLRGIGPQAAWLFSEEFFGWRDFENRRQVGAAAGLVSMPFNSGHGERDQGISKAGNKRVRTMAVQLAWGWLRWQPDTAISKWFRKKFETTKRSKRVGIVAVARKLLIALWRMLKTGEVPIGALMTS

SEQ ID NO: 326038 - protein, 344 aa, unidentified
MLHLGLDLSRRRIDVCVVDDEGSVVEELAAFPDADGLRLLAGRFAGEEVTAVIESMTGARFVHDRLEEAGWTVEIADAARVKALASVAAKTDRIDARLLATLSQRDLVPAIWLPSPGIRGDRELARFRLFLVGRRTSIKNRIHSSLITWGIAVPVTDLFGVSGREFLSGLDLPHRWMETVATSLEVIDHLDGQIACCRQRLVEAGRDDPAVELLTTAPGIGDVLAFTIASEIGDITRFASPNRLVSYSGLAPRVIQSGDTDRRGPLTKAGPRWLRWALIEATIWAAKHPDYAEAHQTIRRRLGPYRGPKVARIDTARRLTTAIWWMLTRDEPFAPRGSRPPLAA

SEQ ID NO: 326039 - protein, 392 aa, unidentified
MNPCALGWDNHRKFSKVSVMEQTPDGEIRAVERARLEHQDKEAMRAWLSHLDPEMPVALEATFGWPWVADLLEELGHPVHLAHPPVIRALAKHEAKTDRCDSDRLGKFQLRGILPESYLAPPEVRQRRERTRYRMALSALRTGVKNRAQAVLHRHGILHDFSDLFGKAGRRFLDDLALPEGSRQALDGCLELLDSLKVLIDEVEQWMVENLKEDDLVRLLMTIPGIGLILAHVIRAEIGQIERFPSFRHLASYAGLAPMSDDTAAREGPRHCSSACNHVLRWAFIEAVHGVGRTKGLRGFRLRQIYGRLCGQGRPKGRKNSAKVAVAHELSKLVHVVWTKRVPYTDTPPPRPGSRGGQRPTQESPTVKTTLRSDQPRHPMVRRRATVRQTLK

SEQ ID NO: 326040 - protein, 414 aa, unidentified
MLYVGIDWAVENHTVTLLTQPGKVLESLVIANTLKGFLTLLDAIRRHIGKDKPAPSPNDVLFIIEDRNQRLVDFLLAQDFIGYLMEPSRMPGYRLRYRSSGNKTDPDDAFIMADVLCRDRDQLPTISPMNATVQTLKTLLMDREGFVRDQTRLINRLTACLRQYYPEALELFSDVAGKTALAFIAAYPDFAAAHRLNREQIQQFLTEHHCPRTKRLERIVELLAQEPIAAPAAVIETKRRLALHIIQQLQGVQATVAEYDAEIQRIGTENAEVQRFRGLPGAGPQIAGGLYTLFGDDRTRFKSAMAVQSLVGTAPRTIQSGKMRVVCFRFGCNGFYRTQAQQLALSALRMSAWAKQYYRGKRAEGKRHQHALRCLANLLMKIAFAIWRDQTVYDENRHLAQIMRHQLRQKSSMA

SEQ ID NO: 326041 - protein, 399 aa, unidentified
MSRVFIGVDPHKLSATIEVVDEAETVLATGRFGTDKAGYTAMRRRVAAYPDRVWAVEGSNGAGRPLAQRLLADGESVVDVPAKLSARARMFDTGHNRKTDPHDAHAVAVVAVRTKGLRVLAYDEQLEALRLLVDRRAELSRARIQCVNRVHRLLAELVPGRSKKNMSTAQAKRILATVKPRDVAGKTRRRLAAEQIAELAVIETKIKALTRELKEMVAATGSTLMELPGVGPVVAARTLADTGDVARFADRNRFASWTGTAPIEASSGEIVRHRLSRAGNRRMNHMIHIAATTQLRHDTEGRAYYRRKIAAGKTKAEAMRCLKRRISDALYRRLRADAAARADAGPGGHHGAALKSSAAGSHPHTGTSDQPQPGPAPTTLPAPTPARKTTTSRRLQPAP

SEQ ID NO: 326042 - protein, 343 aa, unidentified
MQIRSIGIDLGKTTFHLVALSDGGKVLLKKKFTQKQLITFTANLPTSLIGMEACSGAHFLGRALRAQGHDVKLIPAQFVKPFVKSNKNDFLDAEAIAEAVDRKNMRFVPIKTDDQLDLQALHRVRDRLIARKTAVINQIRAFLLERGVVFAKSPIRLRERMPDVLENADENITPRMRNLLSSLWEEWKDLEQQLNMLNLEVEQIASSDAACRRLRQIPGIGPLIATAIVAAIGNGTAFHKGREFAAWMGLVPRQHSTGGKAILLGISKRGNEYLRKILIHGARSVVLNSKRDRVQMGQWMNALEARAPRNVLVVAVANKLARIAWAVLSSGNEYRAISTPMAT

SEQ ID NO: 326043 - protein, 319 aa, unidentified
MAQNDLVVVGIDVAKGKVDACIRRFTLRQTFPNTAQGHRKLVAWLRKYQVSKAVMEASGGYEREWRNVLHDAGIEVRIVDPRRVRNFALSAGRLAKNDPIDAEMIAWFAETFRQAPGQIPDAAREELAALAKARKALVDVKIRLLAQNEHAAPEPARKAHARVIKSLAAEIAKLEAAISARVKAVPEFAELAEIIESVPGLAQATSAILIAGMPELGQVSDEVAAALIGVAPYDDDSGKRRGERHIKGGRRWVRNAIYMPCLGAATQNNPVLKAFYQRLLAKGKEPKVALIACMRKLIIILNTMIARRQKWNPGRHAVA

SEQ ID NO: 326044 - protein, 417 aa, unidentified
MKQNTEIAAFVGLDWADQQHVLSMQAGSDPRQRLTLDHTPEALQSWIDRLRQQFKGSPVAIAVEQKRGALIYALMHVDFLRLYPVNPQTLAQFRKAFYPSGAKDDPRDADLLLEILMRHRDRLRVWTPDNELTRSIQLLTEDRRGLVDERTALTNQLTAALKSYFPQALEWVGDLQTPRACAFLQRWPSLQQFKQATSSSVRKFYRAQRYRGEDRLKLWLSNITTAQPLTQDSAAVLAGSMKVQALVPQILLLTQSIERYDQKIAALFNQHDDSTLFGSFPGAGPSLAPRLLAAFGSDRARFEYAAEIQQLSGIAPVTEKSGNSHWVHWRLACSKFFRQTFQEFAGQSILRSEWARAYYDLQRQRGKSHHAALRALAFKWIRIMFRCWKDRKPYDEAVYCKSLRRRQPPAIEGMATS

SEQ ID NO: 326045 - protein, 341 aa, unidentified
MKHPQFAVGIDISADDFTVSISESPGTALYDTRTFNNNLEGFKELKSWFMNLKIKPKNMIICMEATGVYGEHLCYFLHENKYTIAVDPPLKVKRAFKIDGHKTDAVDSLQIAEYALRFFDKLCIWEPREDIVEKMKALITTRELLVKQKTAASNSVVALNRKAVRPAFAIKVLKSNVNTLARKIKALEKEMENLIDQKPDMRQSVNILKSVPGVKLLLAANMLVITNGFHSVKHHKQMASFLKIAPLQHQSGSSIFKKPKTPKYGPAVMRKLLHLAARSLVTHNPDFQNYYLRKQAEGKEKKLIINNVENKLVKIMCALIRDHKPFIKHYIPIHPHYLKIA

SEQ ID NO: 326046 - protein, 343 aa, unidentified
MKLKKVTTWNDFGSCPAIGIDVCKRHLDIAGLCEATGYSKRINNTSRAISCFIEALIRHNFQGTILCEATSHYHILLAVMLCEAGFDIRVINPLLSSKHAKSSIRKTKTDRVDARILAVMVLTEPDLPPPLKLTRSQCAVRHTLGLIHSQEKHLQGMNRALASYQERLGQLGLSAGKAYRQTAKTIKQLQHCHEKLLAELESYLLEIRPEQQEVIKRVSDVPGITRRNAALFTFVLDPTVSGAKSWMAYAGLDVAIRESGTWRGRGRITKRGPAWLRKRLIQAAWGAAMTYPQGRQYYDFLKAKGRKHKEALVIIARKLLSIMHSLIVHEKKFDHTRAFQIVA

SEQ ID NO: 326047 - protein, 332 aa, unidentified
MMNMHSQGWVASEAARPNAGIDVSKEHLDVHLHDAGWRVVNDASGWDALIAKLKESQADLVVVEATGGYERGLVTALHRAQIDVARVNPRQAREFAKSMGVLAKTDRVDARCLRAFADVLARHKDRHKYITLPADPERELLAALMTRRRQLVDMRVAETNRLEGATARTVRSIRSVIKTLDKQLQDIDGDIDQQLEQHFKPQKELLDSVRGVGPVTILTLTSALPELGRLGRRQIAKLVGVAPLADDSGRRKGVRRTAGGRSEVRAVVYMATLTAIRHNPVIKTFYGRLVEAGKPKKVAIVACMRKLLTILNAIVRDQAPWRDAALTSSRST

SEQ ID NO: 326048 - protein, 348 aa, unidentified
MKIVPKGAVSYGIDLGKSTFHVVGVDRDGAPIQRIKLNRNNVLQFFTLAKEAKIGMEACPGSQWLARKLRAIGHRVFILPAQFVKPFVKSNKNDIIDAEAIVEALNRPTMRFVQIKTEIQSDLQAIHRIRDNVVAARTKVVCQARAFCLEYGIGMRPSVGAFRKDIAKVLSDESNDLTPMMRGLLRDLVEDFNTLDQRLENLNKQIASIAARDDQATRLATIPGIGLLTATALVSAIGNAVQFKKARDLSAWLGLVPAQHSTGGKTTLGSISKRGNAYIRRLLIHGARSVILHLDRDRSALGRWIDSLEQRVCRNKIVVAIANKIARIAWVISRNPGSLYLEKSAMPA

SEQ ID NO: 326049 - protein, 354 aa, unidentified
MLIIGCDFHTRYQQIAMARGETAEMIAERRLDHASGEARAFYRSLQGSPEPVRVGIEATGPIHWFERLLTELGHELWIGDSAKIRASEVRKQKTDERDARLILDLLLSKRFPKIWVPTPAERDLRQLLWHRHKLVSMRTMLGNQLHALAMSQGLCRKQKLFTKKGRAELGSLTLGPWAGRRREELLKLLEQLEPPIAELDRAVLEEAKRREDAVLLMTHPGIGSVTSLAFVLAIGPITRFQGSRKIASYLGLNPTEDSSGGRRRLGGISKQGNTMVRWLLIEAVYPAVRKDPALRQDYQRLKFRRGHAVAKVAIARKLAVRMYWMLRSGADYAQLVRRQGSPGGTLMNASSLLA

SEQ ID NO: 326050 - protein, 429 aa, unidentified
MNCTQNKKIEQVKETTMIVGIDVGSEKHYFRAFNWRGIELTRKPVAFSNSMEGFNSFYNTIVELMQKSELEEALVGIEPTGHYWFDLGQFMGEKDIKFVMVNPHHVHKTKELDDNSPSKNDRKDPRVIAGLVRDGRYFYSYMPTGAYAELRNASNRRFVLVEEQTRAKNRLQKWIAVYFPEYKGIYTHIDAKGGMLVLKKAPTPEEIVRLGVEGIIKIWKDAKLRGNGHKKAMLILAAAMRSIGLKAGLTEARMEIQDLIEDYELPTKRLERVNDLIKGLCQQVRYADKLLEIKGIGITTVAGFIAEVGDITRFDSTKELQKLAGLELVADSSGKHNGKTKISKRGRKRLRYLLFEAAISVVGKNEEFKEIHRYYTTREKNPLKKMQSLIVVACKLIRVFHAILTKGIRYDASKMLKDIRHPGEQLKAA

SEQ ID NO: 326051 - protein, 418 aa, unidentified
MGLFVKFTPFLLSINDYLSCFGVLLGCVWIVLGFVWRVTKDVAGLLFLLRWLTRRGRYAACGQCPASGRARDGRFYCSRLASVITVGIDLAKNVFAVHGVNAAGKAVLVKPLVRRAKLLELIATLPACLIGIEACTGAHYWAREFQKMGHTVRIMAPQLVSPYRMGGRHGKNDAADAAAICEAVTRPNMRFVPIKSVEQQGQLFVHRAHQGHVSERTALINRIRGLLSELGIVLPQAFKAFLSGVAQVLEDLPGYCNQVIGDLLNELYHIEEKIKNSEKLIQQLARDNSAAQLLMQFRGIGPMTATAIVASIGNGHDFKNGRQFSAWLGLTPRQQSSGGKARLGRITKAGDSYLRTLLVLGARSVLLGAAKNDDPVSRWALQLKERRGYGRALVAIAAKNARMCWAMLHLRDEFRFPA

SEQ ID NO: 326052 - protein, 459 aa, unidentified
MGNARKGKIPAQLVEDEDYQLRHERVAGIDIAKAKADVCTRLPPSRAGGRRASRVEEVPATAREILALAGRLLADGVELAVMESTSDYWRIWFYLLEGAGLRVQLVNPRHARQLAGRPKTDRLDAQWIARLAEMGLLRPSFVPPPEIRALRDLTRSRLQLVRDRTREWQRLEKLLEGALVKLSSVVHSLARTKTARVIVEAIASGESDPGTLAGLAAGRVKGGRGAIAGALEGMQVRDHHRTLIRVHLDHIALLDRSVAAVEDEIEAALDAIPAAWGADATGETGPDAGRGPDPAALPAAERLAEIPGVSPALARAIIAETGLDMSIFPTAAHLASWAGLAPVASQSGPRTRKPGKGHGDAYLKGYCTQAATGAAGTGTFLGERIGRLSRRLGGNRARCAVARSILVIIWHLLSDPGARFADLGPGWHDSRADRDRKIRAHVRQLQALGLNVELSEAAA

SEQ ID NO: 326053 - protein, 412 aa, unidentified
MEVLYPHCAGLDVHKNTVVACVRHTVDGTIKREVRTFKTTTKELLALSEWLAAEGCTHIAMEATGVYWKPVWHILSDGDFALVLANAAHVKNVPGRKTDVNDATWLADLLAHGLIRGSFVPDQQTQEMRDLLRTRKQLVRERSRHVQRLQKTLEDANIKLDSVASDVMGLSGRKMIEALIAGESDPEQLAQLAHRRIKATPEELCEALRGRVTRHHRFLLSVHLQQIDAIDQVTRDIDQEIDAHVEPFRDTVLLLTTIPGVDELGACVILAEIGRDMSRFPTAGHLISWAGLCPRNDESAGKRRSTRMRKAAAWLKTTLVQCAWAAARKKASYLQAQFHRLRARRGAKKAIGAVAASILTAVYEMLKTGALYEDLGSHHFDRCGKRRQIHRLVSRLHNLGYAVQITPLPADA

SEQ ID NO: 326054 - protein, 351 aa, unidentified
MKEFIALDAHKRYSWMEREEVKSRKIRHARIEHAPGAIREGLQGREKGSPVAVEATGNWYWIVDETEQAGLEPKLVHPRRAKLMMGLVNKTDKLDAHGMNQLQRNGTLPTVWIPPRELRDQREMTRARMVLTRHRSRLKNRIQATLSKYGWTGGEASDPFGKKARRELSQAIGGLPPQTAQITEMLLKQLDFGQGQIEEMESKTRQLVKDPAQMDRSRSLPGVGWILSAVIALEVGDRKRFASADRYASYSGTTPRVHASGGKIWYGRLRPDVNRYLRWAYIEAAHSVCLHRKTHPERHVSQLYERIRERKGHGKAIGAVARHLAEATYHVWTREEPYQDPALRKGQSREV

SEQ ID NO: 326055 - protein, 400 aa, unidentified
MKGFLHMKLIGIDIGKNKHFFCIMDQQTGEIISQPVSFSNDKEGFDFLVQKIKSYPKDSILIGMEDTGHYHFALLKYLLDLQYTVALINPKTTDFNRKMQGGITKNDKLDTINICDVLDTPERKKQYRISKVNSFDLYEQKQLTRHHHNLKEEENVYKNRLQKCIDIVFPEFNKLFNSKYGTVYMNILKTFGSAENIANTDIRTIRKCFEIEGRGNRISLTPERLKECARSSIGISSSAEVIQIKHLTAQIELIEEQLTEIDKKIEEFSIQNNSPILSIPGISHFSGTSILAELGDISNYSKPSQIIKFAGVAPLHYESSQFNAQHTSITKKGSKYLRKTLYQIILPVIRHNQVFYKYYQLKISQGKGHRCAQGHCVRKLLRIIYHLLKTNQQFDPQLLR

SEQ ID NO: 326056 - protein, 352 aa, unidentified
MLYVGLDIHDKRITICVLGETGQIVRRAQVRTIDEMMRLLQALPDRFQVCYEASCGYGHYHDLLCPIAAGVTVAHPGRLRLIFRSRDKNDRKDAERLAKLLYLGEAPAVHVPAADVRTWRELITCRSRVVAKRTRAKNSLRTLLRCAGVVPPGRAALWRKKGREWLRRLELPTASQRLRLDLLLEEVEALTRQADRIEEHLNQQAKHSPAVLRLRSIPGVGVRTAEAVAAFIDDPHRFRDAKAVGRYFGLVPSQDQSGDRNRLGHITREGPAVVRQLVAEASWQAVRRSPTVRAYFERVRRGDPQRKKIALVATAHYLVRVMWSLLKHGTDWEEGVAPADEPEGATPAIATA

SEQ ID NO: 326057 - protein, 400 aa, unidentified
MLETKIFYDTVGLQHFLKQLDQLAGEQRHCAVAVMESTAHYHRILETYLRRSGIDVVVINPLQSGSMKNLEIRKIKNDRTDAKRIAQLYLFKMLRGNAVDSILVGALKDLTRQRSDIISERVKFSNKLTALLDQGFPGFRKVFSSLRTKSALAVLARFPGPEEICGANRIDIAKTIAFAAGRNTESAYAVKKANHLLDIAEQAMQLQVERGSFKTLITLFAEMLIQIQRAADQIERQIFETAQCDRTFWSQVELLTSIPGIGQYAAVVILAEIGDFSRFKKAKQLVAFAGIDPAVKQSGTSAYKHNKISKRGSPYLRKILDTCTHVAAHKGRNQQPANPILAAYYEEKRSVKPANVAQCACIHKMLGYIFSVLRNQKPFELRSPEEHLALMRSKTADIAA

SEQ ID NO: 326058 - protein, 362 aa, unidentified
MGDGSKDQPQMTAGLDLGDKYSYLCLIDTVSGEVMEEGRLRTTPEALGRRFSSEQPPMRIAIEAGTHSPWVSRVLEECGHEVLVANARKLRLIYANKRKTDEIDAENLARLARLDPKLLYPLKHRGEDSQAHMALIRSREALVSCRTQLVNHVRGTVKSLGHRLPKCPARSFHKKAPSHIPEALRPALGPILEQIASLTERICEYDRLLETISKEHYPHETELLRQVEGVGTLTALTFVLTVEDPYRFEKSRSVGAYLGLVPAQDQSGDRNPQKHISKEGDEMLRRLLVGSAHYILGPFGGDSDLRRHGQKIASRGGKNAKKRAVVAVARKLAVLLHSLWMSGEIYEPLRNAHRSGGRQEAA

SEQ ID NO: 326059 - protein, 356 aa, unidentified
MDKYIGFDIDSKKTVACMVEKGKKERYATIGSDVQSMRNYLKGQKSDGSRIHLTFEVSGQAGFIYDSLIDCADTITVSNPSKMTWIYRTAKKNDRIDSRKQAILLSIGEIPKVHMPGAEIRQWRNVILHRRNLVNKTTEVKNRIRAVLRSQGFSEPYQKGSWWKRSNRLWMRGLSEQQVSSIELWRMNLCHLMEQLDLLDGQVKRVTEYLDLYLGRGAGGKLLMSIPGVGPRTAEAILAYTDDVSRFGRTKQYCSYFGLTPRLDESGTSRRLGHISKLGPSVVRWLLCESSWKVIRKSSAMRAFYERVKAGQAGRKKIAIVAVCRKLLSIMRAMLETGELFNEELVCRECEVKRAC

SEQ ID NO: 326060 - protein, 453 aa, unidentified
MKRKNVSMKVVNPQAAGIDIGSRSHFVAIGQADGDVKEFGVYNEDLNALAHWLIQNDIKTVAMECTGTYWQNLYTSLQSVGLEVILCNGKFTKNIKGKKTDVQDCQWIQKLHTLGLLSGSFLPDEASEQLRTYCRHRTNLLGLAASTTHKMQKYLQLLNLRLDIVVKDVTGLTGLSIIDAICKGEKNPEKLASLRNGNCKKSEKEIAKALQSNGRKDYLFALTQEYRLYLNLQDQIKECDQEIEKMLNEHINANDEKKQHYIEKKVHKRVNKNTPKNIDINLLAYQYYEGVDLLAIEGVSHATVLTLMSEIGTGINKFSTAKEFSSWLRLSPNTKISGGRVLSSKISKGSNRLKIALRNAANAIGNLKDTALSNFFKRIAFRKGRISAISATARKLAVIIWNMLVKKVPYKPETDYEFLDQKRKRKVLEMKKLIHKFDITPDDLGLQLNINNL

SEQ ID NO: 326061 - protein, 411 aa, unidentified
MRLFVGDDWAEDHHDVEVMDEAGKVLAKRRLPEGVAGIAQLHELIGRHLGEDADEAEVIVGIETDRGPWVTALVTAGYRVFPVNPLQASRYRERLGVSGAKSDAGDAHMLADMVRADSHQLRPAAGDSAAAEGLKVLARTHKTLTWERTRAVQRLRHQLREYYPAALEAYDDLDAPDTLELLGKAPDPARAAKLTRAQVSAALKRARRRNITDKATAILAALRSPQLGQPAAVTAAYAATVRSLIAVITVLNEQVKILQRQVEENFGRHPDAEIYQSQPGMGAILGARVLAEFGDDPHRYADGKARRNYAATSPITRASGKKKVVAARFIHNDRLVDALNAQAFTALRASPGARALYDELRARGIEHNDALRRLANRLVGILHGCLKTRTLYDEATAWSHRQNLPQSSVAA

SEQ ID NO: 326062 - protein, 323 aa, unidentified
MSERVCGVDVHRDSLVATIMGDSLKEAGRFINDADGVNGVKEWLKQYGCSRVVMESSGIYWVPLYLALEDAGFDVLLANAWRVKGIPGRKTDQSDSEWLAHLLGSGLVKPSYVPEKRVRELRELTRLRVKLVGTRTAFKNRCHKVLNRVNIRLGSKLSDVFGKAGKEILEGLMDGKTVDDILQHTKNRWLKKRADEISAVVKGVLSQSDIFVLKQCVDMVNEVGERILRVDAQIEMLVNERDVDIVSSIPGVGRRSAAAITAEIGDAKRFLDGKKIASAAGLAPSVYQSAGKSLTGGITKQGSKWLRRSMVEVAHADVKKKGF

SEQ ID NO: 326063 - protein, 343 aa, unidentified
MQAVTTIGLDIAKSVFQVHGVDVQGKVIIRRQLKRRHVLALFRKLPPCLVGMEACASSHHWSRELQVLGHTVRLMPPAYVKPYVKRQKNDATDAEAICEAVTRPNMRFVATKTPEQQSCLMLHRTRHLFIRQRTAVINAIRAHLAEFGIVAPVGRHGVDELLRIVADASDQRVPEIARACVAALGAQLRVLKVQILEFDRRIMAWHRSNAASRRLDAIPGVGPALATALVASVADPWAFRSGRDFSAWVGLVPKQHSSGGKDKLGGISKRGDRYLRSLFTTGALAVIRYAKIHGTRHRPWLTALLARRPTKVAAIALANKIARIAWAMMAKGERYKEPAALAA

SEQ ID NO: 326064 - protein, 343 aa, unidentified
MEKLVIGIDFSKETLNFCCLQGASNRIVKEAVVSNNQNGCKEMIRMLRELYPKARVSDFLFCGENTGCYSMEVSDYLFSKKYVMWLENPLQIKLSSGIRREKTDKVDARMIAEYAFRHQDKIKPYNPQTESIQELRFWLKTHDALKESRKSLINLSRSMKHVPHTLQKSIDELTEQLKRTDKKIKELLKEDQELASNAKLAMSVPGISYVTTAAILVDTRNFTRFTDARKYANHTGCVPHKHSSGTSVYRRPHVSKASNRYINSLLTEGSVSLMTHNKEMREYADKKRREGKSNGCIINNIRNKTLHRLFAVIRNNRIFEKNYRCELKKEHHDVLIQHNALFE

SEQ ID NO: 326065 - protein, 443 aa, unidentified
MKPLPVLDPKAAAIDVGSEKLHTSIAGDTPKVFGTFTADLEALRDWFKAQGVRTVAMEATGVYWLYLYEVLEAAALEVIVVNGRHVQNVPGRKTDMADCQWLATLHAHGLLRGGFVPPAEIRRLQDYQRLRADHIIGAASQVQKMQQALERMNVKFHDVISDLTGVSGLKVVRAILEGERQPASLLSLCDEQIRKSKSAAVKQSLRGCWKEEHLFGLRQALELWETYQQKIAACDRELEKLLQQLAGPISPQAGADGVELKLAPAKAPGKNSPVIERLQQMLARICGGRDATQIPGLSVYLVLQLISEVGTDMSRWATEKHFVSWLGLGGGRKQSGKRRGQIKVHRNRAGRMFCAAARALAQSIDKALGGFYRRLRGRIGGLAANVALARKLAQLFYRLLRYGMEYVEKGLKAYEDKVLQTEARWLRKLAKKQGFILVASVPK

SEQ ID NO: 326066 - protein, 419 aa, unidentified
MSFKILKFNCCGLDVHKTWIYACIGITDSNNRTEYKQARFSSFTKGLNELCDWLAKYNCKDVCMESTGKYWIPVFNILEQHEIWVTLSHPKYTKPMKGNKTDRKDAKWICDLYMCGMVKPSFIPPADIRALRDLVRYRFKLTCMITSEKNRAQNCLTVSNLKLDDVFSDVFGKSSRSITEQILQHPGEKFDVSPFVDGRCKTPIEEIQAAVDGAISKEQAVKLRQCLDHIDELQKHISEVEREILRLSDKYEAALNLIRTVPGFDKNPMTAIQVLSEIGGNMSVFPTAKHLVSWAGCCPRNDKSDRKIKSTRISRAGSYFKPVLVQVANALIKSKKHPEFAARYRRIKARRGHKKAIIAICRMILTAIWHILTDLTPYTPEGFLESHPVNKEKVLTISQALNLLKQRGYLIKNDPSPVS

SEQ ID NO: 326067 - protein, 346 aa, unidentified
MSGAYEGRQIVGMDLHRRRSVLVRMTDTGQLLETVRISNDPDYLRQVMARAGESPEVVLEAAYGWYWAADTLAELGASVHLAHPLGVKMFSLRRVKNDQRDAADLADLLRMGRLPEAWIAPPATRELRGWVRHRAKLVGLRSCLKNQVHAVLAGAGVAVVMSDLSGPGGRQLLAATRLATESRSRVDSLLRVITALDFEIDLYAKLVGGRLRADPGYHAIQQIPGVGPLLGAVFVAEIGDIGRFARSEQLASWAGLTPKHHESDTTVHRGRITKQGSRLVRWAAVEAVQRVPGHTRLGQTRDRIGERRGRNIGVVAAARELITLVFYGMRDHHIRCLPAPAPTGAA

SEQ ID NO: 326068 - protein, 415 aa, unidentified
MEITAVGIDVSKRKSTVAIRRPGGVIVACPFDISHSSHDLEKLVSILKTTGGDIRVVMEHTSNYWKPIALTLKNAGFYVSVVNAMLIHDFSDNSIRKLKTDRADSLKIANYALTFWNQLPPFNDEDETRLVLKEQSRMYERLASTATSLRNGLIALADQTFPSIDQAFGHAIKNADGHEKWVDFFSIYWHRDCVLRLSIEKFTESYRKWCLRRNYKFRTNTAHKLYALAQDAVPTLPKNNGTKALVLQACKSLNAVCEAKQSTQEEMNRLASLLPEYEVVMQMEGTGPITGPALMAEIGDVRRFKNKKALVAFAGIDAPPFQSGNFESKSRHVSKRGSPHLRRTVFLVANIILTLSHKDNSVFCFMDKKRAEGKHYYVYTIAGSAKFLRIYYARVSEYLRTQEPPAAAICLDCKD

SEQ ID NO: 326069 - protein, 374 aa, unidentified
MRDHNEAYVAFDTSKLRNAVAIAEAGRSGEVRFLGEIDNTPAATAKLVKKLSGKYDRLTFCYEAGPTGYGLYRQIKSLGHECLVVAPSLILKKPGERVKTNRRDAVSLVKQLRGGDLTAVWVPDPQHEAMRELTRAREVAVEDLRRKRQQVSAFLLRQGLHYPGERAWTKAHRAWLVSQKLEYAEHRIAFEEMLLAMRQAQERIERLEQAIRVAVPDWSLAEVVTALMALRGIDFISATAFLAEIGDLSRFRTPRELMAYLGLVPSEASTGDTVKRGPITKTGNRRARRILVECSWSYQHPPRVGKEKQERVAAAPPAVREIAWKAQCRLSARYRALIRKGKLKTVAVTAVARELSAFIWAINRQVANPGAAAR

SEQ ID NO: 326070 - protein, 410 aa, unidentified
MKVLHRRCAGLDVHKAEVVACARVFAGRKVVHEVRRFGTTTRELMALAAWLESLEVTHVAMEATGVYWKPVWHILEADLTLILANAQHVRNVPGRKSDVNDATWIADLLAHGLITPSFVPPQPIRELRDLTRTRRQAVGEAVRHQHRIEKILQDANIKLSSVLSDPMGVSGRRMLAAMAAGETDAGKIAELGSPRLECGRGALIEALSGRVSEHHRYLIGWHLRLLDEIEAKIAELDQRIEAQIAPFRAAIERLTGIPGIKQVAASAIIAEIGADMSIFPTAGHLLSWARIVPRLDESAGKKRSRRVKKGGAWLKPVLVQCARAAARKRDSYYGAQYRRLKARIGDQKAIIAVAASILTAIYHMLRDGTEHADLGAAYLSRREGDSKAIAHQLARRIRALGYQVDLREAA

SEQ ID NO: 326071 - protein, 355 aa, unidentified
MNSAKYVGMDVHAATISVAVRDAAGKLIMESVLETKASTILQFIHGLRGELHVTFEEGTWAAWLYDLLKPYVTNVVVCDSRRNALLKEGSKSDRIDGRKLSELLRANLLRPVYHGEHGLRPLKELVRAYLTLRQDLTRVMNRVKAIYRGWGIPCAGQSVYHPRHRDEWLSKITQAGVRRRAQLCYLQLDMLVGLRQQARQELLVEAKKHPAWKLLRSIPALGPIRAAVLMAIVQTPHRFRTKRPLWKYGGLAVVTHSSADHRYVEGQLQRAKKPVSVRGLDFSHNHDLKDLFKSAAIQASTREGPFREFYDALVAKGMRPEMARLTLARKIVTIAFTVWKKGVVFDAKYLKPQTA

SEQ ID NO: 326072 - protein, 397 aa, unidentified
MISVGIDVSKGKSTVCILKPGGEVLQPPFEINHTADELESLVALIKSFDEEVRVVLEDTGHYHLPVVVPLVKRGIFVCCINALRMKKFCSQSLRRAKTDKIDSIKIANFGLTYWNNLTPTLQNGEIYHELKLLARQYYQTTSLLVKAKINLSNLLDQTMPNIQTVLADNKSNSKLTDFVARYYHYNHILKMGEQGFTTDYCAWAKEKGYRLNERKAAQIFALAQNGIPTLPNSISTRIAVSEAVKLIQSITESRNTILAQMQEFCKSLPEYFIVKDMPCIGDTLASRIIAEIGDVRRFKNKHSLVAYAGIDAPPYQSGTFNASERHISKRGNSYLRKTAFEIMQSLIQHKPNGDPVYDFVQKKRSEGKSAKEAMVAGINKFLRVYYGKVMELYSIAA

SEQ ID NO: 326073 - protein, 358 aa, unidentified
MSKRTWKLGNVKPLALAEGDQIVVGLDVHKKTVYAAVRCNGQELTTWVMPMRPETVVASLAPLKAALKKIVYEAGPTGYGLARALRKAGLPVEVVAPGKTPQPANRGSKTDRIDCRMLAEYAEKGLLKSITIPTELEEADRQVVRVRDQLVVKLRRAKQQIKSLLLQQGIPEPEGLAHWTHDGIEALKSVRLSDQIRLALDVLVEDLEHLVALKRRVEAHLSGLMKQKRHREDSRRLRSHPGVGPLTAGTFVTEVYQPKRFARPEELTSYVGLAPRVRQSGETRREGPLVKAGRGALRALLIEASWTWIRHDAHAAVVYRRLVQNTGSAQKAIVAMARRMAVNLWCMLCRGEEYRATA

SEQ ID NO: 326074 - protein, 321 aa, unidentified
MLYAAIDIHKHAFQAAVFDPESGEVVEARLSADRDSLARWAEEWRDRVSAVAIEATTGWCWVWLELVAMGFDVRLAEPVQARGLLGRRRSAKTDRLDARWLARLLAREMLPESWIPPAEIQQLRDRTRLRKAPAEDRRRWAQRLHAYLLYEGWPCSRSRLLSVEGLRWAASLRLPAHARLQVDSLLAVMAALEAQVATVDHELRRFARNDERCQALQSIYGVGPILACHLLAEIGEASRFRRSEQITRLAGLDPVVEECGETRRRGKLAKAGSPHLRWALVEAAVHAHRATAPDLVLYRATRERRDATIARLTVARKIGPS

SEQ ID NO: 326075 - protein, 525 aa, unidentified
MRERSTMTIGVDLGDEWSHLCVLDEAGAVVERGRVRTTPEALSAWFGKRPPARVAMEAGTHSPYASRAVASSGHETLVANPRRVCLIYGEHTKSDQVDAETLARLARVDPRLLSSIEHRTERQQADRELLRARDALVRTRTDLVNHVRGAGKSLGARLPSYHARAFARKAEQHLPEILRPALAPILERIADLTRTIHELGESIEQVSAERYPVTAHLRSVRGVGPVTGLAFVLAIGDPCRFARSRDVGSYFGLRPRQRQSGQRDPQLHITKAGDGFVRRLLLQCAHSILGPFGGDSDLRRWGLKLIERGGGKTAHKKAVVAVARKLAVLLHRLWVTGEVCDPLRVARSEVAVPARCTRCAEVAQHGLLNGPAGQPRARAAEPAPEAGFRGAGPPPAPASGSGWAGPASRLPGCSAPSSSWPAPSPWPTPSGPQRSHGAAGCRIVASVMKPKSIIDSALQPPREEHARVAREIIASLDGPADQDVDAAWLADVEHRLDEVERGATELVPWDTVRERVTQRLRAVRR

SEQ ID NO: 326076 - protein, 361 aa, unidentified
MSVYVGIDVHRKRSQVAVVAGDGKVQLNRNVVNGSEPMLRLIGGLPARTPVAFESAYGWGWLIELLEDYGFDPHMVHPLRCKAIASARLKNDKVDAAILAQLLRAGLLPEAWIAPLEVRQLRALLRHRASLVRLGTQLRNRIHAVAADHGYDRAASYWTGPGRGWLAELDLPPVSREIVTDCLAFIDALAPQIDRIDGEVRARARADPRVKVLTALPGVGQFTALVIVAEVGDITRFGSARKLASWAGLTPTVRGSDLSVRHGHISKQGSAWLRWVLNQAAQTAKRSPEFAATYAAIARRRGKKIATIAISRKLLTRAYHLLAAAQAAQATSTPGTAGHASADQERATKPRARSLQRHEPA

SEQ ID NO: 326077 - protein, 369 aa, unidentified
MDDITFVGLDVHKATVCIAVAEGGRGGEVRQLGVFENRPEILSKVVSRLSKGGRRLSFCYEAGPCGYGLHRLLTGYGHECIVVAPSLIPMKAGDRVKTDRRDALMLAKLHRAGELTAIWIPDAAHEAMRDLVRARATAVRALAKARQHLQGFLLRHERIYHGARAWTLAYRRWLTTVRFEHPAQQIVLQDYIHAVQEAETRRDRLTQQIEELLPNWSMAPVVAALQSMRGVALVVAVTVVAEVGDFRRFANPRQLMAYLGLVPSEHSSGSSVRRGGITKAGNALARRVLIEGAWTYRMSARVSRKLHDRLEGLPAAVRDIAWKAQLRLCSRYRRLAATGRPKVVVTSAIAREMVGFIWAIARLAQPAPV

SEQ ID NO: 326078 - protein, 411 aa, unidentified
MLLLVGDDWAEEHHDVEVQDEHGRVLGKAKLPEGIVGIDRLHALIGQHVGDEDDDQVQVVVGIETDRGPWVQALLAAGYRVYPINPLQVARYRERHSVSGAKSDPADAHTLADMVRTDRHQLRPAAGDSAIAEAVKVITRAHKTLIWERQRHTLRLRSALLEFFPAAVAAFADLTAPDTLQLLAKAPDPASAARLSISQISAALRQARRRDVPAKAAVIQAALRTRHLGQPSVVAGAYAATVRAQAAILTVLNTQIATMEDQVGAHFGQHPDSELYLSQPGLGVVLAARVLAEFGDDKTRYADARARKNYAGTSPITRQSGKRKFVQARYVHNDRLIDALARQAFAALRGSPGARAYYDQLRGRGTAYQAALRQLGNRLVGILHGCLKSGTPYDEDTAWAHHQQQDQQAAA

SEQ ID NO: 326079 - protein, 368 aa, unidentified
MEEFISSFVGLDVHKDSIAIAVAEDGREAPRFVGTVGYEIKQLLKALHSTGKPESQLVVYEAGPCGYGLVRQLRSRGYCCEVVAASKLSRRPGDRIKTDRRDALTLARLARSGDLVRVAVPDERDEAIRDLSRAREDALRARLKCRQQLKALLLRHGRRYTGRSSWNPAHERFLSTISFSQPAQDIAFAEYRLAVREGHDRVERLTQALRTQTEQWRMKGLVAALSSLRGIDFIAAVTLVAEIGDFRRFSHPSELMGFLGLVPSEYSTGERQRQGDITKTGNSHARRVLVEAAWNYRFQARLSRLMHIRQDGQPKAIRDIAWRAQLRLCHRFRRLRSRKLHQNKICVAIARELAGFIWAIAQQVTVAA

SEQ ID NO: 326080 - protein, 391 aa, unidentified
MATPDTAIQDQTATTFDIATLFVSLELSPSKWFVTSLSPGSKKLSKHMITGSDSNALLDLLARVKGKAEQRMNSPIEIVVIQEAGLDGFWIHRLLLAQGIESHVVEAASIAVPRRHRRSKTDRIDGEMLLRTLMAFKRGEPRVCSMVIAPSPEEEDLRRLSRERRTLVKERTRHINRIKGLLMSQGIKGYQPNRRDCHQRLEALQTGDGRPLPTHLKTEVLRELDRLDLVKRQIAEVEAARNALLRSVQEEARSEAGSPGAQLMKLRSIGPEFASVLWLEGFYRRFNNRRQLAAYAGLAPSPWRSGKVNRDQGIAKSGNPRLRTTMVELAWLWLRHQPNSALSRWFHDQVQGKLGRSRKVAIVALARKLLIALWRYVAEGVVPEGAVFKPA

SEQ ID NO: 326081 - protein, 404 aa, unidentified
MKGPIVSIDVSKGKSDYQAFKNLNVKYTGSRSIKHTKEGFDEIVNLVREMEKKLEAEVCVVYEATGVYHRVLKKVLEDNNIKQFIINPLLSAKTRKNDSLRCPKTDKLDPKSIAKTYYSHSLHNSHKPETIYHELRELSRYYEDILVHIRKDKVAFRAQLDIVFPGYDTLFDDLYSPVSLTVIEKYPHPEMLQKKKINTVSKVIQSKTCHRQAASDTMADKAIEYSKTIYSGCDKDDIEVLILQRFIKKLKEDMAEAERTIGEMIKLAQELPDFSIIKSIPGIGDNLAARIIAELGDMTRFKKKNELVAFAGLDPRISESGQDDGDHMHITKKGNKRLRCLLYLAVTCSIRLKRDNNSIKDFYIKKKQQSNPMCSKAAKTACASKLVRIIYSMCKTGELYQYNK

SEQ ID NO: 326082 - protein, 351 aa, unidentified
MLHAGMDMHKLFSVVTVVDDSGNEVVKGKKLLNRDLEIVEFFKSLQDKLRVVIEAGSNWMWMTDLLDDYGIENVLCHPLKTKAIASARIKTDKLDSLTLSQLLRANFIPEAYKPDQKARSLRELLRYRASLVGKRTGIRNAIHALLARGNISLPSSDIFGKKGMEYLLKLELPPLRRFTLDGYLEVLKALTHEVKKAEEKIKEEYKSSPEAQLLSTVPGVGLILSLTILSEIGEISRFKRARQLSSYCGLCPSTAQSGNTLRHGRITRQGSKWLRWAFVEAAIQASGKPGPLRDFYLKLKKRKGGKIARVAVARKISIYVFHMLKEKKTFAEVISLNRALQGELEADTGCL

SEQ ID NO: 326083 - protein, 343 aa, unidentified
METITTVGLDIAKSVFQVHCVDANGDVVLRRQLKRRYVLAFFQKLPPCLVGIEACASSHHWSRQLQALGHTVRLMPPAYVKPYVKRQKNDAADAEAICEAVTRPNMRFVPTKTPEQQSCLTLHRTRHLFIRQQTAIINSIRAYLAEFGIVAPVGRRGVEQLLEVAANVDDTRLPEVARACVAAMGAQLMALKAQILAFDRRIMAWHRSNETSKRLDAIPGVGPALATALVASIADPKAFRSGRDFSAWIGLVPKQNSSGGKDKLGSISKQGDRYLRSLFTTGALAVIRYAKIHGTKRRPWLTALLVRRPTKVAAIALANKIARMVWAMMTRGERYKEPVALAA

SEQ ID NO: 326084 - protein, 402 aa, unidentified
MEKYAGIDIAKRTHWMCVTDGEGRFLMEPRPYGNDADGLSRMVADLDLCGGDVAVGMESTGCYWRSCYKVLAEGGYPVSVINPVVTCAERKSGNLGRAKTDRVDCLVVADALRKQGIAPTPSPDADAAQLRDLCRFRRAVSESMSRAKIQAVALLDQVWPEYGKLFSDKFGDSSRAVLRRFALDEMDADGLADDLRGASRNRFGAAKASDVLESLRSTCGVPATDALRLQLRLLLDQLDFCAAQLAEIDAEADSLLDAVAPTLPTVPGVGRATAAQIAAEVGDATRFRDAKALVAYAGLDPTRRQSGGFDPDRNRISKRGSAHLRRSLYIAAQASLRADCEFRDFYDRLRARGYSHRYAVCAVARKMLCVCWALMRSGEEYSRDRHRARGKAPEGASPVDAG

SEQ ID NO: 326085 - protein, 352 aa, unidentified
MERYVGLDSHSRSCTLGVMSAGGQRLKSLVVETNGRALVEAVRGIGGRVHLCLEEGTQSAWLYELLKPHVAEVVVTMAPERKGPKDDQRDAWARANELRTGAIETRVFKAPEHLAGLRNAVRGYGFAVTDVVRAKNRLKSVFLSRGIGTDASVYDATKRAAWLKKLSSPHRELAEWLGRQLDQLEPLRAEAERLLLAESKKHPIIRKLSTAPGMGPIRTAQVVAIVATPERFRTRRQLWSYSGLGIVTRSSADWVQDRTGKWVRAQHAQTRGLSRKRHPRLKAVFKGAATTVIAQLADDPLHADYERMLKSGIKPNLAKLTLARKIAGTVLSMWKHEEVYDPKRHCPTPEQK

SEQ ID NO: 326086 - protein, 382 aa, unidentified
MTTAAATHNAQSNTTEATLFVAFELSEKTWKLGFTTGHGQKPRERTVTARQQEHVLDEIAQAKRRLGLPETAPVVSCYEAGREGFWLHRFLQGHGITNQVVDSSSIEVNRRRRRAKSDGLDVRKLLSMLIRYHHGERQVWQVVKVPSVEAEDQRHLHRDLETLKQERASTTTRIEGLLSSQGLRVTSLTKLPEQLDALRLWDGSPIPPGLRRRVLRVYAHHTFLSEQIAEVEAERRAQLQTSSEASIDKVRQLMQLKGVGINGAWLLVMEFFGWRAFKNRREVGGLAGFTPTPYQSGASAREQGITKSGNRHVRWMTTELAWSWLRFQPDSALSCWFRERFGGGGKRLRRIGIVAVARKLLIALWRFLETGVLPAGAVLKEA

SEQ ID NO: 326087 - protein, 391 aa, unidentified
MYVIGIDVSKYKHDCIIMHEDTGEIVRDVFSFDNSRAGFVQFISVLKTLNPTLKKKIGFETTGHYQDNLKMFLADNGLDFMELNALLVHKFKSSLTLRGVKTDKTDARLIANYLCKVEFKPYPKIVYNILSLRSLCKRHFTLIKDRTKYLISITNFLDRTFPELKPFLNDNIKSKTAMFLLRKYGIPSKIANMNIQSYELLRKLSRGKFSVAKFYKLKDLAKHTIGFTYPTDTFEIKSLLNVYDSINEEILKVETKISTLMSKINSKIPTIKGIGLVSAATIIAEIEDINRFVSPDKLLAYAGLDPRIYESGTMSSKGKMNKKGSVNLRRVLMNCAESVIMFNPAFYAYYRKKRDEGKAHRVAISHLARKLVRIIFKLETTQVDFDPSLVK

SEQ ID NO: 326088 - protein, 338 aa, unidentified
MSNITVLGIDLGKSSFHLIGRDSGDHLVFKKHLSRSKLLEFIVNLPPCIIAFEACGGAHWLGRICLRHGHDVRLIPPQYVKPYVKGNKNDFIDAEAIVEACGRPGMRFVEVKAEDSQSQMVCHRLREGFVAERTACMSRIGSILLEFGVSFPKGHSKMKSLFSWLAMQSNVELPVALMAELQVAHEHYVYLNERIAEQDAKIKVRVKQDDRCQLLKTIPGIGDITASQLAAEVGNAQQFKKGREMAAWLGLVPRQHSTGGKPRLLGISKRGNKRLRCLLVHGARSILSKLDKYEGPLYDWLRRLSMTKPFNAVCIALANKMARIAWAVLNQHTPYQAK

SEQ ID NO: 326089 - protein, 408 aa, unidentified
MQVLYTRCAGLDVHKDTIVACVRCVSPPLHQEVRSFGSTTTGLLALADWLNEHGCTHVAMEATGVYWKPVWHVLEDEFELVLANAAHIKNVPGRKTDVNDAMWIADLLAHGLIRSSFVPPQAIQQLRDLTRTRKQLVREVSQHSLRIQKVLEDANLKLGSVLSDVLGKSGRAMLDAIVAGQTDPQQLAELAQGTARHKTAELREALRGRITEHHRMMLKLHLQVVDALKHTLAELDAALGKALAPIRQRARLLTTMPGVSDLTASVVVAEIGVDMSRFPSAGHLISWAGLCPRSDESAGKRRSTRVRKSGTWIKTTLVTAAWAAVRVKTSYLRAQFLRIKARRGAKKAILAVAASMLTAAYHMLRDGTEYNDLGSEHFDHRDRSKTIRRLLKRLQDLGCDVPVAAHAA

SEQ ID NO: 326090 - protein, 459 aa, unidentified
MTKPKPKRSRREREMSPVHAGAAAIDVGATMHVAAVGPGRDPEPVRSFGTFTADLHRLADWFKQCGIKTVAMESTGVYWIPTFEILEQRGFAVVLVNARDAKHVPGRKTDVTDAQWLQRLHEYGLLRASFHPERRVAALRDYLRQRERLLDYAASHIQHMQKALMQMNLQLHHVVSDITGASGMRIIRAVLAGERDPAALAALRDQRVKASEETVRQALVGNDREEHVFALLQAVELYDAYQAKVAACDVRIEAALKEVEAACPPPASPIPAPRHRTRQPNALAFPAREALHRILGVDLTQIHGLGPYLALKLVGECGTNLSAWPSAKHFTSWLCLAPSNKISGGKVLSARTRRSSNRAAALLRLAAVTVGRTETALGAFYRRLAGRVGKAKAVTATARKMAVLFYNTLCHGMDYTDPGASYYEDRYRRRVLTNLQRRAKSLGFVLHPVEPKPGGAGVS

SEQ ID NO: 326091 - protein, 395 aa, unidentified
MITKRRCSVDKAATIEEVRQTVTPPIREIVGEPRSPHFCQTSAADPVQSQGRPAPSQARPHNKDGCRRSSLLHENLVMDGCFVGIDVSKAQLDGHVLGRQSFQHPNSPAGIAQVVTLLQALPVTLVVVEATGGLEVPIARALQKAQIPVAVINPRQGRDFAKASGRLAKTDRIDAETLALFGQSLRPRPQALPDEQTVALDAIVTRRCQLIDMRTMEANRLQQTADVKVRKNLEKHLEWLNDHIDDVDRELGAAVKNNPAWQVRDELQQSIPGIGAGVSRALLAGLPELGRLASRQLAALVGLAPFARDSGQHKGKRHIAGGRSQVRAMLYMGAWSAARSKTPLGDFYRRLRAKGKEAKVALIALAHKMLTIANAVVRTGQAYDASRHGANLVNV

SEQ ID NO: 326092 - protein, 355 aa, unidentified
MKLHRSQTQFNCGIDLHAKNMYLCVMDKEGNKLLHINIKTHDQKSFHELLAPYKHNLTVACESTFNWYVVSDMCEDAGIPFVLGHAFYMKAIHKAKVKNDRVDSETIASLLRGNLLPTGYVCRRQIRPVRDLFRRRTYMVRQRAALEAHLTEMGHLYDFPATSKDFKRRGERLLTYAKRLPDDFGVQMSAAADIRLIEALRVEILSIERAVMQHAKGVDRELLELLQTIPGVGPIIALCILYEVDDFSRFADCGHFISYCRLITPPQESGGKVTGAGHRKNGNPYLKWIFSELNATCRRHSDELNAFAQRLVSRHGPRKAACMLTHKLGRAVFYIATERVPFNLEKFIGGPMKKR

SEQ ID NO: 326093 - protein, 422 aa, unidentified
MVLKGVPMALKIVYQICCGIDVHKTFVVACIASTNKQGVTTYKRHRFSTFTQGLKELLQWLLDNHCKDVCMESTGKYWIPIYNVLEKDCNIVLAHPKYVKAIRGKKTDKKDAKWIADLFKHDLVAGSFMPPADIRQLRDLMRYRFKLTCFMSSEKNRLQNCLTVSNIQLASVVSDTFGKSSQRILDKILENPDDTSFDIEPLIHGSMKKKLPELELAIDGFITPEQAGKLKVIKKHFEDLESRKAELEKLILALASPYQQELGLILTAPSFKNKFTAIGIISEIGVNMEAFPSAKHLCSWAGLTPTNNESAGKKKSVRVSKAGCYIKPLLVQCANSVVKSEKHPEIRNRYLRLRKRRGHKKAIIAIARMLLTALYNMLKNKEPYNAELYRKSDVLPVNREITIEQAILMAQFQGYKIKSAAE

SEQ ID NO: 326094 - protein, 347 aa, unidentified
MAHFVGLDVSLKETSVCVVDEVGQVLCERKVPTEPDEIAVLLTSVGGDYVRVGIEAGPLSQWLVNGLAEASLPMVCVETRHMKALLKAQQVNKSDRNDARGIAQMMRVGLFKPVHVKTLAAQEQRMLLTSRRLVQRKLLDIECDMRGTLRNFGLRIGAISTTGYEARIRDLVEGLPGLAAIIEPLLIVRRVMRQQLAVLHKMLLNRVRQDPVCRRFMTVPGVGPVVALTYRAAVDQPHRFLHSRAVGAHAGLTPKRHQSGEIDYDGAVSKYGDATLRAMLYEAAQSMLTHSQKWSWLKAWAMRVAQRRGMRRATVALARRLAVILHRMWVDGTDFRWSNDTVTAPAA

SEQ ID NO: 326095 - protein, 325 aa, unidentified
MSDSARAGVVVGLDVAKDSVHVAVRPGGQQWRAATTAAGLRQLAERLIALAPRLIVLEATGGYEQPVVAALTVGGLPVSVVDPARVRHFARATGLLAKTDRLDAQVLARFAEQVAPAVRPLPDAAQRELALLVQRRRQLLDMLAAEEQRLDQQALFPRSPITGSLVAHVAYLRQQLADTDQALTAQLAAHPRWDATHALVRSMPGVGPVTAATLLAELPELGTLSRQEIAALVGVAPLARDSGRWRGQRRIGGGRAAVRQVLYMASLTAVRCRQSPLRTFYQQLRARGKLFKVALVACMRRLLVILNAMVRDGQPWTPARCAANT

SEQ ID NO: 326096 - protein, 342 aa, unidentified
MEHYAGIDVSLECSSVCVVDANGKIVREAKVASEPQALIDWFGSLGFGLERIGLEAGPLSQWLFAAMKVAGLAVELLETRHVRKAFEAMPVKSDRNDARGIAQLMRLGWFRPVHCKSMSAQETRSLLTARKLVQSKLHDVENSLRGILRGFGLKVGKTTGQKFAGRIEELVAGHPHLQMIAKALLAVRAVLRTEFAAFEKQTRRMVRSDMQARLLTSVPAVGPIVALTYASAIDDPARFKSSKQAGAHFGLTPKKHQSGETNYTGRISKIGDASVRTALYEAANVMLTKPVKGCSQLKSWAMRIKRRAGTNKAKVALARRLAVIMHRMLADGTPFNAAAAAA

SEQ ID NO: 326097 - protein, 343 aa, unidentified
MQITTIGLDLAKHWFQVHGVDANGQVVVRRRLWRSGVIAYFRSLEPCLVGIEACATAHHWRRELIALGHTVKLMPPAYVKAYVKRNKNDAADAEAICEAVTRPSMRFVPIKDAEQQSVLMLHRARSLLVRQRTMLVNALRAHMAEFGIVAPQGLRHVEMLTKTITHQQERLPELARSILQTIADQLNGTMARIQEIEGRLVRWHRQSRVSRLVATVPGVGIMGASAIAATVPNPSLFRSGREFAAWLGMTPRQNSSGGKERLGRTSKRGNKYIRSLLTAGAVAVLRHARNRPTRDGAWVRALLARKPTKVAAVALANKTARIVWAVMVREAGYQPQEVFRQPA

SEQ ID NO: 326098 - protein, 435 aa, unidentified
MEEVTDEPLYRDRVCGIDIGKAGMVATIRVPSDKDPARRAAETRSFGTTKREVLALADWLRCWQVPAVVMEATGDYWKGPFYRLEAEGLDCVLADARQVRHLPGRPKHDPGDSRWLAACFERGAVTSCFVATPEFRVIRLHTRYRRDLTAERTREKQRAEKLLESAAIKLSSVVTDLHGVTGRDIMDHLIAGERNPKVLAQLARARARRKISELEAALDGAEFFTAEHAALLARMLARIDRLNADIDELAEVIERLLAPYEEQLQQAGSMPGWGRRSAQDAVAETGADMSRFPSGAHLASWAGRTPLDNSSGKRTGRARSKKGNRYLAAITGETAVAAGKTQTREGARYRRLARRRGKAKAQVALGNTQLKVYHKLLSSPGTRYRDLGPDYYERQAGTRRQIAHHVGKLGALGFEVTLCRLPEPGQDGSGSTQAA

SEQ ID NO: 326099 - protein, 398 aa, unidentified
MTDKLIVGIDIGKRTHVASIIDDAGTVVIRPFSFANTTEGGTLLLYRIAAVNTDASKVVFGLEATGHYWLALFSFLTGKGYPVSVINPYQSDAFRKVHLSTTKTDKEDSFLIADLLRFGSFHETKMASEHMVSLRNLSRFRVTMSQQITDTKRRIVTIMDQIFPEFETLFSNSFGKTAKALLDDYPTPESFETVTTRKLTNVLTKLSKGRFKKEKADEIKHKAETSFGVDFALDSFKLELSLLLQQLDFLTIQITVVEKQIGKLMETVPTTLKTLPGVDTIIAAAILSEVGDITRFQTSAQLVSFAGINPTVHQSGQFTGTKNHMSKKGSPYLRLALWKASITSVRFNPVLKTYYEQRIKEGKNHMTVIGAVSRKLTGIIFAMMRANKDFDEKATPLV

SEQ ID NO: 326100 - protein, 299 aa, unidentified
MFFFWGRPSCKTLRLLVSTSASILSTFTVSDKSGKALLCTKFTRTKLIEFLAGCTPATVVMEACGGARFMARRIADLGHEAKLIYPQFVRPFVKSNKNDFVDAEAICEAASRPSMRFVQPRTEVQQAMRALHRVRESLVRDKVKTTNQMHAFLLEFGISMPIGVTVIKRLSTVLAENELPPYLAQLLMRLHAHYLYLVEQITELETALEQELSRDETEQRLQTIPGVGPITANVLSSQLGDGKQYSCSRDFAASTGLVPRQYSMGGKNTLLGISKRGDKNLRRRLLTNLDDSILQGEDR

SEQ ID NO: 326101 - protein, 393 aa, unidentified
MFYIGIDIAKHNHEASIIDSDGSLLCESISFSNSQKGCEKLIALLERFSVDPDNCIVGMEATGHYWLSIYSYLFELGFDLKVINPIQSDAFRKMYIRQTKNDSKDSFVIAQVMRFGQFSSSSLSDENIMALRQLSRYRFCLVDDCSDLKRKVICLLDQVFPEYSSLFSDIFGVTSKELLLKYPTPEDMLSVSATKLSNFISKCSRGRYGRSKAEEIQSAAKSSFGIKFASNAFSFQIKQMIEQIKFIENHLKELEKEITELLIQTNQVITTIPGIGNVLGGVIIGEIGDISRFESAPKLVAYAGLDVRVSQSGQFTGTQMKISKRGSSYLRRAIWMAATVAAFSDPVLSEYYQSLRARGKHHLTAIGAVSRKLCNIIFAVLRDDKPYEPMPKR

SEQ ID NO: 326102 - protein, 342 aa, unidentified
MKNYQIGIDISKEKVNICLRGSKKNVWEDETPNTLVSIKRAFKKGLKGQGIAPNDVIVCAEFTGRYIYPLVCACDDLGLFLWMEDPTRIKNSFGIARGKDDKIDARRIAEYADRFSDKAVAYGMPDRTLASIKSKLADRDMLLEDRKRYETQLHDQKGFMDPKDYAQKCRLWTAVIKTLNKQLATLDEQLAEIVASDKRISHQMELLKSVDGIGDRIALYMVAVTMGFSRFESPRQFFCYAGLAPFKYTSGKSIHSKSKVSQRANKHIKALLHLAAVSAATHMKDSEYRRYYERKTAEGKHPMSVLNVVRAKLVSRMFAVIRRDSVYQRNYVFSNNLEKISA

SEQ ID NO: 326103 - protein, 318 aa, unidentified
MPDLVPSAGVDVGSLWLDLGFYPFAKPIRAANDEEGIEAIVAALRLRGVGKVALEAIGGYARKLVTALVEADFRVFVVNPRRIKAFRDAEGLIAKTDRLDAALIARFAHTMTHELRPLSDADQAILKALSTRRRQLTESIAIEKTRLKQALDALVVESCRDMIAILEDKRRVIEDDLNRRIDAQNELARRRDILTSIPGVGARISTLVVVEMPELGVIDRKAAASLAGLAPHPSQSGLARGRNVISGGRPCLRAAFYMAALVATRHNPRFRSRYADMRAAGKPAKVALIAIARHIVTLANALPRDNVRYENANFASPP

SEQ ID NO: 326104 - protein, 384 aa, unidentified
MKMDRKAAAPVAAERDQCARVGMSGNRSKDGGLAMNVTTYGLDLAKQIFQVHWVEPCTGEVKSKALPRSEVSAFFARREPGVVAMEACGSAHHWGRLLLGLGHEVRLIAPQFVRPFVKTNKTDMADAEAIWEAVQRPRMRTVALKTEEQQAMLGLHRLRQLLVKMRTMQANQVRGLLYEFGLIMPKSWRALLAQAGPRLADDAHWSVPGLLRRELQEQLAGIRALTSRIAELERQIGAWQRREAECGRIAEVPGVGKLTATAIVATVGDARGFRSGREFAAYLGLVPRQSGTGGKVKLLGISKRGDVYLRTLLIHGARTVLTTQSRAGRTLDPWLAELLRRRPKNVAIVALANKMARTIWALLAHGRAFDRNWGVARGAVPVVA

SEQ ID NO: 326105 - protein, 316 aa, unidentified
MEAPVAGIDISKDKLVVYFQGKLYEFPNDKQGFEGVKQILPKGCKIGIESTGVYHINLVKYLGNEYDVRIINPLVLKRFKDFRGKKSDKSDAKKLAELVVNMGSEFITSEARELTSQWDFVTRSIVRVKNRLRRDLILLGYRDSLSKENLNEVLRGEDNVVLSEVRFLLGELERLEGRKREIEEGLENFVPKDSLIFTIPGIGRTLGCIILARVGDVRRFSDKKRFVAYCGLDPVVESSGKGVVSRGISKKGDVVLRRAFYLAALTAIRVNPVIKRFYEEHKGRLRGKKLIIACARKLAVITWAVLYYNKPFEADE

SEQ ID NO: 326106 - protein, 367 aa, unidentified
MKKVSTVGSKQSRNISQQRLTIGLDLGDRNSWYCVVDEAGQIQLEQRVRTSAKALQEVFGAMPCSRIALETGTHSPWISRLLSELGHEVIVANARKVRLIGESRKKDDRLDAQTLARLARIDPELLCPVKHRSAQAQADLTLIRARAGLVRARTGLVNTARGLAKSYGQRLRGCNVRNMNPEKAEGLSPELQRALEPLLACIESVSEQIREYNERIEALAQQSYPQVALLKQIKGVGTLIALTFLLTLEDPHRFRKSRDVGGYLGLQPGRRKSGQSEPQLHISKEGDPYLRTLLVQGAQHILGPFGVDCDLRRWGLKLAERGGRNGKKRAIVATARKLAVLLHHLWGSGEVYEPLHNSSRTTVAAAA

SEQ ID NO: 326107 - protein, 355 aa, unidentified
MTSTQYIGMDVHKESISIAVRNAAGKIVMECVIETKASTILQFMDGLRGDVQVTFEEGTWAAWLYDLLKPHVTKVVVCDPRRNALLQEGNQNDRVDARKLAELLHNNQLRSVYHGDHGLRTLKELVRSYLTITQDVSRVMTRVKAVYRSWAIPCTGKQVYAPHHRAEWLAKINEPGVHRRAEFYYQQLDALRCVRQQVRRELLAESKKHPAWKRLCGIPSIGPIRAAVLLGILQTPHRFRSKRQLWTYSGVGIETSSSADHQVVKGQLERKKKPVEIRGLNRNFNHDLKNLFKGAAIVAATKPGPFAEFYAELVAKGMRPEMARLTLARKIATIVLIVWKRGVCFDAQHLKPQTA

SEQ ID NO: 326108 - protein, 314 aa, unidentified
MSVWVGIDVAKDSLEVHIRPSGRCLSISNCADGIGELVREMVALKPQLIVLEATGKLEKLAMCALAGAGLSVARINPRQARDFARAIGRTAKTDKIDAEVLAHYAEAVNPEPRRLSESESSELSDLLNRRRQVVDMIQSEKNRLKQMGQSVKTHIEAHIAWLEHEKNSLERELAACIENSCIWKELDSLYQSCKGIGPVVSATLIVSLPELGSLNGKQIAALVGLAPMNRDSGMMRGKRRIIGGRRNVRSALYMATVSAIRYNPIIHAFYERLVAAGKVKKVAITAAARKLIVILNTIARTKQPWNPATEFAKA

SEQ ID NO: 326109 - protein, 415 aa, unidentified
MALKIVYKICCGIDVHKTFVVACIASTNDKGITSYESHRFSTYTSGLKTLLQWLLDRNCKDVCMESTGKYWIPVYNILEPDCSIVLAHPKYVKAIRGKKTDKKDAKWIADLFKHDLVAGSFMPPADIRQLRDLMRYRFKLTCFKSSEKNRLQNCLTVSNIQLGNVVSDTFGKSAQAILDKLLENPADTSFDLEPLVYKSLKKKLPELRDAIDGYITPEQAGKLKVIKAHYENLESRKAELEELILALAAPYQQELTILQTAPGISSPFTAIGIISEIGTNMEAFPSAKHLCSWAGLTPTNNESAGKKKSVRVSKAGCYIKPLLVQCANAVVKSTKHPEMRNRYLRLKKRRGHKKAIIAIARMLLTALYHMLKNGENYNAELYQKSDLLPVDREITVEQALMIARNQGYKIKSATA

SEQ ID NO: 326110 - protein, 322 aa, unidentified
MCKIIGIDISKQTFDVGFNDGSNWHHLVLDNNEKGFKRLLKVLSNNDWVVMEASGPYYLKLATFFYGKGYNVCVLNPLIIKRYSQTRLIRAKTDKKDAQTIAEYGAQYRLKQWKPEPTNISKIKQLYTVLELLNKEVHQSERQLEALTATGIMDKDLKSILKGIVSYLTCKRNKVEKQIEEIAQSVYKSTLDRLKSIPGIGTKTAIMLTVITGNFENFETHKQLIAYVGFSPRIYQSGTSVKGKGHICKMGKSQIRKLMYLCSWSAKRCNKDCVDMYERLLEKGKPERVIKIALANKLLKQAFSIAKNKTYYDENFNKKTCF

SEQ ID NO: 326111 - protein, 356 aa, unidentified
METAYDGRQVVGMDLHRRRSVLVRMTEDGRRLGTAKITNSPAELRGAIARAGKHPRVVLEATYGWYWAADVLAAAGAEVHLAHPLGVKAFTYRRVKDDVRDSADLADLLRMGRLPEAWIAPHEVRELRELTRYRIKLVRMRTSCKDQVHGVLAKLGVAVTCSDIFGVAGSAWLDGLRLPQPYAGKVTSLRHLAGELTTEITMLGEVIASLLAGDRGYQVIQQLPGIGPVLAAVIIAEIGEVTRFRNAGQLCSWAGLTPRHRESDTKVARGHVTKQGSRLLRWALIEAIQRIPRDSVIGAVKDGIIGRRGKEAKNIAKVAAARRLLTLVFYGMRDGQIRCLSRPRQDPSATGEARAA

SEQ ID NO: 326112 - protein, 471 aa, unidentified
MTLSGTRSECSWCFEPVCQSDLDSAAYPKLSPPAVGEHEEQIAQQLAVFLGRVARRPTMEMLYSSCAGVDVHKDTVVVCVRRRDAKGKVQQQTRTFGTMTGQLLALADWLAQEQVTHLAMESTGVYWKPIWNLLEDQFQILLVNAQHIKQVPGRKTDVKDAEWIAQLLQHGLLKASFVPATPQRHLRELTRQRRQLIQAKASVANRIQKASEDADVKLGSVASDVLGVSGRDMLRALIAGETEPAALAELARRKLRAKIPALRLALEGRVTEHHRFLLQLLLDELTHMEALIGRLSARIVEVLPSSFGEAVERLATIPGIDERAAENILAEIGADMDQFPSAGHLASWTGMCSGNRESAGKRQSGKTTKGNRWLRATLVQVAWAASHTKNTYLSAQYRRLASRRGKKRALVALGHTILVIIYHLLKKQTTYRELGPDYLDRLDTDRLTRNLIRRLERLGHKVTLQPQEPAA

SEQ ID NO: 326113 - protein, 410 aa, unidentified
MEVLHPRCGGLDVDKDSVGACVRCVSFPEAHHVRTFATTTTGLVALADGLETHGCTTVAMEATGVYWQPVWHLLEGHFTLVLANAQHIRKVPGRKTDVNDATWIAELLAPGLIRSSFVPPAPIQELRDLTRTRKQLVRELSQHCLRLEKVREDANLQVASVLSNLLGHSGRAMLAALIAGEQDPERLADLARGSAGQKRPQLIQALRGRGTPHHRALLQLHLDLIAALEAALAQVDTALGKALAPIAAAADLLKTMPGVSDVVAQVILAEIGAERSRFPTAGHLVSWAGLCPKNDESAGKRRSTRLRKGGTWLKTTRVTAAWAAVRHKEGYLHNQFLRLKARRGAKKAIIAVAAAMLPAAYHLVRDGVEYHDLRPQHFDRRDKHKVIARLMRRLTDLRGEVELKQVAYVS

SEQ ID NO: 326114 - protein, 334 aa, unidentified
MDKVTTVGIDLAKRVFALHGVDGAGRVGLRKTVRREQLMQTVAGLPPCVIGMEACSGAHEWARRFQELGHTVRLMAPVFVAPYRKSGKNDGNDAEAICEAVARPNMRFVPIKSAEQQAVLALHRVRQGWIEERTATINRLRALLTEFGIVLPNRAQYVRRGAHAAAEAVPELARRAVADLRTHLGVLDERIGGYDRELQAQARQSEAAQRLMQIRGVGPLTAVAMVATVGCARDFRSGRQFAAWLGLTPRQHSSGGKTRLGHISRRGDAYLRCLLVQGARSVLLTAMRHSDPMSRWAVSLQARCGYHKALVAIAAKNARIAWALLSKNQTLRAA

SEQ ID NO: 326115 - protein, 345 aa, unidentified
MHKTDPAGIEISVQELIVTLRREGKLKPLKSFRNTPAGHQAIVRYLARKGRVVQVCLESTGVYGLDLALALHAAPGIEVMVANPRAVRHFAQALMQRSKNDRLDAVVLLEFAARMPFQAWQPPAPAARHLCALARRLEALTDLGTAEKNRLHAARATQALPQIIRQDLERSIRFHQRALARLTQEALKLIAQDAELQLKFNLLLTIPGVGQTSAVQTLAELAVLSPDLDVRQWVAYAGLDPREYTSGTSVHKKTRISKAGNRHLRRGLYMPALVAVRHDPHFRAYYAHLRARGKAKMQALVAVMRKLLHAIYGMFRHVLPFDGGKVYPLPQTLVAPSAVAKTEAA

SEQ ID NO: 326116 - protein, 320 aa, unidentified
MGTEKVYVGIDVSKETLDMAVHASDQRWRFANSDEGITETLSCLEELCPTLVVLEATGGFQDPLAAALAVAGVPMVVVNPRQVRDFARATGRLAKTDTIDARVLAHFAAAVHPPFRLLPDTQGQELKAILTRRRQLIEMLTAERNRLHSARSRFAKAHIQAHISWLEEEMAHIDHDLRHSIRQSPVWQEKDDLLKSVPGVGPVLSTTLLADLPELGLLNRREIAALVGVAPFNRDSGHFRGQRTIWGGRAVVRSALYMATLVATRYNPIIRDFYRHLLSAGKPKKLALTACMRKLLTILNAMLKHKTSWHYPISGISQTS

SEQ ID NO: 326117 - protein, 413 aa, unidentified
MEVWLGGISCFISEGGARMYSLLVGIDVSKDFFATAGIDAEGKESFSRSYVMDSNGFGDFLKMITSHCEDFSRVMVAMESTGCYHINLFSFLTSQGVRTMVVNPLLIANFAKLSLRKTKTDKKDAMTIARFLMDHHEEVSHLSLSQDHQDLRDLSRERESICHLMAATKVEIKRVLRTTFPELESIGNLYTRVMLRFLQRYPSARLVRVAKPRAVAKALKGPYVGNKLTFTAEDIVKAAQSSVAVVSPAKEIILQGKIATLVHLQERLDEMTKLLTDLCKATRIDDLKILRSIKGVGPKTAAPFLAEMGEVQHYASHKKLIAFTGIDPSLHESGNYIGTSRLSKRGNRHLRRAVYLMTAAVASKNPFFKAYFLRRKRQGLPPQKALFATAHKLLRVIFAMLTQRTYFNPKEVI

SEQ ID NO: 326118 - protein, 318 aa, unidentified
MTQDLFVGIDVCKATLDVAVLPGDQAWSVPNSEDGIQDLIANIKKLGSPKIVLMEATGGLERRALALLAAAGLPVTAINPRNARDFAKAIGLLAKTDKVDAKALALFALKIQPPCHPLPDEETRALQDLVVRRRQMVDMLSAEQHRLAAAQSPKVWRQITQHIAWLKKRIHIVDFDLDQTIKNSPAWRPKSDLLKSVPGIGSVTTSTIIGHLPEIGTLSNKQIAALVGIAPFNRDSGTVHGRRCIWGGRAAVRNVLYMATLAAIRFNPTIKAFYLRLRAVGKLPKVALVAAMRKLLTILNAMVRDKSSWRSPHAEIPS

SEQ ID NO: 326119 - protein, 368 aa, unidentified
MRNHSKKASVGVTGKRTVGLDLGDRHSYYYTLDAVGENVESGRVKTSGEGLEKRFGGQEAARVVIEAGTHSPWVSRLLAGLGHEVIVANPRKVRLISDNEGKDDPVDAELLARLGRVDVKLLSPIQHRGEAAQADLAVIRARDALVGARTQLVNHVRGAVKSLGSRLEKSSTRSFGDKMGDQVPEALQEALEPVLEVIKELTSQIGGYDQQIRKSCQEKYPETRLLTAVPGVGALTALGYVLTLEDPHRFASSRAVGSFLGLRPGKDKSGQQDPELRITKAGSPLLRRLLVGSAHYILGPFGPDTDLRRWGLKLAGRGRKNAKKRAVVAVARKLGVLLHRLWVHGEVYQPLYQAERAVAVTAVAGARS

SEQ ID NO: 326120 - protein, 279 aa, unidentified
MKLTRVGVDLAKQVFQVHGVDRAERPAWCKRLKRSRWIADLERDVEPGCEIGMEACGGAHHWARVLQSKDYRVKLIAPQFVKPYVKTNKTDANDAEAICEAMSRPSMRFVAIKTVEQQDLQAVHRVRSSLIRERTAKANQLRGLVYEYGLVAPREIKSLRRAVPQWLEDAENGLTPRFRALLSGLYGDLRLLDERVRELDREVASITREHEPVRRLMQIRGVGPLIASALYSLVGDARQYRNGRELAVALGLTPGQHSSGARRSCWASASAATSTCAPC

SEQ ID NO: 326121 - protein, 422 aa, unidentified
MSYCPVAGIDVSKRFSDMCILSPDNKIFAQEKIYHDETSINRANALLQKAERLFFSKPVIVMESTSHYHLILFQFFSEHGYDVIVVNPLQSNSMKDFSIRKRKTDRVDAFKLAMMYRTKTLRPSQIPQTATRALRQLCRHRAELLNDVSSYKNRLTALLDQTFPGYDKVFSDVGGVTSCAVLVRFPTPTILLVEEESELVEVIAAASKSGYSFAKKKAGLLISAAQKAQTLGIHSCADETLIVCTIQMLRTLSESVLQIEAAIDNLLAQIKEIRNNVSLLQSIPGIGSHSAALLLGEIGDISLFKKPKQLAAYFGLDPTERQSGSFRGTKNKLSKRGSPYARAALHMGVVNSICKRGKDSAANPVLLSYYEKKCKNKPAKVAQAASMHKLVFIIFAVLRDQKPFELKTPEQHAVEQGFVKAA

SEQ ID NO: 326122 - protein, 335 aa, unidentified
MKKIYVGIDISKEKCNLCFRSGLEIVREEECSNDVKALKKAFKAALKVLGASLEEVLVCAEYTGRYIYPLTVACQELDIFLWLDDPTRIKNSMGLTRGKNDAIDAARIAEYAYRYSDKAVRYCIPDAALVSMKNLLSDREFLLIDKKRYQSQLTDQKKYMAPGDFKHKSSRWKKVIKSIDEQIAAIDAEIESLIAADPVLTRQKELLVSIDGIGERIAINMIVVTGGFTRFENARQFCSFAGLTPYKYDSGTSVRSKAKISKRANQTMKTLLHLSAVNVATRMKSGEYKDYYERKLKEGKHVMCILNVLRAKLVHRMFSVIKRDTEYTKEYKPAC

SEQ ID NO: 326123 - protein, 407 aa, unidentified
MELVALYKRVIGLDIHQAQITACALIEEPDGSARIEQRQFGAFKRDRRELADWVSSLRPDEVVMESTGIYWKSPYAALEAIGIRAKVVNARHVKNVPGRKTDVGDAHWLATLARAGLLRGSFVPSAKLRELRLIARQRQKLVGQLASEKNRLHKVLTDSGVRLGVVVSDLHGQSARAMVKAIIAGQSPQEVLKLASRRLKASREEIFDALQGDLTASHRFVLDELMRHIEEIEARIARVDTRLLAELESERDALALLQTIPGVDLIGAAMLLVEIGTDMESFGSADRLASWVGICPGNNESAGKRKSGHLRKGNLYVRRLLCEFAHAASRTTSVFKSKFQSLVVRRGHKRAIIAIGHKILRTIFFMLKRREHYRDSTTDYEALSVQRNAPRWIKALTKFGFIKPTCA

SEQ ID NO: 326124 - protein, 296 aa, unidentified
MLIIGCDFHPRYQQIAMMDTETGELVERRLEHENGEARAFYASLPKPVLVGMEAPGYAQWFERMLAEFGHELWIGHASEIRAGVVRKQKTDARDAQHLLRLLLEKRFPRIWIPSPAERDARQLLRHRYKLVCFRVSVKNQLHGLAMSQGVCRKKKLFTAQGREELEKLSLGPWGSRRRQELLGMLDQLNPVIDELDRAVRQEAESRADAARLMIHPGVGPVTALAFVLTLGPVARFRRSKQVVSYLGLNPKERSSGDKQHTYAISKQGRRNAVELARGRAVNFSESRREPHKFGQR

SEQ ID NO: 326125 - protein, 457 aa, unidentified
MTRRKHSRPARDIAPVLPQAAAVDIGATLHGAAVRPGCDPEPVRTFGTFTTDLHRLADWFEQCGVETVAMESTGVYWIPLYEILDQRGFEVVVVNARDAKHVPGRKTDVSDAAWLQRLHEYGLLRASFRPKGAIATLRSYLRQRERLLDQAAAHIQHMQKALTEMNLQLHHVVADVTGVTGLRILRALVAGERDPDTLAAYSDPRCKAPAETLRAALVGNYREEHVFALAQALELYEIYQAKVAACDQRIEAVLERLKAANPPPAATLPPARPRRRQANEPGFAVREALHAILGADPTQIDGIGPSLALTLVGECGTDLSAWPSAKHFTSWLSLAPHNKISGGKVLSARTRRSGSRAAALLRLAAVAVGRTATALGAFYRRLAARVGKAKAVTATARKIGVLFYNMLRHGMDYADPGASAYEARYRQRVLSNLRRRAKSLGYVLQKADPASAAIAVS

SEQ ID NO: 326126 - protein, 343 aa, unidentified
MQTVTTIGLDIAKSVFQVHGHDDAGQVVIRRQLKRRSVLAFFQKLPPCLVGIEACASAHYWSRELQALGHKVRLIPPAYVKPYVKRQKNDAADAEAICEAVTRANMRFVPTKTAEQQSGLVLHRTRHLFIRQQTAVINAIRAHLAEFGIVAPVGRHGVEELLNVLADPNDKRVPELARACLSAFGAQLRRIKEQVLEFDRLIRAWHRSDEMSMRLDEAPGVGPVLATAVVATVADPKSFRSGRNFSAWIGIVPKQHSSGGKNRLGSISKQGDRYLRGLFVAGALAIIRYAKIHGTKHRPWLTALLARRPTKVAAIALANKLARMVWAMMVKGERYKEPVALAA

SEQ ID NO: 326127 - protein, 416 aa, unidentified
MLFIGDDWAEDHHDIEIEDADGRRLARARLPEGLEGITRLHALVAEHAPAAWAELLPEQVAGRVVVGIETDRGPWVTALRAAGYQVFAINPMSAARYRERHATSGAKSDAGDAHVLAEIVRLDRDHHRPVAGDSDLADAVKLLARAHQNAIWERTRHVLRLRSTLREFFPAALEAFGDLTASDTLVLLERAPSPELAAKLTRGQLAAALRTARRHHVEAKAVALQEILRAPALRQPPVLGSAYATIVVGQVRIIAALNAQITQLTEVVDEHFGRHPEAEIYLSQPGLGVVLASRVMGEFGDDKTRFADARTRKNYSGQSPITRASGRKTVVLARYASNRRLGAALHLQAYAALTGSPGARAYYDALRARKIGHHAALRQLANRLVGILHGCLKTGTLYDENTAWQHHLPGAENLAA

SEQ ID NO: 326128 - protein, 355 aa, unidentified
MNDTKYIGLDVHQATISVAVLDSAGKLVMEAILETKAETILQFIQGLRGSVRVTLEEGTCAAWLHDMLKPHVAQVLVCDPRKNALIKAGNKSDRIDARKLADLLYLDKLHPVFHGETGNRVLKELARSYLALTRDTTRVMNRLKALYRSWAIPCAGQRVYAPRYRSEWLAKITEAGVHRRAEIYYQQFDALRSLREQVRRDLLAEGRKHKAMKLLRQIPSIGPIRAALLIALMQTPHRFRTKRQLWAYCGLALKTSTSGEYRILEGRLKRARKFLAIRGLNANHNHDMKNIFKGAATRAAAVPGPFQEFHAGLVARGMKPTMARLTLARKIAAITLIVWKKGVDFDAEHLKQQAA

SEQ ID NO: 326129 - protein, 370 aa, unidentified
MLDTTTFVGLDVHARSIKAVSLDVMTGEVRAATFGYDAGAVAEWVRSVDPGARCVYESGVTGFDLQKRLSGLGVDCVVGAVSKMIKPSADRRRKNDRNDAEFLARMLSVGNVVEVWVPDDECEAARDLTRALEDARDDLSRSKQRLSKFLLRHGLVFDERTPTGRRKGNWTRAHWSWIESIRFAEGADEEVLAYYVDAVRRAAEEKARLEGLVEAEARKPRWRKRVDSLRCLKGVDTASAADLVFEAGEFSRFRNARSFAAWVGLTPSEHSSGESDRRGAITKAGNKHLRKALVEAAWHYLTCSGRPKDLAKGQAPDRGARRHAAKGVRRLVERREALLARGVHGNKANVATARELACWVWAVGLMAEEA

SEQ ID NO: 326130 - protein, 408 aa, unidentified
MHLIFIGIDWSEQHHEVEVQAGSGKVLKRLRVDADMAGLSRLREVITDAAEEPSQVVIGIESDHGLLVEALVGSGYRVYPINPVTSARAREGESPSRSKSDQGDAHVLANLVRTKRQDLRPMAGDSQEAQAIRVRARSHLRAIRLQQRVRNQLRSALAKFFPGALPLLGDEPTELRDALAVLSLAANPEQGRRLSQSKVRASLARYGRQRNLDLKAAQIQAQLRTPQLELSSPKVTSAYSDEVGYLVRTLIQVRSEVGQLEEQMAVDFREHPDAEILLSQPGLGIVLGARVLGESGDDPTRYVNAKARKNYFGNAPVTKRSGKLKMVNRRIARNRILADASFRWATSALAASPGARRYYDQLVARGKTGNEALRALANRLVGNLHGCLRRHCRYDEPIAWPEALAEAA

SEQ ID NO: 326131 - protein, 352 aa, unidentified
MTVAIVEARAETRAITGGVDTHADVHVAAALDPIGGLLGVREFAATTAGYARLLDWLGGFGTVCLVGIEGTGSYGAGLARHMATAGVRVVEVDRSDRQDRRRQGKSDPLDAVSAARAAQSGRARGAPKGRDGAVEAIRALMVARRSAARERTRAINQARALILTGPDDLRARFTRRTPAALVAGIARLRPRPGDVMGYAVRIALRELGRRAEFLDGQLECLDELIAPLAAARAPGLLALYGIGPHTAALLLIAAGDHPGRLRSEAAWAHLCAVAPIPASSGKVTRHRLNPGGDRQANHALWRIVFTRMGSDAATRAYVERRMKEGKSKAEIIRCLKRYVAREVYPHLRPAAG

SEQ ID NO: 326132 - protein, 406 aa, unidentified
MEQVTTIGLDIAKHVFQVHGADAAGHALFRKRVTRPKLLGFLAAQARCVVAMEACAGAHYWAREISKLGHCVRLIAPAYVKPFVKRQKNDAADAEAICEAAQRPSMRFVPVKTEEQQANAITFRARDLLVRQRTQCVNALRGHLFEYGYVFPQGITHVATLVALVEDPQSSLPESVRILLKLLVDTFTALDGQIAALDAEINQRSKANPTARRLMTIPGVGPITATAITALAPAVQGFAAGRDFAAWLGLTPLQKSTGGKQKLGAVSKRGERTIRRLLIIGASTVVQQASRRGAPKGSWLAQMLGSQTEDAGDCGSGQQDGPHRLGSARQRRHLQNSRRGGLGRPRSRRCRWGERKESMAQQSARRGWDNQGFPQCFENATGDLDPVRELPYRPAAVFLPHQRPDR

SEQ ID NO: 326133 - protein, 386 aa, unidentified
MQKLNDFSRSLVALEPDSTLIAVVEMSLSSWLVAGIVPGVERQPLKKLAADESALLKLLHRWREEAEKAGRRIERIAVAFEAGRDGFWLARWLKARSIEAHVIHAASVAVSREHRRAKTDRLDTELLKRAFLGWLRGERDHCKMVAIPSINDEDVKRPNRERENLVSEQSRIINRMKAALIRLGIRGFNPKLKRAAGRLDDLRTPEDEPIPPNMLAELRRDMERRRLVRDQIRQIEQARLQHLDHAPGDGPHAMVRLLARVIGVGIETADMLVHEVLSRNMRDRRAIARYAGLTGSPDESGRKRREKGLARSGNGRVRHGMIQLAWRFLLHQKDSALAQWFRARTENARGTRKPMIVALARKLLIALWRLVRQGVVPDGVVLRSAQ

SEQ ID NO: 326134 - protein, 338 aa, unidentified
MEAYAGIDLHSTNSYIGIIDEQDQRHFAKRLPNSISQILVALEPFKENLKGVVVESTYNWYWLVDGLQEEGYQVHLANPSAIKQYEGLKHTDDKWDSFWLAHMKRLKILPEGYIYPKEERPVRDLLRRRLLFVRQRTSQILSLQSTIERNLSLKMSGNAIKKLKEEDVEDLFDSPSLVLTAKSNISVIQFLTQRIKVIEKAVKSGVKLRKEFQLLKTIPGIGDILALTIMLEVGDISRFAEVGNYSSYCRCVSSKRLTNGKKKGENNRKNGNRYLAWAYVEAANFAIRFSQEAQRFYQRKMAKTNGIVAIKALSNKLARASYYVMRDQVAYDANKLFG

SEQ ID NO: 326135 - protein, 414 aa, unidentified
MSHRIAGIDVHKKMLAVVVGDAAEEGDVQLQRKKFGAMAGDLQMLAEWLAGLQVQEVVMESTAQYWKPVWQELEGKFHLELAQAQSNRGPRGRKSDFRDVERLWRRYRADELILSYVPDPEQRLWRTLSRTRVRLARDRSGLANRLEALLEEMRLKLTSKVSDIQGVSSIRILHGIAAGERDPEKLAEMADPQLRVNRQQLCELLQVVRTLDERYRKVLRQILDQWELNQKQSQELQKELAESLLPYGDQVSRLAEVPGLGVESAQQIIAEVGPTAEKFPTAGDLSSWVGVCPGENQSAERSTSDRSAHGNRTMRRILDQAANAAVKAKGTVFQARYQRIRGRDPKKHNVAIWAVAHHLCRVTWSILHKGVVYQEKGNRPDPKAVKKRATRLLRQLKTLGYKVQVMPNQAGSPA

SEQ ID NO: 326136 - protein, 407 aa, unidentified
MDLLKTVFGIDVSSRKSNVCIMVNGQKVNDYAISNDMVGFNRLLGDLKQVTKPQIIFEATGVYSRRLQAFLDMHELRYVMMNPLEAKRKTKDDLHQNKTDKLDALYLAKLQSEHPQRLAYVQNKEYQELMANNRIYEQASHDLITNKNRLHKAVQLTFPEIEHLLANPRGKNYWSIALRFPHPDIVLETKEADIIDFLKGLSGIGKKRANDITQSLIRLAKVACPAVKKNSAHIRGLKMAINNILSAEEECQTALQEMAKLAPKRDLEILTSIPGIGENTALRIISELGDIRRFNNPSQLNAFVGVDPQVYESGNLTAHLSISKRGTAIGRKVLYLAINQIQSAKKVGNPCHIADYYEKRKRSSETASHKKAAIASIHKLLRTIFALIKNDQLYSYDVAKHNQRLLS

SEQ ID NO: 326137 - protein, 341 aa, unidentified
MWSIGLDVHWRTTSVCILNEYGKKIKEKTIRGSWEKVLTYVGGIRQPCQVCFEASCGYGVLYDRLRAMGRRVVVAHPGHVRMIFRAKRKNDRIDAHKLAQLLFLDAVPPVYVPGVNTRQWRRMVELRRTLVDKRVRAKNGLRSLLRSQGIRAPRGLWTRKGLRWLGQVAFAGEMTAIERDMLLDELAQYDRQVDRVTRALDRIGRSHPGVALLQDIPGVGPRTAEAIVAYIDDPTRFRTKQVGAYFGLVPCQDASAGTNRLGHITREGPATARKLLVEAAWQVIRRCEHVRRYFERIGAGKKERRKIALVATAHSLLRCMHAMLLTGECWRHNADAAVAAA

SEQ ID NO: 326138 - protein, 354 aa, unidentified
MTPNYSPKDYNVFIGIDVDKSKFSITVKDDHLKNVSKAMPADPEALYNYIHNHHKDERVICAYEAGPTGFRLHDYLNQRRQICFVTSPITIPRARNQKVKNNRIDSNTIAHYLRSGELKAVRVPEGEYRELRHLIHSRERYASDRKKAKQRIKGLLLYTSLHNEIKEPEQNWSKRYIRELKQLPCSEAVGQRLDLLLSDLDYTRRQTCLILKELRTFCKTHSEIQKYKGYLESIPGIGFITATTLLANIGNPNNLRNAQELGGFFGLTPREHSTGDNVTRGSITHLGNQQMRQLLIEAAWVAIGNDPQLDQFYHRIKAKHHAAFAARKAIVAVARKLTQIIYCVLKEQRPYIKH

SEQ ID NO: 326139 - protein, 360 aa, unidentified
MNAVGIDVSKNKSTIAILRPFGEIVAKPFDVKHTSSDITYLISQLKSLNGDTRIVMEHTGRYYEPMAQWLSDAGLFVSAINPKLIKDFGNNTLRKVKTDKADAIKIARYTLDNWCELKPYNNTDELRRQLKNMNRQFDFYMKQKTAMKNNLIALLDETFPGINTFFDSPARNDGSQKWVDFVTIFWHVDCVRRHSISSFSERYQSWCKKKKYNFQSQKPNDIYEFSHDLIATLSKDNVTKLLIQQAVDQLNIASKNVESLRLLMNQTAAKLPEYPIVLDMAGVGTTLGPQLIAEIGDLSRFSHKGALTAYAGVDPGANQSGDYEQQSVRTSKRGAPQLRKTLFLIMDSLMKLQMIRYTDL

SEQ ID NO: 326140 - protein, 355 aa, unidentified
MDSKKYIGMDVHKESISIAVMNGAGKIVMECVIETKASMILQFIDGLRGDLQVTFEEGTSAAWLYDLLKPHVTKLLVCDPRKNASMKEGNKSDKIDARRLAELLRLNHLNPVYHGEHGLRSLKELVRSYLTITKDLGRVMTRVKAIYRSWAIPCSGKQVYAPRHRVEWLGKISEPGVRRRAEFYYQQLDALRTVRQQVRRDLLAEGKKHQAWKRLCQIPSIGPIRAAVLLGILQTPHRFRTKRQLWTYSGFGIETHSSADHRSVDGQLQRAKKQISIRGLNRNCNHDLKNLFKGAAIVASSKPGPLQEFYAALLTKGIRPEMARLTLARKIATIVLIVWKRGACFDAQHLKPQTA

SEQ ID NO: 326141 - protein, 352 aa, unidentified
MTQLSTYRIGIDVAKGVFQVHGVKNEPGEPVAIKRRLKRGQMEGFLAKLPPSLIGMEACGSAHYWARLARSYGHDVRLMPPAYVKAYVKRNKTDPHDAAAICEAVGRPTMRFVPIKSEADQALMMLHRTRASFVEKRTAAANQLRAAFAEFGIIAPVGAGGFSQLLRLIETDAESFVRLPEALRLLLAELARQWRSCDAVVRRMEAEIAASVKKSERARRLVRIPTIGPIGASAIDGLLPDPHVFKSGRDFAAWNGLTPREDSTAKTIRRGPISKRGDGYLRRLLVLGATSYLARVRRGQIKGASAWVVKMAAHPKRKLAAVALANKTARIAWAMLAKGEDYRAPAAALQAA

SEQ ID NO: 326142 - protein, 354 aa, unidentified
MEKIAIGIDFSKETFDMTVLDTKKTNGKVNADALTKAPHEQFENRRSGFRKSLSWARKVTGRKLDKDNAIFCGEATGKYSVRMSEYLREQGLFVWIDSGLRIKNSMGIVRGKSDKADSCRIAEYAFRHWDKAELYEPLEESVSALRELYLYRDHLVGIRKATEQRNSLMKEFFDVVGESSFIRRSGDRIVKDLKEEIKRCEEEMRKLIESNKELKTTFECITSIKGVSLINGVAFIVYTNNFEWFGNNPRKIATYWGVAVFGKESGTSVKGKTKTSKCASRKLKKLISEAATCAIRWEPRIKAYYQKMRDKGKHHGVAMNNVKNKLIHIITALAVNKTKYRDTYEEDRKLRKAG

SEQ ID NO: 326143 - protein, 382 aa, unidentified
MAILAIDVSKSSLSFYSDFIGKGFVDNSPQGIFDLFNKASEASSDFILVLESTGIYSFGVANYFFQNHIPVFWVKTDNMKLYCKILNRPKTDKIDAKLIFDIASKFPDSLVPFVNNSYIINELRNLTRLYLKLNEDIARLKLRLYSYVSLYFPKLDFKLNKTYESLLKDFTVEEIATMPLEELFEYIAKVSRHIVSSKDLAEKIQSLAKNALRLSPNPFNTLRLSIVSTIELIQHYEKQINLVKKEISKLIKRIPNTLTTVKGIGDITAAGIIAEIGDINRFRNASALASYAGLVWNIKQSGNYKSENTQLTKKGNKYLRTYLVMAANSLRIYDPIFKDYYRRKYAQTTTHKHMRALILSARKLVNLVYYLLKNNVPYVPNR

SEQ ID NO: 326144 - protein, 361 aa, unidentified
MQRIKVNQKSFEGQTFYIGIDYHKKSWMVTVLGEEYEHKTMGYFPCPVKLADYLKKNFPGGIYKAVYEAGFSGFSTCRKLRELGIDCHVIHAADVPTNQKERFQKTDKADSRKLARCLRSGELSGVHLPDPVLEVRRGLVRQRHRIVKDIGRTKNRVKALLFQIGITIPERFNPYQSRHWSKPFTGWLKSLPDNPTGIRDLVGNYVRIGELLRNELLLVTRQVRDLSQTDQYKENFGLVTSSPGIGTVGGMTILTEFDDITRFGHCDHLCNFVGLVPSMHGSGERMATGKMSKRGRKQLKCVLVEAAWTSIRKDPAMMLKYKELTKRMNGNKAIIRIARKLLNRIRYILINRQEYEMGVIK

SEQ ID NO: 326145 - protein, 348 aa, unidentified
MLKYSVGLDISSKKIDCCFSSIDMGQKVTVQSTVTVCNNPTGFNLLADWIAKNHRQKDIALVICMEATGVYYESCALFLFEKGCKVSVILPNKAKKYLQALGLKSKNDSIDAKGLAQMGAEQNLKLWEPMGKYFYELRQFTRQYQNIQKQITVYRNQLHSLKNSMYINKAIVKQLEQVIKLFTKQLKELEEQIKNHLESNPEVMQKTENICKIKGVGILSLATVLAETNGFSLFESSRQLVSFAGYDVVENQSGKRVGKTKISKKGNSRIRRILFMPAFTVVRCKEAPFLNLYTRTFSNHGIKMKSYVAVQKKLLVIIYSLYKNNQPYDPKRQNIQEKEQVLASLLAS

SEQ ID NO: 326146 - protein, 329 aa, unidentified
MPKVVVGLDMHLKKTQGTVMSMSGKIVKQERFNTDREELREFLNGLPKGTEVALESLGFCWPWIDFIEELGHAPLLANPIKVKIRAEDVKTDKVDSELLAHLTRMDWLPTCYVPNKEMRWLRNLLRHRAFRRKISTALKNKTWSEFRKRGIELNADFGTQKGRRKAESSGIYEISQNLEILEVVEGQIKQIESELRKRYGDLKPLELLQSIPGIGFLTALTLYAEICDIGRFSNPDKLAHYAGLVPRVKQTAGHTRMGRETRANKWLKWALIEAAWSHVNWCPEGRLAAVFENAYRRKRDKKKAIKIVARKLVNIIWAVWTYEKEFKME

SEQ ID NO: 326147 - protein, 402 aa, unidentified
MNCVGIDVSKGKSMIAVMRPFGEVVVSPFEVRHTANELSELAGLLKSLDGETRVVMESTGNYHAPVAWLLHDAGLYVSVVNAMLVHDYGNNSLRRAKTDKKDAVKLANYGLDHWLTLTRYVPEEDTRLMLKTCYRQYQQYSKVQTMLKNNLISLLDTTFPDANRLFTSPPRADGSEKWVDFVATFWHCECVCGRSEKAFTTQYQKWCRKHGYNFSEDKALDIYASACRHFGVIPKTDTAKLLVEQAISQLQTTSSALAALKQEMQSLAASLPEYPVVMGMFGVGPTLGPQLLAEIGDVRRFHSKKALVAFAGIDAPPYQSGQIDVRSRSISKRGSASLRRTLFLVMGVILQHAPMNEPVYQFMNKKRSEGKPYRVYMIASANKFLRIYYASVKAYLDSLEHD

SEQ ID NO: 326148 - protein, 333 aa, unidentified
MVLKTGLQGRDRKMSLKVVSAGLDVSKQWIDAAVWWPGLREKVQARFDQTPQGLEQLCDWLIGHEVWRVGLEASGGYEVAAMDALQARGLMVFRLNAQRVRQFARAKGRLAKNDKVDALVIAKAVTVLPDEGQAAPLRRRELDPLVERLNHRRRLRDLSSDCDNHLEHLVDAKLRAWTIALRAQLKARIALLDKELAALVARAGPLSEVADRLRTAKGAGPLLAQTLVALLPELGQVTRRQIASLVGVAPFDDDSGKRIGERHIKGGREAIREVLYMATLSAMRFNPTIKAFAARLAGKKPKVIIVACMRKLLVSLNAMARDATDWRDPAAAA

SEQ ID NO: 326149 - protein, 413 aa, unidentified
MVYVGIDIAKRVHVCAILDESNTVVVKPFRFHNDAKGFKKLLVHIERLGLDASDILIGMEATGSLFENLYRHLKALEYPVVLLNPYQTSKFREMDTMKRVKNDNIDAVMIAALLKSGRFSKGYVSDEQLHSLRELYRHKESLSNQLKALKRNTQTILTVVFPELETVIRDPFSMTGLALLEKYPTAKHYEFASADRILKTFRGIQGNNFTQEKAQLLLDRAKASVYSGVAKEARALHIRMNIKQIRMLQTMLDETIEAMQALFSEEAPLKEEDKEVVSDIIDNLRTIPGVSDKTILALLAECGNLDRFHSAKALVGYLGLYPTLDESGEKSRSGKLAKRGAKLAKKAIFLAAIAAIKHNEQMYTIYLKYRSRGKAKKEALIIVARKLIAIIYAIYTRNEPYDPVRVFTARPNT

SEQ ID NO: 326150 - protein, 365 aa, unidentified
MKIIYWIGIDDHADKWTVAQYRGEEPQPSKEFELVPDEKGYRRLLGYLKGLEGEVRVVYEAGPCGYELYRRLTRAGYKCQVAAPALTPRKPGERVKTNRRDAAKLARYLRSNDLTFIVVPDQDRESLRDLVRSRQSVQKDVGRMRKQIIHLLLRYGHRYREGQAWTQRFWAWLKKVQLEGVHSRFVLTEMIGELEHRISQLERYDEQVELASQKPEYQHYLAAQRTLRGINTLSAMTILSELGDLRRFATAPKLMAAVGVVPSEYSTGDKTNRFSITKTGNAHLRHVVVEAAWQYQRRPLLGRTIKARRKDQPKAIVEIVEKCDKRLHARFYRLTSRNKKSSVAVVAVARELLGFIWAIGQIAHP

SEQ ID NO: 326151 - protein, 349 aa, unidentified
MLADELDYVLGVDTHRDEHVMAVVTAPAGAVVAGAAAPANAYGYRELLRVAEQHAPGRRAWAIEGTGSYGAGLSRYLCARGESVLEVSRVPRGERRLRGKDDALDAARTARAALASDTLALPRTGERREALRLLLVARRSAVDVRREALTQLRAVIVTAPEPLRQQLCRLSEGKLLDRCSRLRRTSSAGADELATRIVLRSLARRVRTATVEAHELEREILAHVHVLAPTLLDEPGVGPIVAAQLIVAWSHPGRLRSEAAFARLAGVAPVPASSGQTTRHRLSRGGDRQLNRALHTVILHRRQHDPATRDYIARRVAEGKSRRDATRLLKRYLARHLYRVLEQQTPLTT

SEQ ID NO: 326152 - protein, 413 aa, unidentified
MTDTNNHDTENVLIAIDIAKKSHDALIQLPSGKLKAMKIPNSLEGYHRLIKHADVSPEAIRVGFEPTADYHRNIAYWLQKQGAECFLVSSLACARAREMLFKSWDKHDRKDAHVILYLMQQGIIQPFYDPLVADTMDIQELSNTYHQISLARTRCHNSLFNHYITLYFPEMERYFHNTRAEWFCRVLLKFPTPSSITRYKQATFVKRAWEIVGRKVAKQRFLEELYETATQSIGLPVDLKSLAVTTFKVQLNRYLELSLQRKQLEKMADDLLIERSDYQQLRTLPGVGPVIALMIIAESGDLKRFRHYRQYLNFCGFNLSAIQSGNQQGRYHLSKRGNARLRYAYWLAAVSAIRQRENSFRYKYERYIRNNPDNPDLKRKARVAVASKMARVAHALVKKNTNYRGFYEFGHGT

SEQ ID NO: 326153 - protein, 354 aa, unidentified
MARKSTSLEAVATIGIDIGKNTFHLIGLDKKGAIVLRQKLSRAQVDARLANMPPCLIGMEACVGAHHLGRRLKALGHDARLMPARYVRPYSKGQKNDFRDAEAIAEAVLRPTMKFVAIKTVEQLDLQGLHRVRERLVCQRTSVINQIRAFLLERGIAVRQGLRALRTEMPIVLAMTDKLSPRMIRMIENLCTDWRHLDERIETVSDEITTLSEQDDGAKRLMTVPGIGPIISTATVAAIGRGDVFSKGRDFGAWLGLVPRQMSTGGRTILGPISKRGNRYLRMLFVQAARAVLLRPQSWEKHGLKSWIEAAARRLNRFKLAIALANKIARIAWGVLHGGRNFEVRPMTPASQST

SEQ ID NO: 326154 - protein, 363 aa, unidentified
MQNSITWVGMDVHAENIVLAALRDSSDAVLFRAEFPNTPKGRERLAGRLAENAPVRCVYEAGPCGYELRRFLESKGIECDVAAPALIPRKPGDRVKTDRKDAEKLARLHRLGELATVFVPTPAQEALRDLLRTREDAREDLLRRRHRLSKFLLRQGRRYTEGERWTMRHWDWIRAQIFTERNAETVFREYIVAIEQEVERIRRIELQIVEESRGPEVGKAIARLRALRGVDTITAMTIITEVIDLNRFRSPRELMAFIGVVPRERSSGGRERRGSITKTGNAHIRRVLIESAWHYQRLPAGTPKTILVRREGQPPEVIETARKAELRLHRKFMKLVGRGKPKGIAAVAVARELAGFIWALGRG

SEQ ID NO: 326155 - protein, 326 aa, unidentified
MEHELHYIGIDTAKEKLDVDVLRPDGRHRTKKFANTTKGHDELVSWLKGHKIDHAHICIEATGTYMEPVAECLYDAGYIVSVINPALGKAFAQSEGLRNKTDTVDARMLAEFCRQKRPAAWEAPHPLERALRALVVRHQALTDMHTQELNRTETAREVQRPSIDAHLLWLEAELKRLEKQIKDLTDDDPDMKHRRKLLESIPGIGEKTSAVLLAYIGLKDRFAHARQFAAFAGLTPRRYESGSSVRGASRMSKAGHVSLRRALYMPAMVATSKTEWGRAFRDRLAANGKKGKVILGAMMRKLAQVAYGVLKSGVPFDASRHNPVAT

SEQ ID NO: 326156 - protein, 312 aa, unidentified
MTNTGEWIGVDISKRFLDVYAASAPPFRVANDADGRSALTERLRALGVRGVVLEATGGLERPVLAALIGADLPGSIVNPARVRAFAEGTGQLAKTDRIDAKVLAAYGAYMRPQPTALPSSARAKLKELLAYRAQIGEEIVARCAQLKLYQSDGLRARAQDALEALRRERRELEREIDTLVESEAELCAPFQILTSVPSIGTVVGATLLAELPELGALCRRRIAALAGLAPFPCDSGERRGYRAIRGGRSHVRKALFNAARVAIQHNPKIKAFYQRLRASGKPGKVAIVAAMRKLLTILNAMLRSATTWQAQT

SEQ ID NO: 326157 - protein, 425 aa, unidentified
MEVIHRRCSGLDVHKETVVACVRLVLDDKITREVRTFETTTSGLLLLLAWLTELGCTHVAMEATGVYWKPVWNILSDGDFELVLANAAHIKNVPGRKTDVSDAAWIADLLAHGLIRSSFVPEQEFQELRELLRTRKQLGRQQSSHIRRLQKTLECANVKLDSVITDLVGKSGRAMLQALIAGETDPVKLAALADRRIKASAQELREALRGRVTDHHRFLLHLHLQHIDFADSAIQDIDRNVTALITRMDQEVEAGQTRATFQSLILLLMTIPGIDVLSARIILSEIGRDMSRFPTAGHLLSWAGLCPRNDESAGKRRSTRLRKGDPWLKTLLVQCAWAARRKKGSYFNAQFLRLRGRRGPKKAACAVAASLLTTIYHMLKDGTQFQDLGADHFDRRSKDVRAKRLVAQLANLGFNAKLTPLAQAA

SEQ ID NO: 326158 - protein, 337 aa, unidentified
MGTSPHSQARGVRRGKGTRQERPSEGHSVFVGIDVSKARLDVAFRPEGTSFEASNDEAGIGDCVRRLQALRPELIVVEATGGFETALVAGAAVVGLPIVVVNPKQVRHFAKAIGRLAKTDSIDAEVIAHFAEAVRPEVRPIQNEAGELLTALLSRRRQVLDMVVAENNRLTTTRERQVRQRITHHLHFLKQELRELDKDLDKEVRSSPAWREKEDLLKSVPGVGPVLARTLLAELPELGRLDRKRIAVLVGVAPMNNDSGSLRGQRRIQGGRAKVRNVLYMAALVASRFNPRLKRFYEGLRASGKTGKVALVACMRKLIVILNALVRSGERWNAEAT

SEQ ID NO: 326159 - protein, 310 aa, unidentified
MENIVVGIDISKDQLDIHVLPSQASFCVARDAIGLEELVQRLLVLKPKLVVMEATGGFETIVASTLAAAGFPLAVVNPRWIRAYAQALGRLAKTDRIDAAIIAAYGRDAKIEAQKVPDEAAQMLGELVARRRQIVETMGVERNRRRSLTRSKLIKGLDRILAALQKELSDLEQDIDQAIRGTTAWREKDELLQSVPSVGPRISSLLIAELPELGTLTRRKIAALVGVAPMSDDSGKHRGRRHIKGGRIQVRCALYMAALVASRRNPVIAAYYQRLIAAGKKPKQALTACMRKLLVILNAILRDHRPWQPT

SEQ ID NO: 326160 - protein, 322 aa, unidentified
MEAVYAGIDISKQWLEVGLWPGAETFRLSNDASGVAELAERLRALGSRAVVLESTGGWEVLAASELHAAGLTVAVVNPRQVREFARSLGTLGKTDRLDAVVLAQFAQSSHSNGRLVARRLADEAERELKALVVRRRQLVGMLVAETNRRERAPKVVRQSIVQTIKGLKRAVAQVEQQLKQVLAGSPPQQSKATLLTAVPGVGPQLTFTLIAELPELGQLGRRQIASLVGVAPHPYESGKFKGRRMIWGGRASVRTMLYMAALSAVRHNPLLRTSYQALLARGKSKKLALVACMRKLLTILNAIARDSSPWNPSHHLDFLHSR

SEQ ID NO: 326161 - protein, 329 aa, unidentified
MRRVIGIDIHRTFGEVVIWEDGRLRPAGRVDMTRTALEGFGKELQATDEVVIEATGNCMAVSRVLSPFVAKVVIANPLQVKAIAHAHVKTDKIDAGTLASLQAAGYLPEIWTPDPATERLRRLVARRNQVVRHRTRIKNELHAILHAHLIPRCPHADLFSRIGRAWLERQPLPEDEMLAVARHLRELDRLGEDLLLLDREVARDALGHPAIKRLITITGVNVTVAAGLVAAIGDIRRFAAPQKLVSYVGLNPRVRQSGLGLAQHGRISKAGSARPVAATPGRCSSKPPGQLPRRQDLCMRSSSGSGPGEATRSPPWPSPASSPYCAGTF

SEQ ID NO: 326162 - protein, 382 aa, unidentified
MTGTEPHAWGTDLMDDIIFVGLDVHKATVCIAVAEGGRGGDVRQLGVFENRPEILSKVVSRLSKGGRRLSFCYEAGPCGYGLHRLLTGYGHECVVVAPSLIPMKAGDRVKTDRRDALMLAKLHRAGELTAIWIPDAAHEAMRDLVRARATAVRVLAKARQHLQGFLLRHERIYRGARAWTLAYRRWLSTVHFEHPAQQIVLQDYIHAVQEAETRRERLTQQIEELLPNWSMAPVVAALQAMRGVALIVAVTVVAEVGDFRRFANPRQLMAYLGLVPSEHSSGRSVRRGGITKAGNALARRVLIEGAWTYRMSARVSRKLHDRVEGLPAAVRDIAWKAQLRLCARYRRLAATGRPKVVVTTAIAREMVGFIWAIARLAQPALV

SEQ ID NO: 326163 - protein, 348 aa, unidentified
MNKKIVKQVAGIDVAQKELVVCLGRMYDDWAPELYSHKTFPNHEKGFMALVLWVKKLAVEEVPVRFVMEATGVYHESLAYFLEEKGYESSIVLPNKISNYSRTLEVKTVTDKTASEAIARFGLERKLDPWKRPKKLFKNLRQLTRERDQVVQMRTMAKNQLHAEQAEAEPNPGSVTRIKQQIVFLNKQELQIKKELLVLSRQDSQVQQSVKLLCSITGVGSLTATTVLAETNGFELIRNKRQLTSYAGLDVKEKQSGTSVKGKAHISKRGNRYLRKAMHLPALTAIRHDDRFKAIFARLVSKHGIKMKAAVAVQRKLLEMMYIVYKTNIPYDKKYLQRNEEQQQIING

SEQ ID NO: 326164 - protein, 358 aa, unidentified
MNYVGLDVSMKETFICIEDESGKILNHGRVKTEPELIADYLIKFMPLAKVGLESGSLSHWLTDELRKLQIPAICIDARKMAAVLSVQVNKTDKNDARGIAEAMRCGIYREVQPKSQESIEIGTLMRSRRILVEQKIKLSNAVRGFLKIYGIRLGNVGEAGFSKTVRKKLSEKSASAKEGIEGLLSCYEKTREEIGKLTKRIEQIASEDEDVKLLMTIPGVGPIVGLAYKIEIDNPKRFRNSKTVGSYLGMTPKQYSSGETHRQGRISKCGSTEVRCLLNEAATTMLTRSKAWSKLKAWGLKIQRKHGFKKATMAVGRKLAVVMHRMMIEKTNFIYGDPKEEKKRSPCKNDAIGLARAI

SEQ ID NO: 326165 - protein, 410 aa, unidentified
MDVVYSRCAGLDIHKKTIMACVVVPGPKGKPQKTIRAFGTMTDDISALGDWLAAEQVTHVAMESTGVYWQPLWNLLEQRFALLLVNAQHIKQVPGRKTDVGDCEWIADLLRHGLLRASFVPDRAQRELRELTRYRTALLQDRAAEVNRLQKTLEGANIKLAAVASDVLGKSGRQILDALVAGGTEAGDLAQFAKGRLREKIPQLERALVGSFRPHQQFMVARHLAFIDAIDETVAQVSAEVAERLRPVEADVELLDAITGIGRRTAEVWLAEVGTDLERFPTHSHLASWAGMCPGNNESAGKRKSGKTRKGNSHLRTALVEAAQAAARKRDSYLSAQYRRLAARRGKKKAIIALGHSLLIIAYHVLKRRVDFQDLGPTYFDERDRTNVERRLVRRLERLGYKVALEPVAA

SEQ ID NO: 326166 - protein, 315 aa, unidentified
MAMPVPVSKPIVGVDVAKNELVIYQAELDLLEVIPNNKTAIKKWLKALPGSVSIAIEATNIYHLEFADLAYEAGCVIYMVGGYELSHYRKGVNVRAKTDAQDAKLLARYLKNEADELHPWTPPSPLYRQLLSLFRRRAALVQARVSLTQSWANEPLLKASFAEQIKSMQKLESLIEKMISDRLKEAGLSDQLKRCLKVEGIGFLTGARLVTSFQRGDFRNADAFIAFLGMDLRVSKSGQKDNRRSLSKRGDSEARRLLHNAAMAASRTAAWKEFYQAQRARGYSTTQVLVMLARKLARVVFALLKGQSEYQPRVG

SEQ ID NO: 326167 - protein, 341 aa, unidentified
MAKITTIGLDLAKNVFHMVCCDERGKVVKKRKLKRREMLTFFATLEPCLIGMESCASAHYWARQLEALGHEVKLIPAQYVKAYVRGNKNDYNDALAISEAVTRPQMRFVSVKTPEQQDVQALHRLRERCVQMRTGLCNQIRGLVGEYGLVCARGVSTLRRHIPLWLEDAENGLSDFFRRLLSQSYRQLQGLDEDIDTYSQELTRHSQQNEACQRLQTIPGFGPIVASVFHSQVGDGKAYHRGRDVSASIGLVPRQNSSGGKDTLLGISKRGDRYLRSLLVHGARAVVSRAKGKDDPLSRWINRIRAARGMNKATVALANKMARMGWAVLAHNTHYKPAVQA

SEQ ID NO: 326168 - protein, 421 aa, unidentified
MSTPTGPAFSAHIGLDWADAKHDFCLQPGDTGEREFGRFAHGPDQIDAWARGLKERFGGTIAVALELTKGPIVYALQKYDFIVLFPVNPSMLAKYREAFHPSHAKDDPTDAELALDLMLRYPQQCLPLHPQSVAMRTLGHLVEHRRRLVDDRKRTTNRLVDALKQYFPHVLDWFERRDTLVFCDFLTRWPTLAQVKHARTATLEGFFHDHNVRRPRLIAERVDGIRHAMPLTEDIAVIQSYRLFTLALVDQLRVMLQAIARFDQEIAALAPTLPDYLLFDALPGSGPVLTPRLQTAWGEQRERFQNAGQVQRYSGVAPVTQRSGKKSWVHWRWQCSTFVRQTFVEWAAQTINKSFWAGAFYRQQRAKGSSHQVAVRALAFKWIRIVYRCWQTHTPYDESRYLMALQLRGSHLVAGLPAKST

SEQ ID NO: 326169 - protein, 324 aa, unidentified
METWIGIDISKDSFDAAWEQDGKKAHEKFQNTTTGFKALMKWAPEDSKFVMEATGTYHLRCAMFLAGNGRHVSVENPLAVKRFIQSDLRRCKSDVSDAFSLAKYGRVREPMAWHVPSEDARKARRLQGWIETLQGQLTAQCNYLHALQQEDLGDVALAQCKKMIAYMKKAIAEAEKRFESIVCKCKKEEVDLIASIPGVGRISACKLVAKVEDFGRFKDSRQFMSWLGMTPRNMQSGTSIRVNGGITKMGDGRLRAQFYMCAVASIKFNDRCQKMWERMRAKGKPAKVVFIAIACKLLKTAYALVTKKQKYEANYNVKNLQLAS

SEQ ID NO: 326170 - protein, 366 aa, unidentified
MKKISTVQSFGNEIFKEQKLTIGVDLGDRWSFYGVLDEAGKIILEQKVPTTQEAMKQTFGKIPRSRIALETGTHSPWVSRVLTELGHEVIVAHAQKVQLISKSNRKDDRHDARTLARLARIDPELLGPVRHRSVQAQIHLTVIRARAELVSARTALVNAARGLVKSYGERLPKCGTYQVSRELAAELSAELRDVLEPLLKEIESLNERIKEYDERMEKIAKEVHPEVSLLKQVKGVGTQIALTYVLTIEDPYRFLKSREVGCFLGLRPGRRNSGESEPQKRISKEGDRYLRTMMVQGAHYILGPFGEDSDLRRWGLKLAERGGKNAKKRAVVAVARKLAVLLHRLWVSGEVYEPLRNSQKAMRAVA

SEQ ID NO: 326171 - protein, 421 aa, unidentified
MKVVYPVCCGIDVHKRFLVATIVSVTKMQTLSYKRERFSTFNKNLQRLKHWLIENGCYDVCMESTGKYWVPVLNVLEPEMHVVIANPKWVRAVQGHKDDAKDSKWIAELFCFGLVKGSFIPSKDIRILREFTRYRAKLTNMRSSEKNRFQNGFTVCNIALDAVVSDMFGTSAQRITKYLLTDKEPTAQHCSSLLHRSLKKKAVAVVESIEGFQLTEEQKFRMLQIRQHMEYLNATIQALDEKLDQMAAPYAAAIRLFCTIPGMGRESALTILSEIGTDMTQFGSSKRLCSWAGLTPGNNQSAGKKKSVRITRAGVYIKPMLVQVAHAAVKCTSQPYYKVKYENIARRRGKKRAIIAIARMILTAIYHMFKTGEVFCPTDLRQIDMPEELKEKRRSRKIQNAIHLLKQQGILSETFVAPTCA

SEQ ID NO: 326172 - protein, 348 aa, unidentified
MTIVSEKYAHVIGVDTHARTHTYAIVSTTTGACAGCEAFPVTSAGMKRAIAWIRRGTSGQVLASVEGTSSYGASLTRALTAEGITVVEAKPPRKAVRAGVGKTDEIDATAAATGVLGTDVDRLLHPRTDGARAALSVLLASRRRVEKQSTANRNALNALVRQIDLGLDTRWAATDKQVAEIRAWRPRTTDSVEQQIAREEAIDLARGITAAAARVKLIKAHLAELDEQLAPGLQAQPGLGPVTVGIILAAYSHSGRVRNEAAFASLAGVSPLQASSGNTTRHRLNRHGDRQLNMALDVIIKTRMRFDETTKKYVERRTAQGLSYREIKRALKRYLARDLFRQLQQLFS

SEQ ID NO: 326173 - protein, 360 aa, unidentified
MAKAKTLVGLDVHATRIVAAVLDAESGELRMFRMNGDAGDAAAFCAGLPRPVRAAYEAGPTGYGLARELAKRRVECVVAAPSKIPRASGDRVKTDRRDAELLVRLLLAGKLHAVRVPGLEEEALRDLVRAREAVRVDLMRCRHRLSKLLLRHGIQFDDGRAWTQRHRDWLATIALPWPAAQATMLDAQGAIDALAHRRDQLEREIVVLIPGSPWVVQVGRLRCLRGVDTLTAVGLCAEIGDFERFARAEQLMSYVGLVPCESTTGQQRRLGSITKTGSGHARRLLVEAAWHYRPRPRIGKALTDRQSGQPAEAIAVAWSAQQRLHRTWARLEQRAKRRTIIAVAAARELAGFAWAVTQIE

SEQ ID NO: 326174 - protein, 338 aa, unidentified
MKLYGAVDLHSNNSVVEIIDEQDRVVYEKRLPNELPFILSQLSPYQSSIQGIVVESTFNWYWLVDGLMDAGYTVHLANTAAIQPYEGLKYTDDHFDGRWLAHMLRLGVLAEGYIYPKEERAVRDLLRKRSQLVRQKTANLLSIETIVTRNTGALISANRIRQLTPETVGSLFANQDHALASQANLSVMRCLEEQIQILEQAVKKRIRLRPTFRYLKTVHGIGEILALTIMLETGDIRRFPQVGNFASYCRCVDSRKISNGKRKGSGNRKNGNKYLAWAFVEAANFAVRYNPSVKRFYQRKKTKTKGVVAIKAVAHKLARACYYIMKDQVPFDTAKAFA

SEQ ID NO: 326175 - protein, 463 aa, unidentified
MIAKKIDKSKPNKSAVPKQQKKNALDFINVNAAGIDIGSKSHFVAIPEGRDTECVREFKTFTNSLIGLVSWLKKVGITSVAMESTGVYWIPVYDMLEKSGFDVLLVNAKHIKNVPGRKTDVNDCQWIQQLHTYGLLRGSFRPKDKILKMRTLLRHRSTMIDYASSHIQHVQKSLSLMNIQLNNVIRDVMGATGMKIIRAIIEGERDPEKLAKYRDPNCKSTEKEICESLVGNYQEDHMFCLKQALELYDYYSIKIAECDLEIEKIMNEMESLIGEGEPKAYTKKKTTQKHKFAFSLYEELIRITGVDLTAIPGLNVQSVAKIISEVGVDMSKWETSKQFAAWLGLCPGNKISGGKRLSGKTAPCSNKAAAAFRMGANALRRSNTALGAFFRRMSGRLIPAKAITAAAHKLAVIFYNMLKTGQEYMESGAQYYEMEYRDRCVKSLVKKATRLGFAIVPIEPIQN

SEQ ID NO: 326176 - protein, 345 aa, unidentified
MYRTKVGVDLAKEVIQVCIYRNKKVQSNIEMTPNEFLCWLVNAKPVTIIFEACGTSNYWKQKAISAGHDARLISAKLVATVRQNQKTDKNDALAIVQAASLPDVAFIGGKTVEQQQLQTIKRLRELAVKHQGAIQKQLVSLLLELNIRISNRKGGIISAIDGVLEDATNGLSVECRIAIDTAKMNLKVSIEAVQRYDNCLEKSVIAHADCKKLLKLEGVGTMNAINLYLALGCSDIGVFSKGKDASACIGLTPIQHSSGGFVKLGSIGKHCKNSILRSQLICGAMAAVNQAVIREAKTKKDVWIKGLVERRGKKCAAVALANKTVRTAFAMLTQGTEYKAELLAA

SEQ ID NO: 326177 - protein, 410 aa, unidentified
MQTIVERGCGLDVHQATVVACLLIVRKNGTVHKQVRSFGTTTRELVSLREWLLAEGCTHAAMESTGVYWKPVYAVLEGALEIVVANAYHVKNVPGRKTDVKDAEWLADLLCHGLLRSSFVPPKPIRELRDLTRYRRKLVEAQTAERNRLLKVLESANIKLASVATDVFGVSGRLMLRALIEGVATPEEMSELAKGTLRRKIARLQPALEGNLEPHHRFLLKLQWQPVEAAERDLATLQERIQQKLEPYAAQSALLDEIPGVDRGLAAVIIAELGVDMTVFQSVSHLASWAGVCPGNNESAGKRRNSRVTKGNLYLKSALIEAANAAARAKGTYLRDKFYRLKARRGYKRAALAIAHKILVAVHHMLLQNVSYKDLGDLYLDKLNKHHLTRNLVHRLERLGFEVTLHLKAA

SEQ ID NO: 326178 - protein, 332 aa, unidentified
MEARTVSTLPPVAADHDPIRCLVAIELSKKSWIVAVNSPLSDKIGRHTLEACDWKGLLERIERTRMRVVRELNRPVEVISCYEAGYDGFWLHRLLEAHGVRNYVIDPASLHVDRRARRAKTDHIDVAQLLRSLMAYLRGEPKVWSVVRVPSVAEEDNRRVHRERHRLIAERVQHVNRIKGLCAVHGIYDYEPLRSNRMLRLEQLRTGDGRELPRRLKAEIVRELERLELVLQMIETIEKERDAIASARQTSPHTNAKKIQELAKIKGIGAETATVLVGEVFYRRFDNRQQLASYVGLTPSHFQSGSMSRDQGISKAGNPRPAPPWSNWPGSG

SEQ ID NO: 326179 - protein, 340 aa, unidentified
MRIRKVSRNLDSGKSASMYDQYIAIDWSLKTMAIAHMSHRDDHPRIFEREADLKELKEYLASFKGRTIITLEESGTAHWLYLELVACVERIIVCDPFHNRLLWHGPKTDKIDAGKLCELLRAGLLKEVYHSDNGIYELRTLVSAYQDVVSAGVRALNQKRALALGHRDKGKSASFIEGMLQENIDLYRRSKQQYERRLADVARRNTLVRYQREIDGIGTIGAVRIVATVVDARRFPYAGKYLSYCGLVKHEKLSGGRSYGRRKPRYNRVLKSVYRTAALAAVRGANPMREYYDHLLAQGVAEHNARQAVARYIARISYGMLKSGAHYEPYHRKGEAKKAI

SEQ ID NO: 326180 - protein, 405 aa, unidentified
MNAVGIDVSKGKSTVTIRKPGDVVLMSPCDIPHTQSAINDLIKQIKSLEGETKVCMEHTGRYYEPVATWLSDAGIFVSAVNPILIRDFGDDSLRTPKTDKADSKKIARYTLDRWAKLKQYGIMDKTRNQLKTMNRQFGFYMAQKTAMKNNLIALIDQTYPGANDFFDSPARNDGSQKWVDFIHTYWHVDCVRSKSLNAFTEHYQNWCKRKNYNFSAEKAAKIYQISSDLIAVFPKNDITKMLIWQAVALLNTASKTVESLRSKMNELASTLPEYPVVMDMNGVGATLGPQLIAEIGDVSRFTHREALTAFAGVDPGKNDSGKHIQNSVRTSKKGSPYLRKALFQIMDSLIKRSPVDDPVYAFMDKKRSEGKSYYVYMTAGANKFLRIYYGRVREYLSNLSNNETI

SEQ ID NO: 326181 - protein, 354 aa, unidentified
MVIIAFDSHKRYTQACVERLDGVGICEERIEHRRGQIKEFLKQYEAGTPVAIETIGNWYWLVDEIESAGMEARLVHARKAKMMIGAVNKTDKLDARGLNLLQRCGTLPTVWIPAGELRDQRELPRTRMVFARQRTVLKNRIHSVIDKYGLGEEFSGISDIFGLKGKRRLLDAMKLMPQETRFCVEGLLEELEHIEDRLEAIENRIGEVYKENDEIKFLRTMPGVGPILSVVIWQEMGDVNRFASAERFASYCGTCPRISQSGDKCRIGRLRTDVNQYLKWAFSEAGNSIAVNYKRMPHRYVSGLYARLRQKKGHSKAVGAVARHLAESSWYMLSKGENYLERRFGNGSMRATLS

SEQ ID NO: 326182 - protein, 358 aa, unidentified
MEHHILKVALGVDVSKDNLAVCLCRLTVNLTKEFEDPFEVSNDLPGFKKLIRWLDKQVASRENLWIVMESTGIYHEAFVYYLYEAGFNVSVMQSGRVKRYAQSLDQRSKTDALDSRMLAMLGCERALPVWTPPDPILRELKGLSRERSFLLKEKQIEKNRLHASEHSVYNNKRELRRYKQRLKLIARQLEEIEKEMTELINASSYLKGRIKHLESIPGISFVSAATVVGETLGFTGFTNAKQLTSYAGFDVVLKESGAYKGKTRISKKGNKNIRRALYMPAMTAVRCNPTLKKFYERVKPTKAKPMIALVAVERKLLVLMYSLWKNEINYDPEYEQKKTARTEVLAAQDRSNLALTSS

SEQ ID NO: 326183 - protein, 434 aa, unidentified
MSEFLNDFIVGIDVSSEFSVVAMLEPNGSLIRKPFRIDHNPAGFNKLLGILKKEEERLKQKPIYFVESTGIFHLPLFFFLKSNDLKGFVLNPLCVHSTKNFDLRKVKNDAKDAESIARLAKFQDVKYSLVPEPQILSLRMLLREYYAISDMLTELKNRLCTDLYLLFPGYLDVFSNPFGKASLKILRDYQTPQAILSENPDTLAQMIAKTSRKGLIWGQKKVAKLVEMAQLCLQMPMEFSILSRKIQYHLDGIETFQANLEGLKDELAGMISNVDFPKNVRDSIILLEAMPGIGFLTAATILAEIGDFSRFHSPKALVAFFGIDPSVNQSGKFNGDRNKISKRGTRFGRRVLFTAALASIRTTCKGDPINPVLRDYYQNKCQNKKKKVALVAVMHKLLHYIFAVLRDQKPFEFRSPEDHQSWRNSTHSSLTLAA

SEQ ID NO: 326184 - protein, 426 aa, unidentified
MVSDDVMIAVDPHKASNTAAVLDPVTKTLIGTARFANTGEGYARLAGFARRWDCRRWAVEGCRGAGRSLAQRLVADGEVVLDVPAKLAARVRVYSQGHGRKTDKDDAVSIGLAALDGSGVAPVAPDDVLAALRLLCDRREELCALRTQSVCRLHRLLTELTPGGMRRELTAGKAEALLARIRPGDDVARIRLQLARDHLADIRALDARLKTAAAQISDLVTATGTTLTSLFGIGPVIAGRILAETGDVSRFATKDKFASYNGTAPIDASSGDQVRHRLSRSGNRRINHALHMMAVTQIRYPWTDGRRYYERKRAEGKTPKEALRCLKRRLSDQVYRQLVRDRQGTIEGCGSPTTRPPTPPTSTSPASTSPAAAPASPPPRQKASRRSSSWTGKTTASSASRSSTPAAACTPTSSKKRKSSADTGTS

SEQ ID NO: 326185 - protein, 348 aa, unidentified
MDIIGLNLHKRESQLSIRAEDGTITERRIVTSRERFTAVLGGRPRARILLEASTESEWMARHLESLGHEVIVADPNYAPMYANRSRRTKTDKRDARTLLDACETNAYRPAHRLSEARRHVRAELAVRDALVRTRTRYIALAKALVRRDGLRVPTSASSWVPTRIAELDLSPALATELTPLFAVYAPLNEQIAAADRRLAAVAAVDPIVARLATAPEIGPVTASAFVATIDDITRFGSAHQLEAYLGVVPSERSSGEKRQLGRITKAGNGRMRWLLVEAAWRILRSKSPETAALRAWALAIARRRGKRIAAVALARRLAGVLYAMWRDGVPYDAQRIRPLAVTVHERAG

SEQ ID NO: 326186 - protein, 406 aa, unidentified
MTTQKVCGIDVHRDTLVATIFDPKTQQKQTKTFRNSLDNITQLVNWLKQNKCQKTAMESTNIYWMPLYETLEATNIEPILANAYQVKAIPGRKTDQSDSEWLAQLLQANLIKPSYVPPKQIRILRKLVRLRIKYVQDRTQCKNRVQKIFNSVNIRLRTVISDIFGAAGTEIINGLLAEKTVDNILENTKNKQLKTKCDEIKAVAQGTLQQEDIFMLNQLLRTIKCLDEQIKQIEQHIAVLVDKTAMDIVMSVPGVGFLSAATILAELGEPSRFSNEKQVASWCGLVPSLHQSAGVTTLGRITKCGSKYLRWCMVEVAHGAVRVDCRFRVMFNRIAAKKGRKVAYVAVARKMLAVVWHLLVNGERYVDDGFLKKSVRVRLDGVVSVSFEDMIKTLRNAGFVVSKGLV

SEQ ID NO: 326187 - protein, 379 aa, unidentified
MADRITYVGLDVHKESIVVAVAAGGLRGEVREYGRIANTAGALDRLMRKLGGEGVGLRFCYEAGPCGYGIQRHLSAHGHECMVVAPSLIPKRAGDRVKTDRRDAASLARLHRAGELTAVWVPDAGHEAMRDLVRARLDAVHALRRARQQLSGFLLRQGCHYRRPAWTKLHRPHGSSPWAEGSRLAGLNFAQAVHHIVLEDYIAAVEAAEARRDRLTAQIEAMLPDWTLAPVVAALQTMRGMALVNAATLIAELGDLSRFANPRQLMAYLGLVPCEHSSGASIKRGGLTKAGNSAARRLLIEAAWTYRFPARVSRELLLRQEEQPKPIREIAWKAQLRLCARYRKLARSGKPANVVTAAIARELAGFIWAIARRVPPTAG

SEQ ID NO: 326188 - protein, 364 aa, unidentified
MKIVGCDLHAGQQSIAMMDSETGELTEKVLKHEGNAVREFYGSLQGPVVVGIEATGAMQWFLELLEQLGIECRVGHPAKIRAAETRQQKHDRRDAEVILELLLMKNRFPDIWMPSTEQRDLRSLLRDRHQWVKMRARLQHTLQAVALNHALRKGKALWTATGRQALQDLALPDYTAQRRDELLRLYMQLEQRIQQLDKQVEKEAQGRPQARRLLTHPGVGPVTALATEVFLGDPHRFDTANQVASYIGMIPCEHSSGKRRRLGKLTKEGNSLLRYLWTEATLHAAVKDPELKRFYRRKLVQKGMGKARVATARKLGIRLWIMLRDEIDYEEFCRRGKLPQKGKTYAGMPDFNSGPARAVTGSTE

SEQ ID NO: 326189 - protein, 342 aa, unidentified
MQVTTIGLDIAKNVFQVHGIDAAEKVVVRKQLRRSQVLEFFKALPRCLIGMEACATAHYWARELTKLGHKVRLMPARDVKAYVKRNKNDAADAEAICEAVRRPTIRFVLVKSAEQQSQLMLHRTRDLLMRQRTQVINALRAHLAELGIMAAQGNAGLRELLAIIAGAADDRLPVEAHASLLVLAAELQAMRTLIASIEKRIIAHHRSDEASKRLRSIPGIGLVGATAIVATITDPKAFRSGRDLAAWIGLVPRQDSTGGKQKLGPISKQGDRYLRRILVVGAHAVLKLARQKPEKYPWITQLLARKPFKVVAVALANKMARIAWALLVKGGPYRARALVAAA

SEQ ID NO: 326190 - protein, 342 aa, unidentified
MDHYAGIDVSLECSSVCVVEASGKIVREAKVASEPDALVSWFAGLGLRLSRIGLEAGPLSQWLYGGLRQAGLAVELLETRHVRAAFKTMPVKSDRNDARGMAQLMRLGWFRPVHCKSLGAQEVRALLTARKLIQAKLHDVENSLRGILRGFGLKVGKTTKRSFAGRIRELVAGHDSLTVIGQAVLGVHAVLLREFNGLETRVRDLARRDGKARLLMTVPGVGPIVALTYASAIDDPARFRSSKATGAHFGLTPTRYQSGERDVSGRISKVGDAAVRSGLYEAANIILIKPIKGCTELKSWATRIARRAGPRKAKVALARKLAVILHRMLADGQPFDPAAAAA

SEQ ID NO: 326191 - protein, 337 aa, unidentified
MEYFAGLDVSMAETHVCVMTRNGAVVHQAKVPSTPADIAAELAQVPTCRRVLFETGRMAPMLYHGLSQLGLPVVCVESRQAYQALKSLATHKTDRNDARGLAHLARTGFFKPVHVKSLPAHAVRSLIIARKKLVGQRVTLENQIRGLAVVFGVRLPRALSPAFIKQALRASEGIPGLSAAMRGLIAARAAVFAAIVAIDGDIRRMVRASDACRRLMSIPGVGQLTALAFTAAVDDPGRFRRSRDIGAYLGLVPRRYQSGEVDYSGGISKCGDRRLRTLLYEAANVMLTRYKGPLKLKDWAFAIAKRSTMRKARIALARRLAIIMHAMLRHGTEFKPA

SEQ ID NO: 326192 - protein, 339 aa, unidentified
MTITMIGIDIAKSVFHLHATNHLGHQVKRKKLRRDQLLQFLAQVPACKIAMEACGSSHHWAREIQQLGHKVLLISPQYVTPFRLGNKNDYNDAQAIAEAASRPQMRFVAIKSIEQQSILMLHRMRERLVKQRTALVNQTRGLLAEFGVVFPQGIHHFRAAIPYLLEDGDSDLTPMARESFALLYEEFLFSDQQVKHVENQIKAISEQSSVCKKLDEIQGIGELAATALYASIGDATLFKNGRHLSAFLGLVPRHDGSGDKNILKGISKRGNGYVRTLLIHGARSVLRHSINKSDPFSLWANALRERRGFNKACVAIANKLARYAWVVMSKDESFVSLTN

SEQ ID NO: 326193 - protein, 405 aa, unidentified
MDVLYERCAGLDVHRDTVVACLITPDGRELRTFGTMTDELLALADWLTGRQVSHVAMESTGVYWKPVYNLLEGTGIEPLVVNARHIKAVPGRKTDVRDAEWIADLLRHGLLRGSFIPDRPQRELRELVRYRKRLIEERGREAARLHKTLEGANVKLGAVASDVLGVSGRAMLNALVAGRDDPEALAAMAKGRLRDKHDRLVAALRGLIGPHQRRLLATQLRHVDFLDAEIAGLSAEIEERMRPFEPAIELATTTPGIGRRSAEVVLAEIGTDMRRFPSDRHLASWARMCPGMDESAGKRGSGATGPGNRWLRSALVEAAHSAARTKNTYLAAQYRRLAGRRGANRAAVAVGHTILVALYHMLRDGVAYEDLGSTWFDERDRRATVRHAVRRLEGLGYRVTLDSAA

SEQ ID NO: 326194 - protein, 367 aa, unidentified
MKKVSTVAMKQSRNISRQRLTIGLDLGDRNSWYCVLDETGQIQLEQRVRTTAKALGEVFGAMPHSRIALEIGTHSPWISRLLSKLGHEVIVANARKVRLIGESRKKDDRLDAQTLARLARIDPELLYPVRHRSAQAQADLMMIRARAGLVRARTGLVNTARGLAKSYGERLGGCNVRDMDPEKAEGLSPELQRALEPLLATIEELSERIVEYNDRIEALAQANYPQVELLKQIKGVGTLIALTFLLTLEDPHRFRKSRDVGGYLGLQPGRRNSGQSEPQLHISKEGDPYLRTLLVQGAQHILGPFGIDCDLRRWGLKLAERGGRNAKKRAIVATARKLAVLLHHLWVSGEIYEPLHNRDRLTLPVAA

SEQ ID NO: 326195 - protein, 412 aa, unidentified
MKDLLEISCGLDIHKEKIVACILTGPLGKPTRSEIREFSTLIPDMIALRNWIVSKNCHHVAMESTGIYWMPIYEILEDAFYGDITLLVVNARHMKNVPGKKTDMRDSEWISTLLRAGLLNGSFIPEKRIREFRDLNRYRKSVIRDITSQKNRIEKFLQSSGFRLSSFISDIFGASGRNIILHLIEHGQIDKTALDSCLKTKTRNRIDEILMSVNGTLSEHQKAFLRILMTHYDSLKKHLAEIETSLEKDMAPFALQVEQLNSIYGISTTASCAIIAEIGIDMKPFKTAEHICSWAGLCPGNNESAGKRKSASVTKGNPYIKSMLCEIAWVIAGKRNTYLSAWYWRIKQKKGAKKAIVALARKLLVIIYTMLKQGTLFDESCFETRRKHCEQKQLSRYIRELEKHGYHVEAQS

SEQ ID NO: 326196 - protein, 355 aa, unidentified
MSSEKYIGMDVHQATISVAVMDSTGKVIMESILETKSSTILEFLGGLRGTLSVTFEEGTWARWLYDLIKPHVAHVLACNPRKNAALQQGNRSDKIDARELANRLRLNDLKPVYHGENGIRMLRELARSYLTIVKDLSRVMNRLKALYRSWAIPCAGRDVYYTRHRSQWLEKIREAGPRRRAEHLYQQLDLLQHLRQQARRELLAEGRRHSITAKLRKIPALGPIRSALAVALIQTPHRFRSKRQLWKYCGLALETRITGEYVYVHGERRRSKKQLSIRGLNKDHNHDLKGLFKGAATQASVKPGPFQEFYQRSLAKGIKPTMVRLTLARKIAAITLTLWKKGEDFDIHKLNSQAA

SEQ ID NO: 326197 - protein, 472 aa, unidentified
MIRSVGIDLHQGRHRARCLDDRAQPCDSFSFQTTPEGLATLEERVFRDGANPIIVLEPAGLPWLMVAVYLRSRHPDCRLVKAKTQKVAALRRYLRGPVKTDRLDALTLAKMPFIDPEQMDEIYLPPAEIHALQRLTRQRKRIEQDITGRKVRISAIVDGYLPGVRRAFNDVWSSPVRAFLRSRLNPFAVVRDGEEALHAFLSKASPRSKWSRAETQLVFLACQSVASVCELSRPADTVSEEFFLNLQDEIARELRLMEAEEAESESLAQRIAELYQKHHPSDNLRTIPGVGEHTAPVFLAAVGDPARFPNQSAFANWEGVVPGARQSSNVEAKGLRMTKAGPSIMRMALYQAGDVGRRWDPQLAAVYYREMVYHGKNHRQAMGAVMSHLGARVLTVLKQDRPYELKDIEGNPISKEHARKLILVEYHVPEDIRRERRRRNSKISKDRETATYRINEAAKAPQPVPVQAVSRK

SEQ ID NO: 326198 - protein, 348 aa, unidentified
MHIAVLGIDLGKNSCSVAGLDASGRVVLRRRLHRDSVVKLASRLPACVIAMEACCGAHHLGRLLQAYGHVIRLMSPEYVQPYVKAQKNDERDAEAIAEAATRPTMRFVDLKSEDQLDMQTLHRARSRLVGQRTALINQLRAMLLERGIAVAQGRHRLARYLAQALDDGNAEPVPLSLRIRLLIEDMRAQWSELDRRIASFDAEFVAATRSDEAARRLSTIPGIGALNATALVAAIGDARSFARARDLAAWLGLVPRQATTGGRPRLLGITKRGNKYLRTLLIHGARAALPSLATTEGALGNWLRGLSARAHRNTVIVALANKLARIAWAVLRSTAIYSARISDRPTAV

SEQ ID NO: 326199 - protein, 346 aa, unidentified
MLYAGLDLSRKRLDFHLLDAEGATVEVGAAAPDAGGLHGLMRRLDRHGEPIRAAIESMNGARFVHDQLEPAGWQVEIADAQKVKGLAPLACKTDRIDAWVLAELARRDLVPAIWLPDPLVRAERERARWRLHLVRHRSSLKQRVHAVLLTHGKPCPVSDLFGVHGRQLLARLALPEPWQGTLEASLRLIDELDREIESCEGELRRLGADHRYVPLLCTVPGIGWVLAYTIAAEVGDIDRFPSPRKLAGYTGLCPRVYQSGESDRRGPLAKQGPKYLRWALIEATAHACKHPLYHDRYQRTKTRLGKQRGAKVAQVDLARRLTEAIWHMLTRNQPFAPKGATDPLAA

SEQ ID NO: 326200 - protein, 375 aa, unidentified
MRSVALDFGGKVSFCEVANGKVIRRTSVKDFWELEPELGPQTAKAKVAVEACREAWFLVEQLRRWGHEPLVVDTTRSAKLGIGHHKRKNDRIDAEVLAHAVERNLIPTAHVLSPHRQSLRQWQSVRRALVETRAQYIVCVRGFLRAANLQRLPRCEPERFAKLARKAPMSANTRELITALVDTIADLSERIAQVDNRLEAISSEEPATLLLRTTPGVAAVVSTAFVSVIDEPSRFKRAHQVEAYLGLVPSEHTSVHRQLGSITKQGNKYLRALLIQAAWSILRTRFTDPLRIWAQRIAQRRGKKIAAVALARRLAGILWAMWRDGTVYEPARVGQVSAQGVERRAQQELTVAAAMRRAGVKGQRRIAAFRRAQMD

SEQ ID NO: 326201 - protein, 349 aa, unidentified
MNATALSPMVGVDLSKNVFELAVADAQWRVVERARLTRSQFERWCAKRAVGLVVMEACGSAHHWGRWLTGMGIEVRLLPARYVRAYVKRNKTDAADAAALLEAARASDIVPVRIKSVEQQALQSLHRTRSLWMSTRTSRINALRGFCREFGIAIAAGSRIGLEQIGRVLADPHSALPALLRDTMQLLVEEIRLLETRISQLERELTELARQSPACQTLLSVPGIGLLTATALVAATSGQVNHFRDARHFASWFGLTPKESSSGMTRRLGRISKRGDRYLRMLLTHGARSVLRAATVAQQRGRSLDALRSWALNVQGRTHHNRATCALANKMARICYAVLRDGKITASRE

SEQ ID NO: 326202 - protein, 351 aa, unidentified
MKVTTIGIDLAKSVFQIHGIDERGNVVLRRQLRRAQMVLFFSKLESCRIGLEACGSSHYWARKLAALGHTVRLMAPQFVKPYRKSDKNDGNDAAAVCEAVGRPSMRFVSVKSPEQQAELSVHRVRQRLMRQRTALINQLRGLLAEYGLVLAQGATHVRSQLPALLENSSDSLPPLALELFQDLYEELCQLEQRLADYDRRVERLYRGNPLCQKLGELDGIGALTATAFVATVAHAAQFHNGRQCAAWLGLTPKQDSSGGKTRLLGISKRGDVYLRTLLVHGARSIMRHTPKRDDPKSRWVEQLRKRRGENIAAVALAAKHARILWALMVRSEPSAQLIAAHSIEPPAQPNL

SEQ ID NO: 326203 - protein, 425 aa, unidentified
MNQSNHYTQNDYAAFIAIDWADKKHVFSLQVTGQTKKEAGTLEHKPEVIGPWVAKLRERFAGRPLAVAVEQSRGALIHALLTYDFLVIYPLHPTTVSKFREAFKSSGAKTDPLDADQILQILTKHLELLKPLTPDTEETRLLARLAEDRRKAVDLRTSHIQALTAALKEYFPQAIELVSGNLTSRLACDLLMKWPTFESFRQAKPSTIKRFYYGHNIRSSEVIQRVLDLAKAKSLTTDPAIVQSGSRLSQMYTQLIRALNPVIDDYDSSIEKAFEAHPEVNLFNRLPGAGPALAPRLLTFFGTDRSRYQSAQNVHSFSGIAPVTKSSGKTRAVYFRVACPKFDRQTFHEFARLSIAKSQWARNYVDYYTDKGKNFHTIIRALAFKWIRILWKCWQDRTPYCEEKYMQALKKRGSVFATLHLQNKS

SEQ ID NO: 326204 - protein, 411 aa, unidentified
MRRVLFVGDDWATEHHDVELQDEAGRRLGKAKLADGIAGIARLHAMIGEHVDEDAGPVEVVVGIETDRGPWVQALVASGYTVYPINPLQVARFRETERSSGGKSDAADAHTLTDMVRTRRHTLRPMAGDSGRAETVKVLTRAHKTLIWERTRHTLRLRQMLREFFPAALLAFDDLAAPDALELLGRAPDPVLAARLSTAQITAALKRARRRQVSAKAATIQASLRSRQLAQPSAVAGAYAATVRAQVAILTTLGTEITTLEGQVEAHFGQHPDAEIYLSQPGLGVMLGARVLAEFGDDTTRYADARARKNYAGTSPITRQSGKKKTVLARYVHNDRLIDALNRQAFAALRASPGARAYYDQLRARGVGHHAALRQLGNRLVGILHGCLKTGTTYDETTAWAHHQQDLHTAA

SEQ ID NO: 326205 - protein, 413 aa, unidentified
MQVEYERCCGIDVHKETVVACLIVPDAQGHPVKETRTFSTMTGDLQALGRWLAEQGCTHVVMESTGVYWKPVYNLLERQFALLVVNPTSIKKLRGPKTDVADAEWLADLLRHGLVRGSFIPSAEQRALRDLTRYRTQLLDERTREVNRVQKVLEDANIKLASVATDIMGVSGRAILQELLEGEGEPALLAELAKGRLRNKRALLEQALTGKVQAHHRFLLVQHLSHIDYLDEQIAQLDSEVAERMRPFEAALASWEQLPGIQQRNAQVIVAELGADLQQFPDAEHCASWAAICPGTNESAGKRHSGKTAKGNRWLKRALTEAAHGAARTKKSYYAALYHRLAGRRGKKRAIIAVAHSLLVTGYHLVTQGVDYQDLGRDYFDKRNQETIKRRAVKRLEQLGYQVDLTPVPALAG

SEQ ID NO: 326206 - protein, 362 aa, unidentified
MLGFEKTNTPKGASMRFYTNTHKHYCGIDLHGRKMYVCVIDGEGKVLVHRNINCKPDEFLKIIAPYREELVVGVECMFAWYWLSDLCRKEKIEFVLGHALYMKAVHGGKAKTDKIDAHKIAVLLRGGTFPIAYVYPPKMRATRDLLRRRNFFVRKRADLMAHIQNTVTQYNLPKLGFDLSSESNRHEVVQLFPNPEVRKMIDIDIAMIDAYDKVLKVLESDIEKTARQHDRHALTLLRSIQGVGPILGLVLLYEIHDINRFETVQQFASYCRLVKCCHESAGKKKGTGGAKIGNAHLKWAFSEAAIHFICNNPPARKLLENLSKIHGKGKALTILAHKLARAIFYMLKNKRPFDRDKFLATA

SEQ ID NO: 326207 - protein, 351 aa, unidentified
MVIIGVDYHPSDQYIAFVDTETGEGDERRLNHSDGEAEKFYRELAARGASVRVGMETTGYSRWFERLLAELGIELWIGDAAKIKTKRVRKQKTDRNDAQLLLKLLLDNNFPRIWVPSPENRDLRQLLWHRHRLVQMRTRIMNQLQALAMNEGQRRKKKLWSEAGRAQLEKLALAPWASRRRKDLLELLDGMNPTIGELTQAAELEAKKRPEVLRLMTHPGVGPLTALAFVLIIGTVERFQCGKQIGSYVGLIPCEDSSAGHQRLGHITKQGSSLLRFLLGEAAQAAARCDADWRRRYMHLALRRQRNIAKVAMARRLGVRLYWMWRKGWEYSDWIKFGSHAGQLGTGNGVQ

SEQ ID NO: 326208 - protein, 354 aa, unidentified
MPKGTLVSRYIGVDLHKNSFTVCFLSADRQDMNTEGEYTLRNFKVSPSGLKLFKSTLTKKDELAVESTGNTGYFVREIKDLVKEVKIVNPIQFKVISESVKKTDEQDAVVIARYLSKGLIPEVRIRSKEEAQLASLIGTRDKFVKLRSALKNKIHNILNANGVVTKREVFGSEKGLDAVLDMKLDEAYLFELKIIVDQIHNLNKSIDEIDKKLKDKGSKLKGYKNLTSITGIGDISATVLLNTIGDVKDFKDEKKLAAYIGIVPRVHQSNETSQYGHITKMGNKIARTALVQSTLIAIRYNMYLRSFYLRLKAKKGSGKAIIATARKLLSIIYRTLKNDWVFEDFNKFKLVENA

SEQ ID NO: 326209 - protein, 357 aa, unidentified
MLESDQLQPRESPIVTTSTSIKCHLYTRLHDLLKTSRKELFVLDAILERCAGIDVHQDNIVACLLYGPLDKRPSKEIETFGTTTKELLRLKDWLEDQQCTHVAMESTGVYWKPVWNILEDSCKLTLANPARIKNVPGKKTDYSDAEWIARLHRSGLIEQSFVPSVDIRDLRDLTRYRRKLLQNVTQEKNRIHKILQDANLKLTTFMSDVFGVSGRLLLESIVNGEVLNERQVRDMVKSSLKRKVPELIEALNGRLRLHHRKMIRRHLEHIAYLEQEIQELETEIEQLTMPYRLEMELLDTIPGIKHDAAASIVAELGTDMSHFPSDAHLSSWAGVCPANHESNGKKNEKRTNAEIRD

SEQ ID NO: 326210 - protein, 273 aa, unidentified
MEQVCRVGLDIAKNVFQVHGVDESGTVLLRRQVRRRQVLGFFGKLPACLVGIEACATAHHWVRELAKLGHEVRLMPARYVKAYLKRNKNDAADAEAICEAVTRPTMRFVPVKTPEQQSLQMLHRSRRLLVQHRTRLINAIRAHLAEFGIVAGVGRNGIAALLELIAEGGDERVPELARDCLGALATQLDLVTRQIREADSRILVWHRSNEVSLRLAAIPGVGPLTASALVAAIPNPKVFRSGRDLSAWIGLVPKQNSTGGKERLGSISKAGDR

SEQ ID NO: 326211 - protein, 350 aa, unidentified
MVVVGADVHKRTHTFVAVDQAGRKLGEKVVAATTVGRHKALVWARAEFGNELVWGIEDCRHLSARLERDLLSAGQQVVRVPPKLMAQTRASARTRGKSDPIDALAVARAVLREPDLPVASHDAVSRELKLLIDRREDLVAQRTSAINRLLWRVHELDPERAPKPRSLDLAKHRELLRAWLATQPGLVAELARDELADISRLTEAINALAKRITERVRVVSPALLALPGCAELTAAKLIGETAGVSRFKSESAFARHAGVAPIPVWSGNTTGRVRMTRSGNRQLNAALHRIAVTQVRLDGIGRAYYRKRRDAGASKTEALRCLKRRLARVVFHHLHTDHQTRNQPCQTAAA

SEQ ID NO: 326212 - protein, 400 aa, unidentified
MAVMIGIDPHKGSHTAVAVGAAEEPLGRLRVRACPDQAGKLVAWAQAWPERTWAVEGARGLGRLLARQLVAAGERVLDVQPKLAARVRLLEAGDTNKTDPNDARSVAVAALRSKGRQEVTADGHAVVLKVRAKRHRDLSRTRNRVVCRLHAMLCELIPGGVPDEITAGQAARILERVAPAGAVAQARCELAAELLADIRHLDAQRREVKKKLAAAVTASGTSLTEVFGVGPVIAATVIGGVITVARFPSRDHFAACNGTAPVEVSSGQRKIHRLSLRGNRRLNHAIHMAAITQIRHEHSDGHAYYQRKLAEGKTHKEALRCLKRRISDAIYAQLRADARKAGPGGQPGNDTGSSVTGSHPGHRLFGQATSGPEPSLRAPATFTQATPAPEPSAKKIQRAT

SEQ ID NO: 326213 - protein, 381 aa, unidentified
MQALSKMVAANDTEQQATLFVALELSQATWVVALHSPIADKISIHCIEGGDTDKLMALIEKKRVQAARRLGRTVQVVSCYEAGRDGFWLHRFLIGHGIDNRVLDSASILVDRRARRAKTDRLDAAALLRVLMALVRGEEQVCRVVRVPSIAQEDERRLSRERERLLHERNSHIARIKGLLILHGVRDYRLIERDWKERLDAVRTAEGQALPARAKTEIERECRRLWLAKQMLAEVEREIEQMIAHDGAAAGKLIRVRGIGPTFASVLTHEVFYRSFDNRRQVGSYLGLVSIPWQSGGVRRDQGITRSGNARARRCAIELAWLWLRHQPGSALACWYRARVGTMTGRMRRIALVALARKLIVALWRYLQNGIVPEGAVLKAA

SEQ ID NO: 326214 - protein, 328 aa, unidentified
MQTQTVPLTIGADVAKDEIVVACEEQHFAPHGIANRRPALVAFLKTLPPGSRIGMESTSDYHELFATLAHKMGFVVYVLNPKDTRHYAKGVGQRGKTDRVDAKLIARFVDREHAKLHAWIPPTSEQRQLDRLLKRRAKLSSIKAALGQSLKGLSGFSAELKALLERIQRVIARIDANIKALIEASIERQQNYTRLLSIPSVGSVVGSGVLVHLERLPFANADAFVAFTGLDPRPDDSGRHHGRRRLSKRGPSELRRVLYLAAMSAAHTKTWKPLYEHYRAQGLPKTAALVVLARHIARTAWSIYTHKTTFDAQRLTRQPSMRNAPQRA

SEQ ID NO: 326215 - protein, 338 aa, unidentified
MSKLKLISIDLAKNVFQVCSLNHRQQVKMNKALKRSEIAEYMAQQPPVLVAMEACYSSHYWARCFEAMGHSVKLIPAQHVTQFVRGNKSDRNDALAIAEAAQRPNLRSVPVKSLEQQDVQSLHRMRTRYTKTRVALINQMRGLLSEYGIIAPQGHSAFCTLLRDICDPDHRALTPLFKTQVNQVGEEYYQLTNRIKEIDTLLTDYAKHNPLCRILMSIPGIGVINATALYSAIGNGCQFKNSRELAVWLGLTPRQSGSGEKQTSGGITKRGSRYLRSQLVHGARSALIASRKKNDVLSLWINRLATRRGFNKACVAMASRIARIAWVLLHRQESYRTL

SEQ ID NO: 326216 - protein, 409 aa, unidentified
MLFVGDDWAEDHHDVELQDPAGRRLARARLPEGVVGIARLHELVAAQLGADDGPEQVVVGIETDRGPWVQALLAAGYQVFPVNPRQVARYRERHGTSGAKSDAGDAHTLADMVRTDRHQLRAAAGDSDLAEAIKLLARAHQTLIWDRHRHLLRLRAALVEFFPAALTAFPDLAAADALELLAAAPEPTSAARLSRTRVAAALTRASRRGVPAKANQIQQALRAEQLPQPETVVAADAATVRAAVAVIGTLNAQIAALAGQVEAHFGGHPDAEIYRSQPGLGGVLGARVLGEFGDDPGRYRDARARRNYAGSSPVTKQSGKKKVVVARFVRNDRLADPLHQQAFCALTASLGARAYYDQLRARGTGHHAALRQLSNRLVGILHGCLKTRTLYSEETAWSHRTSDAATAAA

SEQ ID NO: 326217 - protein, 343 aa, unidentified
MGQYIGLDVSLKDTAISIREDGKRVWRGKCPSDPGIIAQTVRKHADDPVNVVFEAGPLATWFYHALTGEGLRAICIEARHAQKILGETLNKTDANDAEGLAKLAETGFYKAVRVKSFEAMLIRSLVAARTQLLAITTQLTNQIRGLMKTFGLVVPKSKGRVFVEKVNGLLDGHVELKGIIYPLLEAWQAVREQASTLSRQLLLAARQCRSTRLLMTIPGIGAITAVSYVAAIEDPKNFPKSRSVGAWLGLTTRRYQSGEMDFNGHISRRGDQRLRGLLYEAATSLLTRTRAETVSDLKTWGLQLRERLGFKRAAVAVARKLAVIMHSMLKTGQTFIPTREELA

SEQ ID NO: 326218 - protein, 343 aa, unidentified
MQTITTIGLDIAKSVFQVHGVDAAGAVVIRRQLKRRSVLAFFQKLPPCLVGIEACASSHHWSRELQALGHTVRLMPPAYVKPYVKRQKNDMADAEAICEAVTRANMRFVPTKTPEQQSCLMLHRTRHLFIRQQTAVINSIRAHLAEFGIVAPVGRKGVTELLHIVADPSDKRVSEVARACLAALGTQLLSLKQQIVEFDRMIMAWHRSNQASKRLHYIPGVGPMLATALVASVADPRNFRSGRNFSAWIGLVPKQHSSGGKDRLGSISKQGDRYLRSLFVAGALAVIRYAKIHGTGHRPWLTALLGRRPTKVAAIALANKIARMAWAMMAKGERYRNPVALAR

SEQ ID NO: 326219 - protein, 324 aa, unidentified
MSDSILGIDVSKETLDAYCARGQRKQGRTFANSPDGWKLVRAWLKAMGSKQAHVCMEATGRHSLGVALALHEAGHVVSVVNPAQIRDFARTKLGRNKTDKVDAALICEYAELFKPEPWTPPSPAMRRLCELQTMRAGIIRSRTEWKNRIGSGLGDSTASKLAAATINHFTNQLEAIDRTIGETIEQDAELRSRRDLLLSVIGVGETLAASLMAEMPEPGVLRRSGEMVAYAGLNPSHHRSGTSIDRPTRISKIGNATLRSSLYMPALSAMRFNPAVAILVARLKSAGRLKPKQIVVAAMRKLLVLCFGVLKTGKRFDLAIAMPA

SEQ ID NO: 326220 - protein, 469 aa, unidentified
MFTALASSPQVRLSSLTNTQGLPHNRLTYIAFAEFKACMSLLLNLPFWRQVMQTELSQFTAIIGIDWADKKHDICIQVAETGRRKVLQIPHRAEKIDDWARSLYREHGGPIAIALELSKGPIVSALQKYDFFVIFPIDPTTLANYRRTFTPSGAKDDPTDAEYALNLLLTHTEHFKALRPQSVEMRTLMTLVEQRRRLMNDRVRITNRLRNALKQYYPQALEWFDRIDTLLFCDFIKRWPSLAQARRARKATLEKFFREHNMNRKALLERRMTAIKSALALTEDEAIILPYRLQALTLVAQLEVALASIRHYDDEIAALAPQHPDYGLFDGLPGAGPSLAPRLLVAFGEQRERYGKAAELQKYAGIAPVTERSGQSTWIHWRWQCPIFLRQTFVEWAAQTINKSYWAGLYYYQQRAKGCSHQAAVRALAFKWIRILYRCWVTRTPYDEAKYLKALQERGSPLLKIAEAA

SEQ ID NO: 326221 - protein, 342 aa, unidentified
MVTTIGIDPHKATHTAVAINETETVLGELTVPADRSQTKTLLDWAQNLDGGGRVWAIEAAGGLGYLLSQQLVANGEQVVDVPPVLASRVRLLGSGRSDKNDPNDARSVAIAALRQPGLAVVRPEDHTQVLRMLAKRHLELTGLRTQAACRLHSVLVLLRPGGLPPRLSATKAGRMLRGMRSLDPIGEQRRTMARTHLADIRRLDREIKANKVLISKAVATSGTTVTDVYGVGPVVAAFLIGYTGDIGRFASANHYAAYNGTAPIEVSSGGKKRHRLSMRGNRMLNHAIHMAAVTQIRHSDTPGRNYYDKKQAEGKTRKEALRALKRRISDTVYRQLITNHQG

SEQ ID NO: 326222 - protein, 335 aa, unidentified
MNQARMHVGVDVGKDSLDICYPNGDKEHIRNTKRCRATLIKKARTLGAVISFEATGPYDEALESECVASGVPAVRLDAWKTRKYAESQGMLEKTDSIDSEMIRDYAASLRPDQLHFVRERSAGYRKLKRAVSVRRNLLKAKALIASQLEGDLDAEVKSAIARAVASIDRQVERMDAVCVAAIRSDERMGAIAARFGQVVGIGPVLISTALASCPDIGSFTSKGIAKFAGVAPLENRSCTITKKPRPRRGRRDLRCALYMAAVSACRSNHRLRRTYEGLVARGIPKRAALIALARHIIILMNYIAKYPDFNPEVDPKKAAQMALPKRRPGRPRKNP

SEQ ID NO: 326223 - protein, 345 aa, unidentified
MEIRTIGIDLGKTVFHFVAVNARGQIVVRKKGSRTQLLRFTANLPQCLIGMEACGGSHFLGRALREQGHDVRLMPAQYVKPYVKTNKNDYIDAEACSEAVTRPTMRFVPIKSDDQLDLQSLHRVRERWVVRRTAVINQIRGMLLERGITIRKGRHHIEESLPGILEDPDNKLSGALRVLLTQLRLEMQYLHGQIEETDKLIARICGELEQCRRLVAIPGIGPITATATVAAIGNGAAFKKGRGFAAWLGVVPGEHSTGGKQKLTGTSRRGNKYLRKLFVQGAHTVLLQKTKQSSGLSTWLVNLTSRKRPQVATVAFANKMARMAWAVLFKGEAYRPPTAPQVIAA

SEQ ID NO: 326224 - protein, 438 aa, unidentified
MRKLILGIDVACRAAHQATLTDERGEFLWSARKFRTTTADLESLWSSLPDDGELTVVMEPTRNAWVPLASWFQLRGAAVVMVPPEQSADLRDYYSKHTKSDRLDSRILARVPLLHPEGLHSLEGLGPADPLRRITKLRASLVKRRTVIAARLDAYLELLGPSWHGAFSADLISNRCLRLLASGYADPHAMRRLGRARLTKLIWRHSHGKCGEREAVELLAAAEESIALWDGELDFAELADDIAVEARLALALCHEIHELEERIAVSLKALDPLGIMTSVPGVGTVNAAQILARLGDPNRFRSLAGAKSYSGLVPSLSASGVHGRHGGPTKSGDAPLREALFMAADWARRVDPTLAQRYHRLMVSEGKHHNSALCHVSATLLTRIISCWRAGTPYVIRDLDGIPITKEQGREIVARNFSVHEAIRAQRRIVNRGTSRRI

SEQ ID NO: 326225 - protein, 346 aa, unidentified
MSDVVTTVGIDIGKTTFHLIGFDERGAIVLRQKVSRAQLERRFAALPPCLVGMEACCGAHHVGRQLAALGHAVRLIPAQYVKPFVKSNKNDFRDAEAIAEAVLRPTMRFVPLKSREQLDLQALHRVRQRLVGERTAVINQIRGFILEHGITVRSGPPALRRVLPEILANQHGVLSPGMAQLLMDLDDDRRRLDERIEELTRTIEEIAKRDEGCRRLMTIPGIGPIVSSAMVAAIGDGAAFAKARDFGAWLGLVPKQVSTGDRTLLRGISKRGNRYLRTMFIQGARSVLLRRVTWANHSFGRWLEAAAPRLHRNVLAAALANKLARIAWSVLTRGGAYARTLDARPA

SEQ ID NO: 326226 - protein, 460 aa, unidentified
MKRKRSKLKINRTMPTVHPNAAAIDVGATMHMAAVRADRAPEPVRSFGTFTTDLHRLVDWFTECGVETVVMESTSVYWIPIFELLDARGFAVFLVNARDAKHVPGRKTDVSDAQWLQRLHSYGLLRASFRPKGQIAELRAYVRQRERLLEYAASHIQHMQKALTEMNLQLHHVVADITGATGLRIVRAILAGEHDPKVLARLRDYRCHASAETIEKALTGSYRAEHLFALEQALALYDTYHEKVSACDVRIEAVLKELSIGRGRSPGSNPLPSPRRPRTDQANAMAFDVHTALFALLGKDITKIDGLGPYLSLKLIAECGDDLSAWPSTKHFTSWLCLAPSNKISGGKVLSSRTRRSGSRAAALLRLAAVTVGRTDTALGAFYRRLSARIGKSKAVTATARKIAVLFYNAVRHGMDYVDPGASFYETRYRARVIDNLHRRAKAFGFALQPIEPIPGIAVS

SEQ ID NO: 326227 - protein, 377 aa, unidentified
MKKELYLGLDVHKDCIITAVAEEGRKGEVRDTGVISNDLHAVEKWIGRLRKAYGKEVILRACYEAGPCGFGLARRLRQLGVECQVVAPSLTPTRSGERVKTDRRDARKLARLLRAGELTPVYIPEATDEAIRDLCRARSDAVDDRRRSRHRLKGFLLRHGYRYQGKSSWSAAHERYLRELVLPHPAMKVILEEYLQGIAAAGERIARCEAAMRELLEKWRLAPAVRALMAMKGFQTVAAMILVSELGEVHRFSHPRQVMAYLGLVPTENTSSERRRQGHITKCGNAHARWLLVECAQHYATSPKVSNELSRRQQGQSAEVRAISWRAQNRLHRRYTRLLARRLQRNKVIVAIARELCGFIWELLRTQPCYQAQSPLV

SEQ ID NO: 326228 - protein, 349 aa, unidentified
MRCFLPPADSRFYAGVDLHARSLFLCVLDRDGEERFARNLSAAPAPFLKAVRPFRDGLVVGCECMHCWYWLADTCREHQIAFALGHAWAMRAVHGQKTKCDRHDAQAIARLLRGGNFPLAYAYPKERRGLRDLLRARLRLVRQRAQLYGHVHTARRQANLPPVSSDVKYKSKRGGITADIADPFVRRRVETHLALLEPLDTTIRRLEAEIEEAAREHYPTELAVLQTTPGVGAVLSLTILLEIDTIDRFETRQQFCSYARLCGAVQESAGQRSGAGNRKAGNAWLKWAFSEAAVLAAQKDERIGALLERLASKLGKPKALSALAHKLGRAFYHMLHTKEVFDVQRFVRH

SEQ ID NO: 326229 - protein, 380 aa, unidentified
MRRVSGLDVHKDTVFLCILDEDGVVFQSKYGVLTPELEQMAGVMVEYGVEEAAMESTSIYWMPVWRVLEPYVALRLVNPFFIKQLPGKKSDVKDAEWIATCLQKELIKGSYVPDELIQQLRQYDRRIFDLSKDIVYKFTKLDAALQRCNIRISNYVSTTKGKAYKDIVRLISEGKTDSEELVRHIHGRTVNRIGKDVLIRALSGVVTAADIDTIRQLREEVELAQRHKDECQAKMDAICKQYFPEQYANLQTIPGVQARSATAIIAEVGTNMDAFQTAAHLVSWAGLKPRNEESAGKIKSRKVTHGNKYLRKTLIECSWAASRTQNCFFSRFSYIQCTVRHKNKMKVQVAIARKVLTAVWYILHDNVPYRDFTPDIVPTE

SEQ ID NO: 326230 - protein, 339 aa, unidentified
MDGDTGEVFQQRLSPDHGEIVAWLGDLPGPVAVAYEAGPTGFGLARALAAAGITCEVAAPSKLIRPTGDRVKTDARDAAHLARLLHLGQITAVTIPSASQEAARDLVRAREDCRGDLMTARHRVSKLLLRQGIVYSGGTTWNRDHERWLRAQRFDNPALQLTFEAAFDAMLARRDRRTRLDDAITAMAADSEFTPVVHRLGCIRGIATLTAFGLAVEVGDWHRLTGRSIGAYVGLVPCEYSSGDSRSQGGVTKTGNGHARRLLVEAAWHHRSPYRPSEQLRGRWGLACPAARARGQAANRRLHARWRSFDARKKRSVVANVAIARELAGWCWSLAVMPD

SEQ ID NO: 326231 - protein, 337 aa, unidentified
MNKSELDFVPCGIEVSSQTLLVALGSKAPREFANTPSGHQDVVRFLERAGGRVRVCLEATGRYGLDLALTLHAVGVPVLVANPRAVRHFAHALMARSKTDPLDAEVLRQYAARMPFQNWQPPSPRALKLVAIVRRLQALTEMMTAEKNRLHAASLSEALPRYLRLEIARHLRVLERHVAQLTAAAHAFLHEDPELTERYSLLHSIPGFGPTSALHVLAELLLLAPDLDVRQWVAAAGLDPRQHSSGTSVHSPARISKLGNARLRRGLYMPALVALQHEPHLAAFYQKLLARGKAKMQALVAVMRKLLHAIYGMFKHHQTYDGAKVHALSPQPEAQCV

SEQ ID NO: 326232 - protein, 347 aa, unidentified
MLHVGLDLSRKRVDVCAISDQGELVDELAAPFDEDGLCRLTERVAANRGGRVRAVVESMNGARFVHDTLEAQGWGVLVADAQRVKGLAPLACKTDKIDARVLAELSFRDLVPAIWLPDPQVRRERELARFRLHLVRHRSSLKNRVHSTLITFGKPCPESDLFGVAGRELLRRLDVPEPWHENIEASVVLIDQLDRQIEAIAGELKYVGADHPYVPLLMTAPGVGWLVGFSIACEIGDINRFSSPTRLCGYTGLCPRVIQSGETDRRGPISKHGPKYLRWALFEAALNACDHPLYKERYERTKKRLGRQRGPKVAQIELSRKLTEAIWHMLTRNEPFAPAGAPFRLAA

SEQ ID NO: 326233 - protein, 359 aa, unidentified
MVQGTSVGLDVHALSVVAHAIDDETGKIARARLCPEHGEVLGWLHQLRVPVRVTYEAGPTGFGLARAITEAGMQCVVAAPSKLQRPAGDRVKTDARDAAHLARLLRLGEITEVTVPEPEIEAVRDLVRAREDARADLMRVRHRLSKLLLRQGIVYYGGTPWTCVHEQWLRRQRFDDIHLKAAFDYSFDAVLAATAARDRLDEQITEVAASPRFADQVNRLGCLRGISALTGLALTVEIGDWSRFTGSSIGAYVGLVPSEHSSGTSRVQGSITKAGNTHVRRLLIESAWHHRKSYSTSGPTLRARWAKVDPALRARGHAGNRRLNKRWQTFTERGKNPLVANVAIARELAGWCWSLATMN

SEQ ID NO: 326234 - protein, 452 aa, unidentified
MRLLNGKQGLRRSQFANELRGADLEKVLLVPIDVSKVLQKSMILNYFGEVLEPSFSFMVSQTGMKFLIDKIEKAQFSCNAERVFVGIEATGHYYEDIVRILTEKGYSVHIINPASTHEERKQHLTYTKTDDIDLYLIAEVLIGNKATNAKLATGVYKQLQHLTRTRRNEINKRSRIKVEIRTMHDHIWREYQGYSLLVDGKVKTRTIFSDFWGKASLHLLTHFPHASQILELGEIGLRRLSKEHNLKIRKTAIEKLLYAASESVSKPLEDLSSELFLLKQKLKDYEWHTQTIKTYEQEIERIFIETDGLYLLTVPGIGLVTAAEIYCEIGDLTHYTSANQLIKKAGTNPTVKQSGPTDGYYGRISKQGNANLRRAIYNAGRSLSVHNDALKPFYTRLKEKGKKAGKIYIAMGNKFIKIAFAMLKNQSPFKWDNPTFDYRQEVTKKLISPIAA

SEQ ID NO: 326235 - protein, 352 aa, unidentified
MTYFAALDVSLRSVSVCIIDDEGNYQFEAKVISEVEDIVRCLEAFDGEIELVGFEAGMLTQYLSYGLKASGFEAVCIEARHAQKTLSAMRNKTDKHDARGIAQLLRTGWYVPVHVKSVASHRVRAMLSSRRTVLKKCVDLENELRGLLRIFGDKLPSKVSHSSFDTVVRPLVEKDAALSRALVPLLDARATLYQTYLQLDAEVKAIVRQDAVCRRLMTVPGVGAITALTFKAAVDDPSRFKNSRLVAAHFGLTPRRQQSGEMDYAGRISRAGDADVRSALYVAAHALITRNSEWSSLKAWGVKLMKTKGHRKATIAVARKLAVILHRMWIDGTDFRWQSEDRAASNNAAPDL

SEQ ID NO: 326236 - protein, 378 aa, unidentified
MNTDKYVGLDVHKDTTVVAIAEGGREGECRVYGTISSDLHALEKLLRKLGGPVRQAQDAEPEGARLRVVYEAGPTGYVIARRLAQLQIDCIVVAPSRTPQPKGQRQKTDRRDALMLARLHRAGELAGIHVPDAVDESVRDLTRARADAVHDLTRAKQRLKSFLLRQGYRYTGKANWSEAHQRYLRELVLPLPALKAVLEEYLLTITQRLQQVDRLDELIAAQVPSWRMYPAVQALMCLRGVKLNAATVLVAELGEIHRFAHPRHLMAFLGLVPREHTTGDSRKLGGITKSGNAHARWMLAEVVQHAFLPPKVSSHLALRQQGQPQSYRELSWRAQTRLHQRSRHLLGRGVMKPKVTIALARELCGFVWALLRQVPAPS

SEQ ID NO: 326237 - protein, 344 aa, unidentified
MDHFARLDVSVKETSICIVDDTGKIVREAKVASEPEALLAVLKNLAYHFKRIGLEAGPLSQWLYSALAEADLPVICVETRHMRAVLKAQINKTDRNDARGIAQMMRVGLYRPVHVKTLRSQKLRMLLTHRKLLQSKAIAIDNDLRGTLRNFGLKVGMVGTVGFEARIRELVENFPDLAALIEPLLIVRRTLREQIVILHRRLLAIVREDEVCRRLMTIPGVGPVVSLTYRATVDVPARFRKSKSVGAVFGLTSAKYQSGEIDWSGKISRCGDEMMRTMLYEAAQSMMHSKKWSWLKAWAMQIARRRGMKRAIVALARRLAVIMHRIWVDGTEFRWTREQAAAAA

SEQ ID NO: 326238 - protein, 340 aa, unidentified
MNYYAGIDVSLEASCICVVDANGKVVREGKVSSEPAAMIAWLSEVGVTLTRIGLEAGPLSQWLYAAMRQAGLAVELLETRHVRNAFKIMPVKTDRKDARGIAELMRLGWFRPVHCKSMEAQETRAMLTARKLVQKELHETESSLRGILRGFGLKVGKTTPVGFEGRIRELVTGHPSLEVIASALLSVRAVLRRQFNEFEKRLRTIARTDTRARLLMTTPGVGVIVALTFASAIDDPSRFKSSKAVGAYFGMTPTRYQSGETDYSGRISRNGDGSVRAVLYEAGHLILTRPLKGCTALKSWAMRIAKRAGTKKAAVALARKLAVIMHRMLADGTPFTTQPA

SEQ ID NO: 326239 - protein, 341 aa, unidentified
MEEYIGLDVSMKETAVSIRRAGERIWRGKCASDPSIVAELIRKRAPSVKRVVFETGPLSVWFYHSLRVEGLPAICIDARHAKAALNMATNKTDANDADGLAQLAEVGFFREVRVKGFDSMLTRTLIAARTRLVRITTELSNQIRGVMKTFGLLVPAGKGSTFEKNVRSLLADQDRLASIVLPMLEAWRSIRVRAAELGRQLVRDARQSRACRILMSIPGIGAITATSFTTAIEDPDNFRKSRSVGAWIGLTTRRYQSGEVDYDGHISRRGDRPLRGLLYEAAAVILTRSSTHSTLRTWGLQLRERIGFKRAAVAVARKLAVIMHTMLKTGELFNPNAGATA

SEQ ID NO: 326240 - protein, 312 aa, unidentified
MIEQCFGGIDVSQDRLDVLLLPQGTGFSVANNEAGWSTLIGRLRGLLLTAIGLEPSGGYERGVLRALLAAGLSVRRINPNRLRQFARARGALAKNDRIDARLIAEYVATMPTHVVRHDPAAARIAEIVTMRRQLCDEHVAIENQAAQLEDAMLRRLAKRRLARIETDIRLLEKRLTETIAAEADLARRYERLTSMPGVGPVLAFTLIALLPELGRMSRKQIAALVGLAPYDFDSGKLRGHRSIYGGRMPVRNVLYMAALSACRYNPALRAFHKRLAAAGKKPKVILVAVMRKMITTLNAMLRDGASWQPQAA

SEQ ID NO: 326241 - protein, 370 aa, unidentified
MGKSVLYVGLDVHKMSVDVAVAEPGPGAEVRFYGRIGGDLEALDKVTRKLQAKGAELRFAYEAGPCDYQVYRHLTAQGHSCLVAAPALIPRRPGDRLKNDRRDALALARLLRAGELTPVKVPDADDEAMRDLTRAREDAICVERRARQRTVAFLLRHGRVYPGKTTWGRGHWAWLLQQVMDHPAQQIVLQEYLDAVREASARVLRLTGQIRDLVPQWHQAPFVAAYQALRGVSFIVAATVVAEVGDLDRFNNPKELMAYLGLVPSEHSSGASVRRGRITKTGNSHARRVLVEAAWAYRLRARVSRTLLKRQEGLPERVRQLAWKAQLRLCARYRRLLARGKARQTIVIALARELAAFLWAIGRAVAPATA

SEQ ID NO: 326242 - protein, 316 aa, unidentified
MADVEVFVGIDVSKARLDVATVPGEQTWSVGNDEDGLVELVDKLKELTPKLVLLEATGGLERRALARLVGAGLPAMAINPRNVRDFGRSLGKLAKTDRIDAVILGRFAQAVRPELRPLADQQTQELQALLTRRRQIVEMLTAEKNRLLATDPQKYRRQIKAHIEYLQKALAINEYDIDQSIKQTPVWLEKIDLLESAPGVGRVTASTLIALLPELGTLGRKQIASLAGVAPFNRDSGTLRGRRAIWGGRATVRSVLYMAALTSTRWNPAIRVLYRRLKAAGKPSKVALVACMRKLLTILNAMLRARTPWRSPEIPA

SEQ ID NO: 326243 - protein, 426 aa, unidentified
MRKLDTMQIQLMEESFMYNAVGIDASKFKSTVTVIQPAGIVIRKPFDVLHTSNELNTLVTYLKSLEGETRAVIECTGRYHEPVVKSLEDAGIFISAVNPKLIKGQKQNSLRKVKSDPADARKIARYALDNWAELRQYSSMDTIREQLKTLNSQFDFFMKQKVVAKANLISLLDNTYPGVNKLFDSPARKDGSEKWGDYAYSFWHVDCVRKIGLKAFTERYEAFCKKHHYNFQKGKPAELFEAAKQLVAVFPKEKSYKLLIHQSIQQLNLASEHIEILRKEMNQLASTLPEYDTVMSIYGVGETYGPQLIAEIGDVSRFTHREAITAFAGVNPGVNESGQFRQRSNRASKNGSTKLRKTLFQIMTTYLQNKPVNEPVYQFLDRKRAEGKPYLVYMTAGANKFLRIYYGKVKECLHNLEQDSLPPEES

SEQ ID NO: 326244 - protein, 402 aa, unidentified
MNFSIGLDWASQAHAVCVLEATGQVGWQGTVEHSAAGLAELLRRLARFGPPAALPVALERPSGLLVDTLLAAGHPVVPIHPNALKASRPRYSAAGSKSDPGDAFILADLLRTDGHRFRRLQPLSDETRALRALVRGRDDLVAERTALANQLRALLERVWPGAAALFADVESPISLAFLTRYPTAQSAERLGEKRLARFLGQHSYCGRRSAAELLARLRSAPACEVSDLEAEASRDLVHALVAVLTPLGVQIQQLSAAIVAALAQHPDGPLLQSFPRSGGVNAAQILAELGEDRTRFPTDEQLAAEGGVAPVTRESGKHRQVAFRWACNKRLRQALTTFADHSRHASPWAASIYTAARRRGCDHPHAVRILARAWVRVLWRCWQDRRPYDVTLHRAAQRVAAA

SEQ ID NO: 326245 - protein, 427 aa, unidentified
MNYTQNEKIMSITESTLVIGIDIAKRFQYARAFDYRGIELSKVKSFENTAEGFKTFQEWLKLVATENKKDNIIVGLEPTGHYWFTLGNFLKELGIKLVLVNPFHVKRSKELDDNSQTKNDLKDPKTIAKLVIDGRYSQLYIPEGIYSELRIAMGMRESLNKNLSIIKNKVDHWLDKYFPEFNDVFANWEGKAALMSLTEFSTPEQVLSTGVQQIVVTWKKEVKRAVGIQRAVRLVEAAKISIGIKEGIKMAKKELEANLEQYELYLKQNEQLDIEIEELAFQVPGVNEMVSMKGVGIMTAAGFIAEVGDIRRFTHPSQIQKLAGLNLIENSSGKHKCKTSISKRGRSRLRALLFRVIMPLVSKNNEFKVLHEYYTNRKENPLKKKQSLILLCCKLIRIFFTIITKKVEYNPQKLMKDTGFNLQLKVA

SEQ ID NO: 326246 - protein, 335 aa, unidentified
MQIKHFIGIDVSKDTLDLSVVVDGKNLQHYCIKNSTRDIKSSVNKIMKAFGATVDDTIFCMEHTGLYNLPLVKWLQSQQGKMWLESGVHIRKTLGLVRGKNDKVDSARIAMYAYINRHQIKLWNAPRKLIERIAALLSQRSRLNKAKKQLNTANQEQRLFIDKDIMRSLNKYTQKTVVVINKQIEAIEDEILGLIREDEKLNRMYQIITSVHGIGFVTASYILVTTNEFININNPKKYACYSGVVPFEHSSGSSVRGKTRVSQMANKNIKTLLHLAALSTIQIQGDLQEYYKRKVAEGKNKMSVLNAIRNKLILRVFACVNQNREYEKLYSYKFV

SEQ ID NO: 326247 - protein, 342 aa, unidentified
MNFIGLDIHKKTISYCVKDNSGKVLSEGKIPATRQGLQEWIRTLAKPWTVAMEATMFTGWIYDYLRPHAAAVKVAHPLMLRAIAVAKKKNDRIDAGRIADCLRCDFLPECYMAPMEIRQRRRTLRYRKLLVRQNVQLKNKIAQLLMESGVTYNKEKLHQQGYFHQVLPANQEIDPSVWPLLKLTREMIERTQKTERALLRSLEADPLLAARVERLMTIPAIGHVTALTWVLEVGEVERFHSVKQAISYCGLCSGEKTSADSSRRMPISKQRNRHLQRVLLEAAHLAPRLNPELAVLYEREAAQSNRNQATIAVARKLAAYLLAIDRGERAFLTHQVHSRAAG

SEQ ID NO: 326248 - protein, 415 aa, unidentified
MIEHDQLHREDPALPVVPTAGIDWASTEHVVAVVDDRGAQVERFTVAHTTTGLRQLVRRLQRLKVREVAIERPDGPVVDALLEAGLGVIVIAPNQVKNLRSRYGSAGNKDDGFDAYVLADTLRTDRARLRPLTRDSDATVTLRMTVRARQDLVQARVAMANQLRAHLQTTLPGVIGLFRDIDSAITLRFLTRYPSQDKADWLSRARLGNWLRSIGYNHIRNLDRLWNHLHDAPPGTTGPQGTARAHITLALVAGLETLRAQIHSLEDQIAGQLCGHPDAAIFTSLPKSGTVRAARLLAEIGDARGRFPTPEALACLAGAAPSTRQSGKVKVVAFRWAVDKQLRGAVMDFAGDSHHTNPWAADLYQRARARGHDHPHAVRILARAWLHVIWRCWQDGVPYDPDQHRALQRLQHQAA

SEQ ID NO: 326249 - protein, 326 aa, unidentified
MEHELHYIGIDTAKEKLDVDVLRPDGRHRTKKFANTTKGHDELVSWLKGHKIDHAHICIEATGTYMEPVAECLYDAGYIVSVINPALGKAFAQSEGLRNKTDTVDARMLAEFCRQKRPAAWEAPHPLERALRALVVRHQALTDMHTQELNRTETAREVQMPSIDAHLLWLEAELKRLEKQIKDLTDDDPDMKHRRKLLESIPGIGEKTSAVLLAYIGLKDRFAHARQFAAFAGLTPRRYESGSSVRGASRLSKAGHVSLRRALYMPAMVATSKTEWGRAFRDRLAANGKKGKVILGAMMRKLAQVAYGVLKSGVPFDASRHNLVAA

SEQ ID NO: 326250 - protein, 350 aa, unidentified
MIIVGCDYHPGFQQIAYVDTETGELQERRLPHREEAERFYRDLAAGQATVRVGMEASGHGRWFERLLAELNFELWMGDAAAIRAKRVRKQRTDRLDAQHMLNLLLEDRFPRIWVASWENRDLRQLLWHRHRMVQARTRVMNQLQAVALNEGLRCKKRLWREGGRQQLESLTLAPWTSRRRRELLELLDRLNPTIAELSKAIEQQVETYPEAQRLMTHPGVGALTALAYVLIIGDANRFSRGKQIASYLGLVPTEESSGDRRRLGHISKQGNCLLRFLLVEAAQVTARIDPQWRSKYFHLAMRRGRKIAKVAMARRLAVALFWMWRRKWNYQQLQKFGSQAGQPGHPHGVQ

SEQ ID NO: 326251 - protein, 317 aa, unidentified
MTDTGTGAFIGIDVGKMYLDIAVWNSEVYWRVSNDGAGIEKLINRLQKLSPVLIIVEATGGLELPVVTALALAALPVAVVNPTRVRNFARSTGQLAKTDKLDARVLAHFAQAVRPQVRPLRSEEQEYLAALVTRRRQVVQMLTAEKNRKSSARPQIRKRVQKHIDWLTEELRALDEDIAKFIHSHPLWREKEALLRSVPGVGPVTACTILAELPELGTLNRQKIAALVGVAPLNKDSGRKRGKRRVFGGRASVRRTLYMATLTATKFNPVIKSFYENLLRRGKEKKVALTACMRKLLIILNSILRHQRPWQVRPARP

SEQ ID NO: 326252 - protein, 339 aa, unidentified
MESTTIAVDLAKSVFQIAVSRHPGKVSESHRLPRGQFLRFFAERQPALVVLEACGTAHYWGRQLQDLGHRVRLLPPHQVRPYVYRNKTDRADAEALLEAHRREKIHSVPVKSLAQQTLAALHRLRSAWMADRVARINLVRGLLRELGFPIPVGARHVVVQTLELLEKLPEPLRPALSEACEEIGELEVRIADVEKQLRALAKQTPVAGRLESIPGIGLLTATALVALVGDVQRFPTSRHFASYLGLTPREYSSGLRRRLGAISKAGDSYLRTLLISGARSALLAAHRRKQPDRLQRWALEVHRLRGHNRAAVALANKLARIVWAVWRHDTRFESRALPA

SEQ ID NO: 326253 - protein, 441 aa, unidentified
MKKEIMFEQIYESAAGIDIGSEMIYVSTDGENAESYGTCTSDYRKCIEYLKKQKISHVAMEATGVYWIAFYNMLEASGIKVSLINPAEVKQRKGKKTDVRDCKWIQKIFSAGLVKESFIPEGKLFEMRFLVRERLDIIEMGSTYVNKMHRCLELMNIKIGHVLSQIHGTSGMKMLKAIVSGERDSEKLLALCDVKVIKQKGTLIRKALEGNYNDTWLFMLSKDIELWEQHQLQVEQLDGRIEKLLTELTKDKQVADYKPNKEKPIRHHKPQIEGLQEMLVKLFGVDASTISGINNYTLLRLIGETGVDMSRFETRKHFVSWCGLSPAHNKSGKKSKFIKHAPCNKAGQIFKEAAQSLENSKFIAIGQFIRGLKSRRGASVAYKAGGRKVAEAYYDILTKGKEYVEYGIKKYEEQKKQKEISLLKKLAKKHNMQIAEKQQAA

SEQ ID NO: 326254 - protein, 344 aa, unidentified
MDIVIIGIDLGKNSCSLTGMDASGRVVLRRRMRRNSLERFTKGLGRCIIAMEACCGAHHLGRIFATQGHEVRLMSPEYVRPYVKSQKNDDLDAEAIAEAAMRPTMRFVEVKSQAQSDIQALHRARERLVSERIALINHLRALLLERGIVAPQGRRKLEEELSVFADEDGIEALSPRIRLLIEDLRAEWRALDERIAAFDGEFVRMARDDEAVRRLTKIPGIGTINATALAAAVGNARAFRRGCDMAAWLGLTPRQMTTGGKPCLLGISKRGNRYLRKNLIHGARAVLPYLVERETPLGRWARGLLARAHKNVAVVALANKLARIAWAVLAHGCAYDSGCETAAA

SEQ ID NO: 326255 - protein, 424 aa, unidentified
MLAHSLSPGGSRPQSRQSKEADKEMTSETPRTAQSPNASYFAGLDVHQKTCDIALVDPVGRIARRWHLKTCPAALDLFARELRKECAPLPVALGLEASTAGKAVFLHLRQLGLDVHMGHPLKLESIRSSESKTDRNDAEELARLLQCRHFPESYVPTEELDQLRNWVRVREEQVEKLRRVKMQVRSLLVKHHLQHEATKYSDIFGVQALHWLEKVELENPAHRRQLQVLLEEGALLVQQVESLTMDLAREAAGRKEVELLQSIPGIDYVLGLTIVAEVGDVRRFPNRKKFAAYCGVVPRNRDSGGRVATHAPVRHGNSRLKWALDIATQSHVLRIRRGRLFQLFETLKARVGVPKALTAIAHRLAFVIYGIWKSGAPYAEGNPASFERKREKLAMHARAVRNRRTVPQLVEQLLSRPSISGVSG

SEQ ID NO: 326256 - protein, 362 aa, unidentified
MTKMTHVGLDVHQDTIAIAQLAPGHEAPLVWQIPNAATSIRKTFCKLAREVRELRCCYEAGPCGFEVQRQLESLGIECVVVAPSLIPRKPGERIKTDRRDAIKLARLDRAGDLTVVHIPTPEGEAVRDLVRAREDVRKDLVAARQRLTKFLLRHGRVFRTGKNWTQQYRAWLRSQTFEHTGEKLTFDHYVTAVEHQEACRDHLEKEIGAAAETVPYADAVERLSCLRGIATLSAMVLITEIQDFRRFTHPRQLMAYVGLVPSERSSGKTERRGGITKTGNSHARRILVEAAWHYRHPPAGKGRVHHSLRGQPAARIAFARKAQARLHKRYIRLLGRGKSRQAAAVAVARELCGFVWAAALQA

SEQ ID NO: 326257 - protein, 351 aa, unidentified
MVTAGIGPHNHVHIAVAVRAEGRPIGKPLTVKNDAVLIITLLKWIRSITDGTATWAIEDGRGFARRLADGLLLAGQEVAWVAARLAAAHRKLHAAAGAKSDPAGATAAARAAIAAPGPGRHRIDDHVRELRVLAGYRAGIIKRRAMVINQLKAQPHIWPGHTPADLTRAKNLAISAALTSTAQLSPHVRRALASMTAEIAGLNRQVRDLDTTIRQIVSPLAPALLQITGISYNCAAVLIAETGGITRFSSPARLARYTGRAPIPLCSPGKQRHRLHRAGNRRLNSVLCTAAIVQKRFHPPAQQLLARHQPAKGPRSARRILQRHLIDVIHHAMTTGQATWQHPITRHQFAA

SEQ ID NO: 326258 - protein, 344 aa, unidentified
MYEVFIGVDSHRSTLAAAAIDPMGRVLATVEVENDPQGHRHLIDWRRQLTGSVRIGIESSGNYGNCLARTLIASGEDVYEVPPNLSHREARRRGLGKSDAMDAVAIARVLAREETLPRPRAGQAHEDLKLLIDHFDQLKRQRNQLVNRIHKALVISHPGYEKQIGELKAERHKKAVVNLVRRDRSVRADLVRRNIRELRRLEDEVKTLRLQMKDLIEATASSLTEIDGIGTLTAARLLGEVGDVTNFRSKATFASLTGTAPLPASSGMTVRHRLNRHGNRKLNFTLHYIALTRCRVDPATKEFMAKKMAEGKSWKEALRALKRHLSNLIYRTMIADEGMLETAA

SEQ ID NO: 326259 - protein, 349 aa, unidentified
MEQNEVILGVDTHLDTHVGAVISDTGRLLGTRSVSTDTAGYLDLLTWANSLGHLRRAGVEGTGTYGAGLARVLRDHEIEVLEVNRPDRAMRRSKGKSDPTDAENAARAVLSGRATAIPKEQSGAAEAMRAVSVARRSAVKAKTQAINQLRALLVSAPQDIRDRLLKAKTTECVESCARVRSLGKTLMLQTLTATLRLLAKRWLTLAEELKALDTMLDSLTTQHARRLRERFGVGPQTAAVLVAVAGDNPERLKSEAALAALCGTSPLQASSGKTVRHRLNRGGDRSANNALWTIAMVRMRSDPRTRAYVERRTKEGMSNKEIHRCLKRYIVRELYPLILADLADSTASA

SEQ ID NO: 326260 - protein, 338 aa, unidentified
MIVIGVDVHKQSVTAVAVDEAGRMLDEKTISVGSDDLIGWAAGLAGERLWAVEDCRQLTRWLERQLLGCGEELVRVPPKLMAPERRAGRARGKSDPIDALAVARAALREPELGRPRPGEQVFRDLKLLVDHRDDLVDERRRTQQRLRWHLHQLDPTFAVPLRMLGRSSHLERVSRWLARRDQELQVRLARELVTRCRSLTRAIVELDRELEQRTAETAPALLELPGCAAVTAAKLLAEIGPIDRFKSDAQLARHGGVAPLEASSGRVQRHRLDRGGNRQLNAALYRVAITQARYHPAARAYLERKQAEGKSRREAIRCLKRLLVRVVFNTLKASPALT

SEQ ID NO: 326261 - protein, 374 aa, unidentified
MSKVTRFVGMDVHAETIAVAVAEGRDQARSLGTIANRPEAIRRLLGKLGNPAKLKVCYEAGPTGYALYWQLTRLGIHCDVIAPSLIPTKAGERIKTDRRDAEKLARSYRSGDLTSVWVPDARHEALRDLVRAREAAKEDQLRAKHRLGKYLLRNGQRPEEGCRAWTSAWWQWVRALQLPYADQNTTLLDYIMEVDHQAQRIELLEGAIDRAVAAAPPELRALVDALQALRGVAKVTAVTLATEFGSLSRFERPAQVMSYTGLVPSEHSSGPRIRRSGITKTGNSHLRRVLVEAAWHYRHRPRICQRQHALLPTLDPKVAAIAWRAQERLHRRYWALSQKSKPTGKIVAALARELVGFVWAIGTETEQRLLKNGA

SEQ ID NO: 326262 - protein, 382 aa, unidentified
MSIVMGIDQHRAQITAEWIELETGEIGRARVRPADRTGVGRFSGQQLEVATEATTGWRFLVEELRAAGAEVHLAEPAETSALRGNKKRAKSDRADARHLRELLLAGRVPESWIPPDHILDLRARVRLRHTLIEQHCEWQQRIQAVLYHHGCPQRRGLMVADGRDWLATQPLPETARERIAVALAMIDALEVQIAPLDRELRAYARAQTGCRALIDAYYGIGELTAVTIVSELGDCRRFANSRDAVRYSGLDVTVYQSDRHRAPGHLSRQGPPALRWGLYEAAQVARHPRSPDRAYYEQAAEKLGGNRACLALARKLLKRCYHTLRELGDDALAPPAVQQQTRPRADGTAVRRPATRPVSKRPANACAGRLTRPSTALRLRGS

SEQ ID NO: 326263 - protein, 338 aa, unidentified
MIVVGVDVHKQSVTAVAVDEAGRMLGEVTVRVGSDELVGWAADLCAERLWALEDCRRLTRWLERLLLAAGEELVRVPPKLMAPERRSGRGRGKSDSIDALAVARAALREPELGRPRADEEPFRELKLLVDHRDAIVDERRRVHQRLRWHLHQLDPTFEVPLRMLARSSHLERVSRWLARQDQELQVRLARALVTHCRALNRTISALDQELEQRTTELAPALLELPGCGALTAAKLLAEIGPIGRFKSDAQLARHSGVAPLEASSGRIQRHRLDRGGNRQLNAALHRIAITQARCHDDARAYLERKKAEGKSRREALRCLKRLLVRAVFNTLRAGPALT

SEQ ID NO: 326264 - protein, 347 aa, unidentified
MLYAGLDLSRQRLDVHVLDEEGRTVEVTATTPETFGLHELVARLSRYGEEVTAVIESMNGARFVHDQLELYGWDVEIADAVKVKGLAPLAAKTDRIDARVLAELGRRDLVPAIWLPDPTVRAERERARFRLHLVRHRTALKNRIHATLIAFGHPVPVSDLFGTKGRELLASLAIPEPWATTLLRSLHFVDELDTQIAACEAELRAAGADHPYVPLLMSVPGIAWVLGYTIAAELGDIGRFASPKKLAGYTGLCPLVRQSGRRDDRGPLAKNGPKYLRWALIEAATHAARHPAYRDRYEHTKKRLGRQRGSKVARVEIARELATAIWHMLTRNEPFNPGRSPARPLVA

SEQ ID NO: 326265 - protein, 323 aa, unidentified
MTMNILGIDIAKTKFDVCLMATGRNHFNTFENNQAGFAALDSWLARHAAGSVHACMEATGNWGLDVAAHLYASGATVSIVNPRQVKSFGGSELARNKTDRLDAALLARFCRAHTPAPWSPPLAHMRELRELVRRCASLKSARTQEVNRQKAGAVSPVLHASIARMLRQIDDEIAAMTAAIRDLVDQDVALRTNFTLICSIPGIGETTAALILAELPNLASFTPKGLAAFAGLSPSEHSSGARQRSVGITRIGHAALRSALYLCALSARRHNPQFTDFVARMTAAGKPKRVILIAIARKLLVLAHTVVRKQTAFMAEAPRTVPA

SEQ ID NO: 326266 - protein, 343 aa, unidentified
MPIVGGLDIHRKQITFDYLDTATGEVRRGQIAPADREHLAAWLAGRFTGQDAHFAVEGCTGWRYVVEELAAAGVTAHVAEPADTAALRGRKRHAKTDKTDSRHLRQLLADGRLPECWIPPSHILECRALLETYHDLRVEHTAWTQRIHAALFHQGAPQLGGRLRTGEGLAALRAIAAQLSPTGQLQIAVALDKLAALDRHLDVLRRRLLEAARQLAGAKELHARLYGVGPVTALALVCWLGGEGRFSSARKAVRFAGLDITVWSSDRKGPPGRLSRQGPEVLRWCVYEAGKTHARGSAPDHGYYASVKDRIDGKRAALSEARKIIRQAVHILAELGDGALAPA

SEQ ID NO: 326267 - protein, 349 aa, unidentified
MKILALDLGKFKTVGCVYDSASGEHRFKTSYTTAAGLGQLVREVKPERVVIEVCNIAGWVCDLLRELGVEVQVANTSDEAWRWCKVKKKNDRADALKAAQLSAVNQLREVHIPNIEVRQWRALIAFRQQLVRRRGKVKNHIRDLLLSEGQILPRGAKCWTQPGRAHLEALAKDFGELGMHELWRGQLHIELRQLQALQREIEQVEEKLNALAKAEPRVALLRTIPGVGPRLSEAIVALLDQAERFHHAREVSAYVGMVPKELDSGETVRRGRITKHGSRLVRSLLVEVAWAGLRYNSWVRETFQRISGGKKSRRKIAIVAVGRQLLVRCWAMLRDGTIWQPPPLAFAKP

SEQ ID NO: 326268 - protein, 459 aa, unidentified
MERKMKLGMDVVNFNASGIDVGSRSHYVAIGQELEDVREFGVYAENLTEICQWLMDSGVTTVAMESTGDYWQNLYVELISFGFEVVLANGKFTKNAKGKKTDVKDCRWIQKLHTLGLLSGSFLPDLTTEQLRTFCRQRGNWIDLAASTTHKMQKHLKLLNFRLDVVVKDVCGLTGMKIIEDICKGNLDPQSLAEHRHYNCRKPKEEIARALHGNNRSDYLFGLQQEFEAYKFFQKKIADCDKEIELFIKRELKEHPERKKMKTTEKSYKRINKNAPQIKDMNQLAFRYFDGVDLFAIEGLSHSTVLTIMSEIGPEGFHKFGSSKQFASWLRLAPNNKISGGKILSNRVPKGSNRLKIALRQAANAIGNLKDTHLSDFFRRVAYRKGRHSAVSATARKLAVILWNMVTKKIEYQPPKQYLFLDQKRKLGMVNRIKKQIDKFELKPEDLGFTNTLDVSNLI

SEQ ID NO: 326269 - protein, 350 aa, unidentified
MEKISIIGLDLAKHVFQVHAADERGQCVQRKQLKRRQVLAFFAKLAPCVVAMEACGTAHYWAREIKKLGHETRLIPPAYAKAYVKRGKNDAIDAEAICEAASRPAMRFVPVKTMENQAVATLHRSRDLSIKNRTMLVNALRSHLAEFGFIAGKGIGKLADLIKIVSEAPAEALPDMVRAALSGFLDTIALINANLAAIEKELMAWHKKNEKSKRLETAPGIGLMGATALSALVPDPLLFKNGRHFAAWIGMTPKLDGTGGKTRLGRISKAGDRYLRRLFVLGATSLIRSLANKSTPLALWVQRLLARRSKRAVTVALANKLARIAWAIMAKGEAYKPLTAAQLASPAVSA

SEQ ID NO: 326270 - protein, 328 aa, unidentified
MQFLGIDVSKDKLDGAAVSENSGAMLGRRSFPNTPDGIERLVRWAEKLAGVGPAGIHAILEATAAYHELAAHELVAAGMTVSVVNPARVRSFARGVAVLGKTDRLDAMMLARFGRLVRPKAWRPAEPILRDLQALLARLDEVEADLRREANRLEQARVRGCPEAVLRSFADAMAALKASRSELRQAIEAHVAAHRALQADLDRLLTIPAVGPKTALRMLVLLRSREFDSARQAAAFLGLVPVERQSGTSVRGRPKLSKAGNPRLRAGLYMAAVVATRLNPDVRAQHQRLLERGKSKMSALGAAMRKLVHICFGVLKSGGDYRPAANLA

SEQ ID NO: 326271 - protein, 370 aa, unidentified
MPSMPRPAQPDQDATATGEVVLGVDTHKDVHVAAVITALGALVASRSFPTTAAGYRKLLIWARTLGTLRRAGVECTGSYGAALARQLRAAGIEVVEVNQPDKATRRRRGKSDPIDAQAAAQAVLSGRATATAKTGDGPVEMLRMFRLAKGSAIKSRTQAINQLKAVLVAADPAVRESLSGLSTPILIHHCAQLQLQAALPSEPAAAAAYTLRLLARRILALTAEIHHLKQQITQAVNRRTPKLLARPGVGPDCAAALLIAAGDNPHRLASEASYAALCGASPVEASSGKTQRLRLNRGGDRQANAALYRVTLSRLRWDQRTRDYLARRIGEGKTRREAIRCLKRYIAREIYQIITESNPDPTSAAAAAAA

SEQ ID NO: 326272 - protein, 411 aa, unidentified
MTKEDFIYVGIDLHKETHTAVMIDCYNQKLGEITFPNRPADFPKLVTKVKKCNTDGKEVVYGLENAYGYGRALAVWLIDKGYLVKDVNTAISHRQAKHRGAMYRKSDSDDAEAIALATLNMLDKLPDACPNDAYWSLGQLVHRRDNIMKQRTRLVNQLHEQLCIAYPSYKSFFNDISRPTALYFWEHYPSKKYLKGKSVEDLRAELVPVSHNKCSTKTCEKILDAVASDKVKNNAYQDARDMVTLSIVSDLQHYDSQLAEVDKMLEQMYKMLGCTLTTIPGVNVITAVKILAEIGDIKRFSNANKLAQFAGIAPLRLSSSGKGKDVATKQGNRRLQATIYFLAIQMVQVSSKGTPRNPVVRAYYEKRKAEGKTSQQALICISRRLISIIYGMLKNGTEYRMPVVENAGENR

SEQ ID NO: 326273 - protein, 394 aa, unidentified
MIYAGVDIAKTDHVIGAVDERGAEMCRPMPFKSTEAGLERAVAWLEGLAGSPSDVVVGMEATGHYWMACYSFLVARGYSVAVINPMQVKAVRKLKGLDKVKNDRVDAWLIAEALRIGQYDETRLATDEVASLRSLSRYLQSLRGMAAELKTQCVCLMDAHFPEYAGIFSDMFGAGSRAVLSKSPLPFELARRRADSLARDIAEASRRGGKSAGYAARIKAAARSSIGVRLGQEAASFQVKSLIRQIEFADSECAKVEARVRALLDEVEPLVLTIPGVSYATGAQIVSEIGDVSRFRNASALVSYAGLNSSVSQSGQFDSGGGPITKHGSPYLRRALWLAANRARQYDPGLRAFYDKKRAEGKPHRVAVTAVARKLCHIAFAVMRDQVPYDPGRE

SEQ ID NO: 326274 - protein, 420 aa, unidentified
MKVVYQTCCGVDVHKSFLVATIIKTTSGVEPSYQKKRFSTFNNSILQFKEWLVKNQCRDVCMESTGKYWVPVFNLLEDEINITIANPKWVKAVKGNKDDTKDSKWIGDLFRLGLVPGSYIPCKPIRILREFTRYRYKLTSCRTSEKNRYQNALTVCNVALDSVVSDIFGKSATSVIDYLIEQPDNSINHEEIASRLLRSLKKKSDSVIESIEGYQMTDSQKYRMRLIRAHLDYITSTINDIDTMLNSLIAPYENAVQLLCTIPGVDRNSAITVISEIGTDMTPFSNSKRLCCWAGLTPGNNESAGKKKSVRITRAGVYLKPALVQVAHAAVKSDKSPYYKQKYERIMKRHGKKRAIIAIARMILTAIYQMLSTGEAWNPTDLFKIDMPEPMKEKQKEKAIKQAMKLLIREGKISESQLAS

SEQ ID NO: 326275 - protein, 460 aa, unidentified
MSKLSKPNTSLAEVRPFAGMSQVNPHAAGVDIGAHEIMVCVPGDNKTQLVRAFGNYTVDLQAIVAWLTEQHIELVAMESTGVYWIPLFETLEENGFDCLLISSRSLRRVPGRKSDVIDCQWIQTLHSYGLLESSFRPEAELVALRTLLRHRAQLLEHRSPHILHMQKALLQMNIQLSQALSDVTGETGQAIIRAIVAGERNPYKLAALRNYRCKKDEDEIAKALTGTWREEHLFVLKQSLEMYDFYKRQIEACDAEIERAYQLTRTQEGNAGGDDDLPPVPEHKRNSHSKNAPQGVQVRKHLKRICGVDVAAIHGFGESLAQDAVMETGTDMSKFPTDKHFCSWLGLAPKNEISGGKIIRSGTLKTRNRAGQAFRKAAASVMRSECMFGVFYRRMKARLGPAQAAVATAHKIARVYYQMLKYKVEYEPLSAQAYEQKYYEQQVKYLKRKAAKLGFQLSPA

SEQ ID NO: 326276 - protein, 351 aa, unidentified
MPCKTEVAVARTIGIDTGKNTLHMVGLDQEGAIVLREKVSRTRIAARLVNVPRCLVGIEAGMASHHVARELLALGHEVKQVPPAYAKPFRQGHKNDFRDAYAVAEAVQRPSTRCVPVKTADQLDLQALHRVRSRLIGNRAAVINQLRGFLLEHGIPVRQGLRFLRQQLPQILATRNDVLSPRMVRIIGALIGDWTYLDERIERVTDEIETLARADENCRRLMTVPGIGPIIASAMVAAIGNGAAFAKGRDFAAWLGLVPKQMSTGDRTILGRITKRGNRYLRMLFIQGARAILFRPAGWAKHSFGPWLAAAARRLHRNVLATAFANKLARIALTVLVEARSYAARIEPRAT

SEQ ID NO: 326277 - protein, 343 aa, unidentified
MKKILKQVTGIDVSQDELVVCLGQLNEDLSVEFYGSRSFANSLTGFKSLVEWVEKKGPIGGFLMEATGVYHESLAYFLADNDYRVSIVLPNKISNYFRTLEVKTINDYTAAEAIARFGLERNLDNWQPPKGIYKQLRQLTRERDQIIEMRTMAKNQLHADKSEARPHKASLTRAKQRIEFLNKQEKQIIAELNQLIGQDSEMKKLIVLLCSIKGIGFLTSVTVLAETNGFDLIRNKKQLVSYAGLDVREKQSGTSIKGKPRISKKGNKYLRKAMHFPALTAIRRDERYKAIYARLISKHGIKMKAAVAVQRKLLELIYTIFKTKAPYDKDYLQKTREQQIVTP

SEQ ID NO: 326278 - protein, 390 aa, unidentified
MKNRYASVACGGMDVHYKSSHVTFRDEDGEVVLRERLDHTNRPGLREQLARWPKGVPIVLEASFGWGWLSDLMEEVGLDPQLSNCYKVEKYRQTRGWVKTNKKDADLLSMLPGETRWKPDPWWRVWRAPAEVRDRREWMRYRADLVALTTGTKNRIHAVFHRHGIFFDEATDLFGGLGRRFLDQLSQDGRHAGGMLPEGALEVLRGLVNLHTYLRLELAKIAKTLRGQLERDDLAKRLDGIPGIGLILSHTLRSEIGDIGRFKNHRKLAAYACLAPRSDDTGEADPERPPLGRHLGGRGNRTLKWTFIEAAHGAVKRGGKWRAMYDRATDGGRKDRGRGYIKVARGLVQVVYIVWSRNVAYREAPPRRVAAGDRRTRRPRKNSRPGTGQP

SEQ ID NO: 326279 - protein, 353 aa, unidentified
MANPMANLTIGVDLGDRYSELYGVDAAGACVETGRIRTTVAGLEQWFGGRPPARVVVEAGTHSPWASRVLPRLGHEVLVANPRKLRGLYENDSKDDRVDAEYLARVGRLDPALLKPITHRGEAAQADLAVLSSRDVLVRARTLLINHTRGVVKALGGRLPRCSAEAFARRVGPHVPPAVRPALAPVLEQLQQLTTTIRGFDRAVEHRCAQSYPETARLRQVTGVGPVTALAYVVVLDDPTRFRRSRAVGAYLGLRPRRSQSGEQDPQLRITKAGNPFLRRLVVQAAHYILGPHGPDCDLRRHGERIAARGGKNAKKRAVIAVARKLAVLLHHLWISGAVYEPLRHRPALAQAS

SEQ ID NO: 326280 - protein, 346 aa, unidentified
MKKVLKQVLGVDVAQKELVVTLGRTMDDFSIELYAHKVFRNSETGIKALLDWAVKLTDSSIKVRYVMEATGVYHQKFAYHLDENGYDVSIILPNKISNYMRTLDNKTITDKTCSMAIAQFGLERKLDNWHRPKNIYRSLQQLTRERDQIVNERSMVKNQLHAEQSEAHPHANSVNRLNARISFLNGQEKEIKGDITEIIRQDSELHAQIRNMATLTGIGELTAVIVLAETNGFELIRSKKQLTSYAGLDVREKQSGTSVKGKPCISKKGNRSLRKAMYLPALSAVKWDERFKGIYARIVSKHGIKMKGLVAVQRKLLEMMYTLNKNKTAYDNQYLLKENSVQTQIA

SEQ ID NO: 326281 - protein, 472 aa, unidentified
MSKQRSLYRASRTNAKGHGRKKKKDTEEAVAKLPVLRPDAAGIDIGTEELWVSVPEDRDKQPVRQFPTFTNAVKAMIVWLQQCRIQTVAMESTGVLWIPIYQMLEDAGIEVCLVNARHYQNVPGKRTDVYDCQWLRFLHSVGLLRPSFRPEQAVCAIRALVRQREQMVQMRSQHIQHMHKALDQMNLKLHYVISDVVGASGQKIVRSILRGERNPAVLGKLRERNIKATEEQIQESLVGDYREEQLFTLRQSFEMWEEYNRRVNDVELEIEKYTAKLQTKVELKAMGEAEKPLRKGRKCKPQKLHLANMRDLCHQKFGVDVCQITGMKRGGIAEVLIAELGPDLSAFSSASAFAGWQALCPNHEISGGKVLSRKTKKMKHPVAVAFRLAAQSLERGDHYLNRWYRSMKGRLGAPKAITAAAHKLARIFYYMVTRQVEFDEGVFAKNERRMQERVRKNLEKRAAQMGYKLVAA

SEQ ID NO: 326282 - protein, 440 aa, unidentified
MDLVYKRCAGMDVHKKTIHVCIRIGRGKKLEVLTRVFGTFTADLEQLREFLRTNKVRRVIIESTGVYWMPVRNVLERSDWKFDLVLVNPQHVRALQGEKTDDKDCRRLAEFGQHDLLRGSFLPPVEIRDLRDLTRRRSQMQSDRNRVINRIGRLLETANFKLGSVASNIVGKTGWLILNAIANGETDAKRLAEQAQGSLQLKMAELAEALRGYSREPFRWLLSQLIEDLSRLDSKLNEIDLRLREQMKPYEDLIGRLCTIPGVKEITAWTLIAELGTDISKFPTASHAASWAGLCPGNCESAGKRQTGRTRKGDRYLRRMLIQNGWAVAHKKDCFLTALFYRIAARRGSKRAAMAVAHRVLVIAYYIIRDGSVYAELGGDHYDQKNPERTARRLTERLERIGYEVILTKANVAAPLLEVGACTRRYPFSIQGKTSTRPPL

SEQ ID NO: 326283 - protein, 453 aa, unidentified
MPVMGVPEQIEDEEHEQRLERVAAIDVAKASGKVCTRVPHEVKAGKRVTVVWDVAATTNAICELATYLVEQRIERVVLESTSDYWRPFFYVLEAAGLCVWLVNASDVKQVSGRPKTDKLDAVWLAKLNERGMLRPSFVPPADIRRLRDYTRLRLDLTRERTRHKQRMEKLLEDALIKLSTVATDIFGKSGRDMIEALIAGKNDPKQLADLARARMRVKHAALVQALDGRFDEHHAELARILLDQVDGLDTQIQRLTATIDGLIAAMPAAAGDDRAPTDTDTGGGHSQRPAALSAIARLDEVPGIAEHTAQVIIAELGLNMAQFPTAGHLVSWAKLSPRTIQSGPRTRGGKTGKGNPYLKSILGEAATAAAKTNTFLGERYRRLVKRRGKLKALVAVARSILVIVWHLLTDPTTRFRDLGPDFHTRRVNTDRKIRSLIHQLEALGHTVTLQPAA

SEQ ID NO: 326284 - protein, 425 aa, unidentified
MNFTQNEKISQVTNETLVVGIDISSENHYVRAFDWRGIELSKTFKFKSTSYGFKRLMEWLDETCKSNSKTKVIMGAEPTGHYWFTLAEYLKGNNIKFVFVNPMHVKRTKELDDNHPSKNDRKDTKVIAKLVIEGRYLIPYIPEDIYAELRVANERRMRITREIVAIKNRIQRWFAIYFPEYTHVFGSWECDSSIEVLRNCPLPADVMSLGAEDINQLWREKKIRAVGIKRANALIETAKTSVGVKNGANAARFEMSMLIEDYLIKKEQEARIIEILKTLCIQVPNSEKLLSIKGIGILTVASFFGEVGDIRRFESPKQIQKLAGLAIANDDSGKHRGKAGISKRGRKLLRYTLFQAVISLLMHSPEFRYLHHYYTTRSNNPLKGKQSKIALCCKLIRVFYAILTKGVEYDSEKLLYDIVRPELAA

SEQ ID NO: 326285 - protein, 424 aa, unidentified
MKFKMQDKQNQLIERISDRHLVVGVDIAQQFHVARAVNYRGIVVGDPLTFENNEEGFNRFLEWINKLKAKNSLDTTIVGMEPTGHYWINLSKWLSNEKIDVVTVNPHLVKRNKENRDNTQSKSDKKDALVIADMVKNGYYAFVRSTPESFEKLRVLMSNRDVIVKRLVSSINQLNRWVDVVFPELRQVFKDVKGKGAIATLRLFPTPIELRSMQPQDIVGKWKSVMKRQPGLKKAYLLIDLAKRSIGTHQALDAYKLHLEQLLEEYDLATTQLERVEQEVTNVLQQIPFAKKLLAIKGISEISLAGILGEAGDLSGFAHGNSLLRHAGLHLSEASSGKWKGQIVISKRGRSRLRRFLYLATMSLVMNNPEFKELHANNVKVKKIKKMKSIMKLCGKLARLFVGIAKRNESYSPEKLQPFSAQAA

SEQ ID NO: 326286 - protein, 429 aa, unidentified
MDKTELTRLEEFRQLRAEIRGSEEYLIVGIDVAKERHHAFFGTATGKTLHKRLVFENSKEGFERFLVQAEALKVQHGLGKMVLGMEPTANYHKPLGEYLIRRGDQVVLVSGVAVARNRELLDGRWDKHDMKDSANVADLISQGKMLYYDLPSQEVRELRELLSLKRGLKRQEHGMRVRIRNHLLAQYFPELDKPYGEGEAQGLKVVKWCVAPSEIAKMSYEGFIRLVKPGPRIRVEQKERLMAIWKAAPHSIGCEAGGSLGFVAKMMVEGLEGLRETLGKVDERIQEICKRVPSYPYLLSIPGVGPAIAAVLIAAIGNPHRFSSAKEVIKLAGLDLSANRSGTTSERAVPVISKKGNASLRYALYQAALIASNKSSPIMRYYTRILQGRERERGIKTKMRIKLAVKLLVIAWTLMKKEERFNPDYLKWD

SEQ ID NO: 326287 - protein, 349 aa, unidentified
MSVDPVYKVARSGARVEEMRWRDRTVIDGILGIDVCKNTLDVSISSYTKVRTKSFTNSPDGWRHLLDWLIAQKIQRVHACLESTGRYSLGIACALYEADHVVSIINPAQIRDFVRTKLGRNKTDGVDASHIREYCELFKPSPWAPPSEAHRRLGELQTIRSGIIAGLTEWKNRKNSGIVDAEAQALADATILHFTSQIGAVDKAIALAIENDSDLRSKRDLLLSISGVGDTLAGVVLAELPGPDVLHSSGEVVAYAGLNPRQHQSGTSVDRATRISKIGNAVLRAALYMPALSAMRYNPAIVALVTRLKSRGRLKPKQIVVAAMRKLLVLCFGVLKTGKPFDPAIAMGC

SEQ ID NO: 326288 - protein, 343 aa, unidentified
MKDNIYDHYIAIDWSIKNMAIARMTKKSNKITAIDVPSDIEDLQAYLKNLRGTKILAIEETTTSQWLYAELKEDVDRILICDPNRNKLLNEGPKTDKIDATKLVQLLKAGLMKEVYHSTDKFLYLRRVVSGYEDLVKSGVRLKNQRYALLRACGKRGKEKIGSTIDSQGEQFVLDCLDRQIEAYKKEKQCYENEFERLARKNPEIKHQKSLPGIGTINAVKIVARVVTPHRFSDKGRYLSYTGLIKLEKTSGGRSYGKRSPRYSRQLKSVYKSGVLAAIAGNNPINDYYDYLIQENGYPEHNARHKACRRLAILSLGVFKSGRKYQPYRRNYIKNNKEDTSGL

SEQ ID NO: 326289 - protein, 386 aa, unidentified
MSQSSNILLRAINYDHTLVLAIELSNKSWVLAAQVPGLPRTKAQRTIEPNKTALLAAIDGYRARAAALGYSVERVITTYEAGWSGFWLARWLVAQGIEVHVVQPSSVPVDRRLRRAKSDGIDAELLLRTLLAWLRGEPRVCSMVPIPDEADEDARRCVRERTELLSDRVGLTNRIGAVLATLGVGDYNPLLQSRRRRLTELRTGLGEPIPPNALTKIERLLARLELVLAQIAELERKRDEVAAADAPDRAGKMIQQLTSLRGIGVQSATVLVREAFVRNFSNGKALGSYAGLTSTPYSSGGIDREQGIGKAGNRRLRTVMVELAWLWQRYQPGAAQVAWFRDRVGSTGRRIRKVMVVALARKLLIALWRFVIDGVMPEGAVMKPSI

SEQ ID NO: 326290 - protein, 292 aa, unidentified
MYTENDIILAVDYHDKTITGRWFNCNSGQERIVKMDTTQQQICQLIDTAVSEAAQVGGRVIWIMESTTGWARVKRLIGSKASCVVANVLQMPLPPKAYRRKTDKIDTGRILREYLNGSLPYAYQPSLSVRSVRRLVAIRENLVSRRTALRNWIGRYLAHETWEVRTGLWSNIGMRRLKRITASTREPDKTVLTVKLTELKQLEGLLEPIEKRIIRICEHWRQAQRLDQIYGIAQISAVSILARIWPIKRFASAEELIAYAGLAPGIRESDQTLRVGHNWWRRNGQTFASLHH

SEQ ID NO: 326291 - protein, 357 aa, unidentified
MRIIGCDLHTRQETMAMLDTETGEVVEKTLQHEGEKVREFYSALPRPVQVGIEATGSMLWFLNLMEELGIDSQVGHPAKIRAAEPRKQKHDRRDADLLLKLLMENRFPSIWMPSKELRDLRALLWHRHQWVRTRTRVQNALQAMALANGLRRGKSLWSQEGQHSIASLPLGPHAAHRRTALQALYRELDADINALDKRVLEQALERPEARRLMTHPGVGPVTALATDVFLGDPVRFEDAKALASYVGMIPSEYSSAGRQRLGGLSKQGNPLLRFLWCEAAIHAVRRDPLLQRFYRRKLVQKGMGKARVAVARKLGIRLYIMLRDQIDYEEFCRRGQMRQKNGAARAGIPEVGYGPSQ

SEQ ID NO: 326292 - protein, 360 aa, unidentified
MKRQRTSIGLDVHARSVVGCGLDGETGQLFERRLTPDYGEVLEWIRSLPAPVTVTYEAGPTGFGLARFLETAGIGCLVAAPSKLQRPVGDRVKTDARDAAHLARLLHLGQIVEVAIPGVEQEAARDLVRAREDCRGDLMTARNRLSKLLLRQGIVYCGGTTWTGKHELWLRRQQFDSAALTLTYHEAFDAMLAARDRRDRLDTAITAMAADSQFTPVVRRLCCLRGVATLTAFGLAVEIGDWQRLTGRSIGAYLGLVPTECSSGATRAQGGLTKTGNAHARRLLVEAAWNHRARYRPGIELRRRWDAASPAARQRAQAANRRLHARWQAFDNRKKRPVVANAAIARELAGWCWSLAVLQD

SEQ ID NO: 326293 - protein, 332 aa, unidentified
MGSHHKEGSTKMSKYSTVCAGIDTAKHKLDVALEGRSETLQVDNTADGHMALSAWLRQHWVERVGIEASGGYEQEVVAQLRRDGFVVVVFQPAQVRAYARFLLQRAKNDKIDAGLIAACTAATKKIHAPPDPRLAPFAEHLTLVEQITDDIARLKNRRESCRDPRIRGFWKAEIARCNKLLRIELKALAAAIRQHRDLAERLDLILSVDGVGLRTAVAILVRMPEIGRITREQAASLAGLAPFDDDSAEHEGVRHIAGGRERLRGSLYAAALPAAMRWNPQLMALYQRLIAKGKPHKVALVACARKLLIFVNAVVERGTPWVEEPPARLKPS

SEQ ID NO: 326294 - protein, 317 aa, unidentified
MTNVILGIDISKLTFDVTLLIDNKVKNRKFDNNKKGFDTLIQWLKTKGVDTGYACMEATGSYGLKLARYLYENNFKVSVVNPARIKGFAQSKLCRVKTDKADSDLIAHFCQTMKPDLWKPTSLHIQELQQLVNRLDALISIKNQETNRLEGLSDLVATNIKDHIIFLNKQIKEVEQLIANHIKTHQDLSEKSTLLASIPGVGEKTISQVLTFLSNIDNFNSPKQVIAFLGLNPKQRQSGTSVRGTSRISKTGNAELRKAFYMPAIVSLKYNPVIKGFVKRLSITGKPKMVIVIAAMRKLIHIIYGVLKNKTLFNEKN

SEQ ID NO: 326295 - protein, 430 aa, unidentified
MNSNTQNAKIEAITEKTLVLGIDVGSETHYARAFDYRGVEYSKKPFKFSNTEAGFVTFKAWVLDIKEKHGKDKVIPGMEPTGHYWFNLGKFLQDNEMKPVLVNPHHVKKSKELDDNHPTKNDRKDPKVIAGLVREGRYMIPYLPDGVYADLRTASNIRFQLQAELTRIQNRINRWFNIYFPEYKTVYGKPDAKSGILILKEAPLPEDILTLGIDGVNQIWRDAKLRAVGKARAKTLIEAAEHSVGSKEGAVSARMEIRMLLEDYESRNIRLQEVMGLIEGLVNQIPMAEKLLEIKGVGIKTVSGFLAEVGDIRRFNDPKELQKLAGLALVENSSGKHKGKTTISRRGRKRLRYLLFEVAMSLVAKNPEFRELHNYYTTRRLNPLKKMQSLMAIAAKLLRVFYAILTKGVGYDPKKMVNDIRRPAAYAQAA

SEQ ID NO: 326296 - protein, 428 aa, unidentified
MNEMDRNRLEEFRQLRREIKHSQEYLIVGIDVAKDRHHAFFGTATGRTLLKRFVFDNTCEGFRKLLDQTEALRVQHGLSKVVYGMEPTANYHKPLGEGLIEIGRSVVLVSGVTVKRNRESLDGRWDKHDGKDSANVADLVSQGKCLYYEYPSAELRGLRGLLSLKRRLKKQEQSYRVRIRNHLIAQYFPEMDRDYERLGAEGLSIVRWCLPASQIAQLDVDPFIERVSSRRITQDKRRRLGAIWEKAAESIGCHGVPGVDHEGKVLVEGLKQIRETIKETEQKIGELCQQFPEYGYLLTIPGFGPDVSAKVLGAIGEPDRFDNGRQVLKLAGLDLSADRSGKESDKAIPQISKRGKADLRYALYQAAFIASTKNQGFLCYYTRKLRGREKEKGIRTKKYVKLSAKMLLIAWTLMKKKEAFDPAYLNAE

SEQ ID NO: 326297 - protein, 323 aa, unidentified
MSTKATKKRRSFIGIDVSKKLLEVGVHQSDYHFRCPNDPKNFPALITELISLRPARILLEATGGLERALLQALHAAGLPVVVVNPRQVRDFAKALGLLAKTDRLDARVLAHFAAATQPALRPVKAQQETELDALMGRRTQLSDMLAQEKNRRGSAATKGTRDDIEAHIEWLEERIQELDEKLKEQLKCSAVWQQKAKILQSVKGIGFVTSLSLLADCPELGELNRHQIAKLVGVAPLNRDSGQQRGARHIWGGRAQVRGKLYMATLAATRFNPVLKSFYQRLLAKNKLKKVAIVACMRKLLTIINVMVRENKLWNVKAQPVSA

SEQ ID NO: 326298 - protein, 482 aa, unidentified
MVNRKKSTFERLTNGRLNRKQRRELQRKLSAEDPGLEIVNRNVAGIDVGNESHFVAVPPGRDAQPVQEFGSWTADLERMADWLKACGIETVVMQSTGVYWIALYDVLEARGFKICLANARHTKNLLGRKSDVQESQWLLKLHTYGLLGNSFRPPDEIRALRSLWRLRDRHVKEAARAVQHMQKSMITMNIQLSNAISDISGVTGQAIIRSILAGERNPEKLAKLRDRRIQATLAEVSRSLEGNWREDMLFELRQAVEAYDFIQKQMAECDLRLQMLLAALPAREVETAGVAAEAAGKPACKKRSRKSRKNAPVFDLHAELERVCGVDLTSIDGIDIMTAQTIVAELGTDFSRWKDEAHFASWLGLSPCRDISGGKVLKQGSLKVKNRVATALRTAANTLLHSDSYLGARFRSLRTRRGAPKAIKAMARYLACLIYRMFTRGQAWVDRGAREFENKRAQRELSALLNKAAAHGFKLVKLPASA

SEQ ID NO: 326299 - protein, 322 aa, unidentified
MRIIGCDLHARQQTLAMLDTETGEVVNLTLMHEGNNVREFYSKLPRPVLVGIEATGSMPWFLNLMEELGIECRVGHPAQIRAAEPRKQKHDRRDADLILKLLAQNRFPAIWLPSKELLDLRALLLHRHQWVRMRVRMQNALQAIALANGLRRGPALWSYDGQAKIAFLPLLPHAAYRRSALQAMYKNMQSEIENLTRRVAEQAGNRCGARLLMTHPGVGPVTALATEVFLGDPQRFTDSKTLASYVGIIPREYSSGEHQRLGGVTKQGSPLLRFLWGEAGAHAARRDPELKRFYQTGSERSGQGARGGGTQAGNPAVDHVAG

SEQ ID NO: 326300 - protein, 440 aa, unidentified
MAVRKTEEEVFPHAAGIDVGASSHWVAVPRRVADDSVREFGAMTDDLNAMADWLLACGVDTVALESTGVYWIPVLEVLEQRGLKVWLVDARQMKYVPGRKSDVQDCQWLQKLMSLGFLRCAFRPAAEVCELRAVARQRDILHTEQARWVQRMQKALVQMNIQLTEVLTDVMGLTGQLIIRDIVAGERDPKALARHRHSRVKASPQEITKALTGNWREEHLFVLRQSLGMYDDIARHLVECETRLQAGLKELGQRQVDLGQAPRRGSKLRQAFDSRQTLANWAGVDLTRINGLGVTVVTKILTEIGADMSRFATVKHFCSWLGLCPGTKISGGRVLSARTKRSTNRVRQALKLAAMSLSHSDSALGAFYRRLCARMDKPSANTAVAHKLARMVYFMLTRGEEFVDQGQKHYEAQQHQRSVAALKRRATSLGFAITAVAAGG

SEQ ID NO: 326301 - protein, 322 aa, unidentified
MKTQEISFIQLVEVGCGIDVHRDLIVATIRKGNYEYETREFSAYTSSLTSLRDWCKTEGVTHVAMESTGIYWKPVFNILEESFEIILVNARHVKNVPGHKTDKKDSAWLSKLLLSGLLKGSFIPPCDIRELRDLVRYKKKVVAQAASEKNRIIKILEDANIKLSSVLSNVDGAVGTKIINSLIEGTTDVKELARFYHGKMKVSKEEFRKALEGRITKHHRFMLQLHKDSIADKERLIERIEAKIDEATKAYQVEVDLLQTIPGVGKDSAISIISEIGVDMNRFPNENHLSSWAGMSPGNNETGGKKKSQGQYMVTNTFKAHL

SEQ ID NO: 326302 - protein, 429 aa, unidentified
MMAYAPPTTNDMLLIAIDVAKRSHEVLVQWPSGKKKTFKLPSSHAEFILFTDFLADQGLKVKAALEPTADYHRTIAYWLLQHGVDVHLASSLACARVREALFNSWDKNDRKDAKVIMYLLAQGLTKPFHDPLLNGYMHLQELAGTYQQISMARTRCQHSLVNHYLPLFFPEFERYLHSNRAEWFCRFLLQFPVPRSIASLALEAFLEQAWELVGKKIAKQRFLTELYEMAQKSIALPIEAHAVELVPFKLQLKRYQQLTEHRNTLECLAHGLLKDNQDYLRLRTIPGIGPIIGLIILAESGDLRRFAHHRQYLAFCGFSLSGSQSGEFQGRYRINKRGNARLRYAYWLAATVAIRQRENSFRQKYERYIANDKESADVKRKAYCAIAIKMARVAHSLVKQECDYRGYHEAGIPGGRTRSTGRGTHRGIS

SEQ ID NO: 326303 - protein, 321 aa, unidentified
MNKSTIFVGIDISKDVFDVYDSKRGHIQYCNDENGFKLFRKSITADHWCVMEATGCYHHQLAIDLFNNGLRVSMINPLIIKRFIQMKLNQVKTDKSDAKMICRYGEEQAMELWSPEPDYIVESKTLQGVVRLYFKQRTALKNTLHAMSTSKRGKGKLMRSIVRQLRILDKEIGLLEAEIEKLIRANEQELYTRLNTIPSVGRKTAMLLIVSTNGFRDFESSRQLSSYFGLAPNERSSGSSIRGKSRISKTGDSLVRNHLFLCSFTACIHNPQCKALYDRIVLKGKSKKLALIAVCNKLIKQAYGIAKSGLDYDRNHVGRLS

SEQ ID NO: 326304 - protein, 346 aa, unidentified
MNTNKLTIGLDLGDRQHTFCVLSAAGKILAEATLANTREALAAFSACHPKAAIIMETGTHSPWISRLFEARGHRVIVANARKVRAISQNQTKSDAEDARMLARLGRADPALLSPITHRSEKGQRALVRLKVREALVRSRVNQMNSVRFLLKSLGQPVPGGVKATAFVRKFRAQADAATTALVEPLLQMLDALNAQIKQLDEELETLAREQYPMTERLRQVDGVGPLTSLCFVLTIESPERFPHTRDVGAYLGLVPRRDQSGLTDKQLPITKAGNTALRCLLVNCAHYILGPFGPPSHLRAAGERIAARGGKSAKKRAVIAVARKLAVTLLALWKSGAEYHALPQAA

SEQ ID NO: 326305 - protein, 355 aa, unidentified
MNDAKYIGMDVHQATISAAVRDSSGNLVMEATLETKAETILEFVRGLRGSLRVSFEEGTCAAWLHDLLKPHVTEVLVCDSRKNALLRVGNKNDREDARKLAELLFLNKLHSVYHGETGIRALKELARSYLTITRDLTRVMNRLKAIYRGWGIACAGQQVYAPRYRAEWLAKFTEAGVRRRAEIYYQQFDVLAALRQEARRELLAESRKHPAQRLLRQIPAIGPIRAALLIALMQTPHRFRTKRQLWAYCGLALRTYDSGEYRFVGGQLKRSKKAVTIRGLNKNHNHDLKNIFKGAATRAAATVGPFQNFYEARIASGMKPPMARLTLARKIAAITLLVWKKGVRFDANQLKQQAA

SEQ ID NO: 326306 - protein, 395 aa, unidentified
MEFLKYGLGIDMAMEKFDACISIIDKLQHVMIRAQCSFNNNKKGFETFILWVSKNTKLAIPAVYLMEATGIYYEQLAWFLHNRNCSVSVVLPNKAKKYKEALGLRSKNDRIDAKGLAQMACEQSNTSWKPLTSNIYLLRLITRQIQSISEQSTVFKNQVHALQYGMYRDKAIEKMHVRQLDLLQKNKKSLQLRVEQIVEKDEILKRKFKHIGKIKGLGLQNLAVIVAETNGFTAFENLAQLVSYAGYDVVENQSGKRSGKTKISKKGNSHIRRCLHFPAFNMITYEVAPFKNLYERVYEKSKIKMKAYTAVQKKLLEFIYILWKKDEAFDPNYQDKTSGDVEPAPSFASVPQEPSLTCGDQEEKTKPAKQKITPAITRVTQDKHPSKYRRMPSFA

SEQ ID NO: 326307 - protein, 335 aa, unidentified
MKKYLFHVGIDISKLKLDVVLLQTESSKVVEHFIVENTQKGIKILMNHLQKKKIDLSNTLFCCENTGVYTFPLSIYLSEKSLDYWVVPAIEIKRSKGISRGKNDKTDAKDIALYSLRNIDKLKLSTIAEKEIQQLKLLYSEREKVIKSIGLFGMATENKDFIPNDVYKVIASLNAKTIKALKKSLKDIESKIKEIIKNNNEFKHQFDLIKSVPGVGEQTAIYIIIATKGFKTFDSARKFACYSGVAPFEYTSGSSIKGRTKVNHMADKKMKTLLQMCALTAIKYDPQLKEYYNKKKKEGKNNMLVLNNVRCKIISRVFSVINRQTPYIDTYKFAS

SEQ ID NO: 326308 - protein, 438 aa, unidentified
MKVMHERVAGIDVHKKMIKVAIRSPGDKPWTRKTEILTFRTFYGVLREMARELRARGVTHVVMEASGVYTEPVYYALLEEDFTEVLVVNPAHVKALKGHKTDAKDCARLAELLECGLLQGSYIPAAELKEVRDLTRYRSKTVQARTSEIQRLDKTLESAGIKLGSVASDITGKGPAAMTGALIDGERRGKVMADLAKGRARAAGKLADLSMALEGRFTEHHALMCRLILDRIRVHDTAIGGLDKQIAGLAAAWQREIDLLKTIPGFGDVVAWTWIAEIGPAPHQWFGSHEKLASWVSLAPGNYISAGKRKHSRTGDAGTYIKPVLVQAAWAAIRVRGRLQARYNRLVRRFGGPKNPAAKKKAIVAIAHTLLKIAYSVLKSGTPYQDLGEDFYTRRETPAQRQAWLERQIQKLHPGCTVTITISPPPGHAPEAALTPGA

SEQ ID NO: 326309 - protein, 381 aa, unidentified
MKKDSIAKLQVTKSQIRRMAAKQRLTVGLDLGDRWSRYCILNEAGGKASEDQLPTTKAGLDSLFAKMAACRIALEVGTHSPWVSRHLAAMGHEVIVANPRKVRLITQSVKKNDRMDAEQLARLARVDPQLLGPIRHRGAEAQGDLAVIRARAELVDCRTALINTARGLAKPMGERLKSCDADYVKESLAEGLSEATQNAIRPLLKSVEEITRQIGVYDNKIQEIEKRYPETKVLKQVNGVGTLIALTFILTLEDAERFRHSREVGPYLGLTRKLRDSGESQPELGISKAGDVLLRRLLVQAAHCILRDGAPDSDLKQWGMTKVEAGAGKKGSKRRKKRATVAVARKLAVLRHRLWVTGEVYDPQYNRKAVEAAKGTGKAAA

SEQ ID NO: 326310 - protein, 292 aa, unidentified
MQNTLDENLEPAAQFWVGLDVSKETLDACLLRPNGKTTHKQFANDAGGFAKLLRWVQHAAPEQHVHFCLEATGAYSQAVALFLAEAGQLVSVANPARIRFFGLAQAQGNKTDKADAALIARFCRQEVPELWRVAAPEVQLLLALVRRLHAVQELLVQEKNRWSVPSQPAVVIESIQNGIAYLEAEIKRLQQQIRDHINASPDLKRDSKLLQSIPGIGELTAWDLLAELPDVSQFNSAQSVAAYAGLAPREHRSRSSVRKHTRLSKQGNTRLRKAMYFPAVTGITWNPLVKAH

SEQ ID NO: 326311 - protein, 407 aa, unidentified
MELPVLFPCVVGLDVHQAKISACAMIEQSDGSLKVEQREFGAFKRDRRALAEWVRSVAPDVVVMESTGIYWKSPYAALERVGIRAWVVNARHVKNVPGRKTDVADSQWLATLARAGLLRASFIPPADIRHLRLIARQRQKLGGMLSSEKNRLHKLLTDAGIRLNVLVSDIHGQAGRAMVKALIEGRPIPEILDLAGRLRATREDLFEALQPEELSDAHRFVLSELMAHIEELEARMGRFEQRLLGGLSAWEPQLVLLQTLPGVDRIGAAMLLVEIGTDMASFGSAEKLASWVGICPGNNESAGKRKSGKTRKGNAWVRRLLCEFAQAASRSRCGLKEKFQALSIRKGYKKSIVALAHKMLRIIFAMLKNHTPYQDQAVDYEELLVQRNAPRWIKMLVKHGYIRTASA

SEQ ID NO: 326312 - protein, 316 aa, unidentified
MTTNAVVVGVDVAKDRLDVAVRPSGETWSAANDEAGITALVARLRPLGPALLVCEATGGFERAAIAALAAAGLPVVVANPRQVRDFARATGQLAKTDQLDAAILALFAERVRPTPRPLPDAAAQLLDAVLTRRRQLLEMLVAEKNRLGFAPKPVHRGIQAHIRWLERQLDDVTKELATLIEASPVWRAKDDLLQSVPGVGPIVSYTLLGELPELGTLSHKQIAALVGVAPLARDSGTLRGKRLVWGGRASVRTALFMAALCGRRWNPTLKVFYERLKAAGKPTKVALIACARKLLTILNAMMRDQSRWTSNVQYSC

SEQ ID NO: 326313 - protein, 332 aa, unidentified
MDDTIYDHYIAIDWAAYNMAIARMTKKSNKVTVIDVPSDIAELKLYLGRLKGTKALTFEETTTSQWLYTELKEQVDKIVVCDPHRNKLLNEGPKNDKIDASKLVQLLRADLLKAVFHANDDFLYLRRLVSGYEDLVKAGVRLKNQRYSLLKACGNQEVVGEDAFVLGCLNRQIDLYEKEKASYEKEFVRLAKKYPAIRHQKSLPGIGDINAVKIVARVVSPFRFADKGHYWSYAGLIKHEKISGKKSYGRRSPRYCRQLKDVYKIGVSAALGGNNPINDYYKKLIAEGEAEHDARHKACRRLAVLSYGVFKSGEKYQPYKRSRHIIGNAAAK

SEQ ID NO: 326314 - protein, 358 aa, unidentified
MTNEHKHLDFTGQDIYIGIDVHLRSWSVSIYTKDFEHKTYTQPADTRVLVNYLRKNFPGGNYKSAYEAGFSGYWLHDELKLNGIESMIVNPSDIPLKDKDRKNKTDRIDSRRLAKSIRSNMLEGIYIPTDQQREDRTLLRTRQAMVRKQTRVKNQIKSFLYFYGITITEEDIGKHWSRNYVQWLDNIILREESGTFALKVYLEELKHLKGLIAQTTRQIRQLAANQRYTKLVKLLVSIPGISTLSAMTLLTEIHEVGRFKKFDYLNSYVGLKPSEHSSGEKINKTDITQRKNAYLRHILIESSWIAIKKDPALLMAYHKFISKGKTKSRAIIKIARKLLNRIYYVLKSEQPYCLGIVE

SEQ ID NO: 326315 - protein, 410 aa, unidentified
MKGLSLSEPWRSAPARERTPPPGQFQGYGALMEKTPEGASPRIYLALDLGGSRWQLAFGDGSVARPRQRTIEARDLMALLLEIESAKKRFGFPADSAVVSVYEAGRDAFWLHRWLTAQGVDNVVVDPGSIEVDRRAKRAKTDKLDSEKMVRCLVRHHAGEQKVWRVVRVPSEEDEDMRRIHRERKRIQEELTSVTNRSHSLLATIGVKVENMRRLESYVGRLRTANDEEVPPHLRRELVRIVERINLLVEQLGEVEADRRTFLQSSSKRAEMVLLLGSLRGVGMETAWYLVMEVFAWREIRNRKQLGALAGLTGTPHNSDTTVRDQGISKAGNSRLRALMVEVSWQWLRYQPDSELTLWFQQRFANAGGRARKRGIVAVARKLLIALWRFVELGLVPAGADLKAEGAALR

SEQ ID NO: 326316 - protein, 335 aa, unidentified
MVAGTLGSLDKEGAMKMADNSVITAGIDTSKDKLDTAIHGQADSLVVQNETAGWKKLADWLKQSGVTRVGIEATGGYERGALRYLQQVGFTVILLQPLQVRAFGKLMLRRAKSDQLDAALIAHCTHTIDAYNKMAPDARFDALGDRLTYIEQIEEDIARFKTRLEHIGDTRLRRTVGADIKRLKKRRLDELMCLRKAVREHDDLAKRYTLVESIPTIGARTALSIVVRMPELGQLSREQAASLAGLAPFVHQSGKFKGETHIGGGRARLRRSLYIAALPGAFRWNPELKALYERLVARGKSPKCALVACARKLLIFANAVVARGTPWENTRPATA

SEQ ID NO: 326317 - protein, 360 aa, unidentified
MAKARTLVGLDVHATKIVAAVLDAETGQLQSFAMGGESAAAAGFCAGLPGPVRVAYEAGPTGYGLARELAGRGLECVVAAPGKIPRAPGDRVKTDRRDAELLVRLLLAGELHPVRVPGDEEEALRDLVRAREAVRVDLMRARHRLSKLLLRHGIRFDDGRAWTTRHHAWLQTLCFEWPAAQATLLDARGAIDALCHRRERLEREILALLPTSPWQVQVGRLRCLRGVDTLTAVGLCAEIGDFERFARAEQLMSYVGLVPSESSTGQQRRLGAITKTGSTHARRLLVEAAWHYRTRPNIGKALSDRQQDQPPEAIATAWSAQRRLHRTWARLEARAKRRTIIAVAAARELAGFCWAITRVE

SEQ ID NO: 326318 - protein, 322 aa, unidentified
MRYIGIDVSKATFVVAYSADKGGKIRTFDNTTAGIKQFIGTLPKDGSIHCVMEATGNYSAMLLYLLNVAGITVSMENPLKIKNFAKAMLSTVKTDKSDARLIALYGEKMNPQPFKVQGEAILRLRQKRTVIRQLTKQITAMSNLRGSLVCLPVPDKGATHTVDETIKFLEKRRDRLQSELTELVEVEFSRQLALLTTIKGIGITLATALIITTGGFTYFQNAKQVSRYLGICPTYEQSGTSVNIRGHINRNGDAYTRGLIYVAAWNASRFNAKCGETYTRLRQNGKPGKLAMIAVANKLVRQAFAVVAHDKEYVDGFVSNRH

SEQ ID NO: 326319 - protein, 398 aa, unidentified
MTESSDYESVQVFIGVDVGKDTHHAVAINRSGKRLFDKALPNDENKLRSLISDLKQHGQILLVVDQPATIGALPVAVARSEGVLVGSLPGLAMRRIADLHAGEAKTDARDAAIIAEAARTLPHALRTLKLADEQIAELSMLCGFDDDLAAQTTQASNRIRGLLTQIHPALERVLGPRLDHPAVLDLLQRYPSPEKLASLGEKKLAAQLCKLAPRLGKRLAADIAQALAEQTVVVPGTNAAAVVLPRLALQLITLRKQRDEVALAVEQRVLAHPLYPVLTSMPGVGVRPAARLLTEVACRAFASVAHLAAYAGLAPVTRRSGSSIRGEHPSRRGNKALKRALFLSAFAALRDPLSRAYYTRKMSQGKRHNQALIALARRRCDVLFAMMRDGTFYTPQAS

SEQ ID NO: 326320 - protein, 405 aa, unidentified
MSFILAFDVSKGESYKVLYQDHHCLTEGKIPHNQEGFCQLLEEIIALPELPEIVFEATGVYSRPLEKFCQDNRLAYCLLNPLEAKKQMEEGSLRSWKTDKIDAHKLAQTHWKNTRLPKTHQAEVFQELRDLARFYQEIEEKISRVRMDLHQALQLTFPELENFFSTRVTPYALSLIEAFPHPTFVLTSTRTKIKNRLVKSTRKHISENRAWQKADQLLAYAQHSYPAVNSSSIHCQKTSYYACLLQDLLEQKEHLMAQMIQSAQALEEFEIYQSIPRIGAPTAALLIGELGDIRRFPTANQLNAFVGIDIRRFQSGNYVGKDRINKRGNPKGRKILYFAIRNMIRQQRAAPNHLVDYYYKLKKQPVPKKEKVATVACMNKLLKCMHAMVRKHTRYAYTYTASNDQ

SEQ ID NO: 326321 - protein, 429 aa, unidentified
MTANNHTPQGLTLVAIDIAKDHHDVLIEPPTPARRRRLRLANQREDFEHFARYLRGLKSTVLIGFEATGNYHRPLAYFLHYQGFDLRLIPTLALARTREAMHNSWDKNDPKDAQVILHLLKTGLTQIWHDPVVNRINDMRELSKTHGQVTLARVRVWHTLRNHYLALYFPEIDRFIRSNYNVWIVQLLTAFPTPASIIAMHEQEFQAQAWNLAGRKVNKRALIAEIYAAAKQSIGVPVALDSAAIAMFRLVLEQYLALNQLRERIAEQAATLLADNPDRRRLMTVPGIGPATALTILAEAGDLRRFRHHRQFLSFCGLNLSTRQSGKSRGQSHISKYGNARLRTALWMAAQSAVRMRENSFRRKFERYVRGNPLDADLRRKAYTAVTAKLARVVFGLIKQQTDYRPFFEHQFQVEEPSRARAVGAAVTP

SEQ ID NO: 326322 - protein, 336 aa, unidentified
MDTHRDAHVAAVLSLTGAVLATSEFPASAVGYRDLLKWARTSGAVRRAGVEGTGSYGASLTRYLLAQGVDVFDVNWMDRADRRRRGKSDPLDAQNAARAVLSGRACARAKSGDGPVQIARMYKLTKVSAVKARTQAINQLKSVLVTADPALREALAGLGNAELFRTCARFAGASGHEEGGEESVLQATRITLGLLAHRIGQLSEQIRDVDARLARLVERHAPQLLDVMGIGPDTAVTLLITVGDNPERLDSEASFAALCGVSPVERSSGRRQVRRLNRGGDRQANAALHRIVFTRLRVDPRTQDYYERRIKEGKTRREIIRCLKRYAAREVFHLVR

SEQ ID NO: 326323 - protein, 360 aa, unidentified
MVNIQLTGEFATSPEYGMKLFIGLDVSLAKTAVCVINEYGKIAKEAQVPSDPQAIVDFANTLEGAVAIIGLEAGPLSQWLHRGLADAGLDVVLMETRQVKGALKAMPIKTDRRDAEGIARLLHMGWFRPVHCKSVSAQEVRALLAARKAIQQGMIALELSLRGLLRNFGLKVGAISRGQFDARIRELVDGNAMLQAAAGPMLRARASLRQELAGLERQVRLLAKDDAVCRLLMTMPGIGAVVALTFRSAVDDPARFSSSKKVGPWVGLTPSRNQSGERDVIGGITRAGDANLRRALCQAATVMIHRGRSTWLRSWAAQVAKRRGAKRAMVALARRIGTILHRMWRDGTEFSIVPLIAKSA

SEQ ID NO: 326324 - protein, 361 aa, unidentified
MQSTPIIAFDQHAATTVAAVLLPKHRTPVLHSLSSDIPTIQRFVARVKRHGAVTCCYEAGPCGFELQRALTARQIPCDVIAPALIPRRPGDRIKTDRRDAGHLAVLYRADALTAIHIPTEQEEAARDLLRCREDIRADLLRARHRLSKFLLRHGRRFTATKKAWSKRHATWLRAQTWPLAALDQTHRAYLRAVDEVLARLHDVEQDLRALLDLEPLRARVHRLRCFRGVDDLTALTIAAELGDPRRFATAPSLMAYVGLVPSEHSSGAARRQGGITKTGNAHLRRVLVESAWHYRHHPFVSAVVRARQRGAPATAIAGAWAAQQRLHRRYARLAARGKRKQHIVTVVARELTGFLWAALTR

SEQ ID NO: 326325 - protein, 390 aa, unidentified
MTKRKTETVNDLSRCLDPLDMDATVIAVIEMSQSSWLVAGIVPGVERQPLKKIAIDEHALLKLLSRWREEAEKKGHKITRVTVAFEAGHDGFWLARRLAALGIEVHVIHASSVAVTREHRRAKTDRLDTELLKRGFLGWLRGERGHCKMVAVPTLAEEDAKRPSRERETLVGEASRIITRLKAAFIRLGIRSFNPKLKAATERLGTLRTPEGEPIPPNTLAALKRDLERHQIIKRQIREIEQTRLDHLAQAPAKGPHAMVLLLARVVGIGVETADMLVQEVLSRNMRDRRAVARYAGLTGSPDESGAKRREKGLARSGNARVRRGMIQLAWRFLWLQKDSALAEWYRQRTQTAPATRKTLIVALARKLLIALWRLVHDGIVPKGVQMRPA

SEQ ID NO: 326326 - protein, 426 aa, unidentified
MKVMHDRVAAIDVHKDMVKVAVRVPGGKRGKRRTDVLEFRTFYGVLQAMGRELLRRGVTHVVMEASGPYTEPVYTALAELGFEEVMVINPSHAKALKGHKTDAKDAIRLLDLYECGLLSGSYIPAPDLKEVRDLARYRMKTVQARTSEIQRLQKTLESAGIKLDSVVSDITGTGPTAMIEALIDGERRGAVMAELAIGRARTAAKLADLSMALTGRFTDHHALMCRLHRDRIKLFDAAVEDLDATIAPLVARYAREAALLKTLPGFGDVVVAGWLGAIGPAPHEHFATAQRLASWATVCPGNYMSAKKSKGGRTGDGGNYIKPLLVQAAWAAVRTPGRLQARFHRLVRRFGGARNKGAVKRAIMAIAHTLLKIAYQVLKTGEAYQDLGADFYTKRESPQARQDYLVRQLQKLNPGCTITITPAEAA

SEQ ID NO: 326327 - protein, 378 aa, unidentified
MEGTELITPTKYGHGREEYARFLGEAKTVASVTGGRLLFGIESTGIYHLPLYDYLTKRNYQVRVFNGLELCGMRKSRIRKTKTDPIDARLIAGYLLMCFDKDKRSPVPFELRNLREFCRIRERLLRKLTRIKNQLTRDLDLVFPGFTGVFSDILGKKCLMLLEQACTPTELMNMPKEVLRKYVPEKKVVELKKISACAIPASNFNKSIVFEIGSLCRQAKCILEEMLRVEKEIDSEYSQIKTPLQSVPCIGPGTGPVILAEIGDIKNFDHPKRIVGFAGIDPVIKESGKSRKECRISKRGSASLRCALYQAAFAGITCNPVLKVYYNKKRSEGKTHRDAVVCCARKLCYIIYSVLSNNRVFYVPSHIIASNAQMNKQD

SEQ ID NO: 326328 - protein, 426 aa, unidentified
MQNCLFIGVDVALKGNQFCVMNFDQHVYFNLKFPNNPEGNDMVINKIKDIENKFFFEKIIVVMESTGMYSFHPACYLSSNEYLNQFHTEVYQINACDFDKYKKSFHDLEKEDGIDAYILADYARVGRTKALYPFRGSQYIALQRLTRQRYHICKELIREKTYVLTNLYLSFSGLMSLDKNELPFSDLFGATSSAFLEEFDSPDQIAESSVEELIHFITEKSKNHSSNLDNKVNALNKAVRSSYRLDQTAYEPINIAIACSLNTIRFYQQQLKNIDKAILNAALGLDSNTYHILLSIRGIGKVYAAGIMAEVGNIDRFPHNSKLAKYSGLYWKRNQSGEFDSQDKKSSKKSNKYLRYYLVEAAASCVRQNFPFIKDYYNLKYKEVSKHQHKRALVLSARKLARLIFGLLRKNQYYKPIDSVQISKIN

SEQ ID NO: 326329 - protein, 341 aa, unidentified
MANKVYVGVDIAQAKFDAAIWQGSTGTTLNTFSNGSVGFEQLTQRLQAALPPGDAQIVLVLEPTGGYELALVAFAYTHGWQVCLPNPKQVRDFAKSCGRRAKTDVQDALLLAQFGAEQRPEPQRELPPQIQELAELLRRRDDLQQLRRSETNRLVGLRQRPRPATAVLQSLERTIAALEAELAAIEQAIDELIKRDPDLRRQARHLRTVPGVGEKNVLPILVLFYRWQARTCNKGTPKGLVAFAGLDPQPYESGRRVHKRATISKMGDRSVRHYLYMGALGGVRGQNALRSFYTRLVSRGKAKRLALVAAAHKILIWAWAVFCQDVDFDASRFLPKTSVAI

SEQ ID NO: 326330 - protein, 324 aa, unidentified
MRKHSIICAGIDTGKHKLDVALEGRSQELQVQNTAEGHRQLSIWLRKCRVARVGIEASGGYEQEVVRQLRRDGFVVIVFQPAQVRAYAMFHLQRAKNDKIDAGLIAACTAATKKIHAPPDPRLAPLAEVLTFIDQITEDIACLRTRHESFRDQRIKACCTSEIRRLKVLLRCELKKVVADIRRHDDLAKRLDLILSVDGIGLRTAVAILARMPEIGRVTREQAAALVGFAPYDNDSADHLGQRHIAGGRKRLRGNLYAAALPASFRWNPQLKALYKRLIAKGKPHKVALVACARKLLIYANTVVERGTPWTKEMPALTTATRSN

SEQ ID NO: 326331 - protein, 432 aa, unidentified
MAVVMIGVDPHKASHTAVAINAAEESPGQLQVRACAAQSERLPGRAQAWPERTWAVEGAGGTGHLLARQLLSAGERVLDVPPKLAARVRLLATGDTSKNDPNDACSVAVAALRSASVRQARRDDHAAVLKVWSKRYGDLGRARTQVACRLHQVLCELVAGGVPGEITAGQAERILASITPAGAVEAARCQLATELAGDLRGVDARIRETRKKAATAVRAAGTSLTGLFGVGPVIAAAVIGDVRTVSRFPDRGHFASYNGTAPTEVSSGGRKVCRLSRRGNRRLNHVIHMAAITQIRYRHSPGRAYYDKKRAEGKTGKEALRCLKRQISDAIFACLQADARRAAATAAKSPGGQPGNHSASRAAGSHPEHRLFGQATPGPATHPTTAAGADTAAPVPAPLPSRASGRPGPGPGAARPRSGARRASSTRPPASR

SEQ ID NO: 326332 - protein, 324 aa, unidentified
MMTPALGIDVSKDRLDAEIAACGKPRSKYFANSPDGWRQLLAWLKELKIKRVHACLEATGRYSLGIALVLWEAGHIVSIVNPAQIHDFARTKLGRNKTDAVDAGHIREYAEIFKPQPWTPPSPAMQRLGELQTIRAGIVSSLTEWKNRCGSGLADDTALALVKATITHFAAQLAEVDKAIAGTIDNDPDLNAKRDLLLSISGVGEVLAGLVLSELPGTDVLRSSAQAVAYVGLNPRSHRSGSSIDRPTRISKIGNATLRSALYMPALSAMQHNPVVAALAKRLKAQGRLKGKQIAVAAMRKLLVLCFGVLKSGKPFDPALAMPN

SEQ ID NO: 326333 - protein, 340 aa, unidentified
MDATTYGLDVAKRVFQMYWVEAGTGEIVNRRFGRDELIRFLAQRPPGRIALEACGSAHWWARKIKALGHEVVLLHAKFIRPFVQTNKTDAADARAIWTAVQQPGMRTVATKTEDQQAMLSLHRMRALLVKFRTMQVNQLRGLLYEFGATFRAGRAAGLAEIRSRTAELEDALPGAMMCCLQDQLRRIEELQRDIDLLEKRIGVWQKQDAACHAITAVPGIGRLTATALVATMGDAKAFKSGREFAAFLGLVPRQSGTGGKVRLGPMSKRGDPYLRTLLIHGARSVLYNAKVPTPWQTAIQARRPANVAAVALASKIARTAWAILARGQVYQPNYVSMRPA

SEQ ID NO: 326334 - protein, 416 aa, unidentified
MKIVRPTCCGMDVHKNIIVATIGITNKKTRITEYIQETFSTLNPDLLNLKQWLINHKCFDACMESTGKYWIPIFNILEDEINIYLTHPKYVKAIKGKKTDKKDSKWICDLFKHDLIKFSFIPPKEIRALREVSRYRYKLVGMRSSERNRYQNCMTVSNIGIGSVFSDPFGKSAQAIMKEVLESDIIEDEKILKCIHGSCKNKDKILDSIKHCNIETDQRFKMNESMTHMEELQVHINNCEIEMMKRAAPMFDRFMHITQLPGISTLSAILIISEIGVDMKQFESDKQLTCWAGLAPANNESANKKKSVRISKAGQYLKPLLVQCALGAIKDKEGYFGIKYSRIKKRRGHKKAIIAIARMMLVSIYHMILTGETFNPSDYESFRNPNPPIKQQVLTEESAIEFLKKSGFDVSKLTKP

SEQ ID NO: 326335 - protein, 387 aa, unidentified
MYFVGIDISKFKHDCAIVDELGDVITPSWSFQNDREGFSLLKELLDALDGEKKIGLEATGHYGQNLKLFLENNDFSFIEFNPLLINQFVHSKSLRKTKTDSIDALMIAQYLMTVEYKPYPPSFYTLEKLKSLTRFRDSLIRQRSKQLVELTNILDKVFPEFKPFFKGRFSATALYILSHYASPEKISNMNSKSYEPLRRLSRGRFSMVDFVELKTLARNTVGSTCDYLLQEMEITIDIYNQLQSKAEEIELQIHDCVLDLAPPMLTIPGIGAASAAVILSEFGDLSKFNSPSKLLSFAGMEPGYFQSGTSESTGKMVKHGSSHLRYAMMNCAQTVINNEPTFAAYYAKKRAEGKEHRVALTHVAKKLLRVIYTLQTKELSYNPDLVR

SEQ ID NO: 326336 - protein, 341 aa, unidentified
MPLFSYYVGLDVHRKSISFCVRRPDGTLSREGKIPAARDAIRQWAATFDAPWCCGLEATICSHWIHQELKLYATRVEMANPSRLKAISAAKRKNDQLDARTLADLLRCDLFPACYVPPPGYESLRCYLRQRALLVRARVMFKNKTAGLLIQRGVPYETHRLHGKRYYTALLAENSALVEDLKPLLAFNRTQIERLDEMDDAIVEQLIRDPLLKQRVERLKSIAGVGNITALTWAVEVGEPSRFPNERHAVSYCGLCAAERESAGVRKRGPLSKQRNAFLQTTLIEAAHIAVAHNEKLKAIYEAECQHGLKHRATLEVARRLVRWLLAVDRQYFAFLSAAAA

SEQ ID NO: 326337 - protein, 343 aa, unidentified
MELYVGMDVSLKETSICVVDGDGKLVCEGTVISEPEAIAGFIKANAVSAKRIGLETGPTTTWLWHELRALGLPVICIDARHAKAALSMQINKSDRNDAVGLARIMQCGWYKEVQVKSVSCHETRAVLNSRALLVKIKRDLGNQMRGLLKNLGLIIGNAKGKVFSRRVEELVAGHPLLQQAVRPLLTVREKVSREIADFDRQLLALARDDVQSRRLMTVPGVGPITALAFQAAIGEPARFKRSRSVGAYFGLTPRRYASGEMDWSGRISKCGDALVRTYLFEAAGVLLTRVPHWCALKAWGVRLIKRIGFKKAKVAVARKLAVILHRMWRDETDFQWSSREAKA

SEQ ID NO: 326338 - protein, 338 aa, unidentified
MKLYVGIDLHSNNSVLVIIDENDRVIYSKRLPNDAQVILGVLAMYKEQIEAVAVESTYNWYWLVDALQEVGYEVRLVNTASVVIYDGLKYSGDVADARHLAHLLRMNLLPCGYIYPKEPRALRDLARKRAQLVRQKTTQLLSIKNLLVRNTGRDTPSYTIKTWTPEHVAALPLLPEQLLALQANWAVLQALELQIQTVEAELLRQLKPCKTFQLLKTVSGIGDILSMTIYLETGDISRFNSSGNFASYARMVNSKRESNGKKKGEGNRKCGNRYLCWAFMEAAHFAIGSDELIKRFYQRKCAKSLKVVAMKAVAHKLARACYNMLKDGVEFDVKRAFS

SEQ ID NO: 326339 - protein, 347 aa, unidentified
MLHAGLDLSRKKVDVCLLSDQGEHLDQLAVPPDVDSLRTLARRIEEVHAEPVCAVIESMTGARIVHDTLEAEGWSVEIADAQKVKGLAPLACKTDKIDSIVLAVLSHRDLVPAIWLPDPRVREERELARFRLHLVKHRSMLKHRVHSTLINFGRPCPVTDLFGVGGRKLLERLEVPEPWRGNVTASVVLIDDLERQIAEVNTRLKEGHAHHPYIPLLMSAPGIGWVLAFTIAAEIGQIERFSSPEKLAGYTGLCPRVNQSGEKDRRGPLTKHGPRYLRWAMLEATMHALKHPAYSARYQRNKKRLGKQRGAKVAQIDIARRLAHAIWHMLSRSEKFAPRGAALRLAA

SEQ ID NO: 326340 - protein, 404 aa, unidentified
MTHTGPIGVYVGLDVGKSDHHAHGLTPSGKTVLDKKLPNSEPRLRAMLDKLTAKFGTVMVVVDQIANIGALPVAVARDTGCQVAYLPGLSMRRAADLYPGEAKTDARDAYVIADTARTMPHALRDIQTTEEAAAELGMLVGFDDDLAGEATRISNRLRGLLTQIHPSLERALGPRLHHQAVLDLLQRHGSPGQLRRMGRANLVRFLTSRAPRLAKRLTDEIIAALDEQTVVVPGTDAAVLIVPSLAGQLAAILEQRVTLEARIKELLEAHSLSQILTSLPGVGVRIAATLLVCIGDASAFPDAAHLASYAGLAPVTRSSGTSIRGEHAPRRGNRQLKRAMFLSAFAALHDPASRAYYDRQRATGKNHTQALLRLARQRINVIYAMLRDGTFYESRAVTDLPNAA

SEQ ID NO: 326341 - protein, 407 aa, unidentified
MELLAAILKRVIGLDVHQAQITACAIIEEPDGTTRIEQRQFGAFKRDRRALAEWCASFAPDEVVMESTGIYWKSPYAALEAAGIRAKVVNARHVKNVPGRKTDVGDAQWLATLARAGLLRGSFVPPAKLRELRLVSRQRQKLVGLLSSEKNRLHKVLTDGGIRLGVVVSDLHGQSARAMVKAIVDGQPPHEVLKFASKRLKASREELFDALQGELTDSHRFVLDELMQHIEEIEARIARFDARLLDGLKDAQNALQLLQTLPGVDLIGAAMLLVEIGTDMTAFGSADRLASWVGICPGNNESAGKRKSGRVRKGNLYVRRLLCEFAHAASRTTSVFKSKFQALVVRRGHKRSIVAIAHKLLRTIYFMLDRGEYYRDSATDYEALSVQRNASRWIKKLISFGFIPKPA

SEQ ID NO: 326342 - protein, 314 aa, unidentified
MENKELFVGIDISSETLDVAFSPTDQPQRFPYTEEGLQTLITRLQSCQPTLVVFEATGGLEAALMQALQEARLSFSRVNPRQVRDFARATNCLAKTDALDARLLAQFGQVLRPQPTPLPDEQTRYLRALVTRRRQLVTLQVMEENHWRTAPSALRPAIRRHLDWLAEELANLDQEIAEFIQKTPLAETVTLLQSVPGVGQVTAVVLVAEVPELGRLNRKEIAALVGVAPFNRDSGKQQRQRHIRGGRAAVRTVLYMATVAGIRCNPVLRALYQRLINAGKAKKVALVACMRKLLTILNAMVRHRQTWCPHGAGA

SEQ ID NO: 326343 - protein, 457 aa, unidentified
MKRKSKRTKRLEEAHPFSSLSRVNLHAAGVDIGAVEIVVCVAGDENTQIVKAFGNYTVDLQAIGGWLKEHRVKTVAMESTGVYWIPLFEELERQGFECLLISSRSMRRVAGRKSDISDAQWIQTLHSYGLLEGSFRPQGELVALRTLLRHRSQLVEHRSPHVQHMQKALLQMNVQLSQAVTDIMGVTGQTILRSIVAGVRDPQTLASMREAGCKKSEEEIGKALTGTWREEHVFILQQSLAMYDFYTQQIQACDEEIERLYGLTRPDWEAGEVQALSGRKRNSHSKNLPHNPEAIRKHLKRISGVDLSVVDGFGVSLAQTVIMEVGTDMHKFPDEKHFCSWLGLAPKHEISGGKVLKNSTLKTKNRAGQAFRMAAQSVRQADCVFGVLYRRLRARLGPAQATVATAHALARVVYRMLKFQVEYEPLSVNEYQRRYEEQQIKYMRKKAAKFGFQLVPA

SEQ ID NO: 326344 - protein, 347 aa, unidentified
MQVITIGIDLAKHVFQVHGVDANDKVVFNKPLRRSQVLPFFAKLAPCLIGREACASTHYWARELKKLGHDVRLMPAKDVKAYVKRNKNDSVDAAACSEAVRRPTVRTVPVKTPEQQAQLMQHRVRDLLVRQRTQAINALRSHLAELGIVAAQGYDGLKVLLAVIADCSDVRLPENARASLTALIAQIASCQAEIGAIEKRLLAQHRKNADSKRLETIPGIGVLGASAIVATVPDASIFKTGRDFAAWIGIVSREDSTGGKQRLGPISKQGDRYLRRILVVGAFAVIRQARAHPEKYPWLTQLLARKPAKVAAVALANKTARIAWAVLTRKEIYRVHPITATPASLGG

SEQ ID NO: 326345 - protein, 346 aa, unidentified
MNKRDEAGVEVSADRLLVGLEREGATRVRREFPNTPKGHDALVRWLVVPGHALRVVMEATGLYGLDLALRLDATPSLELMVANPRAVRHFAQALMKRSKNDPIDTDVLVEFAQRMPFHRWVRPSPPALALHALARRLESLTEMHAAEKNRLHAAQLSPALPAAVVRDLQRSLRGLERALARLTCQAVQVIGQDPDLSLRYQLLLSACGIGPTSAVQILAQLAVLSADLDIRQWVAQAGLDPRQYTSGSSVHKKTRISKTGNRHLRRALYMPALVAIRHEPHLRAFYQHLVERGKAKMQALVAVMRKLLHAIFGMFKHHQPFDGSRLFALPGEPLLPHPDLSTAEAP

SEQ ID NO: 326346 - protein, 462 aa, unidentified
MLSKKLNKKKGPKKVERLDYINTNAAGIDIGSKSHFVAIPEGRDVDTVRAFQTFTNDLIELVNWLKKNGITTVAMEATGVYWVPVYDMLEQQGFEVLLVNAGHIKNVPGRKTDVIDCQWIQQLHSYGLLRGSFRPKEKILQMRTLVRHRATLIKYAASHIQHIQKALSLMNVQLKNAVKDLTGVTGMKIIRAIVAGERDPAILAQHRDPRCTNPKEVIRESLIGNYQEEHMFCLKQALDLYDHYSLKIAECDKEIEKIMTAMGTLLDEDKPNKKANTKRIPKKHEFAFDMRRELTRIAGVDLTQIPSVNVQTASKVIAETGIDMSKWGSSKQFAAWLGLCPGNKVSGGKRLSGKTAPSSNKAAAALRMAANSLRSSDTALGAFFRRLSSRLGAAKAITASAHKLAVIIYNMLKTGAEYMESGARYYEAQYKDRCIRSLTKKAKIFGFTLVANTETCAAETLA

SEQ ID NO: 326347 - protein, 347 aa, unidentified
MNQISRIGMDTSKHIFQLHGVDAAEQPVLRRRLRRKEMVAFFAKLPPTVIGMEACGASHYWARKLGQLGHTVKLIAPQHVKPYVKRNKNDGRDAEGLCEAMSRPTMQFVPVKTQEQQAALMLAGMRERLVARRTQLSNAIRGYAAEFGVTAAKGLDKIEPLLAEIAADEALPELARELFAIYGTEYVQLQAELKKVEARLMAWHRANADSRRLAQIPGIGPIIATALVMKAPDPRLFPSGRHFAAWIGLTPKDHSTAGKTRLGTITRAGDEMLRSVLVAGATAVIQQARQGRGRASPWLLALLARKSSPKLAAIALANKIARIAWKLLVTGESYHAGGKPIASAHAA

SEQ ID NO: 326348 - protein, 307 aa, unidentified
MDNISRVVIGMDPHKRSATIEAMGPDEQVLGGGRFGTDPAGFEAMLAHTAAWRDRVWAVEGCEGIGKHLVLRLLDAGEQVVDVPAKLSARMRVYATGQGRKTDDTDAHSIALVGVRMRGLREVVNDQALEVLRLLVDRRRRIGEDHTRMVCQLHQILLELLPGGAKKALSAAQARKLLTTVRPKDAAGKIRKRVALELVADLERVYARKKAANKELVELVKATGTGLLDLHGIGPSGAARLLVEVGDITRFPSKGHFASWTGTAPIDASSGDNVRHRLSRGGNRQINRALHMMAVVQLRNATAGRAY

SEQ ID NO: 326349 - protein, 387 aa, unidentified
MSPTIAARRPAAVDYERTLILSIEVSNQSWVLAAQVPGLPYTKAKRTVDPEAQALMAAIAGYRSRAAAMGRSIERVIAVYEAGWSGFWLARWLTRHKVEVYVIQPSSVPVDRRMRRAKSDGIDAELLLRTLLAWLRGEPRVCSMVPVPDEADEDARRCIRERTELISERVGLTNRIGAVLATLGVTDYNPLLRNRHHRLAELRTGLGEPLPPNAHAKIVRLLARLELVLAQIAELERERDAVVETETPDHASKMIQQLISLRGIGVQSATVLVREAFVRRFANGKALGSYAGLTSSPYSSGGIDREQGIGKGGNRRLRTVMVELAWLWTRYQPAAAQVCWFRERVGSTGRRVRKIMVVALARKLLIALWRFVIDGVVPEGAVLKPAA

SEQ ID NO: 326350 - protein, 376 aa, unidentified
MKKNTIFVGLDVHKNSIDVALANAGRDGDVRFYGSIGGDLDSLHKVVRKLQSTGAALRFVYEAGPCGYDIYRSLTKQGLDCIVVAPSKIPRKSGDRIKNDRRDALNLARLHRAGELTPVYVPAAEDEAMRDLSRGREDAVKAHRMSRQVLLAFLLRHGYRYSGLSYWSKAHWRWIADIKLPHRVQQITLQEYVHAVHEQLERVQRLTGLIQELVAQWHLAPLVKALQALRGVSLIVAATTVAELGDLSRFDSAKQLMAYLGLVPSEHSSGETVKRGGITKTGNGHVRRVLTEAAHTYCHPARESRVLLARLEGLPQEVRQIAWKAQIRLCGRFRRLMARGKNRNTVITATARELAAFMWAIARTPLPVHEAVHSDS

SEQ ID NO: 326351 - protein, 391 aa, unidentified
MICVGIDVAKDKYDCFILSSEGEVLADVFTIPNNAEGFDTLLQTIRRCARPEDKIKVGLEATGHYSYNILGFLLDKGLPTYVINPLHTNLYRKSLSLRKTKTDRVDARTIAAMLMSDVDLKSYTDTAYHNEELKSLTRYRFDKVRERAKLKQSVSRLVTILFPELEKLVSSLHSASVYALLSEFPGAKQISSTHMTHLKAVLKNASQGRYGQEMAETIRNAARSSVGSVMPAKSLELQHTIRLIRELDAEIEDIETAIQAIVDEMQSPITTIPGMGVRMGAVILAEIGDFSRFDSPDKILAYAGMSPSTYQSGQLKNCYPHMEKRGSRYLRYALYNAAKYVCHWAPAFADYLAKKRAEGKHYNIAISHAAKKLVRLIFAMEKSRQPYCSAS

SEQ ID NO: 326352 - protein, 331 aa, unidentified
MYFSQFIGVDISKNTLDAAIYPAKDKKLDFFHFDNTQKGLGEMMRWLRRRGIKPSEMVICAEHTGVYTNPLIAFADKKGLALSLNSPLDIKHSMGIARGKNDIVDASRIAEYAHRHQDKLKLYEKPSDAIMKLQYLLTERRQYMRQRTALINLNSAMGKYETPEARNRNESAIHHCEKLVKKVEEHMLTVLSTEPDVKRNFELVSSVKGIGLINALNTIVYTNNFKSFETPRRYACYIGVAPFDHTSGTSVKGKTQVSKICRTQQKAELSMAARSAIIHDPGIKRYYLRKMKEKGGGNDAHGVVLNAVKFKLILRMFAVVKSGQPYKVLNY

SEQ ID NO: 326353 - protein, 344 aa, unidentified
MKYMGIDHHKQYFVATTMDEKGRIISKEKVSTDRNSITHYFKRAGSEGEVKAVIEACYGWEYFYDEVDALVDELIMAHPLKTRLIAEARIKTDSIDSETLAHLLRADLIPQAYAPSAQTRDQKNLLRYRSSLTAMKVRIKNMVHSVLTRNHIEDKGFQELSDKFGKKGIAYMRAMTLKGNDTAILHGYLDLLEETEKRIKSAESRIRAVCRHDELCRLLGSIPGIGDILSVTIRYEIDNIERFVSSGKLCSYAGLVPSTYSSGKRTYQGKITKQGNKWLRWAMIEAAQRAPLNDRWLSVFFNRVSAKKGRKIARVAVARKLLEIIYRIWTERRAYCKKPVTAAL

SEQ ID NO: 326354 - protein, 397 aa, unidentified
MLAVGIDISKSKSVAAILNQDGSMHTSPFEFHHTQPELDAFIKYILNSNQSATILMENTGHYHYPVLKAFREAGLPVCMVNAYQIKKFGDMDLRKAKTDKKDAVRIARYALEKSYSLVPYTSMEQKYEDLRFLARQYNQRMLTLKTNKVFLLNLLDETMPGITNILPLTTRTPETSLSVLFINRFKSYDRIEKMGKSRFLDAFEKIARKSRNRQTKTYGLAIYEAALRNITTRGENEYTLAAQDQCLELVCESQKAADSIILKMQTLAETLPEYAVLRSMAGVGNRLGPLILAEIGDIRRFHSGKALNAYAGNDAPPYQSGTFESHNRHISKRGNAALRKYCFEVMQALKLTRPQNDPVYLFLLKKEQEGKPYNVAKMAGVNKFLRIYYARAMETLK

SEQ ID NO: 326355 - protein, 362 aa, unidentified
MIGQRTSVGLDVHARSVVGRGLDVQTGDVLRARLTPAHEQIIGWLRSLPGPVKATYEAGPTGFGLARALEAAGIECVVAAPSRLLRPSGDRVKTDANDALHLAQLLAVGQVTAVAVPDEETEAARDLVRAREDARGDLMSARHRVTHLLLRQGIVYASGTAWTGVHENWLRSQRFPRPALQWSYDAALAALVAAEDRRDRLDAAITELAAASRFTPVTDRLACLRGISTLTGFGLAVEIGDWSRLSPATIGAYLGLVPSEDSTGESRSQGGVTKTGNGHARRLLIEAAWHHRPPYRPSTQLRRRWQRVPGAVAAHAAKGNRRLHARWRSFDARHKRPVVANTAIAREPAGWCWALAAMHPDQ

SEQ ID NO: 326356 - protein, 344 aa, unidentified
MSEVTTIGLDIAKTVFHAHGADASGQVAFSRRITRGKLLEFFGRQPRCTVALEACGGAHHWARELQAMGHEVRLIPPAYVKPFVKRHKNDAVDAEAICEAAQRPTMRFVAVKSEEQQAAALVFRTRDLLVKQRTQLGNAIRGHLMEYGWVAPKGPSHLAMLADMLDDGEMAATLPEAARPMFAMMVDMLAELDKRVAALDKEIARRAREDEVARRLMTIPGIGPITATAIAAIAPPAETFAKGRDFAAWLGLVPKQASTGGKQKLGAISRMGERTLRRLLIIGSSAVVLQASKRGAPKGSWLEGMLARKPRMLVTVALANKTARIVWAVLIKQEDYRAPVAVAA

SEQ ID NO: 326357 - protein, 345 aa, unidentified
MFVAGIDAHATYSVIAIVSNTGQLVAGPIRIKNTQEDRLNDLLEQYQPLEVVVETSPAWPWLFDRLQARGIDFVLAHAKRLRVIAESNYKSDDIDAELLARMRLAGLIPEVHPKCVEQREQAVLLRSRARLVRERTRMVNRIHAQIHNVGLHLERGRLLTQDGREWVRTVAWPLLGEERRLFIDMQWALIDQLVPMIKTLDRRVEHVGREIPAVALLETVPGIGPYRALLIATETLPITRFRTPGHLVSYAGLAPRSSQSGLRPIRHGSIPAGANRWLRGTFVRAVVNHVTYAPDSWLSQSYELIRQRLGWQVARIATARRLARAVHAMLRTGEVWHDEPVARAN

SEQ ID NO: 326358 - protein, 337 aa, unidentified
MKYIGIDLHSNNSLVSVTDEEDRVMAEKRLPNDLDRILAFLSPWRVDVAGVVVESTYNWYWLVDGLQGAGYTVHLANTVAIKKYEGLKHSGDETDARYLAQLLRLGILPTGVILPKEQRAVRDLARKRVQLVRSRTSHILAVENITARQQGASLNSNQVKQLTAAAVNDMGMAPDVAMAMQANLAVIATLTEQIELLEKRLQERVRPRSEYGLLTSVPGIGEILATVILLEIGSIERFADVGNFASYVRCVGSVHSSNGKKKGEGNTKNGNRYLAWAFVEAAHFALRYCPEAKRFYERKKAKSNSIVAIKALAHKLARACYHILKEHKPFDMTRCFT

SEQ ID NO: 326359 - protein, 355 aa, unidentified
MKTIGVDLHKDSLTTMVLDDQGAVLERRDLSTKCRHQIQEYFASYGPHCQVAVESVGFYYWFWELVHPQVERLVLADPAGVRAHAGRKAKTDRNDALLLATLLRENRLPMAYVPTENIRALRELVRHRHSVGRSLARERRCLRWLALKNNLPGPTSFTSDRAQKWILSQESKFSPAHRLAAHQRLDQIIALERHVADADRAIAQHLVGEPALRQQVELIATVPGIGTLTAATIVAETGDITRFDNPDQLGAYAGLAPRVSQSGETVHHGRISKHGPPILRWVLQQAAWTAIRTDPQARRLHARIGKRAGTKKAATALARKLLIYAWSVARRHQPFHWPGDPLPQDPAASVGSYEI

SEQ ID NO: 326360 - protein, 352 aa, unidentified
MDTSMREIVCGVLRPGREVPAVDRVPNDEESVRRLIGKLGDRRLLSVCYEAGPSGYELHRLITSMGVACEVIAPSLVPKGASDRVKTDRRDAVRLTLALRAGMLTPVRVPSPSEEAVRDLVRARGDLLDDRKRMQQRLNALLLRHGRTWGGGAKWTYAHRTWVDRQRFGEPALQDVLDAYRGALESREAELRAAEARLSAWAAREPLAPAVAKLSAYRGIAELTALTLAAEVVDWHRFATARAFMGFTGLIPSEYSSGTRTRRGSITKAGPEGVRTALVESAWSCRYRPAIGALLRRRQADADPGTLARSWKAQQRLNATWKKMTARGKPSGVAVTAVARELSGFVWAEMTS

SEQ ID NO: 326361 - protein, 347 aa, unidentified
MRFYTQQHPHYCGIDLHARTMYLCILNQAGAIVLHRNMKSDPDSFLNAIAPFREKIVVAVECMFTWYWLANVCAREGIAFVLGHALYMKAIHGGKAKNDKIDAQKIAALLRGGLIPQAYVYPEAMRSTRDLLRRRMQLMHERSQLLAHIQNTNYQYNLPDIGKKIAYKSNRVGVAERFADASARSSIAFDLKRIDFYDGLLNEIELEILRHAKRHDANTLQLLDSVPGVGKILSLVLLYEIHDIHRFPTVQDFASYCRLVKPRKESADKCYGFSGAKIGNAHLKWAFSEAGVLFLRHNPQGQAYLARLEKKHGKGKALTILAHKLARAVFYMLRRKEAFDMKRFLNR

SEQ ID NO: 326362 - protein, 346 aa, unidentified
MLADELDYVIGVDPHRDTHALAVVDVRSGAVVFEATAVADGEGYESVLRLANQHARGRRAFAVEGTGSFGAGLARFLVGQEERVLEVGRLRRERLSGKSDALDAIRAARSVLGQTRPARPRAGGEREALRALSAAREGAVTARRAGLCQLRGLLVSAPEPLRAELRSLTRAQLLRRLAAVRPEGRQDPELRGTLLALRALARRVKALTVEERELAREIETLTRKLAPQLLEQPGVGPLAAAQLLISWSHRGRITSEAAFARLAGCAPIPASSGQTVRYRLDRGGDRRLNRALHMILVTRRRTHAPTIAYIERRVQEGKSRREAIRCLKRYLARNLYRLLENPPMPT

SEQ ID NO: 326363 - protein, 421 aa, unidentified
MRGFGLDVHRDFCEVAIADRGHVRAAGRIATRVEALEVFAQSLVAGDVVALEATSGSDKIVSILQRHGVRVVVANTRKLRSITDAKAKTDRLDARALARLLVSGLLDEVWTPDDRTRTLRRLTNRRERVVRARTRAKNETHGVLSRNLCERPPVTDAFGKAGRAWLAALELPVDERLTLEGCLRQIDFLSGEVAALDREIARLALDWPEVLRLMTVPGVNVQTAAAFMASVGEIGRFSSPRKLVSYLGLDPRVRQSGNTPARHGRISKAGASEARHMLGEAAWRAILTAGPLRAFFERVRARRGPQVAATATARKLVVLFWHLLTREEDYAFARPAMTRNKIRKLELLAGAPSQKGRKGIAGGKSKAVFDAERELSHQAEAAYRRLVSDWKASGPAKAGAGATPGRASQRSSKDKAARQTP

SEQ ID NO: 326364 - protein, 404 aa, unidentified
MYNAVGIDVSKGKSTVAVLQPGGTVIRKPFDVSHTSQNLNELADYLSSLDGTTKIVMECTGRYHEPMVKALSEAGLFVSIVNPHLIKNFGNNSLRKVKSDPADARKIARYTLDNWTELRQYSGMDNTRTQLKTLNSQFSFFMKQKVAAKANLIALLDNTYPGVNKLFDSPTREDGSEKWVDYAYSFWHADCVRKIGLKAFTERYKSFCKKHHYIFQQDKPEKLFNASKELVAVFPKEKSYKLLIQQSIQQLNLASEHVERLRREMNELASTLPEYSTVMGIYGVGKTYGPQLIAEIGDVSRFTHREALTAFAGVDPGVDESGQHKSKSNRASKVGSARLRKTLFQIMTTLLQNAPEADPVYRFLDKKRSQGKPYYVYMTAGANKFLRIYYGKVKECLRNLEQTE

SEQ ID NO: 326365 - protein, 428 aa, unidentified
MNYNQNEKIAQITSETLIIGVDIAKFKHVARAQDFRGLEFGAPCHFENTKPHFDLFLSWIKQLMEQHGMRKVIIGMEPTGHYWLNLAHFLKEEEIKFVVVNPMHVKKSKELDDNSPTKNDVKDARVIAQLVKDGRYAEPNIPQGVYAELRVARKIRDLLYVDLQAVQGQIHNWLDRYFPEFLTVFKDWEGKAALQLLKLNALPHELEILSEQEILIHLRKAVKRAVGLSKIQELKRVAKDSIGIREGSRMAKLELRTLLDKYELITKKFEELESDIDGLLEQIPGVQQMLAITGIGKDTVAGFFSEVGNLCYYSHPRQIIKLAGLSLKENTSGKHKGQTKITKRGRKTLRALLFRVAMPLVAKNTAFKALHEYFTTRKNNPLKKMQSLIAICNKLIRILFTIGTKQCEFSEDRMLKDIPHMALLQKVA

SEQ ID NO: 326366 - protein, 363 aa, unidentified
MTILSFDVSKDELVGARADKNGVEKESFAIPNTAEDIDRLFCSFQERYPCLMAGSEATAEYHRVLVSCALKRNIPFKLINPILTKQFTRATVRKRKTDHTDAGIIAKLLAQGEGTIMTEQLFSPVKSLHRSANSVNQLKKTLLAINAHIKDIGGEAYMDMDILSQSVALLEQSVAVLRTQAQKHVNQGLKKLLMSIPGIGETIAATMILEIGDIMRFKEAKSLVAYAGLDPKVKQSGKSLHHNTQITKRGSPYLRQCAYIAAYIAARHDPEMKAYFEKKRNEGKRYKEAVVACARKTLNRVYAVWKRGTPYEKRERAQNETIHESSGYPIVDPGAFCEVVFSADRKRTRVRTHQSDETVAMAH

SEQ ID NO: 326367 - protein, 404 aa, unidentified
MNNVAGIDVSKGKSVVSVLRPFGEVVAKPFAVGHTGSELKELANYLKSLDGETRVVMEHTGRYYEPGARFLHEEGIFVSAVNPKLIKDYGNNSLRKVKTDKADARKIARYGLDNWVELRQHTPMDTIRMQLKTLNRQQGLYSKTKTMMKNNLIALLDQTYPGVNALFDSPVREDGSQKWVDFATAFWHVDCVRSMSLASFTERYRKWCKRNGYNFSQSRAIEIHTEAQDLIAMLPKDTLTKTMIRQAVNALNAVSKSLERLKAEMRTLSTQLPEYPVVMTMRGVGDSLGPQLMAEIGDVTRFAHRGSITAFAGVDPGADQSGTHEAKSNHTSKSGPPELRRALFLVMDCLLKTQPEDDPVYRFIDKKRSEGKPYLVYMTAGANKFLRIYYGRVKEYLTSLENAD

SEQ ID NO: 326368 - protein, 393 aa, unidentified
MGETMYFCGVDVAKDSFVASVKNGRVLVENKTFSMDASGFRSFERIIRDFKQGVVVGMEPTGIYHYNLLNFLCKSGYNSVVVNPYMLHQFFKFTNNKPTKTDKKDSKTITEFLEFKQDELKESLKAVDERFSVRYFVREKERITQDIARTKTEIKRMLSLVFPEAEKLPGVFSQEFLSVLLEFGGAVKIRRIPKARFVSIAKQLSDKGQGRKAKFSFEKIYELALSSIAGEWPDYEELLKIKIRRLNSLREEKEHITKLIEEKAEKFFKREIEILSSIPGIGKESAIYLMAELVDIKRFSNYRKLVGFCGLDPIIKQSGKFKAGFRISKRGNAHARRIVWIMAGCVKRSCPYFREYYLKKRAEGKSYKEAVIATSTKLLRTIYALLNENRIFK

SEQ ID NO: 326369 - protein, 326 aa, unidentified
MTLSHLTDNIFVGIDVGGTGLDVAWHRGDSAHYANRPDAIATLVERLRTGPEVTRIVLEPTGGYEKPLVKALRQAQLPVEIIHTTRFQAYRQLVGVKAKSDTSDARLLASYAAAPDEVRGRKAGHVELPEDAIRDALSELASRRDQLKHMIHAETCRLGTIRMAELRQMIMVHLEAIRAEDKQVHRMMLELVRQRDDLRRDQRLLKTIKGIGEKSALGMLALVPELGLVNNKAAAALIGVAPFVRQSGTMTAPARIHGGRAAVRSILYMAAITASRHNPVLRPFYEKLIAKGKPPKVALIAVLRRLVVFANAVIRSGQPWKGATAS

SEQ ID NO: 326370 - protein, 435 aa, unidentified
MEEVDEQELHVERLAALDLGKAVLEACVRVPHASKPGRRMQEVRTYPTTTAALLQMADWFRCWSVTRVVMESTGDYWKGVYYLLESEGFECWLVNARDVKNVPGRAKTDKLDVVWQAKVAERGMCRPSLVQPRPIRELRNLTRYRRSLTRDRTREMQRVEKLLEDAQIKLSSVVSRLFGVTGRLILDALVAGQRDPKVLAQLAKGRLRPRIGQLQEALRGFFTNHHGAILAMMLTNIDRLTAQITTLDTMIEQAIAPFTHQVQQLAQITGAGPTAAQEIIAEVGVDMGRFPSAAHLVSWAKFCPQTHESAGKRKNKGRAKGNPWLAATLGNIAAANARTGAGFLGARHRRIARRRGPQKAIVATGNAILVIVYHLLSDPAAQFRDLGADHCTTRIDTNRRARNLAAALQAVTGQKITIRDGQAVDGQAVIEAQAA

SEQ ID NO: 326371 - protein, 425 aa, unidentified
MLVDGPVEIAPLAADADVDPMEIGYRLGSLCVTISGSATMTQHPHVTANNRLDYDRTLILAVEVSGRSWVVAAQVPGFRQKSAKQQLAPRADALMAAVEGYKRRAAAAGRAVDRVIVAYEAGGSGFWLARWLEQRGVEVHVMQPSSVPVDRRMRRAKSDRIDADMLLRTLLAWLRGEPRVCSMVPVPDEATEDARRPIREREELIRARVAIVNRIEAVLTVLGAGEYNPLRRDCRERLGQLRTALDQPLPPHARAQIERLLDRLDLICQQVADLEAQRDQAVEDEAAGQTEQMIQRLVRVRGIGVQTATVLVHEAFVRRFRNARALGSYAGLTGTPYSSGGAHREQGISKDGNRRLRATLVELAWMWLRYQPGCALSRWFHDRLGSSRGRLRKVMIVALARKLLIALWRYLQDGTVPQGMELKPA

SEQ ID NO: 326372 - protein, 346 aa, unidentified
MILIGCDFHPSWQQVCWLNMADGETNNQKLVHASGDAEKFYRRLAVPVRVGIEATGNCQWFLELLGKLGHEVWVGDAAKIRACDPRQQKHDPRDARLLLQLLVENRFPRIWTPSSEEKDLRQLLLHRYKLVRMRVQVKNELQHLAMNKGITKGRRLWSAAGEKVLCELPLAPWASRRREDLFKLRSMLNEQVAALDEAVKHVAEENDRARLLMTQPGVGPITSMAFVLTMGDVSRFPRGKQVASYLGLIPREYSSGGHQRFGSISKQGNRFMRMLLVEAAQCVVRYDEGFRNEYLHRCHRKPRGVAKVAAARKLAVRLYWMLRTNTAYPEIARVGSSSRVALDGAS

SEQ ID NO: 326373 - protein, 368 aa, unidentified
MNTVKFIGMDVHKKTITIAITDEGRQNQPRVYGTITNDLDALDKFCRKMVSTSTQLHFVYEAGPCGYSIYRHLTQKGFACMVAAPSMIPKKSGDRIKNDSRDAVMLARLHRAGDLTAVFVPDAQDEAMRDLSRARGDAVIVAKKAKQRLKAFLLRNRVIFAGKSQWSKAYFNWLANIAMPHPAQQVALQEYIDAVHESLHRVDRLTDQIRQMVAGWRLAPMVKALQAARGVSLVVAVTVLAELGDLGRFKKPSQLMAYLGLVPSEHSSGPNIRRGGITKTGNGHVRKVLVEAAWAYRMQARVSRVLLKRQQGVPQKVCRIAWKAQIRLCARFRRLAAKGKPKQKVVTAIARELSAFLWAIAKQVPLVS

SEQ ID NO: 326374 - protein, 355 aa, unidentified
MTSTKYIGMDVHKESISIAVLNFVGKVVMECVIETKASTLLQFIQGLRGDLQVTFEEGTWAGWLYDLLKPHVTELVVCNPRKIALLKDGSKNDRIDARKLADLLYMNKIKPVYHGEHGLRMLKELSRSYLTISKDLGRVMNRLKALYRSRAIPCAGTQVYAPHYRSEWLSKITEAGVRRRAELYYQQLDALRLVRQQARKELLAEARKQRATKLLRQIPGIGPLRAAHLVAVMQTPHRFRSKRQLWTYSGLGLETHDSAQYRVVEQQLQRSKKSVTLRGLNTNHNHDLKDIFKGAAMRASTAAGPLHDFYEALLAKGRKPTMARLTLARKIAAITLIVWKKEVRFDANYLKQQAA

SEQ ID NO: 326375 - protein, 334 aa, unidentified
MGTVAVFVGLDYHDEAVQVCILDDQGQQLANRSCANDAAAIVAFVQRHGQRVQAAVESCSGAANLADELVNRFGWSVDLAHPGFVARMKQNPDKTDFQDAHLLADLERVGYLPRVWLAPEPVRELRQLVRYRQQLTERRRATKLRIRAVLREQRCRAPAGINAWTQAWHRWLTRTAPLSEQGRWVVERHLRELTRLAEDISEVEQRLQQVTADDPEVARLLAQRGIGPVTAWTLRAEIGRFDRFRSGKQLARLCGLSPKNASSGQRQADAGLIRAANPQLRSVLIEAAHRLIRLEPRWRALAQDLRSAGKPGSLVVAAVANRWVRWLFHQMRAA

SEQ ID NO: 326376 - protein, 329 aa, unidentified
MTNFSNFVGIDVAKKDFYACFDEQSESRKFNNTTLGINSFIRHLSRSNFQNQDTAIGLESTGSYHLRLCLQCSNLGFTIKVLNPLIVKKYNQTKLRRVKNDKKDASLIRYCVSQGAGYEFKETAKTLLLKSLVRQRNSIANSLLKLKRQVEDVKYKEDCLKIKIPSVYQEIQEILRGKAKNLEKQLKTFRKQEQKLLQTIPGIGPITAVSFIAEIVDISRFEEVKKLVAFIGLDSRVHQSGTSVHGKGYISKRGNKILRTRLYNASSVAVLYDNLFRDYFQKKRSEGKPYRVALIATMNKMAHVIHSVWTSGKSFEDQRIKPKEDKCPL

SEQ ID NO: 326377 - protein, 350 aa, unidentified
MKQYIGCDAHRKYSVFRIQGESGPMGPAIRVNHERGELERFLGSLEPGSPVALEAGLNWMWMVEQIEKANLEPHLTNPLEAKKRMGGVNKLDSSDAAGLLTLLRSGTLPEVWIPRGGQRDLRGLVRSRLVLRRHVSGLKCRIHGVLTQYGLKALADEEDETEYRDWFTLKARVALLNAMEELPPATREAMRQEYLAMWELERHVKSLETAIQARAGSLGWMRLLRTMPGVGLILGATIWTEIGEVRRFANAERLAAYAGLTPRTHSSGGKTWRGPTPRAASDLFVRPVETDSENAAQFVHNSRRYQKYIAMIQGRAPNVERTARTLGKGRNIDVAVENDPKLSGFGDTHE

SEQ ID NO: 326378 - protein, 343 aa, unidentified
MQIRSVGIDLGKTTFHLVALNAAGKVLLRKKFTQKQLITFTANMQTSLIGMEACSGAHFLGRVLREQGHDVKLIPAQFVKPFVKSNKNDFLDAEAIAEAVDRQNMRFVPIKTDDQLDLQAMHRVRDRLVARRTSVINQLRAFLLERGMVFAKTPFKLKQAMPEVLENADANLTPRMRNLVSLLWSEWKDLEQQIVAMNEEVEQIASSDPACQRLRQIPGIGPLVATAIVAAIGNGAAFHKGREFSSWLGLVPKQHSTGGKARLFGISKRGNSYLRKLLVHGARSAVLRVKRERSPFGPWLNALERRAPVKVVITAAANKLARIAWAVLASGQDYRAVPDAITV

SEQ ID NO: 326379 - protein, 344 aa, unidentified
MEEITTIGLDIAKSVFQVHAISATGTVVIRRQLKRRFVLQFFASLKPCLVGIEACATAHHWGRELANLGHEVRLMPPRYVKPYVKRNKNDAADAEAICEAVTRPNMRFVPIKTADQQSILMLHRTRMLFIRQRTMTINAVRAHLAEFGIVAGIGRNGLLELLHLIRKGEKPEIPAEACLCLAALADQVDLLKQRILEMDRQIMRWHRAHELSRKLEGIPGVGPLVATALAASIPDPSVFRSGRDLSAWIGLVPKQNSSGGKEKLGGISKAGNRYLRQLLVVGALAVIKRAKLLGYARHPWLVSLMERRSAKVAAVALANKIARIAWAMMSRNEPYRAIPVTAER

SEQ ID NO: 326380 - protein, 343 aa, unidentified
MKATTVGIDLAKNLIQVHGVDEHGRPVLRKQLKRSQVLPFFANLAPCLIGMEACSGAHHWGRQLQKVGHRVKLMAPQFVKPYVKTNKNDLADAEAICEAVNRPTMRFVPMKNGEQQAVLALHRARQGFVRARTAQANQIRGLLAEYGIIIPQGIGQISKHLPRILEDGENDLPGLFRRLLRRLGEHLKQLDLQVSELDSQILLWHRQHEGSCRLAQIPGIGPLTASALVASIGDAKSFENSRQLAAWMGLVPRQHSSGGKTLLLGISKRGDGYLRTLLVHGARSVLRVADRKAGYATSWIAGLVKRRHPNVAAVALANKNARIVWALLRHERNYDARYQAIAA

SEQ ID NO: 326381 - protein, 355 aa, unidentified
MSQEKYIGMDVHQATISVAVMDAGGKLIMECLLETKAATIVEFIRGLHGTLSLTFEEGTSAAWLHDLLKPHVSRLVVCDPRKNALLKDGNKSDRIDARKLAELLRGNQLHPVYHGEHGVRTLKELGRSYLTITQDVTRVMNRIKALYRSWAIPCAGTTVYAPRHRAEWLAKIREPGVRVRAERLYQQLDLLQPVRLQARRELLAESHRHSAVKLLRQIPAIGPIRSALLVALLQTPHRFRTKRQLWAYSGFAVETHDSGEYRSVRGKLQRNRERMTVRGLNDNHNRDLKNLFKSAAISASTRPGPLRDFYVARVEKGMRPTMARLTLARKMAAISLTIWKKGVDFDAKQINQQAA

SEQ ID NO: 326382 - protein, 339 aa, unidentified
MTQVITVGIDLAKNVVCIHGVDTHGHVVVKKRLARQKVLPFVAQLTPCLIGMEASGGAHYWAREFTKLGHRVKLMPPQFVKPYVQSQKNDPNDAAGICEAVERPRMRGVPVKSVVQQDVQALHRIRERQIKARTALINQIRGLLAEYGIVIPQRASQVRHKVPFVLEDAENGLTATAREWLHALAEELQALDLRIAATDQQIERVFAADEACQRLGQLPGIGPLTATALVAAVGDATDFKNGRQFAAWLGLVPRQHSTGGKTTLLGMTKRGNRYLRTLLIHGARAVLRAVDRKTDPRSRWLQGVKARRGKHCASVAQANKTARVAWALLAKDGHYRQAA

SEQ ID NO: 326383 - protein, 368 aa, unidentified
MDKITTSFVGLDVHKDCIAMGVAPTGRDAPRFVGTVVPQWAPLCKALRRLGRVRELQIVYEAGPCGYTLARQLRSHGYACEVIAPAKVARRPGDRIKTDRRDALLLARAARAGELVSVTIPDERDEALRDLSRAREDAVRARLKARQQLKALLLRHGHRYAGKSSWTAAHERYLAEVSFAQPAQDIGFAEYRSAVREAQERVERLTEALRAQLEHWRMRPVVEALMTLRGIDLIAAVTLVAEIGDFNRFARPCELMGFLGLVPSEYSSGSKRRQGAITKTGNSHARRVLVEAAWNYRFPARVSRVLQVRQEGQPKAVRDIAWRAQLRLARRYRHLSARKLALNKICVAIARELSAFVWDIARQVKPIA

SEQ ID NO: 326384 - protein, 428 aa, unidentified
MNVKNTTRREQFCQIVKEIRGSHEHLIVGIDVGKDKHHAFIGTATGKSLHRRLIFENNIEGFSRLLTHAEAVKVRNGLSRITFGLEPTGNYHKPLGSHLIRCGCNLVLVTGSAVKHNRQLLDGRWDKHDTKDAANVADLVSRGRCLYYDLPSSKIDELRDLLSLRRRLKKEEHSLRMRIRNNLLAKFFPELDRFYSACETETLAIVKWCLDPNKIAGMEFDQFFRIVTRTRRGIAQQLRLRKIHRLAAESVGCPMSPAAEFEAGLLVEKLKQVRQEIEETKEFIQDVSIDFAEYSWLLTIPGFGPYVSARVLASIADPRRFDNRKQLLKLVGYDLCANRSGKQSDKAVPVISKKGNAEIRYALYQAALVASTRNKYFVNYFNKLLRGRERERGIKIKMRVKLAAKMLVVAWTLMKRREPFDPHYLNIE

SEQ ID NO: 326385 - protein, 362 aa, unidentified
MNRNTASNTATKAGQIIGTMNGLQVVGLDIAKNVFQEHTVDMQTGDIVNEQIKRAKVLERFVNRPPCVVAMEACGGAHHWARELEKLGHNVKLLHAKVVRPFVSGNKTDASDARGIWLAVQQPGVKFVGIKSLKQQATLTLHRQRELMTKMRTMQTNALRGLLYEFGATFAKGRTALLSEVEQALDQLKDQLPQMVADSLREQVERIKALSTDIKAIEKRLGLQLKADPDMQRIAQIPGVGVLTATAAIATMGQASAFKSGRELCAWLGLVPRQSGTGGKVRLGGISKRGDSYLRTLLIHGARSVTTHAKEPGPWLEGVKSRRHVNVAIVAQAAKMARTIWAVTAKQQSYQKGFQSVRPQAA

SEQ ID NO: 326386 - protein, 341 aa, unidentified
MEQYAGIDVSLEQSSICVVDATGRIKREGKVSSDPQGLIAWFASLGMNLTRIGLEAGPLSQWLYVGLKQAGLAVELLETRHVRAAFKTMPVKTDRTDARGIAELMRVGWFRPVHCKSLAAQEIRAQLTARKLVQSKLFDIEMSLRGILRGFGLKVGPTTPKGFAERIQELVSGHATLEAVAAALLAVHAVLLREFAGFEKRVRQAARSDDRVRLLMTVPGVGAIVGLTYASAIDDPGRFKSSKMVGPHFGLTPKKYQSGETDYTGRISKIGDGSVRLALYEAAHVILTRAVKGSALTSWAARLAKRAGLKKATVALARKRAVVMHRMLADGTPFNAAAAAA

SEQ ID NO: 326387 - protein, 390 aa, unidentified
MRFAGIDIASETHVVAVVDEEGKVVLKATPIAEDATGYGKLLELLGSAADCKVAMEATGHYWQNLFATLAGAGFEIALLNPIRTHNFAKEDLARTKTDAIDAVGIARFAQQKRPVPTRLPDSVTQELRELVRLRDRVVQDLGDATRRLHRMVDLGFPEFTRYVKTLDSELATTLLHEYPTAAAFPAMPRPLAKLVYDGRHKVGPELARQLVDAAKVSVGRHHGDAYRVQVRYSCEDVSIARRRLRELERRIESTLREHEVGTLLTTINGIGPQTAARIVAEVGDFERFTGPEKLAAYVGCIPGIKHSGKTTPKGAMTTIGNARLRCALWMPLLTAVARNPWLRAYYRRLVAAGKLKKVALVAAMRKLMHAVYSVATNRRPFVPRLQEASS

SEQ ID NO: 326388 - protein, 321 aa, unidentified
MNTSLVSSIGIDVSKASLSFATLRVDHSAVVKSCANDEDGVESLLACLKKEKTAITVPCVIESTGDYHLRCALMVSQAGFTVNVINPLITKQYQRASVRNSKDDSVDAVRLARIGLMEPNLKQFKATKQSLALKKIVASAGKLDHYKQQLKAHLKQLEEAEVLLGVKVNLSQLEKTIKSIEKQIDEFETYIHDHAPKEAIEISNGVRGVSQTSVAKVLSLLEGHEFTHKDKLVAFTGLDVAARRSGAWKGRERISKRGNPHFRKLLFQMAWGLKQHNVMYREYYQKMRERGKHYFTCLIAVARKFLRFLFAYVWKKSISFS

SEQ ID NO: 326389 - protein, 343 aa, unidentified
MNATTKTVVGVDTAKQVFQLHWVDAETGEMFSKQLKRAKFLEHFANKAPCLIGMEACGGSQHWARRLQAMGHAVKLMPGKAVKAFVTGNKNDVADARAIWLAAQQPGMRAVAIKSEAQQAVLALHRMRQQLVKFRTMQSNGLRGLLGEYGEVMPVGRAGLNRGMKEGLERLSERLPVMLIDTLREQWDMLARLDEQILRIEQRLLAWMRQDRASKAIAAIPGVGLLTATAAVATMGDAKAFRSGREFAAWLGLVPAQTGTGGRVRLLGISKRGDSYLRTLLIHGARSVLMHAKEPGKWLQDIGKRRPPNVVTVALANKMARTIWALLAHSREYDKEHVSVRPL

SEQ ID NO: 326390 - protein, 426 aa, unidentified
MLVPVCNAIVGIDLADNKQMVVVTDHDSKVLARRTFRCRAWDLGLALDWAGHQASKAGFAGVTVACEPTGHRWRVLGQLAADRGMAFVCVQTLLTSWARRSEDLTFDKTDEKDAVLIARLTAQLRCYVPEPLDERWGRLRHLGARRERLLAETVGQVQQIRDLLECVWPASLDTAKQPFRSRTWLAGMSVILARTDGDPARLRRLGPARFEAAVRREVVARQGKRPCLRIVRLLFVAAADPRGVTIHRPGALERAQLLLDDFRDTQRRLGEAEARMVAVLDELQLSELVCSIVGLSALGGATILAETGDLTRFASARAVVKHSGLAPREKSSGTFTGRTKLTGQGRPGLRAAAWRAVWGAQKANPVYAAKFTHLTSRTENKLNRGQAHAAIAAALLRQLYAVVSTGQRWDAAIAAGGRCEVIRPAA

SEQ ID NO: 326391 - protein, 403 aa, unidentified
MNNVAGIDVSKGKSMVSVLRPFGEVVAKPFSIGHTGSELKELADYLKSLDGETRVVMEHTGRYYEPVARFLHEEGVFVSAVNPKLIKDYGNNTLRKVKTDKADARKIARYGLDNWAELRQHTPMDTIRMQLKTLNRQQSLYTKTKTMMKNNLIALLDQTYPGVNALFDSPVREDGSQKWVDFATTFWHVDCVRNMSLTAFAERYRKWCKRHGYNFSQSKAVEVHTGAQDLIAMLPKDALTKTMVRQAIDALNAVSASLERLKAEMQALAAQLPEYPVVMAMRGVGDSLGPQLMAELGDVARFTHRNAITAFAGVDPGADQSGTHEAKSTRVSKSGPPELRKALFLVMDCLLKTQPQDDPVYRFMDKKRAEGKPYLVYMTAGANKFLRIYYGRVKEYLASLEGN

SEQ ID NO: 326392 - protein, 425 aa, unidentified
MLEEVEDTEQVIERIAALDIGKAELTCCVRVPSTKTPGRRMQEVRAYSTMTGSLLALSDRLHELAVSRVVMEATSDYWKPPYYILESAGFEVWLVNAKDVKHLPGRPKSDTIDSVWLCKVGERQMIRPSFVPPVEVRALRDLTRYRVDLVAACTADKQRTEKFLEDACIKVSSVVSDLFGVSGRDMMRALIAGERDPRVLARLARGRMRGKIATLEEAFTGYFTDHHAFLLAKMLARVEAIEADIADIDAKIDTEMAAIAPFADAAERLAQIPGLGRVSTHALLAEIGLDMGRFPTPGHLCSWLKFTPITSESAGKKKGTNATGHGNRYAGRILGEAAVAAGKTNTFLGERYRRIARRRGKKKAIVAVGRSILVIVWHLLSDPDTRFHDLGSDFYDRRINPDRRKHNHIRQLQALGYKVILEPAA

SEQ ID NO: 326393 - protein, 375 aa, unidentified
MREKVRFLGLDVHAETIAVAIAEPEGEVRSLGTIPNREDSLRKMIKKLGPTDKLRVCYEAGPTGYVIYWQLAELGVKCEVIAPTLVPVKSGDRVKTDRRDAEKLARCYRAGDLTAVWVPDEGSEALRDLVRAREAAKQDQLRARHRLSKFLLRSGQRPPSGVRSWTRAYLIWVAQLRFTQMAQEATRLDYLHEVEHMRERVERLEQAITEAVKLASPALQQVINDLQALRGIAGISAVTIAAELGQVSRFDSARQLMGYCGAVPSESSSGKRTRRGSITKTGNAHLRRIVVEAAWSYHRPPGIWYGLRKRQESISEEAKEIAWKAQHRLHKRYLRLAAAGKDKRKITTAVARELLGFIWAIGTRAETVVRQRIAA

SEQ ID NO: 326394 - protein, 370 aa, unidentified
MLDTTTFVGLDVHARSIKAVSLDVMTGEVRCATFGYDAGAVAEWVRSVDPRARCVYESGVTGFDLQKRLSGLGVDCVVGAVSKMIKPSADRRRKNDRNDAEFLARMLSVGNVVEVWVPDDECEAARDLTRALEDARDDLSRSKQRLSKFLLRHGLVFDERTPTGRRKGNWTRAHWSWIESIRFAEGADNDVLAYYVDAVRRAAEDKARLEGLVEAEARKPRWRRRVDSLRCLKGVDTASAADLVFEAGEFSRFRNARSFAAWVGLTPSEHSSGESDRRGAITKAGNKHLRKTLVEAAWHYLTCSGRPKDLAKGQAPDRGARRHAAKGVRRLVERREALLARGVHGNKANVATARELACWVWAVGLMAEEA

SEQ ID NO: 326395 - protein, 332 aa, unidentified
MNAVSTLGIDLAKNTFSVHGVDADGVVTVRRTVSRAKLAELIARLPACLIGMEACSGAHEWARRFAAAGHTVKLMAPKFVAPYRKSGKNDGNDAEAICEAVCRPNMRFVPIKSVQQQADLSLHRVRQGFVEERTATFNRVRGLIAEFGYVLPNGVEQLRRQVLDLIDRLPARVAHCVRDLLEHAERLRSKALEYEREIRLTVRDNELARRAHTRPGIGPITASALVATVGNGHDFKNGRQFSAWLGLVPCQYSTGGKTRLGHITKRGDPYLRTLLVMGARSVLQRAYRESDPLSRWALALQQRRGYHRACVAIAAKNARVAWALLAKESAPA

SEQ ID NO: 326396 - protein, 423 aa, unidentified
MRKPRADGGRASKTLTFPTTTAGLVALGDWLTTEQVTLVGMESTGVYWKPVFFMLEDRVPEVWLLNAEHLRNVPGRKTDVADSAWIAQLIEHGLVRPSFVPPPSIRELRDLTRHRRTLIEERTRVIQRLEKVLQDAGIKLSSVASTLLTKTGRAILDALLAGVSDPVELAELAKGRLRSKIPQLTEALRGTFRVDHHGLLVGQMLAHVDFLDEAIVTLDARITTTVAPYEPVLERVVTIPGIARKTAVSLVAEIGVDMDRFATPGHLASWAGICPGNNASGGRRKSGRTRHGSAWLKTALTEAAQAAAPHQGHLPGRAPRQHPRPTRNAQSDRRDPPRPTCGLLARRARPGRLHRPRWRLGHPPALRRAPRTPARPTTQRPRPTRHRHARDRRRHLTTGPRRWACAGGILTSVAAFFATEQNR

SEQ ID NO: 326397 - protein, 401 aa, unidentified
MGAQQDIAWIGIDVGKTHHWACVVGADGKVLLSVKVANDEAEIVAMLARAGGLARQLVWAVDIIGAPSALLLALLARAGHSVRYASGRVVAAMSAAYVGEGKTDAKDAHVIAETARLRRDLAVIDADTDLVRNLAVLTGHRTDLIADRVRMINRLRDLMTSVFPSLERAFDYSSHKGALVLLTGYASPDRIRRLGQTRLTSWLRNRHVRGSADVAARAIAAATAQTVMLPGQELTASIIAELAGAVLALDERVKTLDAQIEQNFTEHPQAAVIRSMPGFGPFLGASLLVGAGDLRAFPSAGHLAAAAGLVPVPNDSGRRTGNLHRPQRYSRQLRHVFYLSAQTSMMRAGPNRDYYLKKRDRGATHSQAVIALARRRVDVLWALLRENRTWTATPPALAQAA

SEQ ID NO: 326398 - protein, 381 aa, unidentified
MKQDNKAKQNRGNEVSVEAPQDTCDLGRRRWKVQRVGLTVGLDVGDKMSHYCVLNEEAEVVERGKLKTTPAALQPWLEALPAGTRVVLETGTHSSWISRLIEQAGQDALVAQPRKIPQIYRSKRKNDRRDAEKLARTGRLDPNSMGPIRHRSVEQQADLAVIQARDALVQVRTQLINTVRGLVKGTGERLMGCSSRSFARQVEEQIPQRLRGALLPLVSQITSLSEQIERYDAEVEKLAQKKYPETELLRQVSGVGPVTSLAFVLTVADRWRFRHSRDVGPFLGLVPEQDESGESSPQLGISKAGNTYLRRLLVGSANYILGPFGPDCELRRWGKKLSERGDKNARKRAKVAVARRLAVLLHKLWVSGEVYEPLPEKRAAA

SEQ ID NO: 326399 - protein, 315 aa, unidentified
MNDTVVGIDVAKKTLDVSYAQGQRKQARIFENSADGWKQMLSWLKAKGSQPAHVGMEATGRYSLGVALMLHDAGHTVSIIDPAQIRDFARGKLGRNKTDKADAALIREYTTLFRPEPWTPPSPALRRLCELQTVRAGLVANRTEWKNRLGSGLGDSTAIQVAKATIDALSSQLEVIDTAIAETIDQDGDLRGRRDLLLSVVGVGDTLAALLLAEMPEPGVLRRSAEMIAYAGLNPSHHRSGTSIDRPTRISKIGNATLRAALYMPVLSAMRFNPVVAALVARLKRRPPQAQTDRRGRNAQTAGPLLRRVEDQQTV

SEQ ID NO: 326400 - protein, 356 aa, unidentified
MEQLTTVGIDLAKDVIVACVLDVHGAIIERRVLRRAAFARWAEQLPPSNVAMEACGSAHHWGRWFAARGHTARLIAAEFVVPFRKGGKNDSADAEAIAIAARQPTMRFVPIKTVDQQAILAWHSVREGWKEERTALLNRLRGLLAEYGVVIGRSSDRFLVALPALIEDSRLPDAVHALLLEAREQFAALHARLARCDAQIAAHARNSLVAKRASELLGVGPVTASALAATVPDANVFRSGRQFGAWLGLTPRQHSSGGKTRLGRISLRGNVYLRTLLIQGARSTLQAAINTEPARASRLQRWIIELYGRKGYHKTLIAIANKHARILWAMLAKDERYDAAAWQRHPMHELPLASNA

SEQ ID NO: 326401 - protein, 417 aa, unidentified
MKLLFIGDDWAEGHHDVAAQDDAGKTLARRRLPEGADGIARFHEMVGSCRGQDAEPDPARVIVVIETDRGPWVKALAAAGYRVYPANPGQAARHKETVANPGKKDDFFDAGCLADMGRTRRHQMRELAAGSDVAEAVKIAARAHQKLVRERTRHLLRMRPALREYFPAALEAYADLTLAGKDALELLAKAPNPESAARLTVTQVTAALKRAGRRGDLAQRARDIQAALRAPHLAQPDVTAEAHAASVQAAAAVITALNEQVKIMEAKVSGLFRRHPDAGLYLSQPGIGDITGARIPGEFGDAPGRYATAKARKNYAGTSPLTIQAGKKKTVHARYIRNRHLIDALPAQALTALSVSPGARGSYDDLRARETGHDDAMRRVASRLAGILHGCLKTGREYDEATAWSHRAGNPEATKAA

SEQ ID NO: 326402 - protein, 429 aa, unidentified
MDTYLSVGIDVGSAFSFMSIVNPQGQVIQKPFKIIHSDLASLQRAVDGIKKAEELHSLESRTFLESTGFYHFPLFYYLKESGFEVCVINPLVSHSTRNVGIRKVKNDKSDSIQIARLGLSPDLKVSVMPDELVLELRNLTRKYFELVDQRTAYNNQLRASLCQAFPQFLSVFSEFTGLTARMVLRNYPTPKHLLRVQRQTLIDEMAKVSRRGKERASEWYEALMAAAEASQVFGVGLDSLFFNIQEDLDSWEHISARIDRVKKRIQHLVSQHESVDFVKQVRLLESIPGVGLLSAVTVMCEIGDFRAFDKPKQLVAYFGLDPAVKESGQFKASNMNISKRGSPLARRAIFTIALCSISTSKKGVPVNPVMREYYQHKIQSKKKMTALGAVMHKLCKVFFAVLRDQQPFVLKTPQEHCHHYEAGWLRRSA

SEQ ID NO: 326403 - protein, 276 aa, unidentified
MEGSKVYAGVDVAKDGLELAVRPSGERLSLANDRRGIAALSRRLAELGCERIVLEASGGYETVVAASLWRAGLPVLVVNPRWVRDYARSIGQLAKTDRIDARLLAQYAEHAELELRELPDEQTRALKELCARREDLLEMVGGERNRLEHASKALRRGIERHIDYLDKQLAQIDHDLDQAIKNSPLWSDKRALLRSVPGVGPVLCSAMLARLPELGRLNRAEVAKLVGVAPLNHDSGKLRARGKPFKVALVATMRKLLIILNQMLKTNSPWRPLCPA

SEQ ID NO: 326404 - protein, 382 aa, unidentified
MQASTVSTPTAAHCGTIFVAIELSQKTWLVTLHSPDRDRLSRHKLEGGDHAELLRLIEKIRARAAEKLGSAPRVVSCYEAGYDGFWPHRLLIAAGIENFVFDPASIAVEQRTRRAKTDRIDGELLLRTLMAYLRGEPRVVRIVRVPSVEQEDARRASRERERLVGEQTAHTNRIKALLRLLGMPVGSLRRRNWLAWLEQQRDWQGQPLPPHLMAEIKREHARLMLVRDQLAALEQAQAADAARAAASMGERRDLLQRLKALGPAFSTTLASELFYKDFRNRREVASYCGLAPSPWQSGGIDREQGISKAGNRRAREKAIELAWLWLRHQGDSDLSRWFRTRTANAGKRAKRIAIVALARKLIVALWRYLTTGLVPEGAAMKA

SEQ ID NO: 326405 - protein, 415 aa, unidentified
MKQEKRTTQTYWVGIDWGKFNHAVCVVDMHRTIVREFTIPATLEGFAFLGETLRNLGHIGGVAIESTHNPVLYRVLDEGHAVYPINPKLSKQWREGMSVAGVKSDMHDGRVLAFELARRHEQLRCLRPTNPFATELLGLCKKQRVLINQRTALVQQMRESLGVYYPAALDFFSDLTHPTAWAFVKRFPNPQSLSSARKDTLLRFLRAHQIGLKPTWLERIEQRQQACEWPTPPDALAEEALVLACIAQLQAVQAHIDRFDHIIAERTRSLPQAKLIRSLPGAGPRLTPALTAMAICAEVEGQGVAALRCLTGIAPVKEESGKRIRTRIRRRCNKHWRNIMHLFAWSSTNFCRWAKVFYNLCKQRGDSNATALRKLADKWLRIINTMLQTGQTYDDARYLESLRHNHSPLWPYLCG

SEQ ID NO: 326406 - protein, 377 aa, unidentified
MKNVRFIGLDVHAETIAVAVAEPGGEVRSLGTIPNRAESVRRLIGKLGKPESLKVCYEAGPTGYVLYWQLTELGVACEVVAPTLVPVKAGDRVKTDRRDAEKLARCYRSGDLTAVWVPDAAHEALRDLVRARLAAKRDQLRARNRLSKFLMRQGRRAPEGATAWTVKYMDWVKQQHFEHAAQEATLVDYLHEVEHVAERIVRLDRDIDAAVERTPETLRAVIAGLQSLRGIAKISAVTLVAELGQLSRFAHPRQLMGYSGAVSREHTSGPQVRRGPISKAGNAHLRRIVTESAWAYRHRPSIGRALAARNREQSEAVKAIAWRAQHRLHARYCALLARNKTKQKVIMAIGRELLGFIWAIGVEIERGHTAQEVKRAA

SEQ ID NO: 326407 - protein, 419 aa, unidentified
METVSFEQVVSRGCGLDVHKKTVVATIDGEGLERVTREFGTFTSSLTELKDWLVENRITHVAMESTGVYWKPVYNILEPTGITVWIVNARHVKNVPGHKTDKKDSRWICKLLLAGLLKPSYIPAREQRELRDLTRYRKKLIQDVASNKNRIIRVLEDCNVKLSSVLSDTSGITATKLIDKLCDGEQVTPEDIDKVYHKKIQATKEEIWEACNGNITGHHVYMMNTFRSSNRHLESLIDGLNQKIRQMLSPYENVLELLREIPGLGHKTVEDLIAEIGLDMNAFPSEKHLASWVGVSPGNNESAGKKKSGRTTHGNKQAKTTLVEAAWSASRTKDTFYHARYHRLAARRGKKRAVVAVAHSILKSVYHVLKYNVPYHELGAEYLNSRVQKKREKYLKTELEKMGYAVRLEPVKPVIPAGA

SEQ ID NO: 326408 - protein, 408 aa, unidentified
MRQLLERCCGLDVHKKSISACARVPDEQGEVAELYATFGTTTPDLLELSDWMMGLGVTHVAMEATGDFWKPVYYILEADFELLLVNPAHIKHVPGRKTDAIDAAWIAELLSYGLLRKSFVPPPPIRRLRDLTRYRKALIRDRSREVNRVHKVLEDAGVKLSAVATDVMGVSGRAMMEALIGGTSNPDALASLAKGRLRAKLPELQKALTARFKDHHGFMLQQMLAHIDDLDADIVAISGRIEAEIGPFAEKAKLLPSITGVGPRAAEAIIGEVGVDMSVFPTSGHLASWAGLCPGQRESAGKRKSSRTRKGSELLRTTLVECAHSASHTKDTYWAEFFWQVTRRQGKDKAIVAVAHEILIACWRVLSTGTAYCDPGPGSLRARSEEQIRRRAIRQLESLGLRVTLDAA

SEQ ID NO: 326409 - protein, 360 aa, unidentified
MTATMTYVGLDVHARSTQAAAIDVASGELRRARFGGDSAELVAWLDALPQPLRACYEAGPTGFALQRQAAAAGIDLCVVAPSKTPRAAGDRIKTDRKDAELLARLLLAGQLRPIAVPSPSLEAARHLCRAREQLRGDLMRCRHRVSKLLLLHGRVYPGATAWNGLHRKWLSRQRFEEPASELAYLDSLAAVDGLVARRQALDERLSRLALAGEWAPTVARLRCFRGIDTLSALLLGLEIGDFGRFDSPRKLASWLGLVPTLDQSGESRRQGAITKTGSGYARRLLVEAAWHYRREPRIGVSLRNRQQGQPAHVLQIAWRAQDRLYRLQRRLRARGKPANVATVAVARELACFLWAAAVAD

SEQ ID NO: 326410 - protein, 370 aa, unidentified
MKSIIYVGMDVHKASFTLSCFSVTTQETFATVKISPDAKAIKKYLDGVSLSRSEECEVVCGYEAGCLGYTLYHQLTAMNIRCVIMAPTTILRNSKRVKTDRIDAENLARCLAYGGYKSVYIPTAQDEAVRDYLRMRDDHKLMLKKIKQQINAFCLKHNKIYPGNKSKWTQAHVKWLNALEFDGYLQDAFNEYMITYRELADKVERLESQIEQLAELEEYRDKVKKLICIKGIKTHTALSLIVETGDFSRFQSAERYASYIGLVPGEHSSSEDQNRLGITKAGNRHMRMLLIEAAQCYSRGVPAKKSKDLKSRQKGASPEVIAYADKASIRLRRKYIRMELVNKKKANVAKTAVARELACFIWGMMTDNIA

SEQ ID NO: 326411 - protein, 352 aa, unidentified
MEVTTIGIDLAKSVFAVSGADSRGRVVIRRQLRRAQVLGFMRGLPRCVVGMEATGGAQYWARQFTALGHEVRLMSPALVVPYRKGNKTDRNDADAILEAVSRPSMRFVMVKSVAQQDLLALHKVRAQLVKSRTALCNQLRGLLRERGVAVRMGVAGLKRALPAALAYDSNELSGEMRELLSEMSQWLRTLEQRIASCEARITRKFKHDERCVRLAEVPGVGPLTATALVAAMGNAQRFKNGRELSAYLGLVPRQHSSGGKTVLLGITKRGDRYLRTLLIHGARSALRQCKPEGDARSRWVARISAARGPNVAAVAMANKNARILWALLSRGDRYRSSRTHARSFAPQLSTPG

SEQ ID NO: 326412 - protein, 316 aa, unidentified
MPSKRETPVNVGIDVGKQQLDIAIFERNLHFTVSNDATGIRKLLSRLARYSIVRIVVEATGRREYDFVVAAAARGFPVIICQPIKVRRFAGALGVLAKTDKIDARLLARYAAVMQPEVRPLAIGNIRKIKDLTARRRQLIEMSTMEKNRLDVMPRSLRADIRRHLRHLQAQIEKLDRLIAQLVEQIDEWRDKRELLLSVSGIGTQVVNTLLADLPELGTLTNKQIAALVGVAPFNRDSGALRGKRRIRGGRASVRTVLFMAMLTSIQHNPVIRMSYQRLVANGKHKKVALTACMRKMITILNAMLRDQSPWREKHA

SEQ ID NO: 326413 - protein, 364 aa, unidentified
MKCVIENTKLSSLEETRFEFNRSTGVIKLGIDMHQDFYVVVEQADGSNPKPPQRFRKEAFLHWAAKLKRGTREVHAVYEACGFGFSLQRQLSTLGINCYVVCPQKLDERNKRVKTDGLDAKALCLKLDRFVQGNREALALVRVPTEEEEQKRALHRQREQLVKARKQLEAQGRSLMVNHGIEPVQQWWKCRAFAQLQVPEWMKELLLNSQPILLGLEEKIRALTVQLQSTAEPNQPRGFGALTSVVIDREVGNWHRFSNRRRVGSYTGLCPGESSSGDTRLQTCVTKHGNPRLRAALVEAAWRLVRFQPNYKPIIKWRGTLGPGALATGAARKKAIVAVARQLAIDLWRIRTGRVRAETLGLIK

SEQ ID NO: 326414 - protein, 331 aa, unidentified
MNTLMMPAAAARFNHVIAFDVAKATLSLHILPTGESLCLENDGAAIRRLLKREQKRNRKQGLGPMLVICEATGGYEDAVLKAASELGLECHLAHGSSVRAYAKFRGRHAKSDPIDAFLIAEYGRDKPDLRLYKPPRPEESALRALMGRRAELKEMILAETSRLEHASLKAVRLSLESHLAALKEQLALIEKEIRALTRRDEAFTHKSRLMQTLAGIGAVAAQTLLAFLPELGQIPSPAAVALVGLAPYDRDSGKERGKRRIFAGRSQIRRCLYMAALAAIRSHAVFRDFAERLSRRGKPFKVAVTAVMRKLIVILSAMLRHNQPWKHAQTA

SEQ ID NO: 326415 - protein, 317 aa, unidentified
MIENLSSVYVGVDVSKTQLDVAIGKDGEYWQASNDGMGIRKSVERLQAIQAVLIVVESTGGLEVALITEMFTAGLPFALVHPGRVRDFARSIGLLAKTDKLDARLLARFGEAVKPPVSRLPGEAEQYLNALVVRRRQLLDMLVDEKNHLASTRLSLRPKVEEHITWLEQELADLDRQIDDQIHQIPHFEQKQAILRSAKGVGPVLCAKLLSGLPELGQMNRKKIAALVGVAPFNQDSGRRRGKRRIKGGRADVRQVLYMATVAAARSNPVIKPFYQHLLKQGKLKKVALVACMRKFLTILNAMVRDMQPFNFTPMSA

SEQ ID NO: 326416 - protein, 348 aa, unidentified
MEHHVGIDVSLQLSSLCVLNADGKVVREAKVASEPEALVGFLRGLGLPIARVGLEAGPLSQWLYDGLREASFDAVLLETRHVKAALSAMAVKTDRRDARGIAQLLRMGWYRPVHRKSVPSQEVRALLAARKQLQIKAMDLEQTLRGLLRGFGLKVGDVSRGKLPARVRELVAGHAMLERIVEPMLTAGEAVWREFAKLHREVLAVVKEDQVCRRLMSVPGVGAVVSLTYRAAVDDPARFKKSKSVGAFFGLTPKRYQSGETDVTGGITKVGDAAVRTALHDAANVLLSRVTKFSALKRWAMDVANRRGMRRAKVALARKLATVLHRMWADGTEFVWGKDPAVSAAAAA

SEQ ID NO: 326417 - protein, 387 aa, unidentified
MPQPNDLSRSLVTLEQDSTLIAVIEMGQSSWLVAGIVPGIERQPLKKLAADQDGLLQLLHRWRKEAAQAGHPIKRIAVAYEAGRDGFWLARWLRAREIEAYVIHPSSVPVSREHRRAKTDRLDTELLKRAFLGWLRGEPKHCSMAAIPTVEDEDARRPSRERESLVGECTRIVNRVKANLARLGIRGFRPRLAHAPKRLETLRTPEGTAVPANTLAELQRDMVHLRFVKQQIKEIETARAKRLEQASGGGRDAMVRLLARVVGIGIETADMLVQEVFSRKLRDRKAVARYAGLTGAPDESGQKRRERGLAKAGNARVRHAMIELAWGHLLHQKDSALAEWYERRTVDARGGTRKTMIVALARKLLIALWRLVTTGEAPAGLLLRPAA

SEQ ID NO: 326418 - protein, 377 aa, unidentified
MHSENIAAYIGLDVHKETLAVAIAAPERLGEVRYYGTINNEAQAVRRLFQKLQGLYGNILSCYEAGPCGFGLYHQLTAMNIKCQVIAPSRIPKSPTDRIKNDHRDAISLARLLRAGELTPVWIPDLTHEAMRDLIRARAAAKRDSRVARQRILSMLLRTDKRYAGKHWTGKHRTWLANQSFSQPSQQIAFQHYCQSLEQIEDRILQLDQEISRLLPEWSLCNLVCQLQALKGVGQLTAITLVAELGDFSRFSSPKQRMAFLGLVPGEYSSGNSIRPRGITKVGNSELRRLLYEAAWSYRTPAKVGAWLIYYRPDSVTQYSKDIAWKAQQRLCSRYRSLTAKGKKSQVAITAVARELTGFMWDIALAAQSSFSQQKQN

SEQ ID NO: 326419 - protein, 323 aa, unidentified
MGKYKETFGIDTSKSVFDVYGSKSGHRQFSNDESGFVSFLGYIPKDSLVLMEATGYYHYRFAQFLYNQGVSVAVVNPLSVKRFIQMKLAKVKTDKSDAKAICEYGQYTELTLYNALSEVQSECYQLFRLLDNYIKHRTALKNKLQGKEVLGIPSNFAYRSLKRSLSHLDKEISSLEARLLSLVKQDQQHQLSLLTSIPGIGTKTALFLIIVTDGFTKFETSSQLCSYVGITPTLRESGSSIRSRGRISKVGNKKLRNLLFLCSFNACKYNLACKKLYDRLVAKGKSKKLALIAVCNKLLKQAFSIAKSGLAYDANYVSVLATK

SEQ ID NO: 326420 - protein, 355 aa, unidentified
MSKCSREDRFVGVDFHTETTVVTRLRADGSRVGKTEYYAWTKEGLARLRESCGARDHVAVEATYHWALFADAFEEFEGELVLAHPLKNRLIAESRNKNDKVDSRVLADLLRTGFLARAWIAPKEVREARELLRYRASLVRIQTSLKNRVRVLLAKAGAQVQASDLFSPTGLRELRALELGTLRGLIVDNALGVAERLRAQLAETEEEIRRRVEMSAQAQLVDSIKGFGPLGALTVVSEIGEIGRFSRAGKLVSYAGLAPTTRASAGIVRHGPITKQGSPWLRWILMEAVQHGVNAYPQLRGLYRRVAANEGNRKNAGRVAVARRLLVAIYHMLKRNEPFRPERIGKAVPHARTKA

SEQ ID NO: 326421 - protein, 373 aa, unidentified
MNYSTVYVGMDVHKETFSLCCYTNEKEQAEYPQKVDGHYSKVINYIEAMRFHYGDDALFICGYEAGCLGFTLYHQLTDHNVKCVILAPTTMLQQKGKKKVKTDKRDAALIARCLAHHDYSPVHIPTEQDEQTKEFIRMRDDHKLALKKVKQQILSFCLRHNYRFNGTANHWTQAHLKWLRSLKPEGLYAEILQEYLLTYDNLTDKLERFDKRIEELASNETYQENVHKLSCFIGVKTVTALAVLTEVGDFKRFASAQHFASYIGLTPGEDSSGNDQNRLGITKAGNRHVRSLLVEAAQSYSRGQIGFKSKALKARQDGNPPEIIAYADKANERLRRKYYRMVLKNNKRTNVAKTAVARELACFMWGMITGNVA

SEQ ID NO: 326422 - protein, 373 aa, unidentified
MIVIGTDTHKRTHTCGAVDAFTAAARGELTAAARTGSFGTLLRWARALDPERVWAIEDCRHVSGGFERFLIARGERIVRVAPKHMAGARRSSRERGKSDSIDAFSVARAALKEGIENLPGAQLDGAALDIRLLVDHREDLIAARTADQQRLRWHLHDLWPELEIPAGALDTNKWLGKISRRLARAPQATRVRVARELVRQITARTTRARELEAELAALVESYAPQLLAERGCGPLTAAKLIGEIAGADRFATDAKLARTGGAAPIPASSGNTNRHRLDRGGNRQLNCALHRLAVNKANWDPDTAAFLARKQAQGQSRKEALRSLKRHLARRVWRLLRSTTAPNATLPPTDIPDSPKARETIPGTAPHPMTCIS

SEQ ID NO: 326423 - protein, 351 aa, unidentified
METRATALPKLFIGLDIHKSSWKIHCSTDLFSGKSFSMEPHCKILYKYVQKHYPDHQVSIAYEAGCFGYAAHREFESYGWQSLVVNPADIHRKGKEQYTKTDRIDAQLISRELKDGRLESIGIVGEERECFRSLFRRRYSLSKDLRRIKSMIKMQLLYFGVKLPAQFDNDHWSHAFRNWLEDQEFSHDTASESLASKLRSFRFLDQEFRHISNQLRAYARKHYKKDYYLLKSVPGIGGIVAAGILAELGDLRRFNTLKHLAGYVGIAPGIYQSGTTSRTTGMTPRAQRLMRSYFVEASWQAVRTDPIMQAYYRKHVGKDSKKIIIKVAHKLLSRTLAVIKTETPYEIGVIA

SEQ ID NO: 326424 - protein, 316 aa, unidentified
MSISKTFIGVDVSKERLDCFCRPTGTTFSCDNTLPGIAALVQWVEAQQPQLIVLEATGGLERPLVAALVVAQLPVVVVNPRQVRDFARAIGQLAKTDRIDAAVIAHFGEAVNPEVRPLPDHLTQQMDALMTRRRQLVQMLATERNHLVSTPGQVQNYVKEHIVHLEELIKQLDQDIDQMITTSPIWKTKENLLRSVKGVGPVLSRTLLAELPELGRLSRQEISKLVGVAPLNNDSGKYKGKRSCWGGRASVRGPLYMATLSATRCNAVIKEFYQRLLSKGKLKKVAIVACMRKMLTILNAMIKSNKPWDASFAQRG

SEQ ID NO: 326425 - protein, 342 aa, unidentified
MAALIKHVVGIDISMNTFDACFGSIDSEQSIKLSTGKSFKNEAKGFEELIKWALKLKDSSTPIWFVMEATGIYYENLAFYLNEHEHLVNVVLPTKTKHYKQTTEIKTQNDKIDAQSITRFGLERQLEEWNIPDAKMRIIKELCREHESLNDQASQIKNQIHSKMNSYKPNESTLKRLKQHLHILEEQQKDIVKELKGIIAKIPDVKQKIELIEISLKGVGFMSLVKIIAETNGFACITSAKQLASYAGLDIVENQSGTKSGKTRISSKGNSHLRRSLYMPSMCVVRFTDAFKIFYARLRKKNKNGKVALTAVMRKLLTLIYSLWKNNTAFDPEYYLKKAVLN

SEQ ID NO: 326426 - protein, 318 aa, unidentified
MSDSVFVGIDVSSQTLEVASSSELKTWQVANDAAGLDALVSRLLEVEPALTVLEATGGYEFEAACALQAAGLAVAVVNPRTARDFARAMGALAKTDAMDAKMLAAFARVLHQHPERERFVKPLADAELQRLQALVLRRRQLVQMITSERQRMRIAHVAARPSIERVIEFLKTELGDSEADVAAHVQRHHADLAAALASVPGIGAASVAVLLAELPELGKLDRRRVAALVGVAPLNRDSGQMRGQRTIWGGRADVRRTLYMATLTGVRHNPILKTHYERLLAAGKRKKVALVACMRKLLTMLNAIAKNGSRWDPSLHSA

SEQ ID NO: 326427 - protein, 439 aa, unidentified
MTALPVLDPKAAAIDVGSEQMHLSIAGDAAKVFGSTTTQLHALRDYLVSQGVRSVAMEATGVYWLCPYEVLEKAGLKVVMVNGKYVKNLPGRKTDMKDCQWQATLHAHGLLQGGFVPEEHIRRLQDYQRLRVDHITMAASHEQHMQKALERMNIKFHDVISDLTGVSGLKVIRAILEGQRNPVALLALCDPQIQKKKADRVCESLVGTWKEEHLFALRQALAGWEFYQAQIAECDQALEHVLKQITETQPPPPPCLPSWGRRSGANAPQIPELHRLLWRLCGGKDPTAIPGISNYTLLQLVSETGTDLAAHWKSEKQFPAWLGVAPGSRQSGKRRASQKRSRNRAGRLFCVIARSVGRTADKALGGFYRRLRARRGGLVANLALARKLAALYWRVMVHGLAYVEEGLKKYQDRVAQTEQRWLRKLAKKHGMVLQAKAAA

SEQ ID NO: 326428 - protein, 416 aa, unidentified
MSYKRKLYTGIDIHSREHKAALVPIALLEGPGAAWRKVKPLNIKNDIGDFERLDAAIKLHISSNGEVAIAIDHTGGHYSEPVVHFLQARGYAVYHLETKAVKAARERFLDQESKSDVIDATSTAYLLYLRDVHGLSFRISAMTPELGSRAAALNSLVLQRWQFNKLANQATNRLHQFLLAVFPEGEAQYFNKLLKITPYYPTPQDILVSNGLETIEGLHQKDKESILELAANSVGVPSDTYQWLIRDLSFQRMESLAKRDALTSIIQKQVAVHPYGDILLSFPYLGEIAAATIIGIIKDIERWADKKKFKKALGVYSSLTQSGGEPGRTRQGKEGSRHGRRVLFQVCFGCISTKALDNDFKDYYLRQVARGKPRIKALVSTMGKLAEIIYHCLKVEEPYQYQGKHKTPIISSDKKS

SEQ ID NO: 326429 - protein, 436 aa, unidentified
MPESIPYLSVGFDVGADFTWMSIMLPNGILIGKPFKIIHSDPQSRELAISKIKEAQEMYSLESRCFLESTGIYHIPLLCFLRDKGFDCAVINPIITKNSTNMNVRKLHNDKFDSKKAAKVGLDASLKASIVPDDAIIDLRNLVRDYYYFKDLQSAIVLKLHAELKVSFPAYLNVFSKVTTQTSLKLLEAYPLAADMLAAPKDELVETIRSTARFGETYALARYDAICTAAKDAAVFGRALPSNALRIRLYIKMYREYQAHLDSILEELHQAVGKLEGTPDYDRISFIQTLHGVGFLSAVVLIAEMGSFDLFSSPKKLYAYFGLDPGVNDSGKFHGDRVHMSKRGSSLARRILHMVAINNLKVDKATKTPVNPVIYDYYTRKCASKKKSVAVGAVMHKICNIIFAMLRDNKPFELITPEEHRERYAAEHPESVNPAA

SEQ ID NO: 326430 - protein, 410 aa, unidentified
MTNTIIAQGEPVLVAIDIAKARHEVLIAVPGRKRRRRLTVLNQLDDFNRLITTLSDYHRPVRAAFEATGNYHRALAYRLGIAGFEVKLVSSVALARTREALNNSWDKNDPKDAEVILHMMQIGNERFYHDPMLCGTNDLQELSKTHDIVSRSKTELWHRVLTHYLPLYWPEAERFHRSSRSDWFFAFLERYPSPHFISAMSQAAFIADAWEVVGRKVSKERFLADIYQTAKSSVGLPIAQDSDAARMFRLVLGEGRSLIAQRNEIEDRTVELLKTNDDYQLLTSIPGIGPINALTILAEAGDLRRFQHHRQFLKFCGMDLATIQSGTFRGQTKLSKYGNARLRRTLWMAGQVAIMQKTNSFRDKFERYIAKDRQNAHLRRKAYTAIAAKMARTVHGIIKRGEPYRPFFEG

SEQ ID NO: 326431 - protein, 322 aa, unidentified
MLVTVLGIDIAKQKFDAALLVDGKTKHKACKNSAEGFEILMVWLEKQGIQKVHACLEATGNYGEDLAIYLHEAGHIVSIVNPARIKGFGQSELIRTKTDKIDAALIGRFCLAMKPGPWIPPTPAIRSLRALVRRVDSLIDMRSQEKNRISTAHESVIFLIKEHIAYLNQEIEKIRQQIADLIGQDPNLKRKHDLLDSIPGIGKATIPHILAELDDLEKFDHVRQLVAFIGLAPKETLSGSSIKGKPRLCKIGHARLRKALYMPALVSIQCNPVMIAFYNRLKDKGKNGKVIVCAIMRKLVHVIFGVLKSGKKYDPNYKPAFA

SEQ ID NO: 326432 - protein, 367 aa, unidentified
MKKVSTAAVKRMRNFSQHKLTIGLDLGDRSSCYCALDEAGGIVMEQKLSTTGKALQSAFGAMPHSRIALETGMHSPWVSRLLSGLGHEVIVAHARNVRLIGESRRKDDRLDAQTLARLARIDPQLQCPVKHRSAKAQADLTVIRARAGVVRARSALVNTARGLAKSYGERLRGCNVRNMNPEKAEGLSPELQSALQPLLVGIESLSEQIREYNERIEKLAQSSYPQAALLKQIKGVGTLIALTFLLTLEDAHRFRKSRDVGCYLGLQPGRRNSGQSEPQMHISKEGDPYLRTLLVQGAQHILGPFGTDCDLRRWGLKLAERGGKNGKKRAIIATARKLAVLLHRLWVSGEVYEPLRNSNRMAMPAAA

SEQ ID NO: 326433 - protein, 411 aa, unidentified
MKSYIFRDPKAVEPQNRSLRRSAPPLAGPCRLAGRVLCIGLDVHNESIAVSLAAGDSPEVRRYGIIGGQHEDVLRLIKKLQAAHPGVRLQFCYEAGPRGYPLCRFLRQHGAECLIVAPSKVPRQPGDRVKTDRRDADQLARLLRAGELTGIYVPEPSDEAVRDLIRARYQVQRQQHRARQQLKMFLLRQNIRYAGTKPWTAKHLRFLATVKLPFGEQQFVFQEMVNVITEAGQRLARYEKQIASVVEGWRWQPVVAALMSLRGVALLTAATLVAELGDLHRFASAPQLMSYLGLCPSEHTSGADRQQGGITKLGNGMARKALIEAAWNHRTPARLSRTVLARQEGLPQAVTQAAWNAQTRLHQRYKHLTGVGRKKSQVAAAALGRELAGFVWAIGRMVRPHALKAQAPTQP

SEQ ID NO: 326434 - protein, 346 aa, unidentified
MKPNSQMTLDKYFRQCVGIDISKDKFTACLYMYDIASDVGCHTESIDFTNTRTGFNQMVKWSRREAQKGFPLTYLMEPTGSYYEPLAYHLNKIGLTVYVVLPNKARKFCEYEGIKTKTDAMDARCLALLGCANRKLRPWEPPKPIYRELRQLTRLRASLVKMQTQLRNHIEAVDHMESASKEVRKSYEKLLDTIDRQLEKSDKTIATKVAQDKELETRIKRIATAKGIRTGTVTCIVAETQGFYLINNRKQLTSFAGLDVVAKQSGKDDPKHKISKKGNAYIRAALYMPALSAAYCNRQMNQTYMNICDKHPDTKMIGVTAIMRKMLLLIYSLWKSGEEYDETRDS

SEQ ID NO: 326435 - protein, 408 aa, unidentified
MNAVGIDVSKGKSMVAALRPMGEVALLPQEFLHTEVGLEQMAYAIIALGEDTRVIMEATGRYHEPVAAALHEYGIYVCVLNPLFIKQSGGGSIRKVKTDKADAMKIAKYGLDNWVDLREYTPMDTVRQQLKLCSRQYNLYMKTVVSLQNNLISLTDKTFPGVNELFSSPERADGHQKWVDFVMTFYHCDCICRVSENAFAERYQKWCKRKGYHFSAEKAQDVYLGSCGHFTTLPKNDNTKLLITTAAQQLLAGKMTLAALRAEMARLARQLPEYDTVHAMYGVGEITAAQLMAEIGDVRRFPRRSSIVGFAGVDPAVDQSGKHSAKSVPTTKRGSPHLRKTLYQIVCTYLRKAPEDEPVYQFLDKKRAEGKPYFVYMTAAQNKFLRIYYARVKECLEAFDAQQDTSQR

SEQ ID NO: 326436 - protein, 364 aa, unidentified
MDVHTTNFTLCCYTMDSEREFATVQTKPDYHEILKYMERIRKQRGEDCRFVCGYEAGCLGYSLHNQLRAHGVDCIILAPSTMPQEKGKRIKTDPRDAAKIAKCLAFHLYSPVYVPDAEDDAVKEYIRMRDDVNADLKRTKQQIIAFCTRHGFCFEGKTYWTRTHLKWLETLVFENDLYKEVLQEYLILYYTLAEKVDIYDARIEELSHTERYEEKVQKLRCFKGIATHTALSLLVEVGDYNRFRSAQHFASYLGLVPGESSSGEKQVRTGITKAGNSHLRWLLVESANSYSRGAVGKKGGVLKAKQEGNTPEVIAYADKANERLQRKYYKLALRSRHNIAKTAIARELACFVWGMMTGNISNAA

SEQ ID NO: 326437 - protein, 329 aa, unidentified
MRAGASGKVVREAKVASEPEALVALLRGLGLPIVRVGLEAGPLSQWLHDGLRGAGFDVVLLEARHVKAALSAMAVKTDRRGARGIAQLLRMGWYRPVHRKSVPSQEVRALLGARKQLQVKVVDLEQTLRGLLRGFGLKVGDVSRSKLPARIRELAAGHAMLEKIVEPLLAAREAMWREFAKLHREVLTSVKEDQVCRRLMTVPGVGAVVSLTYKAAVDDPDRFKTSKSVGALFGLTPKRYQSGETDVTGGITRVGDASVRSALHDAANVLLSRVTRFSTLKRWAVDVAKRRGMRRAKVALARKLATVLHRVWADGTEFAWGKGPAAAAA

SEQ ID NO: 326438 - protein, 341 aa, unidentified
MDLFVGLDVSVRMTSVCVMDVNGKVLKEAKVESEPQAIASLLGSLDGQYRRVGLEAGPLSQWLYSGLAVAGYPIICVETRHMKAALSAQINKTDRNDARGIAQMMRVGLFRPVYVKTERSQEIRMLLTARKFLQSKIIDAENNLRGLLRNFGMKVGAVTRPQFEARVIDLIKERPHLAMTIAPLLEVRRVLREQYQCLHKAMERLAADDGICRLLMTAPGVGPLVSLTFRAGIDEAARFSRSRSVPAHFGLTPARYQSGELDRGRGISKCGDSGVRWALVEAAGIIMRQRTKSSPLKVWGMALAKRRGPAKALVAVARRLATILHRMWTDNTEYRWQAQSA

SEQ ID NO: 326439 - protein, 424 aa, unidentified
MLFIGDDWAEDHHDIEIEDAQGRRLTRARLAEGLLGISRLHALLAEHAPAEWATLAPEEASAQVVVGIETDRGPWVTALRASGYQVFAINPLSAARYRERHSTSGAKSDAGDAHVLAEVVRLDRDHHRPVAGDSDLADAIKLVARAHQTAIWERTRHVLRMRSTLLEYFPAAVAAFEDLSAPDALFVLGRAADPDQAARLTRGQLVAALARSRRQHVQDKADALRAVLRAPALRQPPVTQGAYASVVTAQVAVIAALNGQVAALGHALGEHLDRHPDVQIYLSQPGLGPVLAGRVLGEFGDDPHRYADARARKNYSGQSPITRASGKKSGAKSLVLARYATNRRLSAALHQQAFCALGGSPGARAHYDALRGRNIGHHAALRQLANRLVGILHGCLKTGTLFDEDTAWQHRHERDSQGLKTAVA

SEQ ID NO: 326440 - protein, 385 aa, unidentified
MSQLNDLSRSLTSLEQDNAIIAVIEMSQSSWLVAGIVPGIERHPLKKLEPNEGELLRLLMRWRAEATKMGCTITRIAVAYEAGRDGFWLARWLRAHDIETYVIHPTSVAVSREHRRAKTDRLDTGLLKRVFIGWLRGEPDHCHMVTIPTLAEEDAKRPNREREGLVRERTRIVNRMKSCLARFGVRSFKPTLRKAPERLATLVTPEGVPLPANTLLELRRDMARLRFIMDQIKEVEEARAQRLEQAPQEKSQAMVRLLARVIGVGIETADMLVHEILSRSLRDRRAVARYAGLTGAPDESGSRRQEKGLAKAGNARVRRGMIQLAWRFLLFQKDSALAQWYRTRTESAGKKRKTMIVALARKLLIALWRLVTIGEVPAGVVLRAA

SEQ ID NO: 326441 - protein, 345 aa, unidentified
MEPMYYIGLDVHKKKISYCVKDVSGRIHLEGAVAATRTDLDLWMKALPQPWTAAMEATIFTGWIYDYLLPHAAALKVAHPLMLRAIAAAKKKNDRIDASKIADCLRCDFLPECYMASTEIRERRRTLRYRNLLVRQAVQLKNKIAVLLMEAGVSYNKQKLHKVGYFRELLKTHPDINDSLRSLLQLCRETLVRLQKIESALIRSLERDRLLAERVDRLMTIPAVGPITALTWALEVGDVKRFSSIKKAISYCGLCSAEKSSADVIKRSPLSKQRNKHLQCTLIEAAKLAPRNSPGLALIYDQERRKGNANRATLAVARKLVAYLVAIDRSQKDFLVIGEQNRTAA

SEQ ID NO: 326442 - protein, 348 aa, unidentified
MERMLERCAGLDVHKKTVTACVRVPGTHGDRTQHVRTFDTTTAGLLVLRDWLAAHAVTHVAMESTGVYWRPVYYVLEDAFACILANAAQIAQVPGRKTDVKDCVWTAQLLEHGLIRASFVPPAPIRELRDLTRYRKVLIHERTRHANRLHKVLEDAGIKLTSVASRLLGVSGRAMLDALVAGTTDPEVLADLARGRLRQKLPALRQALVGRFRSHHAFLVSQLLAHVDYLDEAIQTVGGHIDEVMVPFTDELARLDTIRGINKRTAEVIIAEIGVDMTVFPTAKHLASWAGLCPGNNESAGKHRSGKTRPANRWLRAALIEAALAASTRAAPGAFAARYRRIMPHRGH

SEQ ID NO: 326443 - protein, 330 aa, unidentified
MTTPSKNITPKENNETTFVGIDVAKNELAVHILPSNQQLTVPNSKEGIKELVKLFKKNNPEQVVLEATGGLERQLLTNLVANGITAIAVNPRQARDLAKGLGELAKTDAVDARILARFAQLQCLPTRPVPTKETQEMNDLVARKEQLIQMRTMEANRLHVARQKPIKKSIEKIIETFDKQIADIDARIEQMIETNPDWSEKDKILQSVPGVGAKTSQVLISALPELGTLNRQEIAALVGVAPFCKDSGKKSGERHIKGGRANVRSALYMATFSAIQWNKTFKAFFDRLMAAGKKYKVALIAAMRKLITVLNVMVKTKSYWKEQKPTGENQ

SEQ ID NO: 326444 - protein, 421 aa, unidentified
MKVTYQTCCGVDVHKSFLVATIVKTTGGIEPSYQKKRFSTFNNSILEFKQWLINNNCHDVCMESTGKYWIPVFNLLEDQINVTIANPKWVKAVKGNKDDTKDSKWIGDLFRLGLVKGSYIPCKAIRILREYTRYRYKLVSCRSSEKNRYQNALTVCNVALDSVVSDIFGKSSTSIIDYLLEQSGTTINHEEIASKLLRRLKSKEDAVIESVEGYQMTDAQKYRMRLVRAHMDYITAEINDVDKMIENMISSNPDFENAIQFLCTIPGVKRDSAITIISEIGTDMSQFSSSKRLCCWAGLTPGSNESAGKKKSVRITRAGIYLKPALVQCAHAAVKSDKSPYYKKKYESLVKRRGKKRAIIAIARMILTAIYQMLSTGEQWNPSDLYKIDIPVALVEKKRQKLSSRLRSCCNGKDYFLLMNH

SEQ ID NO: 326445 - protein, 329 aa, unidentified
MKTSSTTWPRLGIDISKLSFDVCLCLSANSTTSAAFANNQEGFAKLDVWLKEHHAGKAVAGLEATGPYGVLLLWHLHQQGHSVHLLNPRRVKDYARSQGRRVKTDRTDAALIAAYLKATEDLRPWEPPTQALMDLQALVRRRAQVMDALQAERNRKEASSSKVVAASLQRQITELKAEVNRLNVAIDKLVLQNLPLQKSVRLLRSIDGVGRMIAVTILAEVPAISAFARARDVAAFAGLTPALAQSGTSVRRRGRMTKEGSALLRKMLYMGALQAVKRPANAFHKCYKAFVERGKSKMCAMGAIMHKIIRVAFGVLKHETPFVENFARI

SEQ ID NO: 326446 - protein, 312 aa, unidentified
MTGIICGVDIASSSLAARIGQDGAAATFANTSDGIAELADFCETHQVALVAMEATGGFEQRAFAQLSERGLPVAVVNPRAVRQFAQSMGRLEKTDTIDAGMIAWYAQTKKSQPLCLAPQTQLELRARVTRLRQLTEVRTAQLNQQRLVINPAIQNSFRQLLKFLAEQIEELQQAIAALIDADPLWRELNQAFRTIKGVADRTVARIMAEMPEIGTLSNKTISKLAGLAPLANDSGKHQGKRAVRGGRAAVRDILFLVGSVVARHEPDFIAFQQRLRAAGKPPKVIRIAVAHKLLVRLNAKARQVRQQRALAT

SEQ ID NO: 326447 - protein, 351 aa, unidentified
MQIIGVDLHTRQQTVAMLNVETGEIVEKTLRHEGNSVREFYSTLAGPTRVGIEATGSMQWFLELMEELGIDCQVGHPAKIRAAEPRKQKHDRRDAALVLQLLVENRFPSIWMPSREQRDVRSLILYRHQWVRIRTRVQNALQAIALSHGLRRGSSLWSKAGQQAIASLSLTRYTAERRTALQSLYRHLEEQIEDLNRKVEELAWQRPQARRLMTHPGVGPITALATETFLGEPKRFVDGKAVASYVGLIPSEHSSGGRQRLGGLSKQGNPLLRFLWCEAVGHAVRKDAELQRFYQHKLVQKGLGKAKVAAARKLGIRLWILLRDQIDYQEFCRRGQLRQKHGGAHAGMPAR

SEQ ID NO: 326448 - protein, 420 aa, unidentified
MPDDRCRLGSDDVVIGLDLASAEHQAVVLAAAGQRLTRFRIPHTRAGLEELLRRTTPAALGRAGGARVFAFEATGHLWEAVAYVLRARAERYVVVNPLATFRVREARQLSREKTDLTDAEQIAELCRTGLVTRPQLETRPYLALRRAWGEYVRLREERARLKVLVAHQLYGLFPEFLRVWADLLQPGAMAVLRTGLTPAAMATLSLSEFVAQVRAHGAGHRIWRFKLAQVHREAAQTIACPDGLDVLAREVQRTVARMDMLTAHMTAVAAEIDIVLAELAEVPYLRTIPGLGWASVAGLLAHVGAITKYHHGRQLIKLAGTNPSRRDSGQTVGRGQRMSHRGRAGLREVLYLATISCLQHNPRIRAHYDRLIQRADRPLPKMQALGACMNKLLLYAFAVMHRREAFQLDHDWQRTMARVA

SEQ ID NO: 326449 - protein, 414 aa, unidentified
MLKIVYRVCCGMDVHKSFVVACIASTNEYGVTTYKSKRFSTFTKDLRRCADWLSENNCKDVCMESTGKYWIPIYNILEPTCNVVLAHPKYVKAIRGKKTDKRDAKWIADIFKHDLVAGSFIPPADIRQLRDLVRYRWKLTSFTTGEKNRAQNCLTVSNFKLDDVFSDVFGKAASAITTRILQDPTEKITDVSGFRTKGMKATNEQVLAAVDGEMCEEQAEKLRIIRSHMDSLELCRINLDSLILSTAEKYLPQLDLVMPAPGIQSFAAIGIISEIGVDMSVFPTSKHLCSWAGLTPQNNESAGKKKTTRISRAGAYIKPLLVQCALCAIRAKRFPEVRNRYLALKKRRGHKKAIIAIARMLLTAIYNMLKKNEPYNPELYRSADRPPAHREVSVEEAVFILQRQGYLVTAPPTS

SEQ ID NO: 326450 - protein, 309 aa, unidentified
MTDIFIGIDVAGQELVVAQQPITAQWTVANDAAGIELLTTRLRELTPTLIVLEATGGLEVNVYASLAEAGLPAQVINPRRVRAFAEAAGTLAKTDALDAQTLASFAQCLRPELRPHLDPATRALQALVTRRRQVLDMISTEEHRLPRCHRSLQPDIRDHIAWLKLRLKGLEDDISKAIREQPAWKAKQDLLMSAKGVGPAVSASLIAQLPELGTLTHKRIAALVGVAPMNRDSGKWRGKRYIQAGRTAIRSTLYMAALVAARHNPQVRTFYVRLLAAGKPRKLALTACMHKLLTILNAMVRDNCHWATA

SEQ ID NO: 326451 - protein, 382 aa, unidentified
MTGTEPHAWGTGLMDDIIFVGLDVHKATVCIAVAEGGRGGDVRQLGVFENRPEILSKVVSRLSKGGRRLSFCYEAGPCGYGLHRLLTGYGHECVVIAPSLIPMKAGDRVKTDRRDALMLAKLHRAGELTAIWIPDAAHEAMRDLVRARATAVRVLVKARQHLQGFLLRHDRIYRGARAWTLAYRRWLSTVHFEHPAQQIVLQDYIHAVQEAETRRHRLTQQIEELLPNWSMAPVVAALQSMRGVALVVAVTVVAEVGDFRRFANPRQLMAYLGLVPSEHSSGRSVRRGSITKAGNALARRVLIEGAWTYRMSARVSRKLYDRLEPLPAAVRDIAWKAQLRLCARYRRLAAMGKSKVVVTTAIAREMVGFIWAIARLAQPALV

SEQ ID NO: 326452 - protein, 319 aa, unidentified
MGRNNIEFEQVIDRGCGLDVHRDTVVATVMGKGIQTETRTFGTTTSSLKELGEWLASLQVTDGAMESTGIYWKPVLHVLREYPLNLIVVNARHIKNVPGRKTDKADSQWICKLLISGLLKGSFIPPENIQELRDLHRYKKKLVGTIASEKNRIIRVLEDANVKLSSVVSDTSGVTATYLINGLIEGRSDLENLISECYHRKLQSSREQIKEAINGRLTPHHAFILRSMQKHIASVETQISEIDVEIEKYIKDFEKEIELLQTIPGVGKDGAIGIVAEIGVDMDVFPSEHHLASHSGMCPGNNESAGKKKVQEHDKGTNT

SEQ ID NO: 326453 - protein, 429 aa, unidentified
MDVKDRIRLEEFRQLKKEIRGSQEHLIVGIDVAKDKHNAFFGTANGETLLKRLVFENNAEGFSKLLTFLEAVKVKNDLKKEVFALEPTANYHKPLGEYLINCAHNVVLVSGNAVKNNREMLYGRWDKNDTKDSANIADLISQAKFMYYDYPVLPLRDLRNLLSLKRRLKKQEHGIKVRIRNHLLAQYFPELDRYYGRCESLGLSIVRWSLAPCVIASLGYDEFVRLVAPGRRVTTGQRERLKEIWQEAAKSIGCQVGVALEFEAKMMVEGLKRLRDAIGITDDKIREVCLHFPEYSYLQTIPGFGPDVSSRVLAAIGNPFRFSSEKQVLKMAGWDLSAKRSGKKFKTVTPVISKKGNSHLRYALYQAAFVASSKNRYFVTYYTNKLRGRQREKGIKTKMRVKLAAKLLIIAWTLMKKEEPFNPDYLNID

SEQ ID NO: 326454 - protein, 409 aa, unidentified
MITRKYDVYCGIDVGKTAHHAVALAADGTRILSRPLPQDENAITALLGELATAGSVLVVVDQPRNIGAMPVAVARAAGADVAYLSGLRMRRIADLYPGNAKTDVRDAFIIADAARTLPDTLLPIAQHDDIVEGLRMLAGFDADLAAEENRINGRIRSVLLTVHPALERAIGKHLYRPVGVAVLAAFGGPVGLAATTSTHLREVTKAAAPRIGDAVADSIEAALGEQTVTVPGAEKADFVLRTLARQLHQVREARADLEVQFVAELDRHPAGPILTSMPGVAARTAVTMLVEIADIDRFQNAGHLAVYAGVAPRTHRSGTSIRGEHRQHSGNARLKRAMYLSAFASLREPASRAYYDRKRTEGKNHRSALICLARRRSNVLYAMLSSGTTYRSATELSVRRPGPADGKSY

SEQ ID NO: 326455 - protein, 491 aa, unidentified
MQSIFQRSNPAIEKIFAEAGKPEKVMCIPIDYAKRQHTALVCNGAGLQLRGAFNVHNTAEGVDFLEDIIKGLCKKHSIRKTHVFFGGEDCTAFCYNFIHALLERKYLGIGINAYEGAEARQNQLASTDKLDLLGIASVLINKKHGRTLSTEYGQARLLRELTHHRDSMVKAHTASAYRTHHWVDQLMPGFLDAKQSGLEPFSEASLWIMSQNFSPRQLLARKSDILAEKLRLFMLKNTEAKVTQLKALARTTLPPPAGLCETLQDNLAREVALYQHLSGTLHALDQQIARRLAATPGAMLTTVPGIGLILSAGLYAEIGEPARQRNMASLAAYAGIVSRLKQTGGPDNPARSLGRSRRACVPLKRRILDIALSIGQYGTEELKADYRRRDEAHQDVRFTMGRRMLRICAHLIQKQDFFLPPSLLADNAFDVRKAYYAKAWDPILIKWRNAGAIQQAFADGAPLEQWRTMLNELYTLNLSKLSPQYERLRDR

SEQ ID NO: 326456 - protein, 340 aa, unidentified
MRLIGCDLHASQQSIAMLDRDTGVVVEKTLTHEGEAVREFYASIPPPVVVGIEAPGSMGWFLRLMEELAIECRVGHPVAIRKAEARRQKHDRRDAALLLRLLAEDRFPTIWMPSTELRDLRALLLHRHQWVRMRTRVQNALHAIAMAHGVRRGHTLWNREGQALLASLPLAPHTAHRRSELQALYQHLDAHVDRLGERVKKVAEERPRATLLMTHPGVGSVTALATEVFVGDPARFLDGKALASYVGMIPSEYSSGKRQRLGALTKQGNPFFRFLWCEAAAHAVRRDPDLQRFYRRKVVQKGFAKARVAAARKLGIRLWIMLRDQIDYAEFCRRGLARQS

SEQ ID NO: 326457 - protein, 430 aa, unidentified
METSITTPEAVAAYIGIDWADQKHVIALRSATELNKIEHQVIDQKPEALMEWIGQLEQRFSLQGKILVCLEQSRGALIYHLMGYEFFELYPVNPLQLARYREAFSPGGAKDDRPDSELLNELLYCHRDRLRALKPDSVLGRKLSFFNQGRREAVDQRTRLSHAIKSQLKVYFPLTLELLDQDTSTALAADLLLRWPNLEAIQKQSVHTLRKFFYGHNCRGEQRMLQRLELVQKAKPLTQDSAIIEPAALRVQMLARQLKNLLPDIARYDKKIADLFAAHPDRLLFENLPGAGEALAPRLASAFGSDPERWESALEIATLSGIAPVRRASGIRSGKKGERKASVHFRQACPKFLRQSFHEFAGCSIRYCSWAQAHYSSQRAQGKGHHAAVRSLAFKWIRILFACWKQRTPYDAQRYLKTLQHRGSPLANAC

SEQ ID NO: 326458 - protein, 388 aa, unidentified
MLERTVITSVSWTKKNGEFNVTPTSFSNNKEGFDFLINSLKPYSKKSILLGMEDTGHYHVALLKFLLSNGYTVALINPKTTDLTRKMEGGITKNDKLDTITICDVLDTPERKKQYRITKVDRFDFYEQRQLTRHHHDLKEELNVYCNRLQKSIDLVFPEFNTLFSSKYGVVYMNLLKTFGNAEIIASTDIRTIRKCFEIKGRGNRISLTPEKLKECAKNSIGISSEVETIQIKHLVSQIMLIKEQIAEIDKKIEEFSITNNSPILSIPGISHFSGTSILAELGDIGNYSKPSQIIKFAGVAPYHYESSQYNAQHTGITKKGSKYLRKTLYQIILPVIKYNPVFKKYYLLKISQGKGHRCAQGHCIRKLLRIIYHLLETGQSFDPALLR

SEQ ID NO: 326459 - protein, 344 aa, unidentified
MKVSVLGIDLGKNVCSIVGLDASGAVVLRRRVKRETLIGLVAKLPASIIAMEACCGAHYLGRLFADQGHDVRLMSPEYVRPYIKAQKNDDRDAEGIAEAATRPTMRFVELKSQEQLDMQTLHRSRDRLVAERTSLINQLRAILLERGIVVPQGKHRLERYLISLMDEQRTEGLSSRIRALIADARAQWLELDRRIAVLTKEFVAFSKQNEDARRLATIPGVGVMIASALIAAIGKAEAFEHGRDLAAWLGLVPRQSTTGGKPKLLGISKRGNKYLRKLLIHGARAALPHIAARDTSLGRWAKQLLGRVHKNVAIVALANKLARIAWSVLRRGEGFTAKGSPLVA

SEQ ID NO: 326460 - protein, 452 aa, unidentified
MKKNSSKTFKPTQPLTTINPDAAGIDLGSEEIYVCVPYDRDPDFIRRFQTFTSDLLSILDWLKKCRIKTVAMEATGIYWIPLYELLDENGIEAHLVNPRELKRNKKTDVQDCQWLQQMHSYNMLAASFRPENEICVLRALVRHRENLFRYRAAHVQHMQKALHQMNLQLDNVLGDITGVTGMQILRAIIEGNHDPNYLAQFRDYRCKNSEETIRKSLEGNYRKEHLFQLKQSLQFFDFYTSQIHDCDTEIETIYQQVLPPIGEINQLPVPSKKIRKEKNYPNYDLRTYLFQTTGVDLTRISGLNVLTIQTILSETGPNLSKFPSVKHFTSWLRLSPNNRISGGKILTSKTIRFRNRAARAFQMAAHSLAHTHSPLGAYYRKMRAIFGPQKANIATAHKLARIFYFMITRRMEFDETLQAAFEQRHKERIIKNLHRKAKQFGFQLVTFQPTVT

SEQ ID NO: 326461 - protein, 411 aa, unidentified
MQVVHSRCCGLDVHKKIIVACLMILGAGGRLTKEIRSFGTMTEDLLALSDWLLGAGCTHVAMESTGFYWKPVWNILEGQFELLLVNAQHMKAVPGRKTDVRDCEWIAELLRHGLLRGSFVPDRELRELRELTRYRTSLTGERAAEVNRVQKTLEGANIKLSSVASDVMGKSGREMLAALVAGSTDAQSMAEMAQGKLRSKLPQLRQALAGQMGAHQRFMLAEQLAHIDDLDETIARLDAEIEERMRPFEEVIARLDAIPGVGRRTAEVIIAEVGTDLSRFPTAGHLASWAGMCPGNNESAGKRHTGKTRKGDSALRVALVEAASAASRKRNSYLQAQYRRLAARRGKKRAVVAVGHTILVVAYHLITNKESFYQDLGIHYFDERDRQHVERRLVRRLEALGYAVSLQPAAA

SEQ ID NO: 326462 - protein, 374 aa, unidentified
MENTVTHVAMDTHKKQHKIALHYPCQEEIVEFTINNTVRDINKMVKKIAKEAPGKVEFCYEAGVCGFTLKRRIEQHDCHCSVIAPSLIPRKPGERVKTDRRDAKKLLMLSKAGLLTEVHAPDEHQESARELTRQRETAKENLKRIRHQLLKFLTRHGYVYSNGHHWTQKHIDWLRTIEFTESMLKSVFENYFSEMIYCIGRLENLDKEVELLANSAEYKEVVGHLRCLHGIDTLTAITIITEIFNFGRFESPRHLMSYLGLTPSENSSGDQQKKGAITKTGNKRIRRLLNEASWHYRHMYVPSAILKKRRQGQPQWAIDIADAAGRRLSKRYRHLINSGKMPCKANIAVARELAGFIWFLVTQYQTRKNAKDAA

SEQ ID NO: 326463 - protein, 343 aa, unidentified
MSEISIVGLDLAKNVFQVHAVDASGKVVLRRQLRRGAVEKFFAQLSPCTVGIEACGSAHHWARVIGRYGHQVRLMPPAYVKPYVKRNKNDGRDSEGICEAVGRPTMRFVAVKSVEQQATMAVHTARALLVRQRTMTANSLRACLSELGIVAAQGMEGLRQLMTKLEAPSEDIPEVMRSALLILARHWQALDADERALEQQIAKAARGDRQARRLMEVPGVGPIIASTVLAKVPDAKVFRSGRDFAAWIGLTGRDHGTGGKHRPGRISKQGDRMLRALLISGASAHMRQQKRRGVSDPWLRDLLARRPYKVVMVALAAKTARILWAMLVKGEPYRDRASAPAAA

SEQ ID NO: 326464 - protein, 310 aa, unidentified
MDCYIGIDVSKATLDVASLPDGESWAVPNDDHGLAELAPRLVALAPALVVLEATGGFELLAAITLAKVGLPIAVVNPRQVRDFAKAMGRLAKTDALDAGILAAFAERVRPEARPLPDDAALLLESLLTRRRQIVDMVTAETNRLGFARGPVKRDISQHIRWLEKRLNDVDGDLQDAVTASPLYHAKAALLRSVPGVGQVTTLTLLATLPELGQLTRHQIAALVGVAPMNRDSGTMRGKRRVWGGRAPVRAVLYMATLVGLKHNPVLRAFYERLRAAGKPFKVAATACMRKLLTILNAMLRQNRPWDPQHA

SEQ ID NO: 326465 - protein, 323 aa, unidentified
MSIFVGIDISKKTFDTYFERDGKPCHVNLQQTEQDYKVLLHLIGHDSICVMEATGNYHLKLADYLHQSGISVVVENPLKIKRFSQMNLQRTKTDKADSKLIYKYGCSILAHGTQSYWRPDNKEIGHIKQYDTVRNQLIKQRTALSNTEEAMAGLTGLNQEVTDVLKEIVTAVEKAIKQLDKGMLKLVKEHHQDNFNLVTSVPGIGLKTATLMICLTDGFQKFTPDNIKQFISYIGMSPRTFESGTSIKGRGHISKVGNSRLRSMLYMCSWTAKTKNPQCATLYARLKENGKPEKVIKVAIAHKLIRQIFGVIKRGEPFSNEYA

SEQ ID NO: 326466 - protein, 329 aa, unidentified
MSQKLNSAIAVMGIDIGKNSFHVIGQDKRGAIVLRQKWSRGQVEARLANLQTCLIGILACVGAHHLSRKLQALGHDARLMPAKYVRPYSKGQKNDFCDAEAITEAVQRPTMKFIATKTADQLDLQALHRVRERLVSQRTGIINQIRAFLLERGVPVRQGLRFLRAEPPAILATRIDVLSPRMLRVIEELAGDWRRLDGRIESLSDEMAALARQDKGCERLMTVPGIGPIISSAIVAAIGTGDAFSKGRDFGAWLGLVPKQMSTGDRAILGSISKHGNRYRASQSGRVEARTGLRMMPTFPRLSLSFRTAGFPRYGWKAINVGLNGGFGF

SEQ ID NO: 326467 - protein, 387 aa, unidentified
MAQVNDLSRSLTGFDPNSTLVVVVEMSKASWLVSGSVPGVERQPLKKLEPDATALLRLIERWRNEAVRAGRPISRIALAYEAGRDGFWLARWLIARGIEAHVIHSASVAVSRERKRAKTDRLDVAMLMRVFLGWLRGERGHCGMVAIPTMEEEDARRPSRERESLVNERSRITNRMKSALARLGVRGFKPHLRRAPERLAGLRTAEGTGLPANIIAEFRRDMARLALIREQISSIEKTRAERLEHAPDTGPHAMVRLLARVIGIGIETADMLVREILSRNLRDRRAVARYAGLTGSPDESGLKRREKGLAKAGNARVRRGMIQLAWRFLIFQKDSALTRWYRTRTEGPSGARKTTMIVALARKLLIALWRLVTTGEVPDGVELRPAA

SEQ ID NO: 326468 - protein, 387 aa, unidentified
MQSVTSATAVATTALANDITLFASLELSKSKWVVTINSPGSEKFSKHVVEGGDGARLLDLLSRSRAKAEERYGVRVKAIVIQEAGLDGFWIHRLLLANGIESQVVDAASIAVDRRHRRAKTDSIDGETLLRTLMAWARGERRVCSMVRAPSPEEEDRRRLTRERGTLIKERIQHTNRIRGLLSGQGIRDYNPLRRDCFERLEALRTGDGRELPPLLKAEIRRELDRIAVAATQLAAVERARDALIRTNAEGRNNPAAHLLKLKGMGPEFASLLWLESLFRSFGNRRQVAAYAGLAPSPWQSGGVERDQGISKSGNRRLRHTMIELAWFWLRHQPDSALSRWFQARVGAGKGRVRRIAIVALARKLLVALWRYVTQGVVPEGAVFKAA

SEQ ID NO: 326469 - protein, 344 aa, unidentified
MKHYAGLDVSVKETSICIVDETGKICRELKVTSHPEDLLRVLRDPAWNLVRVGLEAGPLSQWLFSALAEAGLPVVCIETRHARAYLKAQVNKTDRNDARGIAHMMRVNLFRPVHVKTLASQKQRALLTARKLLQGKAIAIENDIRGLLRNFGLKVGVVGAAKFEQRIQELVEGLPDLSEVMEVLLEARRKLREQFTKLHRKLLAIVRDDTVCRRLMTIPGVGAVTALAYRATIDVPARFRTSKAVGAVLGLTPAQHQSGEMNRVGRISLCGDGMMRALLYEGAQTVLTRSVKWSWLKAWAMTIAKNRGLKRAIVALARRLAVIMHRIWVDGTEFRWTKEEAASA

SEQ ID NO: 326470 - protein, 410 aa, unidentified
MAERFVGIDVALREHRIAVLDRDGEAVGPSFTIAASTDGVATLLRTLDARAATAAQTLIGLEASGHLWENLEAALVGAGYRVIVLNPLQTRRYRDVVRRKAKTDDIDAHVIAGLLRSGAAQASYVPDEQIQSLRELARLRARLMDDRQDYLRQLIAQLDVVLPEHRTALGDLLSARARGILAQFPTAHHLAQASPRAIRRAAEDAGTRGFSLDDATAVRDAARRSIYSGKAAPARAHVVRTLVSQLERLTSAIDDVDRAATTLLPPSEPGAGPSDAQLLQTIPGVGPQTAATLLGELGALTRFTDARALVAYVGFYPVISESGERAATPRLSPVGSRIARHALYLAAVNAVRRSAEWRTLYLRKKAQGKKAKQALIVVAVKLLHTVYAMLKHRQPYNPSRLLVAPPTIGT

SEQ ID NO: 326471 - protein, 338 aa, unidentified
MIVVGLDVHKQALTAVAVDEAGRAVAERTSAVDAEALVEWARSLEAERLWALEDCRHVTRALEQALVAAGERLVRVPPRLTAPQRRRGRIRGKSDAIDALAIAPAALQEPELDRPRAGEQRLRELKLLLDHRDDLVAERRRCQQRLRWHLHELDPSLAVPLGALDRGVWLERLGRWLGRREQTTQVRIARQLLVRCPASTREIVALERELETRAQTLAPRLLELPGCGPLSAAKLLCEIGPIERFASDARLARHAGVAPLEASSGKRLRHRLDRGGNRQLNCALHRIAVTQGRVYGPARAYLERKQSEGKSRREAIRCLKRQLARTVYTTLKAESALT

SEQ ID NO: 326472 - protein, 353 aa, unidentified
MNYIIGCDAHKRYSQFAVYEGDHLRGRQVRVEHERGTIREFLSEFPEGTPVALESIGNWYWIVDEIEQAGCKALLAHPAKAKVMMGNVSKTDKLDACGLATLLRNRTLPTVWIAPSQVRDERELPRTRMALCKIRVALKNRIHATLAKYNLVLPTESDIFAQKWSSQLNEVIEQLPPETQNCLQQELELLEKVQEHIRVMEERMKVRISLTPNMQLLKTLPGVGDILAIVIGSEIGLIERFARAEQLASYAGTVPAVKSSGGKVRYGHTPKESNHYLKWAFVEAGNAPAQYRKHAHWQSRHVTRLYERVSLRKGHSVAVGAVARHLAEAPFWILNKQEPYREPIRQQVLPRQE

SEQ ID NO: 326473 - protein, 377 aa, unidentified
MHSENIAAYVGLDVHKETLAVAIAAPERLGEVRYYGTINNEAQAVRRLFQKLQGLYGNILSCYEAAPCGFGLYHQLTAMNIKCQVIAPSRIPKSPTDRIKNDHRDAISLARLLRAGELTPVWIPDLTHEAMRDLIRARAAAKRDSRVARQRILSMLLRTDKHYAGKHWTGKHRTWLANQSFSQPSQQIAFQHYCQSLEQIEDRILQLDQEISRLLPEWSLCNLVCQLQALKGVGQLIAITLVAELGDFSRFSNPKQLMAFLGLVPGEYSSGNSIRPRGITKVGNSELRRLLYEAAWSYRTPAKVGAWLIYYRPDSVTQYSKDIAWKAQQRLCSRYRSLTAKGKKSQVAITAVARELTGFMWDIALAAQSSFSQQKQN

SEQ ID NO: 326474 - protein, 346 aa, unidentified
MKILALDLGKYKTVGCTYESESGAHQFQRTFTTPADLRRLVQEVRPDRVVIEVCSIAGWVCDLMGQLGTEVQVANTSDDAWRWRKVKQKDDRRDALKAARLSAVNQLREVYIPPREVRQWRALITYRQHLVGRRTKIKNHIRDLLVREGQLLPRGRSCWNQLGQAQLNTMARPFAEVEAAELWRGELWEELQQLQMIQERVASVEEKLNAMGAADKRVQLLRTIPGVGPRLSEAIVALLDQPQRFRKASQVSSYIGMVPKAFDSGESERRGRITRQGNRLVRSLLVEVAWVGLRHNSWLRQTYQRLSGGKKARKKIAIVAVGRKLLVRCWAMLRDNCPWRWQPQIT

SEQ ID NO: 326475 - protein, 457 aa, unidentified
MKKRGRRTRGLEEAHPFAGMSRVNEHAAGVDIGAEEIVVCVAGDETIQIVKAFGNYTVDLQNIGKWLQAHRVKTVAMESTGVYWIPLFEELERQGFECLLISSRSLRRVAGRKSDIQDAQWIQTLHSYGLLESSFRPQGDLVALRTLLRHRSQLVEHRSPHIQHMQKALLQMNVQLSQALSDVTGETGLRIIRAIVAGERDPQRLAALRDRNCKKSVEEIGRALTGTWREEYLFIVKQSLELYDFYTKQVDDCDAEIDRLYALTRPEWGGEAVKPLPPKKRNSHSKNAPQKQAEIRQHLKRISGVDLSVVDGFGVSLAQTVIMEVGTDMSKFPSEKHFCSWLGLAPKHEISGAKVLKNKTLKTKNRAGQAFRMAAQSVKQADCVFGSFYRRLKSRLDKAQATVATAHAIARVVYRMLKYKVEYETISVTEYEKKYEEQQIKYMKKKAQKLGFQLIPA

SEQ ID NO: 326476 - protein, 343 aa, unidentified
MDHYAGIDVSLELSSICVVDATGRIVREAKVASEPEALVTFFRQLGMPVTRIGLEAGPLSQWLHADLTKAGLEVTLLETRQVKAALSAMVVKTDRKDARGIAQLLRMGWFRPVHCKSPPAQEIRALLVGRKLLQGKLLDVELSIRGILRGFGLKVGPVSKGRFAARIRELISGQPMLERVVEPMLRVRGTLHKEFHALHRAMLDVVRKDGVCRRLMTIPGVGALVAITFTTAIDAPGRFRRSRAVGAHFGLTPKKYQSGETDVTGGISKVGDAMVRTALYEAANVMLTRASRFSVLKRWAMDVAGRRGIKRAKVALARKLATILHRMWMDGSEFRFEKKAATA

SEQ ID NO: 326477 - protein, 403 aa, unidentified
MNMNAVGIDVSKGKSMVAILRSYGEIISKPFEVKHTVSGIRSLIEQIQSIDGESRIVMEHTGRYYEPLVRELSKADLFVSAINPKLIKDFGDNSLRKVKSDKADAVKIARYTLDSWTELRQYSLMDEIRNQLKTMNRQFDFYMKHKTAMKNNLISILDQTYPGANTYFDSPAREDGSQKWVDFSATYWHVDCVRKLSLNAFIDHYQKWCKRRKYNFSRSKAVEISEASKELVSILPKDDLTKLIIKQAVEQLNTASQTVEQLRTMMNEAASKLPEYPVVMAMKGVGKSLGPQLMAEIGDVSRFTHKGAITAFAGVDPGVNESGSYEQKSVPASKRGSSTLRKTLFQVMDVLIKTKPQDDPVYLFMDKKRAQGKPYYVYMTAGANKFLRIYYGRVKEYLSSLPE

SEQ ID NO: 326478 - protein, 370 aa, unidentified
MEHPTTLFVGLDVHKDSISVAHVPEDRSADVTFVGPIGTRQCDIDRLVRRLQSKASRLVFAYEAGPCGYVLYRTLSRKGLTCLVVAPSLIPKKSGDRVKTDRRDAVQLARLLRSGDLTSVYVPTVEDEAIRDLTRAREDAIKDLKAAKLRLKSFLLRLGIHYVGKANWNEAHLRYLAKVVCPTPVQQIVFQEYLRAVSEQVERRSRFDTELTEHVPSWRLFPVVTALQALRGVQDTVAVTTLAEIGDLTRFHNPRQLAAYLGLTPSEHTTGGKRRLGSITKTGNGHARRALVEGAWAYRFPAKVSESIQKRLEKLPKPIQDIAWKAQVRLCKRYRRLIARGKHPNVAVTAIARELAAFMGAIAKEVPIAA

SEQ ID NO: 326479 - protein, 400 aa, unidentified
MVAERQAEWENGSDCHTEAVLLKGKEERERMSKAEETRICVGTDLHKLQMTVCAEQEETGEVLLSEQYRTDAEGYEAFCEGLHRIEEETGKPIAIAVEATGNARYFKNRMEKEGFEVLVVNTNKFKVITASTKKTDKQDAATLAYYLMKGMLPESHLCDQTSEELRRMLKARSILVSSMVKIKNQIHGMMLGYGIETKAAQLQSKKKRQELIQDLADHGYTQFSALSLQVTLNIVDAIGEQIKAVEKQIQEMVREDDTVELLMTVPGIGLINAATIASYTKDIERFDHDFKRFASYLGVVPSVHNSGDSEHYGRITKRGPQTLRTAFVQVAMGMIRQPQKTGEWKLMKDYELMKTNKGTGRAVIALTRKVARIVFAILNTREPFNPELMKLDERNKKQTA

SEQ ID NO: 326480 - protein, 338 aa, unidentified
MAILTVGIDLAKNVFAVHGVDDKGTPTLRQPKVARGKLTALVAALPPCVVGIEACSGAHHWARQFQAHGHTVRLMAPKLVTPYRMSGKRGKNDAADAAAICEAVQRPNMRFVPVKTEEQQSRLMVHRARRGFVGARTACLNRIRGLLSEFGVVLPLKAEVVRREACERLEDLPGYANLVIGDLLSEVSHLDERIKQYDAHIRAMARECSAAQQLMQLMGVGEITATAIVAMVGNAHEFDSGRQFAAWIGLVPGQYSSGGKARLGRITKAGDAYLRSLLVLGARAVLNAAEGKTDSLSRWALALAERRGYWRAVVAIAAKNARMAWAVLTKGESFKLPA

SEQ ID NO: 326481 - protein, 328 aa, unidentified
MTLYIGVDIHARQQTLSYLDTSDGTTGVVALSHERDDIKGYYSQFEREVIIGIEACGYTNWFEELIERLGYKLLVGDAAEIRRLARRRQKNDRRDAQLILELLVHGEFPTLFRYTKESREVLRQLRYRHKLVKLRTMVVNSLHALVINAGLSLRAKLLTRDGRQQLRGLSLSAISQQQRDELVSLADELTRRIGTVEQWLKAQAKPDVRVQRLQTHPGVGLLTSLCLVHTLGDVSRFSSLRKVAAYAGFDPMEDSSAERKAYGGISKAGSKLLRYLLVEAAQTAVKDDDQLKQFYRRLLPRRGKARAKVAVARKLLIRCFIMDRAAID

SEQ ID NO: 326482 - protein, 377 aa, unidentified
MKSIKFVGLDVHAETIAVAVAEQGGEVRSLGVIPNREESIRKLVKKLGAVEQLRFCYEAGPTGYVVYWQLTALGAKCEVVAPTLVPVKSGERVKTDRRDALKLARCYRAGELTAVWVPDAEHEALRDLLRAREAAKKDQLRAKHRLSKFLLRHGRRPPTGVKPWTLNYLTWVKQGVHFQQPAQEATLLDYLHEVEHAEERIARLDLAIEEAVKSTPPEMKAVIEALQAMRGIAQVGAVSIVAELGEISRFSRARQLMGYGGIVASEHSSGESNWRGGITKTGNAHLRRVVVEAAWAYRHRPNVGETLRKRQEKVSEEVREIAWKAQHRLYTRYRKLMARGKGKGKVITAIGRELLGFIWAIGVKVEAAQKVTERRAA

SEQ ID NO: 326483 - protein, 371 aa, unidentified
MNTYILEAAPTACAIELKTDKRPKAKRILLGVDVHLRGYQAARKVDDGVIGVVDTFRSEVELLLHVEKQRQRAEEVVVVYEAGPLGYTLYRKLKAAGVLCYVCSPDGAQQRKKRRKNNKIDARNLASKLFNYLNGDKEALQLARVPTEGQEQLRLASRQHDQLVEERKRLGAKGNAMLLSQGFGSWSNWWRPKVWAQLSVLVPAWLLERLQIWVDVLKLLDEKLSQAKAALAGACSGPRPKGVGALSQMQLQSEVLDWHSYTNRRKIACLAGMVPSEWSTGDKERRGSITKVGVPAIRRIIVEMVWRMIFFQPQYKPVQKWQEVLKGNNPALKKKAVVAIGRQLIVDLWRLETGRVTAQELNLVMIEAEGV

SEQ ID NO: 326484 - protein, 430 aa, unidentified
MKSNTQNAKIEAITEKTLVLGIDVGSETHYARAFDYRGIEYSKKPFKFSNTEAGFVTFKEWILDIKERHEKDKVVLGMEPTGHYWFNLGKFLQDNEMKPVLVNPHHVKKSKELDDNNPTKNDRKDPKVIAGLVREGRYMIPYLPDGVYADLRTASNIRFQLQAELTRIQNRISRWFNIYFPEYKTVYGKPDAKSGILILKAAPLPEDILTLGIDGVNQIWRDAKLRAVGKARAKTLIEAAEHSVGSKEGAVAARMEIRMLLEDYESRSIRLQEVMTLIEGLVKQIPMAEKLLEIKGVGIRTVSGFLAEVGDISRFNNPKELQKLAGLALVENSSGKHKGETTISRRGRKRLRYLLFEVAMSLVAKNPEFRELHNYYTTRRLNPLKKMQSLMAIAAKLIRVFYVMLTKGVDYDPKKMVSDIKRPAVYLQAA

SEQ ID NO: 326485 - protein, 411 aa, unidentified
MEVVHARCAGLDISKRDAKVCVRVAGRGRGKTVETVTTWASMTSQILALRDHLIAERITCAVMEATSDYWKPFYYLLEDAGFDVLLVNARHVKNLPGRKTDVADATWLAQLGAHGLVRASFVPPEPIRQLRDLTRARTAITRERSREVQRLEKLLEDAGIKLSAVASDILGVSGRAMVESLIAGNHDPAALADLAKRRLRSKIPALTEALTGRFTDHHAFLARVHLDLVDQHTAAIDDITTRIEATIAPFHGFRDLICTIPGVSTLTADVIIAETGADMTRFPTAGHLASWAGTTPGHNESAGKVKSSRTRPGNPYLQGALGAAAMSCAQNPGTYLGARYRRIAQRRGPQKANVAIQHSMLIAIWHMGTNGCLYDDPGADYFNRLHPQRAKKRAISQLEAMGYHVTLTHAS

SEQ ID NO: 326486 - protein, 451 aa, unidentified
MDPGFLEHLRLSSRAVIGPGARFLEFLFTGPHADDATQEKVMELLHRRCCGLDVHKETVVACLRLVSNGKVTTEVRTFQTTTADLLHLSEWLAANDCMHVAMEATGVYWKPVWHILDDGEFELVLANAAHVKNVPGRKTDVNDAMWLAELLAHGLIRASFVPDTQTQEMRNLMRTRKQLVREQSSHVLRVQKTLEDANIKLDSVLTDLMGKSGRAMIEALIAGETNPAKLASLADRRAKASHEEFREALRGRVTKPHRFLLRLHLNQIDALDAAIATLDAQVEANLGPFRTAVDLIISIPGIKNLGAHVIVSEIGIDMSRFPSHAHLISWAGICPRNDESAGKRRSNRLRKGAPWLKTTLVQCAWAAVKKKNSYLQAQFYRIKARRGPKKAIMAIAASILTAIYHMLKDGTMYKDLGCNHFDRRSTDQQKQRLVKRLADLGYAVEIKPLAA

SEQ ID NO: 326487 - protein, 373 aa, unidentified
MKEKLRFLGLDVHAETIAVAVAEPNGEVRSLGMIANREDSIRKFIRKLDSPEHLRACYEAGPTGFVLYWQLTQLGVKCDVVAPSLVPKKPGDRVKTDRRDALKLARSHRSDDLTAVWVPDEGSEALRDLVRAREAAKQDQLRAKHRLTKFLLRTGQRPPLGVKAWTEKYVEWVQQVRYTHPAQEATLLDCRNEVQHMEERVKRLEQSIVEVIQLAPAPMQQVVRGLQALRGISAVTIVVELGNITSRFESARDLMGYSGAFPSEDSTGKRIRRGGITKSGNAHLRRIVVESAWSYRHRPAIGARLRRRQEGLPAEITEIAWKAQNRLHKRYMTLMARGKEQRKTMTAIARELLGFIWAIGIKAEAACKQQMAA

SEQ ID NO: 326488 - protein, 404 aa, unidentified
MDYYGGIDWATEHHDIVVLNKEGDKVSAFQVEHSFEGLRHLCDTLKKLVQGDLSRLGVIIETSHGLLVSTLLDEGFTVYPVNPKESENRRKASGAKTDPIDANNLAKMLRSDLKDMKPFKPSSDAIVELRQLTRDQNGLIQTQTALVNQLRACLLDYFPVFPSLFSDLDIPISLAFLRRYPTPEKAMKPSVEELAEFLRAHRHPTPYEAARRIHAKLREPQLTAKPHVVRAKSRLALALVEQMQVLKKQIKAYDKEITALFRVHSDSMIFASLPKAGERLAPRLLAEWGDDRTRFDYTQEVRALGGTAPTPYQSGKFSRPRFRWSCVKDFRYALQLFAWETTLSEPWAREYYDAQRKRGKKHHQAVRALANVWVKIIFAMWKNYQPYDRDVFLAAQNAHRRVIA

SEQ ID NO: 326489 - protein, 353 aa, unidentified
MTIVADQYELVIGVDTHAASHTLSIITTATGAVDAQVSFPANPAGLDRARAWITRRAASRPSLVVVEGIGSYGAGLADRVLAAGLPVVEPAAMAAADRRGVGKTDALDSVRIARSVLAVEIDRLRRPRTEGPRVAMRVLVVAREQMTCERTRAINALTALVRTVELGVDARKSLTSTQITTIASWRTRGESSTLQTCRAEAVRLASRIKALDSELKGNRKSLDAAVKTTAPELSALKGVGAVVAASVLIAWSHAGRVRSEAAFAALAGTCPIPASSGNTVRHRLNRGGDRRLNRALTTIVIVRMRTDSDTRAYVARRRAEGRTTKEIMRCLKRYVTRQLFRTLSAAHPNLGNA

SEQ ID NO: 326490 - protein, 414 aa, unidentified
MDMVVERCCGLDVHKDTVVACVRTPGKGGKRHQETRTFGTMTIDLLALRDWLVAMETTLIGMESTGIYWKPVFYVLEDATECWVLNARHLRNVPGRKTDVADAEWICQLIEHGLVRPSFGPPKAIRELRDLTRYRKAQLDERGREAQRLDKVLQDAGVKLSSVASDILGKSGRDMLEALVSGTRDPEVLAELARGRMRSKLPDLRLALEGRFSVHHALIVGQILAKLDFLDEAIGTLSDEVDRVIAPFGHEVELLDTIPGVDRRIAECLIAEIGVDMSRFETSARLASWAGMCPGNHESGGKRKSGKARKGSKWLAANLAQAAEAAEAAGRSKETYLGAQFTRLRGRIGHPKARKAVEHSILVAAFHILADDVPYQDLGADWFQRRRPEAHARRLAHQIEALGYRVTIEADQAA

SEQ ID NO: 326491 - protein, 331 aa, unidentified
MEHEQTWWVGIDVGAQDSQVVHGPAPDKLSKAFSIAQSEAGLKALDERLVQAGAVREATLVVLEATGTYWMKLATGLHGLGYQVSVINPKQAHHFAQALLKRSKTDAIDAHTLAVLAATLRPAAWNPPPAIYEELLQRLTEREALLEMRQQERNRLHALQQRPHVVKAVQQRMQAHLKFLDGQIQTIETELKQALKQDAAWEHAAKLLRSITGIGLMSCTWLLTATVNFSACSRPDQLASYAGLVPRFHQSGSSLHAPPSIGHSGHAALRSALYMASLSAAQHNPLIRPYYQRLLARGKSKKVAHIAAARKLVHLAWAVVTKDCPFQAPVI

SEQ ID NO: 326492 - protein, 342 aa, unidentified
MSEIITVGLDLAKNVFQAHGADVSGRAVLRKKLRRDQVLEFFGQVPACVVAMEACGGAHFWGREIAKLGHDVRLVPPAYVKPFVKRQKNDAADAEAICEAALRPTMRFVPVKSEEIQGAAMVFRVRELLIRQRTQAINALRGHLAEFGEIVPQGAANASKLIALVEDPECTLPADAIPVLKVLVSALAQLEEEISKLDAEIARRAKENDVARRLMTVPGIGPLIATAIATLAPPPETFRKARDFAAWLGLTPRQHSTGGKQRLGATTKMGERSLRRLLIIGANSVIIKRHTHRAAQPGTWLGNLLTRKPPMLVRVALANKMARIVWALMARGGVYQSPAAVA

SEQ ID NO: 326493 - protein, 362 aa, unidentified
MFRPHTLYIRIRIVRKVSEPAFAMKDQDVTDVIRRKQQTAMRYIGIDVSKATFVVAYSSDKGGEIRTFNNTTTGIKQFIGALPKDSSIHCVMEATGNYSAMLLYLLNVAGIAVSMENPLKIKNFARAMLSTVKTDKIDARLIALYGEKMNPQPFKIQGEAILRLRQKRTVIRQLTKQITAMSNLRGSLACLPVPDKGATHTVDETIKFLEKKRDRLQSELTDLVEVEFSRQLALLTTIKGIGITLATALIITTGGFTYFQNAKQVSRYLGICPTYEQSGTSVNIRGHINRNGDAYTRGLLYVAAWTASRFNTKCGETYTRLRQNGKPGKLAMIAVANKLVRQAFAVVTHDKEYVDGFVSNRP

SEQ ID NO: 326494 - protein, 412 aa, unidentified
METIVERPAALDVHKVQVTACVRVPGADGERVQELAEFQTTVRGLLALRDWLTERRVTQVAMEATGVFWKPVWYVLEDDFECLLVNARHVKQVPGRKTDVSDAEWLCRLLEAGLLRASFVPPKPIRQLRNLTRYRKTQIQERQREVNRLHKALEDAGIKLDCVASDILGKSGRDMLDALVAGTTDPAVLADLARRQMRKKIPLLREALEGHFDAHHRLWIGSILRHIDFLDEQIEQLSAAIEEQIRPFWPAVELIRTMTGFQQRGAECVIAEIGVDMSTFATHRHLASWSAQCSGNDESAGKRRSGKSRNGSKWLDYALEEAALAAIRVKDGYLAAQYRRLKPRRGHKKALGAVKHTMICAIWHMLSTGETYRDLGGDYYTRRDPERQTKRLVAQLERLGHHVTLTEGAAAA

SEQ ID NO: 326495 - protein, 416 aa, unidentified
MKILRPICAGLDVHKNVIVATLGITDMNTQITQYLQESFSTLNCDLYRLRDWLLDHHCHDVCMESTGKYWIPVFNILEDHLHVFLTHPKYVKAIKGKKTDKKDSKWICDLFKHDLVRFSFIPSKEIRALREIARYRFKLVCMRSSERNRFQNSMTVSNVALASALSDPFGKTATAIMHEILSNSSAANDEDRIRKLIHRSCKNKNLIVESVKDCRMESDQKFKMTTCFSHLEELDRHIAACEIELFTRAAPFLDLCLLLTAIPGIQLLSAILILSEIGNDMSLFSSSKQLVSWAGLAPANNESAGKKKSVRISKAGQYLKPLLVQCSLASIKNPDSYFGKKYSRIKKRRGHKKAIIAIARMILVCIYHMLLTGESFHPCDYDELMNPKVSTSTVKFTDGCSCYDPSRNRTDGTPGN

SEQ ID NO: 326496 - protein, 415 aa, unidentified
MALKIVYKICCGIDVHKTFVVACVASTSDKGITSYESHRFSTYTSGLKTLLQWLIDRNCKDVCMESTSKYWIPVYNILEKGCSIVLAHPKYVKAIRGKKTDKKDAKWIADLFKHDLVAGSFMPPSDIRQLRDLMRYRFKLTCFKSSEKNRLQNCLTVSNIQLGNVVSDTFGKSAQAILDKLLENPADTSFDLEPLVYKSLKKKLPELRDAIDGFITPEQAGKLKIIKDHYDNLESRKAELEELILALAAPYQQELTILQTAPGISSNFTAIGIISEIGTNMEAFPSAKHLCSWAGLTPTNNESAGKKKSVRVSKAGCYIKQLLVQCANAVVKSTKHPEMRNRYLRLKKRRGHKKAIITIARMLLTALYHMLKNGENYNPELYQKTDLPPVDREITIEQALMLIRNQGYKIKSATT

SEQ ID NO: 326497 - protein, 389 aa, unidentified
MYFIGIDISKYKHDCFIVSSDGETPFGVFSFRNDKQGFEMFLDRLNSLNSSEEKRIGFESTSHYSLNLMLFLENHNLTFMEFQPALISQYRKALTLRKTKTDAIDSKTIARWLMNVDYKPYPHSFYHNYSLKSLTRLRFYLIKQRTFYLIKLTDILDHIFPEFKPFFNNNLGAAALHILEKYGSPIKIAAMRTTSYDDLRRISRGHFSMQKFLELRELAKNTVGVSNHIFEVELSAILRLYCQLNSEISAIEDEISQLTLELDRPILTVPGIGIQSAAVILSEYGDISKFKSPAQMLSFAGLEPGYFQSGQSEHTGHMVKRGSSHLRCAIMNCCLLLIQYNMTFAEFYAKKRSEGKPHRVALSHVAKKLIRVIYTLETTNQPFDASKLR

SEQ ID NO: 326498 - protein, 322 aa, unidentified
MAMLSFGGIDVSKDRLDVMVLPEEQSSSVSNDAAGWAELVEQLRSSSIAAIGIEASGGYERGVMRALLAADLPVRQVNPFKLRQFARASGVLAKNDPLDARMIASFVAIMPTRPAQRPAPAAERLTEMLAVRRQLNAEKVAVENASRLLEDAMLQRLSRRRIARLAADIAMLDERLVEVVATDDALVHRYRLLTSIPGVGAVLSCTLLALLPELGCMSRKQLAALVGVAPYAFESGTLKGRRCIWGGRAPVRQVLYMAAMSASNWNPALKVFHDRLKATGKLPKVVIVAVMRKMITTLNAMVRDDVIWADRLTGRHSVPTAR

SEQ ID NO: 326499 - protein, 391 aa, unidentified
MVCVGIDVAKDKHDCCILDSDGTIRADCITIPNNMDGFKQLLQTIRDCTKKSDKIKVGLEATGHYSYNILGFLLDNDLAVYVMNPLHTNLYRKSLSLRKTKTDRVDARTIATMLLSDVDLKSYTDTAYHNEELKSLTRYRFDKVRERAKLKQSVSRLVTILFPELEKLVPSLHIASVYALLSEYPGAKQISEIHLTKLTNLLATASKGRYGKDKAIQIRDAARTSIGSVMPAKFLELKHTIKLIRELTSEIDEIEVSIQKIMDELNPPILSIPGVGIQSAAMILAEIGDFSNFESPDKILAYAGCSPSTYQSGKLTNCYAHMEKRGSRYLRYALYNATKYVCQWNPVFAEYLAKKRAEGKHYNVALSHATKKLVRLIYALQKSGKAYLVAA

SEQ ID NO: 326500 - protein, 271 aa, unidentified
METAYDGRQVVGMDLHRHRSVLVRMTEDGRRLGTARITSSPAELRAQIARAGKSPRVVLEATYGWYWAAGTLAAAGAEVHLAHPLGVKAFTCRRVKNDVRDSADLADLLRMGRLPEAWIAPQQVRELRELTRYRHKLGLRTSCKDQVHGVLAKLGIPVTCTGIFGRAGSAWLDGLGLPQPYAGKVTSLRHLAGELTTEITMLGDVIADLLAGDRGYQVIQQLPGIGPVLAAVITAEIGDVTRFSNAGQLCSRAGLTPRHRESDVILSRRAG

SEQ ID NO: 326501 - protein, 345 aa, unidentified
MHYCGLDIATKSSYMYVTDELGKKSTAGEISTSKQGLERRLRSYVRRGLKVAIEAGNQTVWIYEVLVGMGAEVTVVNPAKVKAIAESRRKTDKIDAKILCDLLRLDGLPQPVHMPGRQTRELRGILVARRQLISARTKLCNVIRGMLRQEGIRLPMRALSSQVGWDRLLKRKYCLEHIRPAIESYARSFTALSESIKELDRQLQEREKSDERVERLKTIPNVGSISSLTLVAALDDVHRFSSSRKVVSYSGLAPTVNASGERVVYGPISREGRSEIRAVWVQVAHRMAHDRRAEARPLRRWFNRVARRRGKKTATVALARKILTIAYQMLKEGEGYNAARIGAAG

SEQ ID NO: 326502 - protein, 481 aa, unidentified
MKSRPPERGKITDHARRGHWNEMNRKQRREMMRKMQSEDLSLEVVHPDAAGIDIGNESHYVAVPPSRDRQAVRRFGCTTAELKAMADWLQQCRIQTIAMQSTGVYWIAVYDILEAAGLEVYLVNARDTKNLPGRKSDVQESQWLMKLHTYGLLRNSFRPPQEIRTMRTYWRQRNDLVRAAGAHIQRMQKVLTQMNIQLANVLSDVSGMTGQAIIKAILAGQHDPHKLAELRDPRVQASHAEIAKHLEGNWQEDLLFVLKQEQEGYEFCLQQMGRVRSELEQYLQQREDRSQGACLPKETRKGRLKKNKKGKPAFDLRAELFRMTGTDLTQIDGIDVMTATTVMSEAGWDMSKWETENHFVSWLRLCPDNRISGEKIIGRGRLRTNNRANIALKMAATTLRLSNTYLGAQFRRLRTKLGAPIAIKAMAAKLARLVYRMLRYGMKYADRGAAFYEVEHQRLQIKHLKWKAAKLGYQIVQAPSA

SEQ ID NO: 326503 - protein, 427 aa, unidentified
MKSDVIRYKEFCQFKSEIRASKEHLVIGIDIAKDNHHAFFGTARGKTLLKRLIFSNNMNGFKKLIDQVEELQIQYSLSKTVFGMEPTGNYHKPLAAWLIINEYFPVFVSGKAVKDNRELLDGRWDKNDDKDSANIADLISQGKCLFYENPEESIIELRNLLSLRKRLKKEEHSLRMRIRNGLLARYFPEMDRHWGKSIEENLAIVKWCLDPKKISKMDFMDFVKRVTTTDRGKIQLNRLRKIYDAAADSIGMPVDISVEFEAKMLADRLKQIRERIKDTMQKIQTVAKKHKSYTTLQTIPGFGPFISALVIAVIGNPFRFNSYKQVIRLSGYDLNAKRSGKTSSSAVPVISKKGDSDLRYGLYQASLVGTYHNHQFRRLFNKVLKGRERERGIKTKMRVKIATKMLVIAWTLMKKGEPFNPDFIVTD

SEQ ID NO: 326504 - protein, 311 aa, unidentified
MGIDVAKAKLDLARSDSTSALTFSNDAEGIAQLIASLKGLAIASIVVEATGGLERALLDALLDAQLPVALVNPGQVRSFARGIGKLAKTDAIDAAVLVEYARRASPRLAEKRSKNQVELESLVTCRRQLIHVRTEQTNRRSTTTSTSARGAIDAVLKTVNRQILELDRKIARLIESDDDMNAAGKLLASVPGVGVVLSATLLAELVEIGTVGRGQLAALVGVAPFNRDSGSFKGKRAIRGGRTSVRGVLYMASIAAMRFNPVIARFAQRLKRAGKMNKVIIVACMRKLLSILNAMVRDGLSWDQLNLVKNP

SEQ ID NO: 326505 - protein, 352 aa, unidentified
MPKTDHSTIAVVGIDIGKYSFHVVGLDRRGTIVLRQKWSRGQVEARFANMPPCLVGMEACVGAHHLSRRFKLLGHDARLMPAKYVRPYSKGQKNDFRDAEAIAEAVQRPTMRFVATKTAEQLDLQALHRVRERLVGQRTGIINQIRAFLLERGVAVRQGRRFLRAELPGILATRCDVLLPRMVRIIEELAADWRRLDERIDNLSGEIDTLARQDAGCERLMTVPGVGPIISSAMVAAIGTGDVFSKGRDFAAWLGLVPKQISTGDRTILGKISKRGNRYLRVLFVQAAWVVLIRPKSWERHGLKAWIEAAMKRLHHNVLVVALANKLARIAWSVLARGRSFEVRSTVPAPSV

SEQ ID NO: 326506 - protein, 323 aa, unidentified
MNKYIKYFGIDISHLVFDVTDSDGNYYQFKNSLIGFKKFMKLLDFNSHCVMEATGYYHYQLAYYLQENSVVLSVENPLSVKRFIQMKLSKIKTDKSDSKLICEYAKQVDLKLWQGNSKHQLECLQMTRLLSVYTKQSTMLKNKLHGEAVLGQPSKLVVTSLKRSLRQLKKEIDTIEETLLLLVNEVHKDVLTRLKSIPGIGKKTSLMLVVLTDGFDRFKSGSELCSYAGLTPIIRQSGSSVNGRARISKIGNQKLRNLLFMCSFNACKYNKACKAIYDRIVAKGKSKKLALIAVCNKLLKQAFAIAKSGLIYDDTYRSTLVKN

SEQ ID NO: 326507 - protein, 341 aa, unidentified
MKKFIRTAVDLSKNYFQFYGLASEDGVLVSRKLKRSKVLEFYAQIEPCRVGMEACGSAHHWARELIAMGHEVVLIPPAYIKPYVKRGKNDVVDAAAICEAMARPDMRFVPVKSADDQAVLMLHKSRELLIKQRTMSVNALRGHLAEFGLVVAKGIGRVDELLALAQADARLPQIAKAMVTELAQHLEGLDQSIDAIDDDIAKAHKKNQKSCLIDEVPGIGTLIASVVAASVPDPSVFKSGRDFAAWLGLTPKQHSSGGKEKLGAITKQGNRYIRKMLVVGATSVLRVVGKRKGALADWINALRARKPERLAAVALANKLARICWAIMTTGESFRTETYVKA

SEQ ID NO: 326508 - protein, 435 aa, unidentified
MSIIIKYDSFISVGIDVGADFSWMSIALPNQTFVGKPFKILHSDLNSLSMSVSKIKEAEEMYSLESRIFLESTGIYHYPLFCYLRDKGLHISIINPIITKNSTNINIRKVHNDRFDSKKAALIGLKPDLKVSLIPSDFALDLRNLSREYYDLMDNRSAYVNKLQGELRMVFPQYLKIFSKITTNTALNLLERYTSPDAFLSASKEEIVSSIRSTSRFGITYAENKYDAIIQASNDAKTFGHSVNSNFKRILLYIRFIRQYDAEISTILSDMHELVDGNQDTEFVKQIHLIESIKGAGFLSAVSLMCEIGDFSAFNSPKQLFAYFGLDPAVKQSGNFNGTNVKMSKRGSRIARRVMHTIALVSISATRSGSANNIVLREYYLEKCKSKPKMVALGAIMHKVCNIVFAVLRDEKQFEIITPEDHQKNYLKVKYDIAA

SEQ ID NO: 326509 - protein, 472 aa, unidentified
MSNSIFKNANIDLKEVFASHKPEEILYASIDIAKYHHSAMVVNFFGDIIIPMFDFPYNNHGIDFLKKKLQIAQKQTQAKKLFMGLESTGHYHENLVASLRATGYDIQIIRPIDSKNERDNIHAKTDGIDLAAIARVIISNKGTRSHMPDSIFYNLQRASRTHRQLTWQETRTKNIITMLIDKTFGTLWNPDNSIFSDKWGKASLLFIENYPTPQQASKMGAKRLATFFKKHNTKLGIDTANKIITLAKITPARPLKEMESDIKALKAHIQVLKVLMPVILEQKKQMVKFLLQTPGTYLLSVPGVSVVYASDFTAEVGDVRRFAYASQMISLAGTAPRKYQSGEVDKANLPTSHKGKNLLRATVNQIALSLNAHCPEYRQYYSKKHFQYQDASGKARTATANKFIKLAFALMKNETLYYPGTANPFKSEKEHYQSIWGKMREKVVPYLCDDIPQKNYLTKTQHQLEEKYGITP

SEQ ID NO: 326510 - protein, 351 aa, unidentified
MKQEPEEIPDTEHELVLERVCAIDVAKDSGKVCVRVSGRASKRVSKVWDVPARTGAVAELAEHLLAEGIEKVTVESTSDYWRIWFYVLEAAGLSVQLVNARDVKNVPGRAETDKLDAVWLAKLTEKGLLRPSFVPPAPIRELRDYTRLRIDLTRERSRYWQRLEKLLEDALIKVSAVASTLDTLSVRDMLEALIAGERDPRRLAGLARGRMKPKQAALVEALTGRFDDHHAELTRMLLDQIDALATQIGTLTTRIDELLTAMEPQARADEPDTRGGAGAGADGARESTTIERLDEIPGISPGLAQIILAEIGLDMSRFPTAAHLVSWAKLCPRTLQSGAIQRSGKTGRGNP

SEQ ID NO: 326511 - protein, 355 aa, unidentified
MNQEKYIGMDVHQATISVAVMDSSGKLIMECILETKAATILEFIAGLRGTLSVTFEEGTSAAWLHDLLKPHVARVVVCDPRKNALLKDGSKSDRIDARKLAELLRGNQLHPVYHGEHGVRTLKELGRSYLTLTQDVSRVMTRIKALYRGWAIPCSGVTVYSPQYREEWLAKIPHPGVRLRAERLYQQLDLLQPVRQEARRDLLSESRKHPAVKLLRQIPAIGPIRSALLVALLQTPHRFRTKRQLWAYCGFAVRTHDSGEYRYVRGKLQRNRERITVRGLNHNHNHDLKNLFKGAALSASTRPGPLCDFYVVLVEKGMRPTMARLTLARKMAAITLTIWKKGVEFDAKQLNRQAA

SEQ ID NO: 326512 - protein, 347 aa, unidentified
MGGNQEVRHYGTIGGDMASLDKAIRKLKSKSGGLHFVYEAGPCGYEIYRHLTAQGFPCVVVAPSMTPKKSGDRIKNDRRDAANLARLERAGELTAVHVPREDDEAMRDLTRGREDAVKAQRTARQRLGAFLLRYGCRYPGRKTWGPAHMRWLSDIAMPHPAQQITLQEYIHAVMECKERVDRLTEQIQKLLPAWRMAPVVKALQALRGVAQIVAVTTVAEIGDMRRFAKPQQLMTYLGLVPSEHSSGDSIMRGAITKTGNGHVRRALVEAAHAYGFPARVSRSLLKRQDDLPQHIRDIAWKAQIRLCGRFRRLMARGKLKTKVVTAIARELAGFIWAIAREVQPQGI

SEQ ID NO: 326513 - protein, 358 aa, unidentified
MKKNSKLETRGHLTIGIDVSDRSSCYCYLDQAGEICGEGKLRSTPEAFRQHFRGMARAVIALEAGTHSRWMSALLRECGHEVIVANPGRLRLLTTSDNKNDPRDARTLAEIAWAKPALLQPVRHRSAEAQQDLNLVRARDLLVEARTKLINGVRCLVKGFGARVPKCASGQFCQHAHQRLPEAARPATAPLLEVSDELSVRIGEYDEMLEYVAQTRYPQTTLLKQVSGVGTLSALAFVLTLEDPHRFARSRDVGSYLGLRPKQQDSGDRSPQLRITKAGDSYLRKMLVNCAHYIIGPFGPDTDLRRWGLKLCERGGKNAKKRAVVAVARKLAVLLHRLWVTGEVYEPLRNHAEADVAA

SEQ ID NO: 326514 - protein, 315 aa, unidentified
MTITSEEYVGIDVAKDKLDVAVLGQKATSEAFNSKRGITALVKKMCQLNPRLIVVEATGGYEEALVLALYEAGMSVALVSPQRVRQYARARGLLAKTDKLDAQNLAEYGKNIQPRLFVAKSEEGRRLSAIIGRRRQLADMQKAEKNRLRTAYLEMRSSIQTVIDCLEAEIDRLDEEIRNFMNEHENFKEQEELLRSAKSIGPMTAATLLADLPELGKLDRKQIAALVGVTPMNHDSGRKRGYRKTKGGRPEVRSVLYMSALSAIRYNPVIKVQYEQLLKRGKEKKVAITACMRKMLTILNAMMRDQLPFREINMA

SEQ ID NO: 326515 - protein, 391 aa, unidentified
MFYIGIDIAKKNHEASIIDSSGKSLSKSISFPNSTKGIEKFNNFISEFGVTTNNCIIGMEATGHYWISLFSYIIDLGFTCYVINPIQSDAFRKMYVRQTKNDSVDSFIIAQIMRFGEFSISNFSDENTFALRNLTRYRFALVDECSDWKRKLVAILDQVFPEYSSLFSNIYGVASKELLSKYPLPEDMLSIPAEELGNLLCKCSKGRLGINKAEEIQSCARETFGIKFAKRSFSFQIKQIISQISFLEEQLKEIEIEISYLLEDICPIITTITGIGSVLGASIVSEIGNISRFERANQLVAYAGLDTRIKQSGDFSATNTKLSKRGSPYLRRSIWLAATVAAFKDPALSIYYQGLRARGKAHGTAIGAVARKLTNIIFAVLRDQKPYTPNI

SEQ ID NO: 326516 - protein, 343 aa, unidentified
MEYYAGIDVSLESSSLCVVDATGRIVREAKVASEPETLTAWFNSLGFALSRIGLEAGPMSQWLYAAMKQAGLTVELLETRHVRNAFKIMPVKTDRKDARGIAPLMRLGWFRPVHCKSLPAQEIRSLLGARKLLQGKLHDIELSLRGTLRGFGLKIGKTTPKTFAGRVRSLVTNHPTLTLIAEALLRARAVLLGEFLNLDQKVHTLARHDPRARLLTTAPGVGSMVALTYAAAIDDPARFKSSKTVGALFGLTPKRYQSGETDVTGRISKIGDAAVRTALYEAANIILERPVKGGWLKAWALGVAKRAGMRKAKVALARKLAVVLHRMLVDGTPFNMEKAAAKA

SEQ ID NO: 326517 - protein, 330 aa, unidentified
MQFVGIDVSKKHLHLSWLRDPEQGLARSKAVDNTPTGHAQALTWAMQHSGAAPAELCFVLEATGVYHEAVALHLHQAEAQVVVANPLHIKRFAESHGFKTKNDRHDGQILARFGHERRPKPWQPAPEPVRQLRALLARLEALEEDRQRETNRLEKARVQGVPAPVLDSLQAMLGTLKEQIETLSRQIDQHIDSDPGLKGQREDLESIPGVGEKLSAHFLALFAAKRFVDAKQAAAFLGLVPVERQSGTSVRARPRLAKNGDPRWRARLFLPAMVAARFNPDVSALYQRLLKAGKTKMSALGAAMRKLVQIAFGVFKHGLAYQSQCTPAPV

SEQ ID NO: 326518 - protein, 339 aa, unidentified
MEEITTIGLDLAKSVFQVHGVNAAGGVVVRRKLRRSALLEFFAALPPTLVGMEACGGAHHWARELTRLGHTVRLMPPAYVKPYVKRGKTDAADAEAICEAVTRPTMRFVPAKTEAQQASLMELKVRDMLVRQRTQTINALRSHLAEYGIVAAQGRKVAELIAVIRDGDDTRLPNLARQALGDLVAQIEALDGRIERLDSRMVRHAREDEAARRLASIPGIGAISATALAAMLPNPHGFASARHFAASLGLTPKPHSSGGKERLGRISRQGNSMLRRLLVLGATSRLRNARRSPEAADRATRLLARRPFKVVAVALANKMARIAWALLAWGGTYTATATA

SEQ ID NO: 326519 - protein, 324 aa, unidentified
MNYAALDLHERTVQCVLKDRDGRIVKESKTVKDEGRILAFLDGTDASVVMESGRNHQHIYDVLKERGYDVTVAHPLMVKAIAYAKVKTDRVDARVLADLLRADMIPESYVPGRDIREIRDLVRRRHYMVKLRTMQKNKVHAELATRWLKYEGDPFTEDGKIYLRSLAIDAVNDYLETIEFLNRKIHELDEKVRRVVESDKYAKLLMTVPGISYYSALLISSEIADIRRFPDHEHLCSYAKLSPGVRQSGETQHTSKSVGNSLMNWIMIQCTRVHVRKYDSAITRFYQRVSKRRGEKVAIVAAARKLMRAIYIMLKEEQAFRLDG

SEQ ID NO: 326520 - protein, 363 aa, unidentified
MVELSENFNPIRQEGLMERAKVSTEYCCGVDLHARTMYVTVVNRAGEVLVRQNMPNHFGQFVRVLRPFLPSVSVGVESTYNWYWLADGCHQADISFYLGHALYMKAIHSGKKKNDRIDSQTIADLLRCGFFPVAYPYPREMRATRDLLRRRHRYVSLRAEAYTHIQGTFSQHAMLGITGTDTKRKTTRRELPGEFEEPSLSMSVTCDLDMVDTLDAIITQIEQQIRALAKHHDNRALSILMSVPGVGEMIALTILYEMHTPARFPSAQKLSSYARLVKVDHTSNGKWAGEGNPKIGNPHLKWAFTEIVQHAPRQSERLSRYYDKLKSRHRPGKARIVFAHKFAVAIYHMLKNGQAFDEKRFLS

SEQ ID NO: 326521 - protein, 409 aa, unidentified
MKLFVGLDVSSQDTKICFLNGEGDCLQSFTITNDLPGALILKKKILDTASKSNCKIIKIGLESTSIYSYHPAMFLHNDKELRTYGSQVFMINPKQISNFKKSYPEMDKTDAIDAFVIADYVRFGRHTMSIVKEEQYMALQQLTRSRYQLVHALTKEKQHFLQHLGLKCSQFTQDVESSVFGNAMMELFLERFSLEELAQMPLQELVLFLQEKGKKRFGNPEDVAKSIQKAVKGSYRLSKVVEDSIDLLLSTSIQIMRTYQAQIKEIEKGIESLMSTLPQTLESIPGVGPVFAAGIVAEIGQIDRFADETRIAKYAGLFWKKYQSGRFTAENTSLTKSGNPYLRYYLVEAANSVRRHVPEYRDYYTKKSAEVPKHKHKRALVLTARKFVRLVDALLRNNQIYAPGRGVDR

SEQ ID NO: 326522 - protein, 339 aa, unidentified
MTSMVVGVDTHKATHSAALLNELGVVQGGLEVAASAAGYRQLLDWARSTSAARVWVVEGTGSYGAGLAKYLSEQDEVVYEGDHPKRSWRGPAGKSDQLDAIWVAKEALSGRRRSQPRARGERELLRVLLTARNGAIEAEKQGLNQLYALVVSAPEPLRKRLGRLRAEALVKACLRLRAHGDQETAVTAVTLRSLARRVSALATEAATYERQISKLVAARAPELLALKGVGPLSAAQFLISWSHAGRLRDHNAFAKLAGVAPLPASSGRVQRHRLNRLGDRQLNRALHLVAITRSRCDAQTQAYIARRTSEGKSSREIRRCLKRYLARRVFKLLERLDMT

SEQ ID NO: 326523 - protein, 558 aa, unidentified
MWNKATRVKSSVESASNKHIGGILMVCVGIDVAKDKHDCFIISSEGEILADVFTIPNNAEGFDTLLQAIRRSTRPEDKIKVGLEATGHYSYNILGFLLDKGLPTYVINPLHTNLYRKSLSLRKTKTDRVDARTIAAMLMSDVDLKSYTDTAYHNEELKSLTRYRFDKVRERAKLKQSVSRLVTILFPELEKLVSSLHSASVYALLSEFPGAKQISSTHMTHLKAVLKNASQGRYGQEMAETIRNAARSSVGSVMPAKSLELQHTIRLIRELDAEIEDIETAIQAIVDEMQSPITTIPGMGVRMGAVILAEIGDFSRFDSPDKILAYAGMSPSTYQSGQLSLSGAYSHMEKRGSRYLRYALYNATKHVCHWDPTFAAYLAKKRAEGKHYNVALSHGNTTATGYDNIGLRLHLNEKVCLKLTEILFSVSLKDIGNAHSLSLHDTLIHLHNIHSQRVLQIIRDCRFPCAHESDQENIVVEKISGLDSLTVLCDACENIINFFLMASAFHSGFQPSFLLRLLLRLQYRKIVGFLVYHDVLYDSVSHKQCVQDDLIALSKALS

SEQ ID NO: 326524 - protein, 388 aa, unidentified
MNRIIKIGMDVHSTNYTLCAMEPTVGAEDRVFGEIQVAPDYKEIILFIECLKMKLGFQDDYSIECGYEAGCLGYTLYNQLTNAGIKCVILAPTTMLSTKGKRIKTDKRDARLIAQCLCYGGYHPVYIPTKEDDAVKEYIRMRDDHKQILKSLKQQINAFVLRHGHQYSGTKWTIKHVIWLRTLELDPMYRETLDEYMASHEEQEAKIERYDKRIEEIAAEERYQENARKLGCFLGISTHTALSLIVETGDFIRFAKGNIYAAYLGLTPGEHSSSTSVKRLGLSKAGNTHLRCLLVEAARSICKGAVGHKSKRLRARQIGQSAEVIAYADKANTRLRSKYYRMIRHGKAKNVAVAAVARELACFIWGMMSGNISTVSGADTSVLAVSQG

SEQ ID NO: 326525 - protein, 342 aa, unidentified
MKSATTIGIDLAKNSFSVYGVDDKGKTVLSRTLTRAGVVRFFANLPSCLVGMEACASSDYWARTIESLGHEVRRIHPQYVKAYLLGAKNDTNDAAAICEAVQRPNMRFVPHKSPEQIDIQCIHRTRQGYIKSRTALVNQARGLLAEYGIIIRQGISAIRNQLPLIIADEENALSGLMRRNIASLYESICFFDSQILEQDKLLKTVAKENEACQQLMQVPGIGIMTATILLTVAGVASNFKNGREFAAFLGLVPRQNSTGGKTRLLSISKRGDCYIRTLFIHGARSAITRILAGQTPKYRPNPWVIELIARRGRNKACVAMANKTERIAWSMLAQGTEYRHAA

SEQ ID NO: 326526 - protein, 416 aa, unidentified
MKKIDYLSTLFVGIDIGSRLNVISALNFEQEFLIRMASIPNSQYGAEQMELMIAEVLQQHHEFRSIIIGLESTGFYGVHIANYLSTCQMLAPFSTKVYCLNPKEVAKYKESFNSLDKNDGIDSFVIADFARVGRINTQPWRGAQYLALQRLTRHRLHITECIAREKTYMLNNIFLKFSEFAMLDNDEHPFSNKYGATAEAVLTDYLSTEAIVNASVDELIAFISSKSRGRIHDPEQATYLLQKAANDSYRLDKCLYEPLTVSIGCSFNCINAFEKELKAIDDAILRTVKGLNPTEYQVLNSVPGIGKVYASGILAEIGTIKCFKNNDALAKYCGIVWKENQSGNFEAEDTPMNKAGNRYLRYYMIEAAGSVIRHCPEYKAFYDKKFAEVRTHQHKRALALTSRKLIRMLFGLLGNS

SEQ ID NO: 326527 - protein, 327 aa, unidentified
MTIITLGIDIAKASFDAALLQDEQYEVRHFSNDHDGYRLLHKWLKKRQARGCHVCLEATGRYGDAVANFLHEQGYTVSVINPARLKAYAASKLQRVKTDRQDARLLADFCATQKPDPWSPPAAEFLELQALTRHLQALQEDRQRARNRLQSVNPSDLVNQAIAKQIAFLDAQITELEKQIQQHINQNPHLRQQHDLLTSIPGIGDKSAAVILAEMPDPAQFPQAGQMAAYAGLTPRIRQSGTSVFGQSKLSKTGNARLRTALFMPALVALRYNPLIQALAERLTKRGKSKMTIVGAAMRKLLHLAYGVLKTGKPFDPDYLGNVQVTA

SEQ ID NO: 326528 - protein, 315 aa, unidentified
MRQSTTTAGIDTGKHSLDVALDTSDKTLKADNSPEGWRQIARFLKANNVRRAAIEASGGYEQGVLAHLRDQGLTVLHLQPMQVKAFARYTLKRAKNDRLDARLIAQCAARLKARKAPDKRLAKLASHLTYIEQIEEDIVRFQGRLEHTRDPRIKADIRKHIVAFRDLLKAEKKQLAAELKASPDLARRLDLVRSIPGIGERTAIALVIRMPELGEISREEAAALAGLAPFDDDSGKHNGHRHIAGGRARLRRSLYAAAFPAAFHWNTALIDLYARLTARGRTHKSALVACARKLLVYANTVVQRGTPWQTKTAST

SEQ ID NO: 326529 - protein, 417 aa, unidentified
MDVFVERIAAIDIGKAELSVTVRTPQPGRPGGRRQVTRTYRTMTNALMTLREWLAAEGVTRVVMEATSVYWKPVYYLLEDAAVFEVWLVNAHHVKGVPGRRKTDHIDSAWLAKVGECELIRPSFVPPEPIRRLRDLTRQRTSLVRDRTREAQRLEKILEDAGIKLSVVASEVLGVSARAMITALINGQRDPHTLADLAKGQLRIKHRDLVEALTGRFSEHHGFLCRHMLEHITYLDTLISQYDQRIDQAVAPFRDRLTQLDTIPGIATTTAQRLIAELGTDMTVFPTPQHLTAWAHTAPRPRSSAGKTKHGGTGKGNPWLAGVLGEIAATIARSQTFLGVRHRRLAARRGKRRAIVATSRHLLVIAWHLLSDPTATDTFHDLGPDYHLTRLDTNRRTRNLIHQLEQLGHTVTLTPAT

SEQ ID NO: 326530 - protein, 416 aa, unidentified
MKSARNTLPDEPLNALTCGIDWARDDHAVSVVDARGREVHRCTVEHSAAGLRELLTVLARTGVCEVAIERPDGPVIDTLLGAGITVVVISPNQVKNLRGRYGSAGNKDDRFDAFVLADTLRTDRARLAPLTPDHPATVALRRVCRARKDLVAHRVALANQLRAHLRNVFPGAVGLFADLDSPISLMFLTRFDCQDRADWLTPKRLATWLSGVSYSGRTDPAVLHARLTAAPRGAVGDDGSAHAHITRALLAALRTLVEQIKLLTEQIGTQLAGHADAHIFTSLPRSGTVRAARLLAEIGDCRARFPTPESLACLAGVAPSTRQSGKARSVEFRWAADKQLRDAVTDFAGDSRHSNPWAGDLYRRAVARGHDHPHAVRILARAWLFVIWHCWQDNLAYEPDKHGALQRLIAHQQPAA

SEQ ID NO: 326531 - protein, 339 aa, unidentified
MAIYAGIDLHSNSNFLSVVDNAGKIIEKRKLANDVQAILHPLAAYRDQLQGIAIESTFNWYWIVDALMDEGYRVHLANPAAIQKYSGLKHSDDASDAAWLAEMLRLGVLPEGYIYPKAERPIRDLLRKRGHLVRLRTSLITSLQGIVSRNNGLSLPGRMIKQLKTNHVASLCAANEDLALCGEVSKDTIDYLGRQIKKIEKQAEERAELRPAYKALLSMPGVGVVLGLTIMLETGPIERFAKAGNFSSYCRKVPSNWISNGKRKGRGNTKNGNKYLAWAFSEVAEFARRYDAASRSWYDRKLARSNRMVAHSALAHKLARAAYFIMREGVNFDHEKCFA

SEQ ID NO: 326532 - protein, 371 aa, unidentified
MEHTRFIGLDVHKERISIAVAESGRSGAVEYLGEISNDPVAIGKLCDRLGRPDKTLAFCYEAGPCGYGVHRQLTSLGHRCDVVAPSLIPHKPGDRVKTDRRDATMLARLHRAGELTPVWVPDADHEAMRDLIRLRSVVRQIVTRARQHLQGFLLRHGRNHGRGTAWRMAYRRWLSTLAFEHPAQQIAFQDYVDAVMDAERRLKRVEEQISGLLPEWNLRPVVDALQAMRGIALINAVVLVAEVGDFTRFSNPRQLMAYFGLVPGERSSGETIRRGGITKTGNTHARRALVEGAWAYRMKARIGRHKVDRIEALPKVVRDIGWKAQVRLCTRYRRLRARGKTANVVNVAIAREMVGFIWSIACTIQSAPKTA

SEQ ID NO: 326533 - protein, 376 aa, unidentified
MRAKLRFLGLDVHAETIAVAVAEPDGEVRSLGTIANREDSIRKFIKKLGPPEQLRACYEAGPTGFVLYWQLAQLGVECEVVAPSLVPKKPGDRVKTDRRDALKLARSHRSGDLTAVWVPDEDSEALRDLVRQREAAKQDQLRARHRLTKFLLRTGQRPSLGLKPWTERYMRWLAQIRYTQPAQEVTLRDCLNEFEHMSARVKRLEEAILEVVTLAPHPMQEVIRGLQALRGVAHISAVTIAAELGNISTRFESARKLMGYCGVFPSEDSSGKRIRKGGITKAGNAHLRRIVVESAWCYRHWPRVGAKLRKRQQGIPAEITEIAWKAQNRLHKRYIKLMNAGKDQRKVMTAVGRELLGFIWAIAIKAEQSFQQPIAA

SEQ ID NO: 326534 - protein, 342 aa, unidentified
MVMIGIDPHKGSHTAVALDDQELELASLRVRAGRRQRQQLLEWATPFDVRVWAIESANGLGYLLAQQLLAAGERVLDVPATLASRVRVLSSGRSNKNDPNDARSVAVAALRSPAMTEVRCEDHVTVLRLLAKRHIDLGRWRNKVCCRLHAHVAELVAGGISTEIVVAQASELLAGLHPRGVAAVERHRQALELVEDLARIDDQLRASRRRVTGAVAASGTTLTELFGVGPINAAILIGYTGDPRRFATQHHYAAYNGTAPIEIASAGRTIHRLSRRGNRQLNHAIHMAAVTQIRHTHSPGRAYFDRKVEEKKTPKVALRCLKRRISDSVYRRLVADARRARR

SEQ ID NO: 326535 - protein, 366 aa, unidentified
MYIVGLDVHAKRSSLCILDENGKLVKHLEVKGDWQRMLQVVDEQVPKPFAVCYEASCGYGYLHDQLAKRAERVTVGHPGQLRLIFRSKKKNDRVDADKLAKLLYLKEVPAVHVPGMDVRAWRGLINYRRKLIGRRAAVKTQIRAHLRGLGIAVGVKGGLWTKKGIAWLSEQAMSSSAADGLRRDVMVDDLTELEAKVRKVERELDRIGRAHAGVTLLRTIPGVGPRTAEAFVAHVDDVSRFARVKQVGSYFGLVPCQDASADRNRLGHITKDGPAPVRWLVAEAAWQGRRRSPKIRAYFDRVMRGDPQRKKIALVATAHHLTRVMAAMLRSGEVWREEEPQQPQTPPPASDQQEAKKTKTKTSNKE

SEQ ID NO: 326536 - protein, 376 aa, unidentified
MFKVRFLGLDVHADTIAVAVADVGGDVRSHGVIPNRLESVRKLVGKLGPAERIRACYEAGPTGYALYWQLTQLGVFCEVIAPSLVPKKAGDRVKTDRRDAEKLARCYRAGELTPVWVPDAAHEALRDLVRAREAAKKDQLKARHRLGKFLLRHGRRPEGMKAWTKKYLEWIKSHVRFPQPALEAALEDYLHEVEHVAARILKLEQAIDEAIQQAPAEIRAVIEALQALRGVAQTTAATIVSELGSLSRFESPRQLMGYSGLVASEHSSGNRIQRGSITKTGNAHLRRVLVEAAWAYQHRPNVTGYLLRRQKSLALSEEVKQIAWKAQHRLHKRYQAFAARGKNKNQIVTALGRELLGFVWAIAREAERQHKLATAA

SEQ ID NO: 326537 - protein, 427 aa, unidentified
MNATESNRVAEFRQFKKRIRGSTVDLVVGLDIGKRKHHAFFGDANGKTILKGLIVENSAAGFHHLMSQVDFYLQRDGFKAVVFGLEPTSVYHKPLSEHLIEQGHLVVYATNEAIKKNRSLIDGRWDKHDTKDSANVADLVAQGKCHYYDLPELRLRDLRSLLLLRKRLKKQEHSCRVRIRNNLVAQYFPELDGFWNHAAAENLAIVRGYLDPARIRQLSREEFIAKVATHNGGLRQQRRLREIWEAAGGSIGCRPGPAMQLEAELLVDTLQSIKQQLAHVEQAIQELATGFPEYGYLLSIPGFGPYVSAMTLAAIGNPHRFESRAQLIRLAGFDLCAHRSGEKSHTAVPVISKKGKADLRYALYQAALVASSLTRHFRSHYNRLLQGRQREKGIRTKMLVKIAAKMLVIAWTLMKRKEPFNPAYIQA

SEQ ID NO: 326538 - protein, 331 aa, unidentified
MEIIDVVGIDVSKLTIDVVIHQSKNYRQFENTNKGFSMLCKWALSKSKVDKDKLLFVFEHTGLYSYQVSVYLSKNKFNFSIVPGLEIKRSLGIARGKDDKIDAKKIARYGYRLRDEIRITTLASDTIQILKNLLTLRDRMVKQRAGYKTSLKEMKRVYPMKDNLLLFSSQQKIISSLNTQIVKIEKQMDKIILSNKKLKKQYNLITSITGVGSQTALYMIVTTDGFSKFKNSRNFASYCGIAPFPNVSGTSIRGKTKVSTLANKKMKSLLDLAAKSAIQHNQEMKLYYNKRVEDGKSKMSTINIIRNKLLSRIFAVINRDTPYIDFIKYAA

SEQ ID NO: 326539 - protein, 363 aa, unidentified
MQVRHIFVGIDLGDKNSVARIAIERENSVRVGFTNTRAGRARLFAEVNRRSEAAEGAIIVMAYEASSCGFVLKDEADQRGMLCHVLAPTKMEKSVDQRRQKNDDRDAQDVLEKLRGHYLAGNRLPTVWVPTAQMRDDRELVRIRQEVGEKQTKVKVQIQMLLKRHGLEKPVGSGSAQTIKYRKWLEAVAEESAWGWGMRQSLSSLLRQLRWLETELEQLDQQVEQLSQQERHKPIVEALKTEKGVGTPTAMVYRTEMGYAGRFDRGRQAGRFMGLTPTSHESGEQNDRKGHISRQGPPRLRRMLCQAAWAHVRHDPHAREVYERLVAKNPKKKKIALVAVMRRLAVRLWHRMREAELALEHIC

SEQ ID NO: 326540 - protein, 340 aa, unidentified
MNITTLGIDIAKSVFQLHGTNEQGKVELKKRLRRNQLLAYMAKLPPCLVGMEACGGAHYWGRKFQEYGHRVKLIAPQYVKPYVKTNKNDYNDAEAINEAVGRPTMRFVGIKALWQQDIQTLHRARSRLMQIRSSLSSHTRGLLMEYGIVIPKQIGQLRQGLPAILEDAENDLSPDIRALFAGLYEELQSLDKLINEKDKQVSAIHRESELSQRLGEVEGIGPLTATAFVAAVGDAKMFKRGRDCSAWLGLVPRQFSSGGKTILGGISKRGDRYLRTNLIHGARSVISRADNKTDARSRWIQQLKARVGMNKACVALANKNARILWAIMASGERYRASEQV

SEQ ID NO: 326541 - protein, 448 aa, unidentified
MIAAVVEKGAGIDVHKKFLKVCVMVGPLSEEPRFEIRRVECSNSALEGLRQWLKAEGVTHAVMESTGPYWVPVFNILEQDVKVILANAEQVKNRKGHKTDAQDSWWLAHLLRHGMIRASFIPEKATRNLRELTRRRKKLIEQAASERNRVQKQLEYGNVKLGNELSDVFGLSGQMMLQALVNEDRTPEEIAGLAQGSLKKKKEEIAEAVRGQRLNETQKEIIRSCMRLMTFLDLEIEELSDSIAKLIQESGQQKQKELLETIPGIQDAAAGNVLAETGPDMKQFPDEGHLSSWGGVCPGDNESAGKNKSRHTTHGNPWFRATLTECAWSASRTKGTVFQARYESLKPKIGHKAALVAVAHLLAETIYHVLSRGEQYRESRPQELPEVQRQRIIRHHVRRLRRLGCWLEADRLAPLESWYATRCIPNTGPTQPKRRGPKKRQVQRGASE

SEQ ID NO: 326542 - protein, 429 aa, unidentified
MLFQLQLAAEDEMNQYAAYLGIDWADAKHDLCLIDTASGKQTRLVIQHTPEAIAEYFTGLRARYAGQQIAVGLEQSRGPLLFALLQYDFLVLFPINPTTLAKYRQAFSPSRAKDDPTDAAYVAELLMQHGDRLRAWHPDDDETRTLRYLVEHRRRLVADRTRISNRLTSLLKCYFPQVLTWFPDIRTELVCDFLLRWPALERLRGVKRTTLLNFFRAHHSVRRDTLEKRLAAIKESVPLTTDRAVINSSVLMIKALCAQMKTTIAAIREFDSEIEKLCLAHPDFPLFQSLPGAGDVYASRLLAVIGSDRTRWATADELACLSGIAPVMERSGKSVWIRWRYFCPKFMRQAFHEYAGESVKHSFWARAYYQQQLSKGKSHQAAARALAYKWIRIIWKCWQTRTPYSEVKYLESLRKKGSPLLAFAVTNPS

SEQ ID NO: 326543 - protein, 333 aa, unidentified
MHYVGIDVSKRSLDVCLLAEGSKGSRKTKTLSNGQDSAQNLAKWLILQKCELSQTHVIMEATGIYHEYLACGLHQMGILTSVINPCRSREFAKAMGIFTKTDAVDAYVLAFYGCLKQPEAWTPPEEEVRKLRALLQHRDSLLNDKLRIDNRLNTLKSTEAVQEVMDSLSLVNQYLKSEVARIERLISSHIAQHPGLKRDLKLLMSVDGIGKQIGWNMLAVLRGNNFKSAEQLAAYLGVVPVKRRSGTSVHGRARLSKIGSSNIRAKLYMGALTAISKNSHIKALYERLLAKGKMKMSALGAAMRKLVHLCYGVLHTQQPYDEKYKAKIINFSS

SEQ ID NO: 326544 - protein, 433 aa, unidentified
MGFIVPSAMHPERADQPIAYEWFVGIDWGSQQHQVCVLDRDRRLVGARAVDHDGTSLAQLATWLWTLSAGQPQRVSVAIEVPRGAIVEGLIERGFHVFALNPKQLDRFRDRYSVAGAKDDRRDAFVLADSIRTDLPSFRRLRLDAPQLIVLRELSRAEEALLEEFRRMANRLRDQLHRFYPQMLQLCSAADEAWLWDLMELAPTPSHATEINEEQVRQVLKAHRLRRVKAPEVLACLQAPALPVAPGVLEAAQAHCGFLLPCLRVLAEQLQVCAQHVHALLHTLAVETGEAGGPSDVAIVQSLPGVGRKITAWLFAEASQPLAERDYQVLRTHGGVAPVTKQSGKRRQVVMRRGCNPRLRHALYHMARVAMQRDMHFGGVYAALRAKGQRHGQALRNVGDRLLRILMAMLRHRTCYDASRMRCEPVGQMGQKM

SEQ ID NO: 326545 - protein, 358 aa, unidentified
MAITTIAHAQPTRVTVGVDTHGDVHVAHAKDQLGRRLDTVSIPTTPTGYRDLLAWARGFGQVQAWGVEGTGSYGAGLARYLRKAGQVVLEVNRPDRAARRRRGKSDPVDAEAAARAVQAGGVTIVPKAADGHVEMLRSLRVARTTAMRARTQAVNALRSLLVTAPAELREQLRGRSAVRLVGVAATLDPGALTSPTAAAMLALRTLARRYQALDAEITALDGELDRLTATAAPRLLALFGVGPDVASALLVAAGDNPRRLRSEAAFSMLCGSSPIEASSGKTTRHRLNRGGDRQANAALYRIVIVRLRWHQPTKDYMARRTAEGKSKKEIIRCLKRYVAREVFAVLREMNQADPATAA

SEQ ID NO: 326546 - protein, 360 aa, unidentified
MNKTNVEKLLGRLLETKSEKIKLGCDIHARDLAVAVQVDDARALRPQTMAAAQLLVLVRGLIAGGRQVHACYETGPCGYGLHDQLRAAGADAYVIVAEALADGRKQKTDKLDAAALCDKLDRYLRGNARAMTPVRVPSAEERQRRSESRLREQLKRSRHQWQARGRSLLLFNSHHVTGRWWSQARWSELVAILPAWLVEQLSVMREALLQLDQQERTLRTKLEAEAPRTRPKAIGALTWVLLLREICDWQRFKNRRQVSSYTGLCPGVQQSGRRKRDGSINRYGNPRVRALLIELVWRLARWQPDYPPVRALVTGIARGAARRKCAVAAARRLAVDLWRLATGQTTPQKLKLIVPAEVLG

SEQ ID NO: 326547 - protein, 438 aa, unidentified
MDEVTDEPLYRDRVCGIDIGKAGLSVTIRVPSDKNPSRRMQETRAFGTTKREVLAVADWLRSWQVPAVVMEATWDYWKPVFYRLEPEGLECVLADARQVKNLPGRPKRDTSDSQWLAQNFERGAVRPCFVATPEFRVIRLHTRYRRDLIQERTREKQRVEKLLESAGIKLSGVLADLHGVSGRDIMDHLVAGERDPRALARLARRRARAKIPRLEQALDGTEFFTARHAALLDAMLRRIDAQNADIVEVSTVIEELLAPWEEQLQQAESMPGWQRRAAQDVLAETGPDMTRFATPGHLASWAGRAPLDHQSGQRKGRGKRKKGNRYIGAATGETSVSAGRTQTREGARYRRLARRIGKDKAQVAVSNTQLKVYHKLLSSPGARYQDLGAGYYDKQAQARRKTRYHLAELDALGYDVIITPRAGPDPGDAARGKQTPAA

SEQ ID NO: 326548 - protein, 322 aa, unidentified
MVTLGGDSHKQTHTVVAVDDNGRQLAEKTLPATCAGHLEALQWAVRWPERRWALEDCRHVSRRFEADLLVAGEVVIRVPSKLTGGARKVARTSGKSDPIDALAVARAALREPDLPVAKLEGAGREVRLLLDHREDLVGERTRIQNRLRWHLHELEPEAAIPARMLSRYHTLAELAGRLRSQHGVVVEIAIELVVRIRELTRCINHLEAGEAAGISRFRSRAAFAMNNGTAPVQASSGNQQRHRLNRGGNRQLNVAMHRIAITQLSRPGPAKEYLAKRLAAGNTKTEAIRALKRRISDEVYRRLLRDERESSTSDVTTCVAAA

SEQ ID NO: 326549 - protein, 379 aa, unidentified
MENAESQTQNTCFMAIELSKASWVIGMVTPLSDKVSLRKIACGDVRRLLEIVDCTLDNAGRTMGRPLRMVSCYEAGYDGFWLHRVLEARGISNHVLDAASLLVTRKARRAKTDRLDAEKLLQTLMAYWRGEPRVCSVARPPSAAEEDAKRLHRERAFLMKERVQHIGRIKGLLATQGIYDFQPNRRDWQSRLDHLITGDGRPLGKRLKAELGRQCRRLAMVNMMLTEIDEERDAELDAAEAPAAVTGQIRRLVQLKGVGPQIARVLATEVFYRQFSNRRSLGSYLGLTPSPFQSGDTAREQGITKAGNPRARTTAIELAWLWLRYQPKSALARWFHERTSGHKGRIRRIIIVAVARKLVIALWRYLETGLIPSDAELKA

SEQ ID NO: 326550 - protein, 366 aa, unidentified
MNYNTVYVGMDVHKESFTLCAYTIDAEKGSHFQRTEADYKNVLKYLEFLRTVYGNDANFICGYEAGCLGYTLYHQLTEHDVNCVILAPTTMLEQRSKRRIKTDRRDAEIIGKCLAQHNYSPVHIPTATDEETKEFLRMRDDHKLALKKVKQQILAFCLRHNYRYDGNSHWTAAHIKWLKSLNPEALYKEILDEYLLTYTTLSDKVERLDKRIEELASKDEYRESVKKLCCFIGIKTHTALSVLVEVGDFQRFASYLGLVPGEDSSGDGQTRLGITKAGNRHVRMLLTEASQCYARGQIGFKSKELKSRQAGNSPQVIAYADKANERLRRRYYKMVLGKSKKHNVAKTAIARELACFMWGMMTEHIA

SEQ ID NO: 326551 - protein, 456 aa, unidentified
MGRAKARKISAQLVEDEDYQLRYERVAGIDVAKAKADVCTRLPPAREGGRRVSRVEEVPATAREVLALAGRLLADGVELAVMEATSDYRRIWYYLLEDAGLRVQLVNSRHARQLAGRPKTDQKDAQWIARLAEMGLLRPSFVPPPEIRALRDLTRTRLMLVRDRTREWQRLEKLLEGALVKLSSAVHSMSRTKTARGILEAIAAGERDPETLAALAHGGVKGGHAAVRQSLEGMRLGGHHPRLIRVHLDHITLLDRSVAAIEDEIEAALDAIGEAWGISADGVPSPAPGPDAAALAAAGRLAEIPGVSPDLARAIIAETGLDMTRFPTPAHLAAWAGLAPVARQSGPRARKPAKGRGDAYLKGYCTQAALGASRTDTFLGERFRRLSRRIGGVRAQCAVGRSILVIVWHLLSDPAARFRDLGPGWHGRKADRDRKIRSHLRQLQALGLNVTIAPAA

SEQ ID NO: 326552 - protein, 338 aa, unidentified
MKLNVFGVDIAKDVFQIHWVDKAGKARSEKVKRQHFLEWFSNKAPSLIAMEACSGAHHWGRCFQQMGHQVRLIAAHKVKPFVIGNKNDMVDAQAIWTAVQQPQMRFVAVKSVEQQAALSAHRMREYLVKTRTGSINAIRGFLADFGIVIARGRTAFKREIAGCLETLSQTVPKEFADRMYERVAYIHKLDDDIAGLEQHITAYFKGCPQCQRIAKVPGIGVLSATAIVATVGDVSQFKSGRELSAWLGLVPKQTGSGGKVKLHGISKRGDTYVRTLLVHGARSAITHSKHPSEWLQQLLVRRPKNVVLLALANKTARVVWALLSKEAEYSETQYSQVS

SEQ ID NO: 326553 - protein, 387 aa, unidentified
MDGTHYATIGMDVSDRKTQVCVMAEDGKSPKIAMETVVPTTKEGLAKFLSTQDRSAPVAFETGMHCRWTNEAAEGPGFKVYAANPCRLRMTTESKTKNDVDDARMPARLALSDPGLLHPVKLRGPGRRRMPNLHEMRNLLVKQRTGVIVQMRAIARAMGFRIPKCPTGSFHRLDTSPWPREFRDIAWPMLKNLGRLAVTIKTYEKQIRELAQTPTFKAQVDRLMEIRYVGLHVATGFVAATGGDVDRFGKPRDVGPWLGLTPRQDQSGDIDRQCHITNAGSPSMRRLPVESAQMILRDGPADTDLKARGRRMCARGAKMAKRRAVTAVARAPAVLMVAMLKRPDAPYVPPSGRCEKEPPAMRATAWAADSGGNPGRRFREQEAEPRR

SEQ ID NO: 326554 - protein, 362 aa, unidentified
MNYVGVDIHKKYSVLCAVDERGRKLREARVEGNAPFGFAQFFSGLGGPSKAVVEACWNWGLIHDELEELEGIEEVVLAHPYKTRLIADAQIKTDRLDAYALSTLLRGNLVARAHVPRCETRMRKNLLRQRLYWARLRTMLRNRIHALLDRQRDLELPQCSDIFGVRGLSFLRRLELPETDASLLREQLALHDLIAQQMKAQEKRIGLEFGSEAMHRQLLSVPGIGPTLAAVIACEVDSIERFSSAEKLCAYAGVVPTTHSSGGKTRHGQLLPFCNKWLRWALIEASWVAIGCSPYFGALYKQHRARGKKANSAVLIVARRMCRIIWQLLHEKRDFEKRPLRPNFNFPGCSVVRLTAATAARP

SEQ ID NO: 326555 - protein, 321 aa, unidentified
MKTVQVGDEGFLALLDWARSLGAERVWALEDCRHVSGSFERFLMTSGERVVRVATKLMNDARRSGRDRGKSDRIDALAVARAALREGIEALPSAQLAGVELEIRLLVDHRERLVRMRTAIYNDLLWHLHDLWPEQSLPGCALLSKKWSTRIARRLARAEQTARVRIARDELGHLRELSHTIDGLEAEIAELVAQVAPQLLTEPGFGPLTAGKLIGEIAGAQRFASDAKLARAGGIAPIPVSSGNTNRHRLDRGGNRQINTAIHRVAITRARCHPETQAYLERKRGEGKTNREALRCLKRHLTRRIWHLLQPTPPTLPTSIS

SEQ ID NO: 326556 - protein, 402 aa, unidentified
MNAVGIDVSKGKSTVAIMRPFGEVVASPFEVAHTGSELSKLAGMLKSLNGETKVIMECTGSYHLPIAYALREHGVKVCAIHPMLIHDFGNNSIRKVKTDRADSIKIASYGLTHWLELPEYIPEEDIRHMLKAYSRQYNKYIKLKTMLKNNFTSLLDQTFPDVNELFTSQPRKSDGHQKWLDFAAVFWHCECVCGLTPKAFSERYRKWCKKAGYNFSQTKADDIYASACSHIGIMPKNETTKLLITQATAQINAVAESLSVIAREMKTLAVSLPEYPIVIKFCGVGDVLGAQLMAEIGNIYRFPKKGSLVCFAGLEAPPHQSGKMDTESRSISKKGSPHLRKTLFQVVDCLLKQSPVCDPVYQFLDRKRTEGKHYYCYMTAGSAKFLRIYYARVREYLDSLGV

SEQ ID NO: 326557 - protein, 333 aa, unidentified
MVEGTEGSHHKEGSTKMSKYTTVCAGIDTGKHKLDVAIDGGAQRVQVDNNSEGHRRLSAWLRQREVERIGIEASGGYEQAVVLSLRADGFVVIVFQPVQVRAYAKFVLQHAKNDTIDAVLIARCTAAATDIHEPPDARLAPLAQHLTMIEQLTEDVGQLKTRREACREERIREFWKQEINRLKALLNRELKQLVTAIREYRDLANRLDLIASVDGVGLRTAVAILVRMPEIGRVTREQAAAIAGLAPYDDDSGVRRGSRRIKGGRQRLRQSLYAAALPAVFYWNPQLKAFYRRLLVAGKPHTLALVACARKLLIFVNTVVARGTSWRSSAVTT

SEQ ID NO: 326558 - protein, 343 aa, unidentified
MTIVESTRPITGGVDTHLDVHVAAALDPNGGVLGVESFATTPAGYRELHGWLAGFGELTRVGVEGTGAYGAGLARFLQRAGVEVIEVDRPNRQERRRNGKSDQLDAVEAARGALGGRCQAVAKTGDGSMEAMRALLVAKRSGRQARVRSLNQIRHLSFTAPDDLRVRLQHVPARQLAATTARLGPSGDVVSSATKLAMRSLGRRVLDLDAELEIVDDALAGLVTATAPGLLALHGVGVDTAAILLVAAGDNPERIRSEAAWAHLCGVAPIPASSGKVTRHRLNAGGNRQANHALWRIVMTRMSSDPRTRRYVERRVEEGRSKREIIRILKRYVARETWRHLPS

SEQ ID NO: 326559 - protein, 342 aa, unidentified
MKDTMIGVDLAKRVFHLHVASMRGEVKDRKKLTPDQFRRYMSDVPECVVVFEACGSAHYWSREMRALGHEARIIPAQYVKPFVKRHKNDKNDAEAIVVAAQRPEMRFATVKSEDQQARAVVFRARERLVHQRTELVNALRSTLYEYGHVFPVGIAHLKKIEELLQNPHCDLPPLVVTECQDLLAQIAEKTERIKAKDKLIKELAKESDVARRLQTMPGVGPMTALAVEAFAPDMVQFSCGRDFAAWLGLVPLQSSTAGKSRLGKMSKMGQVDIRRLLIIGAMSRIVGRARHTIPDDSWLGRKVATKPKMLVGITLANKMARQIWAMLTKNEDYRDPALVGVA

SEQ ID NO: 326560 - protein, 320 aa, unidentified
MMNEHKIYCGIDVAKRNFVIGLSNKKQTKTETNNPKGFQHTIEYLNKLKEGRVDLVVLESTGGLEIPLAKALHRAGFRVIIANPRQTNQFALSQSLAKTDTKDAKMLAFYAQMLATRGDVENQLYTPPTPEMERLEALVVRRTQLVEMRSAEKNRLEQVHESQLASVEAVIAYLSQQIDQLDKDIEEQNKHFEDTTKKFKDIKGLGNNTIAVLMSMLPELGKLTNKQIASLVGVAPHPKESGESRQKSRCFGGRKMVRNALYMATFVAVRFEPKLKVFYERLRANGKAFKVAINACMRKLLTILNAIVRDGSQWDSCAIN

SEQ ID NO: 326561 - protein, 372 aa, unidentified
MGHHTEAFVGIDTSKSRNAIAIADGGRGGEVRYLGEFPATEAAIRKLVAKLAAKYRDLTFCYEAGPTGYGLYRLLKSLGHECLVVAPSLVPKKAGDRVKTNRRDAVSLAKLLRAGELTAVWVPDERHEAMRDLSRARQAVKKDLQGKRQQISSLMLRLGRIYPGKTTWGPAHMNWLMAQKLEHREQRIAFEELLEGIRQESERVERLEKAIREAVPEWSLAEVVAALQAMRGIDLIAAVGVLAEIGDLSRFQNRRELMGYLGLVPSESSTGDKVKRGGITKAGNGRARRILVEAAWSYRYPPRVSREKQPKVEAAPRRVREIAWKAQTRLCGRFRSLERKGKRRTVVATAIARELSAFIWAINRELMAHRQA

SEQ ID NO: 326562 - protein, 344 aa, unidentified
MTNRCQLHVEVFAGLDVSAREISVARLRSKEKTPTVASFANNASGHKALLAYLLQGTEHVRVCLEASGNYSLDLALALHAHRQVEVSVVNPRRARRFAESLGERSKTDPVDARVLCEYAARMPWVTWRPPTARALRLRAITRAIESLGVMHTQEKNREHALKASQALPSLVIREMRRHQRYLENRMEQLRREARRLIVKAPELDRRFRLMVTVPGVAETSALQILGELVVLPDGLDARQWVAFSGLDPSQFTSGTSVEKKPRISRGGSRHLRRALYMPALVALRREPHLRAFYQRLVCRGKARLQAVVAVMRKLLLALFAMFRSNQTYDGSKLCSLELATNLAA

SEQ ID NO: 326563 - protein, 356 aa, unidentified
MANPCDLNKEVVMVTTIGIDPHKATHTAVAINETETILGELTIPADRSQTKTLLDWAQNLDGDGRVWAVEAAGGLGYLLSQQLVACGETVFDVPPVLASRVRLLGSGKSDKNDPNDARSVAIAALRQPGLAVVRREDHTQVLRMLAKRHLELTSLRTQAACRLHAVLTQLRPGGMRQRLSAKQSSRMLQVLRIVDPVGEQRRSMARTHLGDIRRLDRELKANKVLIRKAVVASNTTVTDVYGVGPVVAAFLIGYTGDPTRFASADHYAAYNGTAPVEYSSGGKTKHRLSMRGNRMLNHAIHMAAITQIRHDTPGRVYYHRKQAEGKTGKEALRALKRRISNVVYRQLLKDQQTKKS

SEQ ID NO: 326564 - protein, 326 aa, unidentified
MTTSPLGIDISKLKFDACLVRDRGKLRHHVFPNTAAGFAQLSAWLAKHQVERAHACLEATGAYGEALATHLHEAGHTVSVVNPATIKAYAQSRLSRAKTDKADATLIAQFCAERRPPAWQPLPAEVRDLQALVRRLDSLLEMRQMEANRLEVAATAAVTESLAGHIAFLDQEIAGAEKLIRSHIDSHPGLRGQRDLLMSIPGIGETTAAKLLGEIMDVKLYGGARQLAAFAGLAPRLHESGSSVRRKAHLSKTGAPRLRKALYFPAIAAIKYNPYVKDLSERLRARGKCPMQVIGAAMRKLIHIAYGVLKSGRPFDPEWLQKPKNA

SEQ ID NO: 326565 - protein, 326 aa, unidentified
MTHFIGIDVSKAKLDVALLMPNDKIRSKTVANSAEGWRTLWHWLLAHAHPQGKDLHVCMESTGAYHEAVATFLHDQAATVSVVNPMLVKRFAESTALRVKTDRIDAQTLARFARERRPAAWEAPSKPLRTLQALVGRLDALLEMRQMEFSRLDIAHESVQSSHREVIEELDRQIKEVRRLICQCVDDDPDLGRRRDLLETIPGLGERTIPQLLAYIGRPERFKSAKALSAYAGLVPWIRQSGSSLDRRGGTHPLGHAPLRRSLYFPAMVAGRFNPVVARFWNHLKAQNKPGKVIVVACMHKLLSIIFGVLTSGQPFKASKETLAVA

SEQ ID NO: 326566 - protein, 410 aa, unidentified
MQTMVERGCGLDVHQATVVACLLIVLKNGKVQKQVRTFGTTTRELGSLREWLLSEGCTHVAMESTGVYWKPIYAILEGAFEIVVANAQHVKKVPGRKTDVKDAEWIADLLCHGLLRSSFVPPKPIRELRDLTRYRRKLVDSQSAERNRLLKLLESANIKLASVASDVFGVSGLLMLQALVEGKATPHEMAELAKRQMRKKIPELELALEGRVEEHHRFLLRVQLRRLQAVEEDLGVLEHRIQEKLKPYAAELTLLDEIPGVDWKLAAGIIAEMGVDMNVFGNVSQLASWAGICPGNNESGGKRKSSRIPKGNVYLKTALVEAANAAAKAKGTYLRDKFYRLKARRGYKRAAVAVAHKILVAIYHMFSHQVCYNELGDLYLDKLNKHHLTRNLVHRLERLGYTVTLEQKAA

SEQ ID NO: 326567 - protein, 465 aa, unidentified
MTKRGQRQASAQRSSKVSRNLTMLNPNAAGIDVGASEHYVAVPAERDEQPVRCFGAFTEDLHRLAQWLRQCGVRTVAMESTGVYWIPLYQILEDYGFVVKLVNARHVKHVPGRKSDVQDCQWLQQLESFGLLSGSFRPEAKICILRSYMRQRQMLISNASRHIQQMQKALTQMNLKLHQVISDLSGQTGMRIVRAILQGERDRLKLAALKDPHIKSSLSTIAKSLEGDYRAEHLFALRQAVELYDYHQQKIAECDQEILKEMQSLESRAAPGSVPPPPLKRKGRSRHNLIPYDGRAELYRIMGVDLTRIDGLNEGTVQLILSELGLDVCKKWPTEGQFSSWLGLCPNNEISGGKVLRRGTRKVVNRVANALRMCAESLLNSKSALGAYARRMRAKRGSQIAIGATANKLARLIYRTLTYGQEYTDIGQEKYETKYRENVIKSLQKRARHLGFQLVDLHPVSVPVP

SEQ ID NO: 326568 - protein, 403 aa, unidentified
MQEATQHDAVDVFVGVDVDVGKGQHHAVALDRNGKRLYNKALPNDEVKLRALIAELKTHRRLLFVVDQPSTIGALPVAVARAEGVLVAYLPGLAMRRIADLHAGETKTDARDAAIIAEAARSMSHTLRSLRLADEQLAELTMLRGFDDDLAAQLTQTSNRIRGLLTQIHPALERVLGPRLDHPAVLDLLERYPSPSALAAANEKTLANRLTKLAPRMGKNWAAEIVQALNEQAGIVPGTQAAAIVMPRLAQQLAALRKQRDEIAAEVERLVLAHPFWPVLTSMPGVGVRTAARRLTEAAPKAFATAAHLAAYAGLAPVTRRSGSSIRGEHPSRRGNKVLKRALFLSAFAALRDPVSRAYSSCKIQQGKRHNQALIALARRRCDVLFAMLRDGTIYPPKSAPNA

SEQ ID NO: 326569 - protein, 348 aa, unidentified
MNIIGCDFHPSWQQICWLDKETGETGEKKLVHASGEAEKFYQQIPSPALIGMESTGNCQWFVEMVKAAGHEVWIGDAARIRASEVRQQKHDKRDAALLLQLLVEGRFPRIWTPSSEQRDLRQLLIHRNKLVRLRAQAKNGLQHLAMNQGLQKKRRLWSAAGQKLLRELPLAPWASRRREDLLSVMALLDQQIGSLDMAVKEAAEKDSNARLLMTQPGVGPVTSLAFVLTMGDVTRFGRGKQVASYLGLIPREYSSGGHQRLGSISKQGNRFMRMLLVEAAQVAVRCDPQMRQEYLHRCHAKPKGVAKVAAARKLAIRLYWMLRTQKRYPEIVSIESRSRVPLVVRHGG

SEQ ID NO: 326570 - protein, 370 aa, unidentified
MNKISAVNTQTIVVGVDVHKYSHTAVALDCFGSQIGLHEFTNDFLPEYVSWLDAFGNRNNLIVALEDVNGYGVHIVRKLADEGITMRYVPGILTERKRKQSIHREKSDPVDAMRVAKVILTNYEETLPAKESIANREERTTAITLDFFLNERRSLVAEKTILKNQLHAMLHQHMGDHYTDCFPKAFTPKAIGYYLKTVNPKAIHDSEASALVASIRRRLTRLKLLLGQIAEIDKAMKKAAKDSSPVAALKKNISGCGDVTACTLIAEVTSIKRFKTKSQFARYAGIAPVHKSSGNHKRLYTSPYGNRKVNRALHTIALYQISRVDDNNPGRIYFEKKLNEGKTKLWALRCLKRQLSNRVFQTLKHEYNTR

SEQ ID NO: 326571 - protein, 343 aa, unidentified
MQTVTTIGLDIAKSIFQVHGVDAAGQVIIRRQLKRRFVVAFFQKLPPCLIGIEACASSHHWSRELQALGHTVRLMPPAYVKPYVKRQKNDATDAEAICEAVTRANMRFVPTKTPEQQSGLVLHRTRHLFIRQLTAVTNAIRAHFAEFGIVAPVGRNGVEELLLVVTDTNDKRVPEVARVCLAALGAQLRRFKKQILEFDRLITVWHRSNEMSKRLDDIPGVGPVLATALVTSVADPKAFGSGRNFSAWIGLVPKQHSSGGKDRLGSISKQGDRYLRSLFVIGALAVIRYAKIHGTKHRPWLTALLARRPTKVAAIALANKIARMVWAMMAKGERYKEPVALAA

SEQ ID NO: 326572 - protein, 341 aa, unidentified
MKKNVVIGIDFSKLTLDVTFFNTNNPEEKQYQQFENTKKGCVQIIKWVKRTFKDCSDWLVCGEFTGIYSMTSAMVFNEKGIDLWLENPRQIKLSSGISREKNDKVDSNQIALYADRFMDRAKPYKTNNKALLKVRELVSYKDRLTKIRSQLSVPAKELKRVHKDWEEADYILDNSKEMIKQIDKQIKDIEHKMLFLLKSDPDLNRLYKLINSVVGVGMQTSIYLLIHTWGFTSFDTPRQLACYCGIAPFTKRSGTSIKGKSQVSHIANKKLKTLLHMCALNAIRYDPNIKAYYERKIQEGKHRMNVLNNVRNKLVYRIWAVVSSGQEYDKNYNLHKINQAA

SEQ ID NO: 326573 - protein, 353 aa, unidentified
MGVYIGVDLHVRTETVCWMDTSDGEVHERTLEHDRDDVRGFYAQVAAPAVVGVEASGYSLWFHQLIEATGHRLLVGNASAIRQFARRRQKNDQRDAQLLLDLLLHGDFPSVHVPSPASRDVLALLRYRHRLVRMRTMLRNGLQAVALSHQLRLGPRLFTVRGQQQFVALPLTGAYAAQRQHSLGLLESLGERVGAIEKELEARAQQDARVLRLRTHPGVGWLTGLAVVHALEPVGRFDRARRIAAYCGLDPKEHSSGEVQRFGHISKQGNRLLRFLLVEAAHAAVREDEELRRFYFRLESRRNSAIALVAVARKLVLRLYRMLREEIDYDEFRRRGRDARRARVGHSSVARQD

SEQ ID NO: 326574 - protein, 428 aa, unidentified
MNYNTQNAKIASITERTLIVGIDVGSETHYARAFDWRNYEYSKKPLEFRNTEAGFLTLKAWMEDIAERHGKTDVIPGMEPTGHYWFALGKFLQDSGMKPVHVNPHHVKKSKELDDNNPNKNDRKDPKTIAALVNEGRFSYPYIPTGIYAEIRSLSNLRFQTQEELTRIKNRIARWFSIYFPEYKDVYGDLKAVSGRMVLKAAPLPEDIVKLGAEGVNRIWRDAKLRGAGMKRAKTLVSAAEHSVGSKEAPGAARIELKNLLNDMDIYAARLEELLRSIEEKLKEIPYIDKLMAIKGIGLVTVSGFIAEVGDIGRFDNPKQLQKLAGYAIVANDSGKHNGESRISYRGRKRLRYVLYEAAISLIGKNAEFREIHEYYRSRKENPLKKMQSVVAVACKVIRVFYAILTKGVDYDAEKLMRDIRRPQIQAA

SEQ ID NO: 326575 - protein, 430 aa, unidentified
MTTDSAAVRATKGRRMKPWIEITHYAGFDWARDHHDVVIVDRQGQIVADFRIEHSLAGWQAFRDQVKLYPALAVAIETNQGTAVDQLLALDGAIYPVNPLSAKSYRERKAPSGHKTDRLVAEALRLDGQQWTALQPLDPLTQQLQLLCRDEIGLIEQRTALINQLQQALVEYYPAALEAFEDWTQPFCWDFILQFPTPEKLATAGRRRWEKFLHTQKLWRPETAAKRMAIFAPARQFCGSAAVTSAKSLLALSLAKLLNALQLQLDQYRQQIEALFNQHPDHDLFGSLPGAAQTLGPRLLGEIGGNPQRFEDTEALQCVAGTAPVSFQSGQIHRVHVRYQCNKVLRHTVHLWAQCCLRVCPWAEVYYRQKRAEGKSHACALRCLGQRLLKILWKMIQTRKTYDADLHARNQKQHGSWVLALMKPDAKASQ

SEQ ID NO: 326576 - protein, 360 aa, unidentified
MQSDKYVAMDVDSANIVAGVYDSQGKTVMQCCIRNEGKTIQEFLRLLPGKVHVTFEEGTQARWLYELIRPLVSEVIVCNPRENKLLKAGNKSDRIDVGKLGKLLRLGELRAVYQGPRAGEGLKQLVHSYEALVDDVTRVKNRLKALYRGRGINTKGETVYGAKQRQEWLGKLPTPELRTRAAALYEELDCVQRLRGEAAKVMCRAARKDEGYKSICSAPGLGAIRTAQVLATAITPHRFRGKRQFWPYCGLAVVTRSSSDYEWVDGGARRKRKPLQTRGLNQNHNRTMKAVFKGAAVSALQQHPEVQEYYQRLCTRGMRPEMAQLTVARKLAAIVLILWKKGERYDSQRLNQAAPGTDQQ

SEQ ID NO: 326577 - protein, 338 aa, unidentified
MKSFIPNSCSGSKPGFYKAGRESRMSETTRIVVGVDVAKETLEIATSAGEHWQCANDAKGHRALSERLIGAGCIVLEATGGYEQPLLARLGQAGLPAVAVNPRQVRQFARAVGRLAKTDRIDAEMLVRFGQHTQPEVRPLPDEQTRLLEALLTRRQQLLEMIQAERNRLEHALGAVRTDVRQHIAFLVKRLKAVDRDLDGQLRESPLWREKEKLLKSIPGVGRQMVLRVCAQLPELGSIPRKKVAALVGVAPYNCDSGTLRGQRHCWGGRAAVRDVLYMAALAAVRHNPPIRAFYERLQAAGKPKKVALVACMHKLLLVMNAIVRDNTAWNPQMQRVN

SEQ ID NO: 326578 - protein, 330 aa, unidentified
MKVTDIMGMDVSKNTLDCHLFVEQIGLAPVSNDLKGFKAIKKWLTKELKKNTEGLLVVMEYTGIYTYGIERFLEQHQIRYVKRPALDIKRSIGMVRGKSDKADARFISKYGWMRKEELVPMKPLSDTQVELQQLMSHRDKLVSDKSSYQSKLKELRSQMGNKVNKKMTASMEYVMEVLTEEIKETEKQITGLLKSEETLQTNYKLMCSITGIGFATAVHLLIATENFTRFSDVRKLICYCGVAPFERSSGSSIRGKVRVSQLANKKLKSLLTMAAISAIQHEPELKAKYEQKIKEGKAKMCVINIIRAKLLERIFAVIKRQSPYELRLAA

SEQ ID NO: 326579 - protein, 422 aa, unidentified
MLQNTEDAEEIIERVAALDIGKAELVACVRVPSPDRPGTRAQEITTHSTMTRSLLRLADRLRELGVTRVVMEATSDYWKPVFYLLEAVGLDPWLVNAGDVKHLPGRPKTDKLDAVWLCKVAERQMLRPSFVPPVPIRRLRDLTRYRIDLINTRTAEKNRVEKLLEDAQIKLGVVASDIFGVSGREMLAALLAGERDPKVLAQLARTRMRTKIGALEEAFTGHFTDHHAFLLGTMLARVDETSADIAAVEAKIEELVRPFAHAITQLDEVPGIGSTAAHIIIAEIGLDMSRFATAAHLCSWARFAPLISESAGKRKGRSSTGHGNPYLARALGEAAVAAGKTDTFLGERYRRIARRRGKKKAIVAVGRSILVIVWHLLSDPQARFHDLGPQFYDTRTGPDRKRRNHVRQLEALGYKVTLEPAA

SEQ ID NO: 326580 - protein, 338 aa, unidentified
MNITTLGVDLAKNVFQLHGVDSTGKVAVTKRVSRKKLASYIAKLPPCLIGMEACGSANYWARKFQNFGHEVKLMSPQFVKPYVKTNKNDSNDAEAICEAVTRPNMRFVPIKSIAQQDIQAVHRIRSQLIQARTAKCNQIRGLLAEYGIIIPQQIHNVRAKLPEILEDAENELSALMRRELNRIYHDLVELDKRIKEQDQSIQEIFDSNEDCQRIAEIEGIGLITATAIVSAIGNPESFKNGREFSAWLGLVPRQSSSGNKQQLLGISKRGDRYIRSLLVHGARSVVARADGKDDKRSTWISSIKHRRGSNKACVALANKNARIVWAVLRNCEAYKKAA

SEQ ID NO: 326581 - protein, 415 aa, unidentified
MQDLLEICCGLDVHKETVVACLLKGSVNDDKPQKTIRTFSTLLSGLEELKAWLESENCRYVAMESTGVYWQPVYNILESALEGTMVVIVANARHMKNVPGKKTDMKDAEWIATLLRAGLLNGSFIPPQTVRELRDLTRYRKSIIEELSSQKNRIEKYLQSCGFKLSNFLTDIFGVSGRAIINHIAEHGSITAEEVESYVKTRARNKLQEIKLSVNGRMNRHQREFLRLLLKHLDETYEHLGEIEKNINSELEKFKRQIEQLDSIPGIDKTAAAAIIAEIGIDMSKFKTAEHICSWAGLSPGNNESAGKKKSTRVTKGNTYIKRILCEVAWSLTRVRDSYLATWYWKVKQRRGTKKAIVALARKLLVIIYNMLKNGTDYDEKVFYEVRKKQETIRVKRLINEAKKLGLEVIVPQSV

SEQ ID NO: 326582 - protein, 345 aa, unidentified
MPIVGGLDIHRKQITFDYLDTVTGEVRRGQVVPADRAHLRAWLARFAGRDDVAFAVEGCTGWRYVTGELAAAGIVAHVGEPADTAAARGRKRHAKTDKTDSAHLRRLLAEGRLAECWIPPAQILEYRALLETYHDLRAEHTAWVQRIHAVFFHQGAPALGEGALRTEQGLAALRAAAAAHLSPGGQLQVATALDMLAAIEVRMEVLRTQLRDAARHLTGAKVLAARLYGVGPITALALTCWLAGEGRFSSSRKAVRFTGLDITVWSSDRKGPPGRLSRQGPPMLRWAVYEAGKTHARAAAPDHAYYATVKDRKNSKRAALSEARKIVRQACHILTELGDDALTAA

SEQ ID NO: 326583 - protein, 314 aa, unidentified
MSTEYFVGIDVSKDTLDVCVYPTQDTFRVPNSPDGVDELIKRLKPIQPRLVVFEATGGYETLAVSSLSAAGLPVVVVNPRQIRDFAKSIGRLAKTDVIDAGVIAHFASAVRPELRPLKDTASQELTERVTRRRQIVDMIVAETNRLKAATRRNQRDIQAHIRWLQKRQAQIDDEIKRNIKNSPLWRTTDEILQSAPGVGIGTSSMLISGVAELGQLNNKKISCLIGVAPLNRDSGRYKGRRTIWGGRAQVRAVLYMSALSAIQYNPVIRQFYQRLRDAGKCFKVAIVACMRKLLIILNAMVRNQTKWRDCENNP

SEQ ID NO: 326584 - protein, 373 aa, unidentified
MPKYSTAFGMDVHLRSTTVCALDADTGEAVTRRFPGNPWGEIAGWMDGFPGPSLAAYESGYLGFAPQRELAGLGVECVVAAVSKIPRSAADSASKNDRNDAARMAKAILAHDISPVWVPSPEVEGIRDLAGAYDGATARLATAKQRLLAFLAKRGFVYGGTTPAGNPRKYWTYDFLRWLDKVRPEDDGGVRTLAALRNEVEAAAEARADLLSEYRAAVDASPIAAEVAALQSIKGCAFALAAAFSAEVGDFTRFRSGRQVTAYFGLAPSQRSSGDSVRLGGISGAGNALVRKLAVESSWCYAAARHQPKLMPRDTGVPLEIRMHGRKGSERLLRRREEMLARGMPAAKANAATAAELVRWLWALGMMCREGAE

SEQ ID NO: 326585 - protein, 346 aa, unidentified
MKDITVLGIDLAKNVFQLHGADSHGRKLFSKQVTRQGLFKFVGNLKPCVIAMEACGGSHHFARLFRDYGHEVRLMSPQFVKPYVKGNKNDSADAEAIAEAVTRPTMRYVGIKEVEDQDIQGLHRYRERLVKNRTQLMNQIRGLLQEYGIVVRQGKSHLLKTLVALRENEVNKELTPMNKELFWDAYEELMDLDQRIEKYTVKLEILSKKDERSQDLLTIPGIGSITATAILAAVGDPHVFKSGRELSAYFGLTPKHQGSGQKTRILGISKRGDRYVRSLLIHGARSLVKVVGEKTDPRSQWIKQLIDRCGINKAVVAVANKNVRIVWALLTKQMCYQENYGLNEVA

SEQ ID NO: 326586 - protein, 424 aa, unidentified
MVQDEDSRLKEFRQLKSEIRESRDYLVVGIDVAKERHYAFFGTAAGKTLLRKLVFDNTDEGFKKLLLHAALLKARHVLGKAVFGLEPTGDYHKPLGEYLITHGHTVVLVGGSAVKRNRELLNGRWDRNDTKDAANVADLIIQGKCLFYEYPSPLVRELRSLLSWKRKLKKLEHASMVRLRNHLVAQYFPELDPYYRCSEGPAIVRWCFDPHEIASLPFSAFARLVSSRSGGEQQKMRLSEIHTKAARSIGCALTPAASFEAEHLLTTIAHVKTMITEIDLAIETVCKRFPEYPCLLSIPGFGPDVSAKVLGAIGNPHRFDNGRQVLRTAGLDLSGDKSGKRDATPMVISKRGKADLRYALYRAALVASTGNHRFIQYCTSKLAGREKEKGIGTKMRVKLAAKLLIIAWTLMKKREVFNPGCIKS

SEQ ID NO: 326587 - protein, 343 aa, unidentified
MVVVGIDIGKDVFFAHLRTAEGGPPFTPCALHGVANTVSGCAQLLEWAASHGHAPSDFQVVMEATGVYWETCALTLHQAGCQVSVINPAQIKLFARSVLRRGKTDTMDAEIIARYGVVMQPSPWQPPLASTEELKVLVRERETLQHTLTQERNRLHALQHKARSITTVVALVQQRIDLLKEQITALEGAMHALVALNPALSEPLNLLLTVPGYGFVTAVSVLAETQSFHGLQSSRQLFAYAGIAPAPHQSGGMTGPAHISKTGNAHLRRTAYLAAVGAMKCKGPVGQYYRQLRARGKPAKVALVALGRKLLGIGFAVVTSGVPYDEAFESKRKTAAQTQQVPC

SEQ ID NO: 326588 - protein, 352 aa, unidentified
MGVDTHKDIHVASAKNALGRKVATTQIPTTPAGYTQLLDWARRLGPIDAFGIEGTGSYGAGLTRHLRAHGQRVIEVNRPDRAARRRHGKSDPVDAEAAARTVQAGDATGTPKTGDGGVEMIRTLRIARSSAVKARTQASNTLQALLVTAPAALREQFRGLSTTKLVHAATTATATGATADRELPHTPTDAVLLALASLAGRHLALTAEITTLDKHLDTLTTDTAPDLIALFGVGPETAGALLIAAGDNPTRLHTEAAFAMLCAAAPIEASSGKTVRHRLNRGGNRQANAALYRIVLVRLRYHQPTRDYMTRRTTEGKTKKEIIRCLKRYVAREVYTALTKINNSGQPTTQTT

SEQ ID NO: 326589 - protein, 402 aa, unidentified
MNPVVGLDISKEESHGQAFLARGKPFRGTFHFEHTRDGLANLHQVLKDVETASKLRPLLILEATGHYQSPVVQFLEEHHYIYIIINPLISNRLRKSQLRKVKTDAADAYLLGELYYKEEFEPFKKRGVQLLNLRYLTRQYESLSKMCVQTKLQFQAVLDQVFPAYKGVFGAMYSRISLRFLSKFPTSYSVLQTDEITLKAKMKELLSSKRGRSEGWINQRIQRLLDAAKQNPFQQTMYASHLINLKVLITLILQYQEHLTELEQNIDALAEEIEEYELIQSIPGIGHKIAATILSEIGEVDRFDHPKKLVAFAGIDPSVFASGKFTATRNRITKRGSRQLRYALVMAVQCGLIRSRNMRLKAFYDRKRAEGKPHKVALIACANKLIHWLYAILKNKKEFRPI

SEQ ID NO: 326590 - protein, 350 aa, unidentified
MTIKHYIGFDVHKKTISYCVKAADGNIHEEGILRAIPMVLREWAGKRQEPWHGAMEATLFSGWVYDALKPFASALEIGNPSMMKAISAAKKKNDKLDARKIADLVRCNLLPACYVAPQEMRELRRLLRYRNVVVAQAVRMKNKMSGLLMEVGAEYSKQRLHSKKYFSELLDQLEEVPESVKDLLRLSRGSVEMFETMQRQLLNRLQKDPLLVKRVQLLRSIGGVGEVTALTWALEICDPQRFHCIADAVSYCGLSSALVSSAGKQQRGPISKQRNAHLQTVLIEAAKLAPRWNRQLAELHERERKRGNRNRATLAVARKLVAYLLAVDKSGQAFKVRNPPPAEPGVDKVA

SEQ ID NO: 326591 - protein, 380 aa, unidentified
MSKIRFIGLDVQADTIAVAVAEPDGEVRSLGIIPNRLESIRKLVAKLAPAKQQLKACYEAGPTGYVLYWQLTALGVACEVVAPSLVPVKPGDRVKTDRRDATKLARSYRAGDLTPVWVPDAAHEALRDLVRAREDARQDQHRARHRLSKFLLRHGRRPPEDVKKHWTLKYMTWIQEHVHFDQPALEVTLLDYVREVEHMAERILRLEKAITEAIQQAPPEIRAVVQALQALRGVAQLTAVTVVAELGSLSRFQNPRQLMGYSGLVSSEYSSGNRVQRGGITKTGNAHLRRVIIESAWAYQYRPWIGGFLLRRQRDLQLTAEVKEIAWKAQWRLHTRYKKLAAAGQKKPQIVTAVGRELLGFIWAIAVQTEVNFTPDRKAA

SEQ ID NO: 326592 - protein, 471 aa, unidentified
MKKTKVARERRREGGGTALEAIRPKVAGVDIGSEEHWVCGPECDDGERQVRVFRATTAQLQEMAAWLIEQGVESVAMESTYLYWIPVYEVLEAAGLQVMLVNARMLHNVPGRKTDLQDCQWLQRLHSCGLLRGSFRPRDAICRLRALQRQRANLVETRSRFVQWMQKALDQMNVRVHRAVSDLTGHTGMAIVRAIVGGERDPLRLAALRDKACKKSLETIAEHLAGNWRDEHIYNLSMSLRLFDETERAIAEYDQRLLREIEDLQPDDRRNEAVPAHPNAGKQRVICKRGDQRLRQALWRFADVDLTTIDGISAHSAQVILTEVGADLSAFPSENHFVSWLRLCPRTAISGGKPLKKRRNGTGASRVAAALRMAAVSIQRSKTALGAAYRRTARYKGAAVAVFSIARKLAHYVFRLLRHGRAYFDIGEAQYEARFRQRQLHALTATAKNLGFALVAAQSPPTDVPANLVAG

SEQ ID NO: 326593 - protein, 380 aa, unidentified
MPIWLGDEMDASRIFGIDVPYVNELTNVETGGVRCINLLSLVLIWQKSVFQLAMADKHYRITGSKRLSRTQFYQFFVQHAPAKVVMETCGTAHYWARTLIAMGHEVVLLPAQYVKPYVRRNKTDRNDAMALIEAVRNPALKGVPVKSEHQQALQSLHRLRAQCMQTRNARINALRGILREFGVVVPMGPRAAVKTALAALEQLPALLKPSLCAVLEELHSLERRMKEIEAQLKQEVKADPVMQQFMHISGVGLLTATATRATVQTPKQFKNGRQFGAWLGLTPREYSSGNQRYLGRISKRGDTYLRTLFVHGARAVMVRIKIRQRSGQPLTYLQAWAAQLEQRVGHNKATVALANKMARILWATWMHQRDFDGDYAKAIH

SEQ ID NO: 326594 - protein, 369 aa, unidentified
MNATTVKMSSASLVGVDVAKSVFQLAVADGSWKVVQTHRLTRSQFERWFVNREVGLVVMEACGSAHHWARWLNGLGIEVLLLPARYVRAYVKRNKTDAADAAALLEAARASDISPVRVKSVEQQALQGLHRTRSLWMGTRTSRINALRGFCREFGIAIAQGSRLGVEQISRVLADPHSAVPELIRGTMKLLVEEIRLLEARIAQLERELSVLAKQSPACTILLSIPGVGLLTATAMTAATSGSVSHYKSSRHFSSWFGLTPREHSSGNTRHLGRISKQGDRYLRMLLTHGARSVLRAATVSKQAGRPLDELRAWAVAVQARTNHNKATCALANKLARICYATLRDGTPYGQPAPRQRHKIERTAFAVAA

SEQ ID NO: 326595 - protein, 428 aa, unidentified
MKFKQSDAQNQRIERITTSHLVVGIDMAKETHVAQATNFRGIVLSNRHLAFKNTAEGFEKLKRWIESLQKKHRLKSFIVGMEPTGHYWNNLANWLVDLGIHVVLVNPATTKRNKENRDNCQSKSDPKDALVIADVVSRGYYYEYSRQAESFQRLKVMMSDREFWVTNSVRLQNRIIRWLDIRFPEYASVFKKWTGIRSLATLKEFPSPLDLRGLSTTEIITGWRKHMQRAGGSSGIQIAAELLSKANRSVGDVTSLHEAKQDLQRLIEEYERIESHLEQIEKDVAFLLEDIPIAGQMRSVKGLGTIYIAAILSGAGDLTQYAHGRQLLRKAGLNLAESMSGKRKGEVILSKRGSAVLRKYMYLATLTLTGVNPIFRQLHANNLKVKHMSKQKSILKLLGKLARILIGMVHSGESFTPEKTVHTSVQAA

SEQ ID NO: 326596 - protein, 349 aa, unidentified
MTEQRRSYADECVYVGVDVHKETYTVTCVCHKQIVKTATVQAEPAGLAASLPRGFPGATLYSVYEAGFSAFVLHRVLTKAGLSNIVVNPASIAVAANDKVKTDRRDSKKLAIDLADGRLRGIYVPTEAEELARHLPRTRAQIVEHRATIARQVKAKLHQFGLIAPSSRRMISNRYLREMATWSLPPELSVSLTLLAEQWRFATRQLIEMRRLLREQAQAQQEIEKVYRSVPGIGAVAARTLATELGDMTRFANERALFSYTGLTPSEYASGASVRRGPISRQGSSRVRHVLVEIAWRAMPRDAVLKEIFDRLAATRGKKRAIVAIARRLTGRMRACFRQGTTYAVGTYA

SEQ ID NO: 326597 - protein, 340 aa, unidentified
MAANKQFFIGIDVSKPWFDASVMVIENHIKQPIITRRFENTKDGIKVFEKWLKTLKVTFDNNTLLVMENTGYYHRLIWSFCSRTNLPIHIGNAAHIKWSFGIARGKNDTIDSIRLCQYACKEADILKATPPLDSDLLLLKDLITARAKLVLQFNSIKAHIKELKSVSDTAIKMLMEKAHKDAIAGIKKSIKIIEDQIHKIIAANQDIYKNYRLLITVPAIGHFTAAYMICCTNNFAGKITGKQLACYAGVVPFEHSSGISVKGKQRVHKMANKDLKKMLHLCAMVAIQFYPEFTTYYKRKKAEGKHSISILNAIRNKLVLRAVAVVNNQRPYVDNVNKAA

SEQ ID NO: 326598 - protein, 350 aa, unidentified
MKHVAIDLGGRESQICVRSSDGQILEEDRRSTLGLQKYLAALEPAKVVLETCAEAFMVAEWARMAGHEVTVVPASLVRALGVGSRGIKNDVRDSRHLSEASCRMQRLPSVHVPCLRSRELKSLCTLRESLVTARTKLMNSARGWLRGQAVGRIKAGSADTFTRRLHSLWKEKTGGTLPAALLRQTTAIDVLTEQMLLAEKELQEFAKADPVCRRLLTVPGVGALVAVRYFCAVDDVTRFPSAHAVQSYLGLTPGEDASSDKKRLTGITKAGPARVRWVLQQAAWSAWRFRPNDPIVQWTERVAQRRGRRVAATALARKLAGIMFAIWRDGTSYRATRSPADSVVGTSVAA

SEQ ID NO: 326599 - protein, 430 aa, unidentified
MSSANITNEKPIAAFVGIDWADQKHDIVLCAATSKAQFNHRSIGSDPDALAEWALEMQGRFGSQGRILICLEQSRGALIHFLMGYECFELYPINPKQLSSYRAAFRPSGAKDDPVDGKLLCQLIALHHQSLRPWRPDDEATRKLALLCEKRRKAVDTRTALSNQLKSELKLFFPLALSILDNDLTSALAADFLLAWPNFDSLKKASVNKVRKFFYAHQSRSEPKIQERLKCIEAARPLTRDSAIIETSSIAVRMLAQQLKNLVPFIALYDQLISELFDSHPDSALFNNLPGAGKQLAPRLLTAFGSDRERFQCLLEALTFFGLAPVTEQSGKSKWVHFRWACPKFLRQSFHEFAAQSVRSSPWAASFYQHQRARGKGHHAAVRALAYKWTRILYRCWKTRQPYNPELYLTALLQRGSPYASALNNSTQKS

SEQ ID NO: 326600 - protein, 408 aa, unidentified
MQVTFGIDVSKSNSTVCELIGESKNELTITNDRPGFIQLLHELAAFSKHPQIIFEATGVYSRRLQAFLEDYGYEYVVLNPLKAKKEMNMGLRYNKTDKTDAYHLALIQRLYRHPVNQSESQTYKQLNALSRFYDQLTSDLVIAKNRLHQALQSTFPEIENLFSIARGKNYWQIVARYPHCDLVRKDDKKQIINWLMKLKGIAFNHAQRTTDKLIELAHLAYPVVSCSDIEVQQAQYYARRLLNLSNQRQRIITKMVKLAKTLPNHDLENLESIPGFAQTTAVRVLAELGNLRRFSNPNKINAFIGIDPGRYQSGEMDSNLSITKHGNAVARKLLYRAIGQIDNAAKTNPCHIADYYESKKLSSQTKGFKKIAIASIHKLIRTIYALIINDQPYDYNVATHNQKDFSRN

SEQ ID NO: 326601 - protein, 454 aa, unidentified
MGQAKSKKRGRSKRLSAINSNAAGIDVGSQFHVVAVPTDRDDEPVRTFQSFTGDLHRLADWLVACRIDTVVMESTGVYWIPLYEILAARGLRVLVANARDVKHVPGRKTDVNDAQWLQQLHAYGLLRGSFHPPADIAALRAFLRQRERLLDYAASHIQHMQKALIQMNLQLHHVVSDITGKTGMRIIRAILDGVHDPATLAAHRDVRCKASMDTIAQALEGNYRPEHLFALSQAVALYDTYQEHVADCDERLEALLVQLRAPEPPQAPLPAPRHKTRQPNALSFDVRAALYAMIGVDLTQIHGIGPSLALKLVSECGTNMTKWPTAKHFTSWLCLSPGNKVSGGKVLSSRTRRSKSRTSALLRLAAVNVGKTDSALGAFYRRLAARVGKAKAVTATARKLAILFYNTLRYGVDYSDPGASYYEERHRTRVLHNLERRAKQLGYTLEPAQVAEVS

SEQ ID NO: 326602 - protein, 350 aa, unidentified
MQIIGVDLHTRQQTVAMLNVETGEVIEKTLRHEGDSVREFYSTLPRPTRVGIEATGSMQWFLELMEELGIDCEVGHPAKIRAAEPRKQKHDRRDAALVMRLLVENRFPSIWMPSREQRDVRSLILYRHQWVRIRTRVQNALQAIALSHGLRRGSSLWSEEGQHAIASLSLTRYTAERRTALQSLYRHLEEQIEDLNQKVEELAWQRPQARRLMTHPGVGPITALATETFLGEPKRFVDGKAVASYVGLIPSEHSSGGRQRLGRLSKQGNPLLRFLWCEAVGHAVRKDAELQRFYQHKLVQKGLGKAKVAAARKLGIRLWILLRDQIDYQEFCRRGQLRQKHGGAHAGMPA

SEQ ID NO: 326603 - protein, 372 aa, unidentified
MHPEYPTRRQDEGRSFTLLFKHKLLVMRRIVKQVVGIDVAQSELVVYLGRMYDDWSPELYASKSFANTAKGFEGLVRWVNKLTTVETAIRYVMEATGVYHESLAYYLDEKGCEVSIVLPNKISNYIRTLKTKTITDKTSATAITLFGLEKKIDRWCRPKGIFKKLRQLTREREQLVVERTMLKNQLHAESSEAEPGKKAIARMKTRIALLDAQEKEIMSEVKQLTQTDREMKELLILICTLPGVGLLTATTILAETNGFELIRSKRQLTSYAGLDVVEKQSGTSVKGKARISKKGNRYLRKALHLPSLSAIRHDERFKAMFCRLVAKHGIKMKAAVAVQRRLLEMTFTLYKNRKPYDKNHQKKLESSIEATP

SEQ ID NO: 326604 - protein, 450 aa, unidentified
MQVWCGIDWAENHHDVSVVDGDGRQQVKLRIEDTAAGFSVLMGMLAEQQALCDEPITVAIETAKGLLPTALRAAGVALVAINPLAVSRYRDRHSPARAKSDAGDAFVLANILRTDPHSHRPLPVDSELAQSIHVLARAHQDAVWDRMQIANKLRSVLREYYPTFLAAVDDLASKEARAVLHLAPSPAQGQLVRKSSLTAALRRGGRTRGIPAAVDSIHTALHGDQLRQPASVESAMAEHATALLHTLDTAVANVARLEEELTAAFDQHPDAEIITSFPGLGTVLGARILAEIGDDRNRFTTARGLKAFAGTAPVTRASGMKTVVTRRVVRNKRLGQAAYLWALPMIAHSPAAHAHFTHRRDRGDSYSAAARNLTNRGMGMLHHCLTTRQHYDETKAFPNRLRHPATSDKPLAQQAFQETEAHSNHQRSNDQAKPSATSIAPPAGGVPARV

SEQ ID NO: 326605 - protein, 373 aa, unidentified
MRLIALDVHQDNIVTAVLDYGSQNRPLLSRRYGLEEASLAEFTRELGKEDIVMMESTFNAFWLYHHIAPLVRSCHVLNVNAVHLRGNKTDKLDARKLLELLSTFVVTDTLDRMPTVFVPPENVTKLRSLFSSYRLLKKTETQLRNRIHAIYRQNGVVIDRKALGSPKYRATLLKDHPLQDYWLEQVETFVETLERVVPQHVRLKKAILSLAVSLFPKEIQLLTTIPGFSPFTAAAFMSDVADINRFASAKKLCAYLRTAPSIKSSNKTRHLGPVSKCGRSLTVTLLTQSITHLKTASPSYADFYNRLRTGKSAGKCPIAPIRKTLTTAYYMLRRGTEFNHKNVVAYQRKHRALKAFMKDYRPPAGGKEEVQTA

SEQ ID NO: 326606 - protein, 394 aa, unidentified
MPVTREGPDLYGLVTVLSVHSVPAKPFVHDKPEAGMAIMEGQARRIVGGVDTHKDLHVAAVVDDQDRVLSTNSFATTRQGYRQMLAWMRSFGQVQRIGIESTGSYGAGLLRFMQQAKVPVLEVTTPDKQDRRRRGKNDDLDAQNAAHAAFAGQRTVTPRSRDGMIESLRILMACRKTAVSARRVALQMIHNTIVCAPDGLRDQLRSLTRMQLVRTLASWRPDLTAYRDVDSAYRIGLRSLARRYLELHDEIADLDAMIAAIVDELAPNLVARNSIGHIGAAQLLLTAGDNPERLRSEASFASLCGVSPVPASSGKTVRHRLNRGGDRAANSALHIIAIGRLRTDHRTKDYVARRLAEGHSKLDAIRALKRYLAREVFTLITQRRREINATRIAA

SEQ ID NO: 326607 - protein, 363 aa, unidentified
MSDGICFAGLDVHARKTAAAAVQLGSGEVWKAQLPGSSEAAIEWLKALPGQVRAVYEAGPTGFALARTARAAGVELMVCAPGAIPRQPGDRIKTDTRDALKLARLHAAGQLRPVVVPAPELEALRDLVRAREDLRGDLMRARHRIGKLLLRHGLIWAGPGETWATGHLRWLSKVRFEQPLLEVVFGEYLAHHEVLLARRERLDGLILEQSTQGPWAPTVARLRCLRGIDTLTAVGLVAEIGEIAVFAHPKYLASYLGLVPSEHSSGSKRRQGSITKAGSAHARRLLVEAAWHYRRAPSVSLTLKRRQKGQPPAAIEVAWRAQLRLHRRWAHLDTARAKKRTTVAVAIARELACFVWEIAQQAD

SEQ ID NO: 326608 - protein, 361 aa, unidentified
MPTIADAGRLVTGGVDTHAGMHVAGVTDQVGRVMGTREFPATTEGYAAALAWMRGHGELAKVGVEGTGSYGAGLARYLAAEGIEVAEVMRPNRQARRRRGKSDAADAIAAALAALNGEASGQPKSGDGAVESIRALQVARRGAVKARTQAGNQLRGLIITAPQALREKLAGLSAPEQIKLAARFRPGDLTSPAEAVKAAMATVARRHQALAAEIAQLDTALETLVAHAAPAGFRDRTGVGTRVAATRLGTVGDNPARLRTEASFAALCGASPVDASSGKQRRHRLNRGGDRQANSALWRIVFTRMATDPRTQAYMIRRTTEGKTTREIVRCLKRYVAREVYKTLAGPPPARPATPRISMIT

SEQ ID NO: 326609 - protein, 337 aa, unidentified
MKYSGIDLHSNNSVITVIDETDRVMAEKRLPNDLTKILVFLAPWKCELAGVVIESTFNWYWLVDGLQAAGFTVHLAHTTAVRQYDGLKHSGDETDARYLAQLLRLGILPTGTILPPEARSVRDLARKRMQLVRSRTSHLLAIENITARHFGTRISSSQVLRLTAEAIDQMRLPAEVALAMQANLAVVTTLSTQIELLEKRLAEKVRPRAEYALLTSVPGIGQILASVILLEIGSIERFASAGNFASYARCVDSQHTSNGRKKGEGNTRNGNRYLSWAFVEAANFAQRYCAEAKRFYERKKARTNPIVARKALAHKLARACFHILKEHKPFDVTRCFT

SEQ ID NO: 326610 - protein, 312 aa, unidentified
MERTFVGIDIAKDQVDVHVHPTDERFQLSRDDAGLAGLVARLQPLGPRLVVLEATGGYEIPVAAVLASAGVPVAVVNPRQIRDYARATGQLAKTDALDARLMARFAEAVQPEVRPLPTPEAQALGALVTRRRQLVDMLGAERNRHHQARDLRLQRRIATHIRWLTKALAEIEADLATRIRSSPIWRERDNLLHSVPGVGDITAYTLIADLPELGHLDRRKIAALVGVAPFNRESGHWRGRRMIAGGRPAVRSVLYMATLTAVRFNPALAHFYQRLVAAGRPKKVALTAAMRKLLTILNAMLRDQRPWQPESA

SEQ ID NO: 326611 - protein, 419 aa, unidentified
MAKLKIVYPVCCGMDVHRDFVIACIASTDAKGVTDYKSKRFSTYSGGLRDLRDWLSSNNCRDVCMESTGKYWFPVHNILEATCHVVVSHPKFVKAIKGKKTDKKDAQWIADLFKHDLVRGSFIPPEDIRQLRDLCRYWVKLTSYMTGEKNRAQNCLTVSNLKLDSVFCDVFGKSASAIVNHMLEHPGESFDVAPFVHGRCKTPVSVIQEAVDGNFNPYQADKLKIIREHMSNIEELKEMLKTLIFKLAEPYQSQISLLLTVPGIADPMTAIRIISEIGADMTVFESSKHCCSWAGLTPQNNESAGKKKTTRIGKAGQYIKPLLVQCACASSRSDKYPEIKGKFQQLKKRRGGKKARVAIARRLLTAIYQMLLNGEVYSPYVAPAIASAPKERVLTPEQGLAMLRSQGYVISDNDPITAA

SEQ ID NO: 326612 - protein, 357 aa, unidentified
MTTMTHPQRGAARVFGGVDTHKDVHVAAALDELGRLLGTGSFSTTMEGYRQLWRWLRGWGEVVAVGVEGTGSWGAGLARHLTSAGVEVLEVMRPNRQHRRRYGKSDEADAIGAARAVLAGEAVGTPKAGTGQVEAIRLLRIARRSAMKARTQAGNQIHAVIDTAPDQLRRRFAGRPTADIVAETALFRRRHAPTTPPEAARLSLRTLARRWEYLDDELAALDAQLDELTAAVAPTLRAINGVGTQVATAVLAAAGDNPDRLRSSASFAALCGVSPIDASSGRQQHHRLNRYGDRHANWALHVVIISRLRWHKPTQAYMARRLAEGRTHKMIVRCLIGGVWGARRLVEVPCLSVNAGR

SEQ ID NO: 326613 - protein, 337 aa, unidentified
MNRNVVGLDIAKQVFHLFMMLDGKAVKRKLKRSELLTFIAQLPPSLIALEACGGAHHWARSFKQLGHEVELLNARYVKAFVVGNKNDFNDAEAIFTAARQPNKRTVVIKNMEQQDLTMVHGIRQGKVEERTALINQIRGHLAERGMVLPPSANQVRKHLPSILEDAENQLSALSRSLFAEQYQALVAMDEAIKAIDRQIDALCRQNALSKRLIAIPGVGPLTATLAAADVGDGKGYESSRDYAASLGVVPRQHSSGDRQVLLGISKRGNRRLRTLLIHGARAVLRYCGDKSDPLSRWLQALIERRGFNKAAVALANKNARIIWALATREDEYVAQVV

SEQ ID NO: 326614 - protein, 450 aa, unidentified
MSPLALDVVTKTDKTPVLGRMLSKYVGRKTSSIENGITKARNHSRLRGNIMRVVFGIDVSKASSEVAILVNGERVHGYTMPNDIIGFSRLMEDLKTVSNPEIIFEATGVYSRRLQAFLEENSYDYTRLNPLEAKKQLDGLRVRKTDKIDAEKLASSQFVLNRKPTYVQEEVYQNLHDLSRFYQNLTEDIVRTKNRLHKVLQVAFPEIENLLSTPTGEQYWNLVSIFPTKHWVLELSEVELKEAIRNSTSKRISENRVGNLTEKLVGLAKQSYAGISKTSPMIEEVKYNAQELIRLTNRREQVLQQLIALAEPLPEYKILLSIPGIAETTATSIIGELGDIRRFKSANQINAFIGIDLKHYESGDFLGQEHITKRGNPYARKILYKCIHNIASASHTNPCHIADFYEKRKRQSQITSTKPHTIASIHRLIRTMYYLIMHNKLYDYSLAQSH

SEQ ID NO: 326615 - protein, 321 aa, unidentified
MQEPTLFIGVDVSKAELVVSLGPEHRPRSVGNDATCIANWLAEVPPGALIAMESTGRYHGLLAHLASQAGLTVYVLNARDVYFYARALGTRAKTDGVDAGVIARYLAEHHEHLHPWQPASSVQQRLQDLLTRRAQLATQRSALKQIVSGVDVRDIDASGVYDALDGLLGAMDEKVQELIASDARLRSGCQRLRTITGIGAQTSALLATLFSRFEFANADALVAYCGLDPRPNDSGTKRGRRRLSKKGPSPLRRQIYLVGFSASHSKALKLLYESIRAKGFASTEAFVILGRKLLRVAFALWKGDGAFDPARLMPTNDLQKT

SEQ ID NO: 326616 - protein, 435 aa, unidentified
MRCERGSVDVVLPARSRSESTGKGTGMRIIGLDIHRAFAEAVAWEDGKLNRLGRVDMRRDLLSAFAARLSPEDVVVVEATGNAASVVAVIAPHVKKVVIANPMQVRIIAHAKIKTDTIDARVLAQLYAGGFLPEVWIPDEPTQALRRQVTRRNQIVRQRSRLKNIIQSILHAHLIPSCPHQDLCGPRGRDWLAVQVVPEDERLAIERHLREFDRLGEDLKVIERDLARSALADDGVKRLMTIPGVDMVVALAMAAAIGEATRFDKPQKLVSYLGLNPSVRQSGPGPAYHGRITKRGRGHARGMLVEAAWAAARAPGPLRAFFLRVRARRGQHVAAVATARKLTIIIWHLLIKGESYTWARPSLHAKKLRDLELKAGHKAARGQKGEAHAYNVKSHRDEERRWVEQAETAYTRFVAGWNRRGPKKVRTGAAKEERL

SEQ ID NO: 326617 - protein, 455 aa, unidentified
MSSKKGFSEFPVVHPNAAGIDIGATFHVVAVSPNCDSTPVRQFQSFTTDLHKLSQWLREVGVKSVAMESTGIYWIPVFEILEADGFEVILVNAREVKQVPGRKTDYNDAQWLQKLHQFGLLRASFRPSEHIASLRAYLRHRERLIEYSAAHIQHMQKALMQMNLQLHHVVSDITGVTGMKIIRDIINGERCAARLATHRDIRCLKSEETIAAALTGNYRDEHIFALKQAVELYDFYQERISECDKQLEQAMAKLNQKKVTPDVPLPKARHRTKQHNEPDFAVRSALYTLTGLDLTQINGLGPYTALRLIGECGDDMSKWPTEKHFVSWLSLSPGNKVSGGKILSSKTRRTKNRATTLLRIAAVNVGKTETALGAFYRRLAGRVGKAKAVTATARKLAVLFYSIMKHGKTYVEPGALYYETQYRNRVLSNLKKRAKRLGYELIANPTPKTLCAEVS

SEQ ID NO: 326618 - protein, 273 aa, unidentified
MHHSTTVGVDLAKNVIQVSVVSARGKELTNRSFTRRKFAEFLGKQKPALVAFEACATAHHWARTAKRHGHTARIIPAKAVAPFRQGHKTDSNDALAVAEAARRPNIKEAPMKTVEQQGLQAVQRSRDLLVQERTALSNHMRGLLMEFGVVIPQGFASLRRMLPEILEDGDNEVPDMYRPTLHRLYVRFLELHEAIESMNVEIKELVKQHPGCCRLTALEGVGPISAVLLYASLGTGEAFSGSREFAAYLGLTPRQLSSGGKTNIVGLSKKIGN

SEQ ID NO: 326619 - protein, 430 aa, unidentified
MGLIDLSSMPPARDEQAISYNWYVGIDWGSQQHQVCVLDRDRHVVGERVVDHDGSSLAQLATWLWALSAGQPQRVAVAIEVPRGAIVEGLIERGFHVFAINPKQLDRFRDRHSVAGAKDDRRDAFVLADSLRTDRPSFRRLHLDEPQLLLLRELSRAEEALLEEFRRSANRLRDQLHRFYPQMLHLCSGADEAWLWDLLDLAPTPAHAALLSKEQIQRVLKAHRLRRVKATEVLTCLQAPALPVAPGAAEAAQVHCAFLLPCLRVLAEQLRSCAQQGEALLKTLAEEPDETGGLSDVAIVQSLPGVGRKITAWLFAEAAQPLTERDYQVLRTQGGVAPVTKQSGKRRQVVMRRGCNPRLRHALYHMARVATQRDAYFGGVYEALRAKGQRHGQALRNIGDRRLRLLIAMLHDRTCYDATRSRREPVVQMG

SEQ ID NO: 326620 - protein, 348 aa, unidentified
MAMTIVESTRPVTGGIDTHADVHVAAAVDANGGVLGVESFATTPAGYAQLHGWLSSFGTVERVGVEGTGAYGAGLARHLCGEGLVVIEVDRPNRQLRRRAGKSDVIDAIEAARAALSGRASGIAKSADGDVEAIRVLLVARRSGRNVRIKSLNQIRHLGFTAPDELRERLRHIHRDRLARTAASLRPTAGSDTVLYATKLAVATLGRRILALEADAKRLDALLDTLVRHTAPNLLEIPGVGVHTAAILLVAAGDNPHRLKSEAAFAHLCGVAPVPASSGKTNRHRLNRGGNRQANHALWRIVFTRMSSHERTRKYVARRRAEGKTIPEIMRALKRYVAREVYPHLAHR

SEQ ID NO: 326621 - protein, 416 aa, unidentified
MNAVGIDVSSRKSTVAVLRPLGEVVCLPFDVTHDIVGLASLAEKLKTIDGETRVVMEHTGRYYEAVAKALHEAGFFVCAVNPLLIKEYGANSLRRVKTDKADAVKIARYALDNWADLRDFTPMDAIRYDLKTLNRQFQLASKQRTASANNLIALLEQSFPGIRKCFDSPVRSDGTQKWVDFAHSFWHVDCVRKQPFPAFCERYRKWCKLHAYFFKLRNAEKVYALAKSAVVLTPKAKVVKVLVQEAANQLISISRSVEVYRAEMDRLAAMLPEYPVVMAMYGVGKSYGPQLMAEIGDVRRFERKQALVAFAGIDPMPNQSGDKNVRSNKSSKRGSPYLRKTLFNVIRTYLQCAPQDEPVFQFLNRKQAEGKPFYVYMLAAANKFLRRYYAKLRDYFASLDTLQPAAPIPTILKAAL

SEQ ID NO: 326622 - protein, 378 aa, unidentified
MRFYNQAHRFYCGVDLHARTMYLCILDHGGQVVLHKEVPCEPAAFLEAIGPFRDGLVVACECLFCWYWLADLCQAQNITFVLGHALYMKAIHGGKAADDKTDSAKIAHLLRGGNLPIAYVYPKGLRETRDLLRRRMYLVHKRAEVVAHVVNTNSQYNLPPFGKKLIYARNRQALKIAQRFSDASVKKSIEVNLRLLDCLDDLIADVELYLERTVKVDDADTFYRLRSIPGVGKILALVLFYEIHDIKRFAGEGEFLSYARLIRPVKTSAGKVKGSGGGKIGNAHLKWSFSEAACLLARESDQAKRFLARKEKKHGKPKALGILAARLGRAVYHMLWQKKPFDPKRFWNGEPGVTPEKLKKSVVKRPRRAKGSRCVLQA

SEQ ID NO: 326623 - protein, 344 aa, unidentified
MGEVITIGLDIAKSVFQVHGVDEAGTVTLHKRIGRAKMVEFFGKLTPCLVGIEACPAAHHWGRELQALGHTVRLMPPTYVKAYLKRSKNDANDAAAICEAVTRPTMRFVPIKTKEQQAALMLHRARQLLVRQRTMLSNALRGHLAELGIVSAKGRNGTGALLEIIADAGDSRVPPVARGILDVLARQYGALGAEIGSIDRSILAWHRSCEASRRLEEIPGIGPIVATALVAEIGDWKAFGSGRSLAAWIGLVPKQQSTGGKDKLGSITKQGNRYLRWLLVAGAMAVIRYAQKHGTLKRPWLGRLMERRPTKVAAVALANKIARMAWAIIVHGDRYREPKPLLAA

SEQ ID NO: 326624 - protein, 407 aa, unidentified
MQLLYARCAGLDVHARQVVACARIVVDHTVRYQRLTVPTTTRGLLELADWLASHEVTHVALEATGVYWKPVWHLLEGQIELTLANAQHVKNVPGRKSDVHDAQWLADLLAVGLIRGSFVPPRPIQDLRDLTRTRKQLVREIGRHTQRLQKILEDANIKLTETISDIRGQSGRAVLHALIAGETDPERLVALTRGLKASHGQLVDAVTGRVTAHHRFMLQLHVDQIEAIEAGLATLEQRLTEALRPFRAAVDLLKTIPGISDTVAAVLLAEVGDNIGPFPTAGHLVSWAGFAPRLDESAGKRRSTRTRPSAPWLKTTLVQAAWGAARTKDSYFHAQFARLKSRRGPKKAIMAVAASMVTAIYYMLRNGVEFEDLGAQHFVHHDKDQITKRLLRRLHDLGVEVEIKNAA

SEQ ID NO: 326625 - protein, 317 aa, unidentified
MPQPDLFVGIDVAKNELVVRLHPLGEERRFPNDKAGLKALERRLKALAARYHLLIGFEATGGYERKLAALLDRLGLTAYLLDPARVRNFARAERQLAKTDPLDAAVIARCLAALHPELTPYRHDPQAARLAEHVRMRDLAVAQRIQLGNHLETLDDPAMRRLVKAQVGKLKALALRIEKAIAALIASSPDLATRERLMRSAPGIGPIVAACLLAHMPELGALSSRQAAALVGVAPFDRQSGATRKPGRCAGGRPAVRRCLYLAALAIARSKKGHIAQTCQRLRDNGKPAKVALVATMRKLIITLNAMLKSQQTYRPA

SEQ ID NO: 326626 - protein, 311 aa, unidentified
MTSQFAGIDVGKDSLTGNLYGQDAVKDYPNTSRGIQRLSTWLQKHEVHLVVMEATGGYEKMASRQLERAGLAVAVVNPTYVRRFAQGMGTLAKTDPIDARMIAWYASVKQPKPRPPRSEAAEALSACVDRRDQLVAMRTMEKNRLGSAAAYVQSSITAHIESIDEQIKQMEVEIDHLIDQEEEWQSRIACMTSCKGVGKVTAVTLLAEMPELGHEKREQIAALAGVAPMNRDSGRKSGRRKTRGGRSKLRRVLFMAAMSAAKFNPVIHAFYQRLIEKGKPKSVVMVACMHKLLTILNAMLRKNEMWRPDFA

SEQ ID NO: 326627 - protein, 425 aa, unidentified
MKPEEQKQIEFAAYVGLDWGDRTHAISLRCGASEKVERYQLEHKPEALAAWVSGLQQRFGGQPVAVALEQSRGAVIHALMGYDFLVLYPVNPKTAAKYRQAFRLAGSKDDPDDAQLLLEILTLHRDKLRAWLPQDELTRTIALLVEHRRQLVKEQTRLSNRLTDLLKLYYPQALAWAGELATLQACDFLKRWPTLAQVRRVRESELRKFYVAHGCRKKELLERRLAEIKVAQPLTRDQAIITASVVMVQATTSQLRVIVVAIAQLDKQIEALFGRHPDHDLFSSFPGAGPALAPRLLTAMGTDRERFSAAPEVQQFSGIAPVTERSGKSCWVHKRWACPKFVRQSFHEYAGQSIRQSPWARAFYQQQRQRGNGHHAAVRSLAFRWIRIIFHCWKERVPYCELTYCQSLVRRHSPLAQLLAVLPEG

SEQ ID NO: 326628 - protein, 388 aa, unidentified
MNDLIRIGMDTSKSVFVLHGVDAAERPVLRKTLRRRQVIEFFAKLPPTQVGLEACGAAHHWARELGALGHEVKLLPAQRVKPYVARNKNDTADAEGICEAMSRQRMTFVPVKTAEQQAALMLAGMRDQLVARRTQLSNTIRGYAAEFGLVAAKGLEKIEPLLARITGKIEAQLLAWHRQNELSRRLAEIPSVGPIGAALMVMKVANPRAFRSGRDFAAWLGLTPKDHSTGGKQRLGVITRAGDEALRRVLVLGATAVIQQVRRGRGHSSLWLVALLKRKPPKLAAVALANKTARIAWKLMVSGERYRGACATEVTHGNVCFEGASSQPRKPGAVLAAVKARPGSAAARRTGNATAGLDGGCARRPTTIAVGTKKRSMVEQRNESHGHD

SEQ ID NO: 326629 - protein, 344 aa, unidentified
MYYIGIDVSTKESALCILDCKGKIVRETKLPTDPEIIARFIDATGLAIERIGLEVGCTAAWLFAGLQRHGWPVICIDARHAAAALQAGFRNKNDRNDARGIADLMRVNKYRPVWVKSPEAQRQGRLLTARAALQSQLVALENTIRGLLRQEGIGLTDRRTAFEAAVREAMGEDCLLYAALHPLLETRNAVLRHRAALDREILRIVRADPVCRLLMTAPGVGALVSLAFKVAVDDPRRFSRSRDVGAHFGLTPREHSSGEVSYQGRIGKMGDREVRRLLYIAASRMLRRDAALWSPLKAWAVRLARRIGIRKARVALARKLAVVLHAMWSGGQVFQWRRSEASAA

SEQ ID NO: 326630 - protein, 412 aa, unidentified
MDVMYPRCCGLDVHKKTVAACLILSTEGPEPVKEIRTFRTMTADLLALADWLQEAGCTHVAMESTGVYWRPVYNLLEGQCELLVVNAQHIKTVPGRKTDVKDAAWIAELLRHGLLRGSFIPSKPQRQLRELTRYRSTLVQDHARTLNRLQAVLEDANLKLASVVTDIYGVSARAMLAAILTGERDVETLADLARGRLRAKRDQLKEALEGRVTAHHSFLLTEHLSTLEYLDEAIARVSGEIDQRLTADQEAIALLDTIPGVGQRAAEILIAEIGTDMRRFPSAKHLASWAGMCPGNHESGGKRLHGKTRKGSRWLRQILVEIAHVASKTKNTYLAAQYRRIAARRGKKRALIAVGHTVLTIVYTMLTRKQPYQDLGAAYFDQRERHRVERRLVQRLERLGYEVALQPKALAS

SEQ ID NO: 326631 - protein, 339 aa, unidentified
MKEAGCFIGIDVSKLWFDLSLLKVTGGVKEAMLTERFDNNAAGFKVLLKWLKDRSVPFDENTLVVIENTGVYHRLIWQFCTEHGFSLHIGNAAGIKWSLGITRGKDDVTDSQRLCNYCYRHADELRVSPTLDPVILHLKDLMTSRIRLIKQINSTKVYLKELKSSNSKEVQKIMERAHKDALEGMKKSLLLVEAQIKKVIQQHAPIRTNYKLLKSVPGIGHVTALYLICCTANFSSRISGKQLASYGGVAPFTSSSGTSIKGKPRVHKMANKELKRLLHMGARSIANHHPEFKQYYQRKLKEGKHDLCIINAIRNKILLRAVSVINKQTEYVSNYVKNA

SEQ ID NO: 326632 - protein, 350 aa, unidentified
MRTVAEEYDRVVGVDTHAATHTMTLLIAATGAVVEHRNFPTSAAGLRRALTWIRDHTQDQACLVVVEGTGSYGAGLAEHFTQGGIVVAEAPTIPAARPRGKDDAMDSARIARAVLGLRLDQLCWPRAGGTRTAIRVLVSARDQMGTERTKIINALTALVRSVDLGVDARKALTSAQITTIAGWRARDEDPAVAACRREAIRLASRIHALGRDLAANMAELRQFTAAQVPELLDVPGVGPVVAGTILLAWSHPGRVRSEAAFAALAGTSPIPASSGNTIRYRLNRGGDRQLNRVLTTIVLVRMRHDQTTRNYLARRRAEGRTTKEIMRILKRYIARQVFRLLAAAHPTPTA

SEQ ID NO: 326633 - protein, 349 aa, unidentified
MIIGCDYHPGFQQIGFVDTATGELQERRLQHREEAERFYRDLAAQGMKVRVGMEVSGHARWFERLLAELQFELWIGDAAVIRTKRVRKQKTDRQDAQLILKLMLKDDFPRIWVASWENRDLRQLLWHRHRMVQARTRIMNQLQAVALNEGLRCKKRLWREAGREQLEAFPLAPWAGRRRRDLLELLDRLSPTITELTQTIEQEAEKCPAAQRLRTHPGVGSLTALAFVLIIGRADRFQCGKQIASYLGLVPSEESSGDRRRLGHISKQGNALLRFLLVEAAQVTVRSLPEWRSKYFHLAMRRGRKIAKVAMARKLAIQLFWMMRKEWDYEQVKRFGPHAGQPENRRGVQ

SEQ ID NO: 326634 - protein, 352 aa, unidentified
MRIESIQEVILGVDTHLDVHVGVIISEIGQLLGTRSVSASTAGYLDLLNWASSFGVLTRAGVEGTGTYGAGLCRLLLDHGITVLEVNRPDRAKRRQQGKSDPTDAESAARAVLSGIATAIPKQQSGACEAMRIVSVARRSAVKDKTQTINQLRALLVSAPQDIRERLWRAKTDDCVKACAKVRNLGDSVLLQALSSTLRSLAKRWLTLAAELDQFDRQLDALTRKHARQLRSRFGVGPHTAAILLSVAGDNPDRLKNEAALASLCGVNPLPAYSGKTTRHRLNRGGSRAANNALWTIAMVRMRSDPRTRTYVNRRTTEGLTPKEVHRCLKRYIVRELFPLIVGDLGELRSSP

SEQ ID NO: 326635 - protein, 364 aa, unidentified
MKATTIWVGVDVHKESLTVSVFEDRCAQGRPVKTLPNDPKLVRKLFSQLQKEGEVHVCYEAGSCGYELYRQLSAMGIACDVVAPGLIPVRATDRVKTDRRDAEKLARLFRAGELTSIRVPTEVEEALRDLIRCREDGREDVLRHRHRLLKFLLRHGRIFRETKHWTLDHWRWLRGQRFEQPLAQTVFTEYLSTLEKSLERVRTLDQDIVNEATKAPYKQLVGRLRCLRGIDTLSAMALIAEICDFERFEHPRELMAYLGLVPSERSSGGKQRRGGITKTGNGHARRIFIEAAWHYRHVPKRSPKMKARWEGQPAATVEHAYKAQERLHRRYFRLTSRGKPSQLAVVAVARELCAFAWAVARKAA

SEQ ID NO: 326636 - protein, 411 aa, unidentified
MEQREKMIYVGVDLHKQHHTAVIVDCWNNKLGEIQFDNKPTSFPALLKEVKKHLKKGMTAVYGLEDVGGYGRALAVYLNECACWVKEVNPILSNARRKSHVTVQKSDSWDAECVARVLRDEPNNLPDAKPIDLYWALSQLVTQRKWIVKNQTGLNQKLHQQLSYHYPSYKKFFSQVDGKTALAFWERYPSPCHLDGVAESTLASFLRELSNFCLSTGKAAQILSLVKEDGDTRRDFQEKRDFIVQSIVRNIRFNQEELTRIEEEIRSLIKGLGFQLETMTGIDVITAAELVAEIGDIHRFATPDKLARFAGIAPIFVGSGGKGRNYKSKQGNRVLHELFKSLAIRQLAVTRGKREPRNPYFYSYYEQKVAVGKTKKQAVVCIMRKLVNVIHYLMRTKAAYVIPPVPEKEAG

SEQ ID NO: 326637 - protein, 386 aa, unidentified
MKKITMPVTPATELFVGLDVHKASIDVATADEGRTAEVRHYGQITGDLEALDQVIRKLQSTGRTLHVVYEAGPCGYAIYRHLSAKQIDCTVIAPSMTPKKSGDRVKTDRRDAISLARLHRAGELTAVYVPRADDEAMRDLSRAREDAKRAETRARQQLQALLLRHDIRYTGKTPWSAAHLRWLSNIKLPHPAQQITFQEYVTAIDEAAERVARLTQQIAELLPAWRMAPVVEALQALRGVALITAVCVVAEVGDLTRFTNPRQLMAYLGLVPSEHSTGERRHQGAITKTGNSHVRRMLVESAWAYRLPARVTPIIRKRQEKLPKPVRAIAWKAQVRLCGRYRRLSSKGKTKQLVVTAIARELAAFMWAIAREVTAITAAAGTERAA

SEQ ID NO: 326638 - protein, 342 aa, unidentified
MSAAFIGLDLAKSVFQVHGVDVQGKVVVTKRLRRDAVLAFFANLAPCVVGMEACAGSHFWAREIARLGHTVRLMAPQYVKPYVKRQKNDRADAEAICEAVQRPSMRFVAVKSEEQQSTLAIHRVRETLVAQKTQLINALRAHLAEFGIIAPQGAGKIAQLTAVVADPEDTRVPALARSVLQSLVDQLRDTERRIEDLDARLAEQAQADEVCQRLMTVPGIGRITATALTATIGDATVFESGRHLAAWLGLVPRQTSSGGKERLGGISKAGDGYLRRMLVNGARAVMRWQGTKSPWLAGLLKRRPFNVAVVALANKLARIAWAVMARGEEYRKPAMTAEPATA

SEQ ID NO: 326639 - protein, 391 aa, unidentified
MTILVGIDVAKDKHDCFFMNSEGEVLAKPFTIFNNKEGFDFLYEKIQSVSSSDNIKVGLEATGHYSYNIIGFLLNKGLATFILNPLHTNLYRKSLSLRKTKTDKIDSKTIAMMLLSDVSLKSYSDISYHNEDLKSLTRYRFSKVEERAKLKTSLSRLAQILFPELEKLVPTLHMTSIYQLLEEFPSASAIASVHLTRLTNLLSKASKGHYDRETAIKIRDAAKNSIGSNMPAKSLELKHTIKLIRALTIDIGEIEAEISKMMDMIASPITTIPGIGRNIGAMIISEIGDFSRFSSPDKILAYAGFSPSIYQSGKLDNCYAHMEKRGSRYLRYALFHAAKLVCHWDKTFADYLAKKRAEGKHYYVAISHAVKKLVRVIFQIEKTKQAFLKAS

SEQ ID NO: 326640 - protein, 423 aa, unidentified
MTSMTLDPPLTNPLPPGTALVAGVDTHKNTHHVAILDLVGRPVADREFRADGRGYAQIVAFLHAHGDVVRIGVEGTGSYGAGLARALTTAGLTVIEVARQDRQARRRRGKSDPLDAHQAAVAVLAGTDTAIPKSGDGAVESMRILLAERRSAAKARAQVMNQIHALLITAPELVRQAFRALSGQRLVNTLAKTRPGTITSPDPAVVARQTLRRFAVRHLTMQAEIDLIEQQLEMLVRQVNPTLLSLSGVGPVTAATLLVAAGDNPERLGTRASFAALAGVAPIPASSGQRTRHRLSRGGNRHANAALHRIVLLRMRHREPRTMAYFERRRSEQLTDRDIMRCLKRHVANEIYAALLNPATDNPVGRELRARRQAKGIPISVLAATLGVPYQRLRRLEIGTRADPELEARATAILEQISPPLAA

SEQ ID NO: 326641 - protein, 363 aa, unidentified
MEQKDRRFVGLDFGVRTYEMCMYDENGKIVRSNGLTTPEGRQKLYSKLKPTDRVGIEMCSLTMKVAREMKSAVGCDVLLLHAGKLAVIYKSLKKTDKEDALKLARLVKTHEDEELPVVPLPSETDLKRRRMIREAKQLRSDRTKEVNRLHALFVECGVTVIKKKNLATKTSREKSLLSLEKTQKKQAERICQVINLIESQIAEVKKEIAVEVESDNNIKNLQTVPGIGELTAVAYSGFVGDGSRFDNGAQVSNYLGLVPKLDISCDQVHYGNITKTGNPEVRSLLIMAAWSHVRFAKEDTVLKSKWQYLTLVRRMSKKKAIVCIARKMAEMMLAILKSGKPYSPKKFSVDQFSELAEKALKSA

SEQ ID NO: 326642 - protein, 331 aa, unidentified
MNEAGEIVLEHKLATTPEAMKQAFGSMPRCRMAMETGTHSPWVSRLLTALGHEVIVAHAQRVRLIVKSRRKDDRLDARTLARLARIDPELLSPVKHRSAQAQLHLTEIRARAGLVSARTALVNAARGLVKSYGERLRKCGTQQFTREITSGLSAGLREALQPLLREVESLNEGIKEYDRRIDKMAKQTYPETALLKQVKGVGDLIATAYVLTVEDPHRFRKSRDAGCFVGLQPGRRNSGDSEPQMHISKEGDEYLRTLLVQGAHYILGPFGEDSDLRRWGQKLAARGGKNGKKRAVVAVARKLAVLLHRLWVSGEAYEPLRNSQKAMSAAA

SEQ ID NO: 326643 - protein, 354 aa, unidentified
MGWALEEVVENQVFVGIDVSKERLDAALRPRDESFKVANNPRGIATLIKRLKKWRVSRIVLEASGGYEIAAAYDLAAAGLPVAVVNPRQVRDFARATGRLAKTDAIDAQVLAHFAEIIQPQTRPLPDVQTRELMALVARRRQVVDMLTAETNRHGRAVDAVNRAIAAHVRWLRKQLADLDAALERAIRNSPLWSEKARLLRSVAAVGSVTVITLLSHLPELGTLNRRQIAALVGVAPFNHDSGKLRGTCAIWGGRAQVRAVLYMCTLGRNPQLQAFYARLIAAGKKPKVALTACIRKLLIMLNAVLRQRIPWNPELATLPSPFSAARGGAVVCWACSTAREVKVLYQPDGCEGK

SEQ ID NO: 326644 - protein, 390 aa, unidentified
MIYVGIDIAKLNHFASAISSDGEILMQPFKFTNDGDGFHLLASKLETLSLVSDSIIIGLESTAHYGDNLVRYLVAGNFKVCVLNPIKTSSMRKNNIRKTKTDKVDTYIIAKTLMMQDSYRFVTFYDLDLMDLKTLGRFRQKTVKQRTRLKIQLTSYVDQVFPELQYFFKSGLHQKSVYALLKEAPAPEAIASMHMTHLAHLLEVSSHGHFTKEMAKELRVLAQKSVGASDSAISIQITHCIAQIELLDSQLKQVEAEMTDIMKFNDSVLMTIPGIGYINGGMILGEIGDIHRFGSPSKLLAFAGLDPSVYQSGNFQAKCTRMSKRGSRVLRYALMNAAHNVVKNNATFKAYYDAKMAEGRTHYNALGHCAGKLVRVIWKMLTDEAEFNLA

SEQ ID NO: 326645 - protein, 411 aa, unidentified
MENIYPCCAGLDVHKESVEACVRRMGPNGRLDQQTRPWGTMTRDLLAMSDWMAAQGVTHVAMESTGVYWKPIYNILESRFTVLLVNARHLKQVPGRKSDVRDCQWIAQLLQHGLLKPSFIPPQAQRELRDLTRHRTQLAEERTRTVNRLHKVLEDANIKLASVATDILGVSGRAMLSALMAGEESPVKLADLAERQLRGKIPELERALQGQVTKHHRFMLRLLWKQLAQQEELIAELDARIEEQTRPFADEIERLDAVPGVDRRVAEVVLAEVGADMNPFPSHRHLAGWAGLCPGNEESAGKRTRRRIPPGNRWLKRSLVQAAWAASHTKHTYLASQYRRLVGRRGRKRALVAVGHSLLVIFYHVLKRRTTYADLGGDFFDRLEPERLTRYFVRRLQALGHKVTLESAVAA

SEQ ID NO: 326646 - protein, 356 aa, unidentified
MGIEKIIAIDLGKFKSVLCLMDTATRRHTFETVPTTPSDLHDLLARHLTPDAAATHVVFETCDTAGWVHDLCAALGTAVTCVHANGEPWQWRRVKRKTDRDDALKLAKLALMDQLPAVHVPAPDQRQKRRLILHRRSVVARRTQSRNAIRSIFSQQGLPLAPGGKQWTRAGLEQLRQHARPLTECGPEDLWRGRLQIELDLMAAVDQQLKVIDATLDALADDRTTLLQTVKGVGPRVAEAVVLYLDEPTRFKNANAVAGYAGLVPKQIESGTMSRHGHITRRGPSLLRSMLTEAAWMVWRHNAWAKLWVDKISHGSRARRKIAIVALARRLLTILWAMLRTNQPFREPMPSLIAPS

SEQ ID NO: 326647 - protein, 317 aa, unidentified
MKKITDIFVGVDVSKHFLDIFLYPKNEYFRVTNSYEGVHKLLQTLAMHSIKRIACESTGGYENLLLDLCKQANYEIWQVDPRRIKAFIISEGIRAKTDKIDAKMIALFAAKKEPRYTKQTISLNHYKLRALIQRRTDLVGMASMEKKRLNGPTGLYCKKNIENILSILDEHINTLDAEIQKLIDEDDDMNNRKEILESIPGIGKVTAASLIAHMPELGTIENKQAAALIGVAPYTKQSGTYKGHEMIGGGRLAPRCALYMAALAACRYNPIMKNFYNRLRNAGKKPKVAVVAVMNKLIVTINAMCKKNTKWAEIPIP

SEQ ID NO: 326648 - protein, 365 aa, unidentified
MCRDLLSSSAALVRAGVCSPWSLRRPRVTIVMGLDQHRAQITAEWIDTSTGEVSRTRIVPADRDRVRRFAGLFGGQELEVALEATTGWRFVVEELQAAGARVHLAEPAETAARRGTKKRAKSDRADARHLRELVMVGRLPESWVPPEHLLDLRARVRLRHTLVDQRREWQQRMQAVLYHHGVPPRSWLLGAESRAWLAGLALPAAAREQITVGLALIDAHDAQLAPLDQDLRNYAKRQPGCRALMRHYGIGPLTSITILAELGDPRRFSSSREAVRYAGMDITVRQSDTRRAPGHLSRQGPPALRWALFEAAQCARRPASPDHDYYVAAAARLGGNRACLAVARKLLKRSYHTLRELGEEALQPA

SEQ ID NO: 326649 - protein, 349 aa, unidentified
MVVIGVDSHKHTHTVVAADENGRQLADKTVAATSAGHLELVRWAGRFTERRWALEDCRHLSRRLSTDLLRAGEAVVRVPPKLMAGARRSSREPGKSDPIDALAVARAALREPDLPVAALDGPEREIRLLIDHREDLVAERTRAQNRLRWHLHELDPGSEPAARSLDRAVVLAALDARLAEVPGIVARIARELVGRIRALTVTIDALEREITRLVAPLAPSLLALAGCGPLTAAKLVGETAGIGRFRSAAAFARLNGTAPVPVWSGNAERHRLSRTGNRQLNVALHRIAITQVRLGGLGLAYVEHRRAAGDTKTEAIRALRRRISDEVFRRMRHDDRVRATARAPLAAAA

SEQ ID NO: 326650 - protein, 417 aa, unidentified
MSWQKLQQKRAAIKPDTLVIGVDIGKYEHVVRALFPGGRFSSPLAISTDRSGFERLLDQVRHWQQESDCHEVTVGMESTGVYWMSLVYWLEERGIRVVQVSTLHVHQSKEMLDNSPAKTDGKDALLIADLVAQGKYLSFVLPRGVHAELRQLVALRDRLAGERTSRLVQLQVVASSLFPEFGGVYHDFAAKTARRVLRCFPTPAEVLKVTPERMARRVRSGGRVYIKAGQLAALRRLAVDSVGVVEGSGAATLALLDSLTELDRVEARLAKVEELLAELTAQVDEARYLMSFHGIGVVTAATILGETGGLGRYDSAAAVLKLAGLDLYEISSGIHKGQRRISKRGRSRLRRALYFAALHHTVPGTPLYDDYRRMVDRGVPKMKAVVALSCRLTRLLYALARDQRCYSAQPPQSLRVA

SEQ ID NO: 326651 - protein, 413 aa, unidentified
MEVIYQCCCGLDVHKRTIAACVRRLLENGGMHQETRTFGTMTRDILALADWLAAESVTHVALESTGSYWKPVYNILEGRFKMLLVNARHVKHVPGRKTDVKDCQWLAQLLQAGLLRGSFIPERPQRELRDLTRHRSQLVGERSRAANRIQKILEDANIKLASVASDILGASGRDMLRALIRGETDAEKMADLARRQLRSKIPELRPALEGKVTAHHRFMLGELLHHLEYLESRIEEFSRRIEEVSRPFALAIARVATLPGFDQRSAQNVVAEIGVDMEVFPSAPHLASWAGVCPGNNESAGKRKSGKTTKGNRWLRAALSQSAWSAARKKDSYFQAQYRRLAGRRGKKRAIVAVAHSLLTIIYHMLKNASDYQELGCDYLDKLNARSLLPYLLKRIKDMGYQVSLQELSQKAA

SEQ ID NO: 326652 - protein, 531 aa, unidentified
MVTTGKTRTKRNRSRSQKFKKAVLGSPQGIIQKRVQAVGPEKFGIVAIDCAKARSTWRLTDFFGNVLTQSASVEHNRNGLQLAVLTLKQAVEKHDIKDLIVAVEMTGTYHKPPMRAFRDAGYETRLVHPFASSFYRQPEHGDNKTDDNDLDAIFRAAVNGFGLLEKPVDAIHQQLQILARHRRDLVKKKSKLQCQIRHHLEQGLPGFGALFDGDDLWTQITPVPLLETIAMHGGTVDVIKQAGQKGVTKWLEDAKIRFHKATIERVVVWAANAANADPMATFHTRVWMSQLADWEQKNQQIHDTERDLAAVVARTPYVLLLSHPGINVVSAAELAGEMGPIENYATARAVCGRAGLFPSRYQSDEVDRSGKLTRFRNAKLRAAWMMIADNMCKCNRYWMVKAEKWKSEGHKSHDIRCRIANRMTRIVFKMVSGRELYKHPSRLDRGYVMDKLLTFLREHNTAPAVIVRDLKHAAEQLPKSGQLEEGAKLQEAALKARRSRQKGPQELGTLLVAVLARLGIAAKDDDGLKST

SEQ ID NO: 326653 - protein, 344 aa, unidentified
MDHFAGLDVSVKETSVCIVDDTGKIVREVKVASEPEALLAVLKNPAYHFKRIGLEAGPLSQWLFSALAEAELPVVCVETRHMQAVLKAQINKTDRNDARGIAQMMRVGLYRPVHVKTLRSQKLRMLLTHRKLLQSKAIAIDNDLRGTLRNFGLKVGIVGTMKFEARIKELVENQPDLAGLVEPLLVVRRVLREQFVILHRRLLAIVRDDEVCRRLITTPGVGPVVALTYRATVDVPARFRKSKSVGAVFGLTCSKYQSGEIDRNGRISRCGDEMMRVMLYEAAQSMLWSKKWSWLKAWAMQIARRRGMKRAIVALARRLAVIMHRIWVDGTEFRWTREQTAAAA

SEQ ID NO: 326654 - protein, 343 aa, unidentified
MTMVTVGIDLAKNVYQVHGVDSHGKTVLKQKIKRNQLTAFFANKPPCLIGMEACSGAHYWARLLQSQGHSVKLMAPQFVKPYVKTNKNDAADAEAICEAVTRPNMRFVSIKSPEQQSLLSVHRARMGLIKSQTAQINQIRGLLAEFGIVMPTGKIAVFKHIPLILEDADNNLPGTFRAVLAQLYQHLTELREHTETLEKILKEHYKQYALSQRIATLPGIGLLTATAIVGTIGDGTEFKNGRQLSSWLGLVPKQHSSGGRNVLLGISKRGDSYLRTLLIHGARSVICARKNSLSDDGWLGSLIHRRNTNVAAVALANKNARILWALLTKGEEYQANKDCNLYA

SEQ ID NO: 326655 - protein, 344 aa, unidentified
MQHYVGLDVSVKETSVCIVDKAGKVMREVKVATKPEAILAVLTEEGLAIERIGLEAGPLSQWLYSALAGAGLPVICVETRHMKAALSAQINKSDRNDARGIAQMMRVGLYRPVHVKTLASQKRRMLLTSRQLLQAKALDIENDLRGTLRNFGLKVGMVGTVKFEARIRELVADHPDLAAIVEPLLIARRVLREQLGVLHRQLLEIVRHDEVCRRLMTTPGVGPVVALTFCATVDVPSRFASSKAVGAAFGLTPRRQQSGEIDRMGGISKCGDGMMREMLFEAALVLMTHSRKWSWLKAWGLKIARHRGMKRAIVAVARRLAVIMHRMWVDGTEFRWSRKEAAAA

SEQ ID NO: 326656 - protein, 342 aa, unidentified
MNITTVGVDLAKSVFQVHGIDKRGKVVIQKRLRRSKVLEFFVQLPPCLIGMEACSSAHYWARKLHEQGHEVKLMAPQFVKPYVKANKTDAADAEAICEAVTRPTMRFVPIKSVDQHAVLSLHRARSGFVKSRTAQANQIRGLLGEFGIVLPQGIVHVAGRLPDIIEDADNELPLVFRELLLRLRSHLLELNRQIRELEGQIDAWHKNNEDSQRLANIPGIGVLTASALVASIGDARCFKNGRELAAWLGLVPRQHSSGGKPLLLGISKRGDAYLRTLMVHGARSAVRVAANKQTPTDSWTNGLSTRRHMNVVSVARANKNARIAWALLAHKRNYDGEYKQAA

SEQ ID NO: 326657 - protein, 411 aa, unidentified
MEYQNNLIYVGVDLHKEHHTAVIIDDRNRKLGEIQFLNKPAAFPQLLQEVKKHTKKGMKAVYGLEDIGGNGRALAVFLAESNCWVKEVNPVLSTARRKSHVTVQKSDSWDAECVARVLRDELEKLPDAKPMDLYWALSQLVIQRKSLVKNQTALNQKLHQQLSYHYPSYKQFFSQVDGKTALSFWKKYPSPCHLAGVTEEELAQYLRKLSNYSLSKEKAVQILALIKEDGDTTRDFQDKRDFIVQSLVRNIRFNQVELAKIEGEIKELMTGLGFQLETMTGIDVVTAAELVAEIGDIHRFSTPEKLARFAGIAPVFAGSGGKGRNYKSKQGNRVLHEIIKGIAIRQIAVIRGKKEPRNPYFYTYYQEKMAAGKTKQQAIVCIMRKLVNVIHYLMRTKEAYVMPTVTEKDVG

SEQ ID NO: 326658 - protein, 327 aa, unidentified
MSSKTQNSKAVYSLTEKISIVGVDLAKDKFDTYYESKLRTFRNNRLGLSRFQRFLSTIKGKVVVVYESTGAISRPFTRALMEMGVEWRCVPPYFVRSYATAMGIFSKTDEQDAQVIAEYAKAKQPKKTKKLTKTQLELQELEGLKQFYIRQRAHFKTARKSYAHPLAADSFATTLAQLDETIAKITKSIDEIINRDEELKARRTLYLKEPGVGVKTAQTLICSLPELGTCSGKEIAALVGVAPYDRSSGNMNAPKHIRGGRKRVRCAMYMAGIGVRRCKEGEVKDFYLRLKAAGKSSTLNAIACARKILLRLNAATRCMLQELQTTP

SEQ ID NO: 326659 - protein, 318 aa, unidentified
MNKTYQTLNKIGVDVSKQKLDIALNEVDFISIDNDVNAFEAFLNTISHPLNNVHFIMEATGGYESKFADFLLKKNIAVSIVNPKRVRDYAKAMGKLAKNDRIDARIIRSFATIANPVLLNKKSPREQKLRNIIKRRRQLLKHQTTEKLYLETTSEQEALDSIRAMLEQLEIQIKAMDAEIQALMDADRGYCKKKELLVEVDGIGSQTVATLLANLPELGTLSSKQISALVGVAPFCNDSGERKGKKMIWGGRKQIRTALYMPMLCAIQYNKPIKAFYDRLIKKGKIRKVAVIACMRKLLTILNSMLKNNTRWNPNYAE

SEQ ID NO: 326660 - protein, 444 aa, unidentified
MLPVIYERVAGLDVHKKMIVATRMRVIEGQVEWETNTFGSMTPDLLLLHDWLDEWSCIRVAMESTADYWKPVYNILEEVFEIVVVNSSHVKHVPGRKTDVKDSEWLAELMMHGLLTASFVPPKPQRALRTLTRYRTTLVQERARVVNRVQKLLEEANIKLASVATNIQGVSARAILAELAAGQTDAKHLANLARGKMRSKIPALEKALTGLVQPHHRFLLTRQLAHIDFLDEQVEELNTEIARQVETMSDSSTSTDPSAGAETDRDSSGTEQPRNPLTWNEAVVLLDTIPGVDRCTAEVMLAEMGLDMSHFPTDKHLATWAGLAPGNHQSAGKRYSGRTPHGNRPLSSIMVQAAWAAIRTQDSFLKARYHRLAARRGKKRAIVAVAHSMLVSAWHMLTNRQAYHELGGDYFDQRQKDTKVNYLIRRLEKLTGGSVSVEIQPAAA

SEQ ID NO: 326661 - protein, 382 aa, unidentified
MQASTIDTPTAGHCGTIFVAIELSQKTWLVTLHSPDRDRISRRTLEGGDDAGLLALLEGVRTRVAGKLGKVPKVVTCYEAGYDGFWLHRLLMAAGITNLVFDPASIAVEQRLRRTKTDRIDGELLLRTLMAHLRGEPRVVRIVRVPSVEQEDVRRASRERDRLVKEQTGHTNRIKALLRLMGMAVSNPRRSDWLSWLAQQRDRQSRPVPPHLMSEVTREHARLMLVREQLATLEQAPTAAVAAAAAPMAQRRNLLLRLKGLGPVFATTLTNEAFYKDFRNRREVASYFGLTPSPWRSGGIDREQGISKAGNPRARLKAVELAWLWLRHQPDSALSRWFVARTANAGKRARRIAIIALARKLIVALWRYLTTGLVPEQAVMKA

SEQ ID NO: 326662 - protein, 318 aa, unidentified
MSDKTIVGIDVAKNTLEVFIDTTGQLLHLENSASGVHELQKALSGLTVAGVVMEATSRYHCTAELMLSASGLPVAVINPRQIKNFARAMGRVAKSDPIDARIICEYGRRMTPQFRPIKSEQQQDLAILLMRRRQLVQNRVMETNRLKELCGVYIEQGIMRHIKWLDAEIDILDAEIKLRLRQDDTLAMKRKLLDKVKGIGPITQATLLIQLPELGSLTRRQVSALVGVCPYDRDSGQLRGKRAIWGGRSGLRATLFMAMLSAVRFNPQIRAFYTRLLARGKPKKVALTACIRKFITILNAMFRDQKDWIYEGANGLNT

SEQ ID NO: 326663 - protein, 313 aa, unidentified
MKNITEVYVGVDVSKSNLDIYIHPLEKLFKIPNTKSGIKAFTKELSKYNVAKVACEATGGYESLFANILRKKSYNIWIIDPRRVRGFIIATGCKCKTDKIDAQKIAEFAYKNSQGYTPILKNEIHEQLQALINRKKDLTIFLAAEKTRLKHPSHALSLVSIKKLIKTLGNEIKAIDGQIEGLVKNDKELHEKTIILESIPGIGKSSAALLLSFVPELGSLSNGKISALVGLCPYDNESGKYKGKKFIRGGRTIPRNMLYMCALTTIKHHLPLKEFYDRLRGAKKPFKVAIIAIMHKLIIIANSLLKKGELCKV

SEQ ID NO: 326664 - protein, 340 aa, unidentified
MTITTVGIDLAKNVFAVHCVDQNGKTVLVKPKVSRAALPELIASLPPCVIGMEACSGAHYWARVFRQYGHEPRLMAAKFVSPYRMAGKSGKNDAADAQAICEAVRRPHMRFVPVKDESQQAMQCLHRTRQGFIEEKTATYNRLRGLISEFGVIAPQSTDALRHMVSEQKNSLPLQVQQCVDDLLEHINRIEDNIAEYDRILSRMAKTDHRSQRLMELKGIGPTTACALVASIGNAHDFKNGRQLAAWLGLTPSQYSSGGKSKLGRITKAGDSYLRTLLVQGARSVLIGAEKRTDSFSRWVCTLVERRGYWRAVVAIAAKNARLCWASLHYGDDFRLYSAS

SEQ ID NO: 326665 - protein, 405 aa, unidentified
MCILSPDNQIFAQTKIYHDSTSMKRAEALLKKATEAFGGRPAVVMEATSHYHLILFQFFSDCGYDVLVVNPLQSSSMKDFSIRKRKTDKVDALKLAMLYRTKTLRPSQIPQSAIRALRLLCRERVELLNDVTRYKNRLTAFLDQIFPGYDKVFSDVGSITSRAVLSHFPTPAILLASDEYELVEVIATASKSGYKFAKKKAEALIKTAETAKVLGIHTCADESMILSVIPMLNTLSDRVAYLEQSIENLLAQVKTIRKNVELLQTIPGVGPHSASLIMAEIGDVSLFKKPKQLAAYFGLDPSERQSGTFRGTKNKLSKRGSPYARAALHMAVVNAVFKHANAPAANSVLSSYYEKKCKTKPAKVALAASMHKLIFIIFAVLRDQKPFELRTPEQHAREQGFIKAA

SEQ ID NO: 326666 - protein, 425 aa, unidentified
MKNNFMSTLFVGIDVSSKFNVLCALDFQGNKLLKLKASNNQPGAEVFLNSIIDCLNDNNLKYVVIALESTSFYSTHIANFLSSNDLLMYYKPLVYCLNPKSISNYRKSFIDIDKTDPLDAYIIADFARVGRITCQPWRGAQFLALQRLSRHRLHLIESITREKTYMVSNIYLKFSELAVLDKGDRPFSNTYGTTSAAVLTNFLSLDDITYSSIEDLVAFVSAKGKNRFSNPVQTAKLLQKAARDSYRLDKVLYEPLSTSIASSFNLIQAFDTEIKTIDKAIEKAIKGLNTNEYQSLISIPGIGPVLASGILAEIGTVTSFDSHDSLAKYSGLTWRVNQSGNYSADDTRMTKTGNKYLRYYLIEAANSVRNNIPEYHEFYKKKYSEVTTHCHKRALALTSRKLVRLIFGLLTKNQLYSSNKVGDIK

SEQ ID NO: 326667 - protein, 419 aa, unidentified
MPTTLHVGIDVGHHRHAVCLLDAAGTRLGKPFSVVNNQPGVAALIARIAAAAADHDQVAIGLEATGIYWWHLYRALARAPDLAAREPRVVVFNPKTIHGFRDAYTAMDKTDPDDAFLIAERLRFGRLPAAPPPDARYFPLQRLTRYRFHLIHTLVRAKAHALTLLFLVASEYERLKPFTDSFGAASLAVLTELGSLEEQAAMPLEDLIAFVDRQGRHRFPDPAGPARVLQQVAADSFPLDEAAVAPIQFALTQALAHIRFLTQQVAPLDRRIAAELTRFPNTLLTVPGIGPVFAAGLVAEIGEVARFPDDDALAKYAGLWWPRRQSGSFEASDRPLAKAGNAYLRHYFCEAANSLRVHNEDYRRFYTRKVEETPKHAHKRATVLTARKLVRLVHALLRTGQLYAGPGAVSPPKQPSRRR

SEQ ID NO: 326668 - protein, 347 aa, unidentified
MLIIGCDFHPGFQQVAIFDNRTGEVQEKRLQHRAEAEQFYRSLAGQEVRVGMEACGHYPWFERLLQELGFELWFGDAAQVRASVVRKQKTDRRDAEHLMHLLIEDRFPRIWVPSLEVRDVRQLLVHRHKQVQARTRTKNQLQAMALSHGVQKKYKLWTEAGRAELEQLPLLPYAAERRKKLLQALDGLEAEIVELNRRVEEEVKQRPEAVRLTTHPGVGPVTALAMVLTLGPAERFESAKQVGSYFGLIPSEESSGGKQRLGRISKQGSSFLRFLLVEAGQTAARYDPQLKRFYRRLATRKNRGVAKVAVARKLATRMYLMLREGWTYAQLNQAVMSVSPSHSVAGE

SEQ ID NO: 326669 - protein, 305 aa, unidentified
MYQRKTRAVFDGKDLKFINQEGLKSFKKYLKKKVNFSDLVLIFEPTGVYSQYLKEFCAENNIKAYIVNPKQSHNFARALGIRPKTDKIDARILYQFHKLIDVKDIKIPEINQQAKTLSSYLTSYEFALKQRISLSHHLESLRDKKLIALIKKELKRAQELEDKIFNDIKKYVEQNQNLKEDYQRLSTIPGIGEKAAIALLTLFKTDQGTNRAQITALTGLDPVKRESGTSVKGKVKISKNGKGIYRKILYLPTLCATVHNQKIRLFYQRLLANHKNKKLAIIASMRKILLIAHAMYRDKTEYAAA

SEQ ID NO: 326670 - protein, 345 aa, unidentified
MNITRVGVDIAKSVFHVHGVDRHDQVQWRGKYSRGKWLDAIAKRVPEGAEIGMEACASSHHWARELQARGYRVKLIAAQFVKPYVKSNKNDRVDAEAICEAMGRPNMRFVAVKTVEQQDVQAVHRIRSELVQQRTAKANQIRGLIGEYGLVAPTGIGQLRAALPRWLEDAENGLTDDFRVLLAGLAEDLRHLDERIVTVTERIERHAQTDPIAKRLMTLRGVGILTASALAGALGDAQAFKRGRDFAASLGLTPRQHSTGGRDRLLGISKRGDSYLRTLLVHGARAALRWNEGHEDNLSHWFRQLAERKHVNVAVIALANMTARIAWAITRHDSVYDPDLAAHAA

SEQ ID NO: 326671 - protein, 427 aa, unidentified
MPYKIAGIDVHKRMLHVVVSDVQVDGEYDFTRRVFGSLPEALRSLAAWLVEQQVQEVVMESTAQYWKPVWGTLERYWKPICQTREGALATSGALHLAQAQSNRGRRGRKKDFRDAERLVKRLVAHELVLSFVPDVEQRLWRTVVRTKYQLTRNRVQLQNRLEALLEEAHIKLSSLVSDLLGASARRMLAAIAGGETNRETLAALADRGLRATQEQLQDALGVCQALNPVYRRLIKMVLDEVASIDKRIEQLNQETANLLRPHEDQVKRLAEVPGLGVDTAQQIIAEVGVTAATFPSEKHLSSWVGACPGDEESAEVNRSRRSPQGNRHMRRILNQAANAAAKLKGSIFEILYHRCVPRLGHNQTIGIIAHKLCRLVWKILHRGIRYEERGPEVNKASKQKRTRKMIQALRRLGYRIEPSPSQSAITA

SEQ ID NO: 326672 - protein, 358 aa, unidentified
MQTEIKTISFKGQNIYVGIDAHLKNWTLTILTENSFFKTLSQDPCAMTLKNYLHRNFPQGTYYSAYEAGFCGFSVHRELIKCGIQNIVVNPADIPTTDKEKKQKEDRRDSKKIAKSLRSGDLTAIYVPDKSVEELRGLVRYRKVLVKEIGRNKNRIKSFLYFNGVVVPLELDSASKYWSGRFTQWLKTIKMDTEYGNFVLTETLENTEHYRGKLLKIDRKFRELRKSSSYSKTLNLLQSIPGIGPIVSITLLTELGDLKRFNNLDKLCSFVGLIPTTNSSGENEKTGSITPRAKKPLRNALVESAWVAVKHDPALNLSFNELCKRMKSNEAIIRIAKKLLSRMRYVIKNETEYVHAVV

SEQ ID NO: 326673 - protein, 369 aa, unidentified
MADGITYVGLDVHKESIVVAVASDGLRGEVREYGRIANTATALDRLLRKLGVDGMALRFCYEAGPCGYGIQRRLSAQGQECVVVAPSLIPKRAGDRVKTDRRDAASLAKLHRAGELTAVWVPDARHEAMRDLVRARLDAVHSLRRARQQLSGFLLRQGCHYGRPAWTKLHRRWLAGLKFDQAVHHVVLEDYIAAVEVAQIRRDRLTAQIETMLPDWTLAPVVAALQTMRGMALVNAATLIAELGDLSRFTNPRQLMAYLGLVPSEHSSGASVKRGGITKAGNGAARRLLIEAAWSYRFPARLSRELLLRQENQPRSIRDIAWKGQVRLCARYRRLTRAAKPANVVTTAIARELSGFVWAIARQVTVTAG

SEQ ID NO: 326674 - protein, 364 aa, unidentified
MKRPLKYVGLDVHQATTVTSVREESGRVIAQTGLPTDGRMLVKYFRGMRGSIHVAFEEGTQAQWLHDLLQPVVDQVVVCDRRGTTARGNKGDQPDADALSEQLRRGALRSVYHGSGERATLKEVARTYRNLVEDTTRVMLRLKALFRARGITTAGRSVYRADERADWLAQLDAAAGPGASRGVHFRAATLYAELAVLQALRPTARRALIVEAKRDPAWAVLRSIPFLGPIRVALLLATLQTPWRFRTKRQLWGYAGLAVVTRTTAEWALVDGRAVRRRRPPMTRGLNRNHNRVVKEVFKSAATAAATRSGPLQDWYQEMLKRGMREELARVTLARKLAAITLHLWQTGARYDPSHLMPSTVPAR

SEQ ID NO: 326675 - protein, 356 aa, unidentified
MNVYTGTHPYYCGIDLHARFMYICILDSEGKVVYHKNRRCTPEDFLAAIAPFRDRLVVGVECIFCWYWLADLCEQHKIDFVLGHALYMKAIHGVKTKNDRIDSLKIARLLRGGNFPVAYVYPPGMRAMRDLMRRRIHFVRKRAELIGHIQNTTSQYNLPALGTLSRPHHRRDKDIVGHFPDPVVRLMVETDLRLIDYYDPIIKDLDRQILNLAKGHDPTSLHLLQSIRGVGDVLALTMLYEIHDISRFPSRGEFCSYGRLVKGQKSSNGKNYGTSGGRMGNAHLRWAFSEAALLYLRGNKAAEKYYNRLISRHGKGKALTIIAKRLGTAVYYMLKRREPFNEHQFLNNAMMRKTKV

SEQ ID NO: 326676 - protein, 324 aa, unidentified
MSSLSEKAMNQPLYWIGIDVAKAHLDVHIRPTAELFQVPNTDAGIAQLVQRLEPLQPRLVVLEATGGLEFPAAVGLSRVKLPVAIVNPRQVRDFAKATGKRAKTDALDAAVLAHFAEAIQPSVSTIADEDSQRMAELVARRRQIVEMLTAEKNRLGTVRGSVRQDIEAHLEWLEKRLEELEAQLQQAIRQSPLWLERVNLLRSVPGVGEVTSSTLLVNLPELGSLSHKQISSLVGVAPLNHDSGKHRGKQVIWGGRAQVRAVLYMATLVATQRNPVIKAFYERLCQKGKPKKVALTACMHKLLIILNAMVKSATPWQPNLVEQA

SEQ ID NO: 326677 - protein, 318 aa, unidentified
MEPQVSFNQVVSRGCGIDVHQKVVVATIGGDGLKKETREFGTFTRSLTELKDWLLENGITHVAMESTGVYWKPVYHVLEPTSLKVWIVNARHIKYVPGHKTDKQDSAWICKLLLAGLLKPSYIPAREQRELRDLTRFRTKMIQNVASEKNRIIRILEDCNIKLSSVVSNTQGVVATKLINKLCEGQAITMADIEEVYHKRLEVSKEDLYEACQGMMDEHHIYFLQMIRQDIASTEAVIENLNARIKDMLSCYENVLENLKAIPGLNDKTVEDLVAEIGLEMSVFPTEKHLASWAGMCPGNNESAGKKKVVAPTMAINM

SEQ ID NO: 326678 - protein, 440 aa, unidentified
MSKIVNPNAAGIDISTKEHYVAVPEERSEDVRCFQSYTRDLHELANWLKECGVDTVAMESTGVYWFHLYTVLSDYGFEVYLVNAYHVRNVPGRKSDVSDARWLQQLHSFGLLRGCFQPDNLTRSLRNYVRQRKQLITQMSREIQHMQKALEQMNIKLKNVIRDLQGRTGMDIIRSILEGERDPQELAKYKQPGIKASKELLIKSLEGNWREEQLFNLKQAYDLYFFLKGQLSECDKECERLVKDMSADNTPQKDIKATKKQRNNPDFNANQHLYNALGVDVTKIYGINSTTALVVFSETGPDLKSKFPSEKQFLSWLNVVPDNKITGGKVISSRVKRKKNHAGLAFRDAANGLWNAQNPLGEYLRRKKTIAGSRQAIVATARKIASIYYKMVTHSVEFDPKILIFNSQEYLNKRLKNLEKSIQKTKLLLADRQLVYSEVI

SEQ ID NO: 326679 - protein, 341 aa, unidentified
MKNKSFIGIDISKNVIDVSIFCEETPIKDFSHDVFNNSRKGFGEMCTWLKKNHVVLSNCLFGMEFTGSYSMELELFLNARNYQFCMLSTHVVKHYPMGPKDKSDKIDSAKIADFLYRYNGTECVKPYKMPDKTMQRLKALMNERKFLVEQRTCFMNRRQLCTTKEAAQLYDGYIKEFSHDIENIELKMQNLLETDDSLSTTYKNLLTIPGIGFVNAMNVIVITRNFTAFETARQYASYIGVAPHFHTSGTSVKWRPRPSARCDGQAKADLSMAASVAVQCDAELQSFYNRKLGGKQDSDTKRKALNAVKFKLVLRMFAIGKQNRKWEPLDSKSSNEKLAIS

SEQ ID NO: 326680 - protein, 348 aa, unidentified
MLIIGCDYHPGFQQIALVDTQTGECGERRLTHREEAEQFYRTLPGQDVRVGMEASGHARWFERLLHELQFELWIGDAAEIRAKRVRKQKTDRQDAQLLLRLLIEDRFPRIWVPDAENRDLRQLLWHRHRLVQMRTRVMNQLHVVALNEGLRRKKALWRAAGRQELESIALAPWASRRRQDLLDLLDRLTPKIQQLTGALEEEVEKRPVTRRLATHPGVGPLTALAFELVIGTPERFHCGKQIASYVGLVPTEESSGDRRRLGHISKQGNVLLRFLLVEAAQVTVRSQPEWRSKFFHLAMRRGRKIAKVAMARKLAVHLYWMWRQGHDYGQLQKLGSHAGEPGNPDGGQ

SEQ ID NO: 326681 - protein, 353 aa, unidentified
MITIGVDAHKHVHMAMALDERGQVAGQWQGENSAAGWDEATRWARALGDERRWGIEGGGGYGRGLAQHLVGGGEVVYDINPRLTATERRRNRRMDKSDAFDAQAIAQVVQREEDKLPHVAVEDETVALDLLTAEREDAQAEATRLRNRLHHLLLQLDPEYHLHLPALISLAGVQAATAYTTTSDSLVQQERAAVVRRLAGRLRLAMEQVAELGSRIEALAEARYAPLTRLCGVSLLTAGALAGILGPGCRFASEAQLAAYAGVAPLETSSAGRVRHRLNRGGNRRLNAIVYRIALVQARWSPEAKAYLARRVADGKTKREAFRALKRYLVRAIWRLWHACLSPASVQPAYHAT

SEQ ID NO: 326682 - protein, 411 aa, unidentified
MEQIHDRVAGLDVHRDQVAACVRTPGPRGGVQAEKARFDTTAGGLAALAEWLAGHAVALAAMEATGVYWKPVYYALEGRFLVWLCNAHHVKNVPGRKTDMSDAGWLADVAAHEMVRPSFVPPPPIRELRELTRYRKTQIDVRAAEIARLEKVLQDAGIKLTSVASKVLTQSGRAMIEALIAGQRDPAALAGLAKGKLRPKIPQLTAALRGHFGAHHAIVAARILAHLDFLDETIGALDAEVAARVAERYQSAARLLAEVPGLERRSVEVIIAETGADMSRFPTPAHLASWAGLCPGNHESAGKRRRVATTPGNQWLRRALIESARAAARTRDSYFGAQYRQIARRRGPNKAAVAVAHSLLDVIWHMLTTGEVFTDLGADYFTSRQDKEHQTRRLVSQLEKLGYTVQLTAAA

SEQ ID NO: 326683 - protein, 341 aa, unidentified
MENCGIDLHQKSSQVTVVDQEGEVLERASIPTTRAGLERWFGRRERMRILVEASGSSPWVVRLLLELGHEVDVVDPRRVRLIAQSTLKTDRIDADILAELARLRTKLRTLVWQRSETTQRQRGHLRVRRALVEARAGFIVTVRGLLRSFGVRVASCRSDRFAARCQATAIPTELAEVMTPLLDAIHDLDARIATMDAIVEQVGHLYPAVGSLQDIPGVGPVVALAYVLSIEDPGRFRRSRDVPGYLGLRPTLRSSAATVRQGRITKEGDADVRRLLVQAAHAHLRSHVDTALKSWAESLIPRIGKRKTIVALARKLAVLMHRLWITGEVYQPFPNNTAMAA

SEQ ID NO: 326684 - protein, 415 aa, unidentified
MDTTYARVAGLDVHHKSIQCAVRCQTSGKLFAQSRSFGTMTCELRAMADYLQALGITHVALESTGVLWKPVWNILEGRFTLLLVNPRHLKKVPGRKTDVSDAQWIAHLLQCGLLKASFVPIRAVRDLRDLTRHRAQLVAEHTRVVNRIHKLLEDANIKLGAVASNIMGTSGRAMLKSLLDGENDVNKMAELAETTLRGKIPQLRLALEGKFTVHHRCVLKRLMAHVEFLEQESRLVSEEIARIEESLLPRDDFRRLDTIPGINRVAIQNILAEIGPDMSVFPDEHHLSSWAGICPGNEESAGKRLRSSTRHGNRWLRRILSEAAWAATHAKDSYFSAQYRRIAARRGKCRALLAVAHSLLIVFYKILKHHKEYQDLGSDYFDRHGSERLQRYLINRLEALGNEVTLRPRTPDQNA

SEQ ID NO: 326685 - protein, 373 aa, unidentified
MLVWTAPYGIALCQDEAVERSQTREPSVNQIIRIGMDTSKHIFQLHGVDAAEQPVLRKKLRRSEVLTFFAKLAPTVVGIEACGAAHYWARMLIGLGHQVKLMAPQLAKPYVKRNKNDGRDAEGLCEAMSRPTMRFVPVKTPEQQAALMLIGVRERLVARRTQLSNAIRGYAAEFGLTAAKGLDKIEPLLAEIAANEALPKLARELFAMHGKEYAHLQAELKKIEARLMAWHRANADSRRLAGIPSIGLIGATALVMKAPDPHLFPSGRHFAAWIGLTPKDHSTAGKLRLGKITRAGDEMLRSVLVAGATAVIQQAKLGRGRPSPWLLALLSRKSPKLAAVALANKTARIAWKLMVTGESYHAERMPMASANAA

SEQ ID NO: 326686 - protein, 417 aa, unidentified
MKKNSKSPTKKEQTSKRTRSQRPVQRETKEVLAELVEKLRGKLELKATPASLGEAGQGPELRPNLDRLTVGVDLGDQWSHYCILGLIGETLSEGQLRTTQADVAEFFQAITPARVVIEVGTHSAWVQEIIAGCGHEVLVANPRLMERSKRRKRKNDRIDANKLARLGRVDPQSLHPMQHRSREVRQDLVLLRARDALVAARTELINTTRGLVKSLGTRLPKCSSRSFAHKVEEAIPEEVRGALLPLVKLAEGLSACIQGYDRRIEELAGEKYGHTKLLRQVKGVGPLTALAYVLTLEKPERFAKSRDVGPYLGLVPKQEDSGEIQPQLGISKAGDTMLRKLLVGSAQYILGPFGPDTDLRRYGLRLCERGGKNAKKRAAVAVARKLAVLLHRLWVSGEVYEPLGYRVSGTIVQPAAA

SEQ ID NO: 326687 - protein, 320 aa, unidentified
MDAVFIGIDISKDRLDVHVRPGAESFSAARTGKGIDELIAKLLKLSPALIAMEATGGFESIVAAGLAGAGLPVVVVNPAQVRHFAGALGKRAKTDPIDASVIAHFVEATKPEIRPLPDAATQLLADLVARRRQIIEMISAEGQREKRASQKSLQKSIARLKKALEKELTQIDAGIDDAMRGSPVWRAKEDLLVSVPGIGPAIARTLIAELPELGSLDRREIAALAGLAPWTRQSGQWRGKSFIGGGRTSVRTVLFMGALVASRFNPVLKDFRDKLVAKGKPKMVALIAVARKLLTMLNAILRDKKPWRIPEPEELAHEKA

SEQ ID NO: 326688 - protein, 400 aa, unidentified
MLSIGIDVSKGKSTVCGMKPGGEIVYAPFEVQHTREGMLELVSLLRSSCEEVRAVLESTGSYHCPVVAALLENGIFVSVVNSLRMKRFCSQSIRKVKTDRIDAMQIALYGLAYWQELQPARLPEDTYRELQLLARQYYQMTSLLIKAKVDFNAICDQVLPGMQELMNDHAGRHKLSDFVLRYHHTTHILEMGETRFRKDYCKWAEKKGYRNCERMAAHIFATAQNGIPVLPNAPSTQIVITEAIRVLHTVEASRDAILTQMQALAKTLPEYSLVREMPCIGDTLAPRLIAEIGDVRRFHSKRALIAYAGIDAPPYQSGKFCANNRHISKRGNRYLRKTGYEVMQSYVMHKPANDPIFTFIEKKRSEGKCGKLAMVAGLNKFLRVYYGKVTELYRSLPAIE

SEQ ID NO: 326689 - protein, 432 aa, unidentified
MSEGSQEELMSQNQPEIQYAAFLAIDWADQKHVWSLQDANSGTCERGEVDHMPETVEAWVAQMSQRFAGRPIAVAVEQSRGALVFLLSKYEQLHIFPVPPAMTANLRKAFYSSGAKSDPTDADLLLDLVQRHREKLRRLSPDTEATRLIQNLVEERRRLVDEKTAQSNRLEAHLKIYFPQIPRWFGDLGSPLVCALLERWPTLEALQTARPDTLRSFFRKHHSRKEELIESRIKAIGEAMPALKDRAVVEAKVAVVKVSVQLIQDLHEGIEGLNRQIQEAAEAHPDFFIFDSLPGAGAAMAPRLLAAFGSQRERYQNATEMQTFSGIAPVTESSGKSSWVHFRFACSKFLRQSFHEWAALSIPQSKWARAYYELQCRRGKKHHAAVRALAFKWIRIIYRCWKERVAYDENVYLAALAKHNSPLVTATRAEAL

SEQ ID NO: 326690 - protein, 422 aa, unidentified
MSYCPVAGIDVSKRFSDMCILSPDNKIFAQEKIYHDETSINRANALLQKAERLFFSKPVIVMESTSHYHLILFQFFSEHGYDVIVVNPLQSNSMKDFSIRKRKTDCVDAFKLAMMYRTKTLRPSQIPQTATRALRQLCRHRAELLNDVSSYKNRLTALLDQTFPGYDKVFSDVGGVTSCAVLVRFPTPTILLVEEESELVEVIAAASKSGYSFAKKKAGLLISAAQKAQTLGIHSCADETLIVCTIQMLRTLSESVLQIETAIDNLLAQIKGMRNNVSLLQSIPGIGSHSAALLLGEIGDISLFKKPKQLAAYFGLDPTERQSGSFRGTKNKLSKRGSPYARAALHMGVVNSICKRGKDSAANPVLLSYYEKKCKNKPAKVAQAASMHKLVFIIFAVLRDQKPFELKTPEQHAVEQGFVKAA

SEQ ID NO: 326691 - protein, 337 aa, unidentified
MNHLCCGIDISKDTAVFSLLDHDGESLSNPMTFKNTTPGFKTAIKWIRKLTKPFKPYDLHIVMEATSVYYLSFAKFFNGQAGIIVSVVNPAQVHSFAGAELIRTKTDANDASVIARFAMAMSPRPWTPPAPHEEAMLSIVRHLEAVKDMVQAEKNRLHVLETVGSSTAGVQKEIRKHIKFLESQITDLGKGLKKLIKEHPDIDENVKLLCSIPGVGETTASAMLTEIGDISRFDNVKQLVAYAGIAPAEHQSGTSVRGKVMINKRGSRRLRKSLYMPAMVAAQHNPVIKKFYERLLAKGKKPICALVACMRKLLHIAYGVLKHKKEFDPNWNIPILA

SEQ ID NO: 326692 - protein, 331 aa, unidentified
MYFSQFIGVDISKDTLDAAVYPAKDKKMDFLHFDNTQKGLTVMMSWLKRRGIKATEMLICAEHTGVYTNPLIEFADKKGLALSLNSPLDIKRSMGIARGKNDAVDAGRIAEYAHNHKDKLRLYEKPSDNIRKLQYLLTERRQYMRQRTAIINLDCAMGKYGTNETRSRSESARHHCEKLVKKVEDQMLSIIHSDPDIQRNYDLVSSVKGIGLINAINTIVFTNNFKAFETPRRYACYIGVAPFDHTSGTSVKGRTQVSKICRTQQKAELSMAARSAIVSDPGLRKYYLRKMKEKGGGKDAHGVVLNAVKFKIILRMFAVVRSGEPYKVLNY

SEQ ID NO: 326693 - protein, 389 aa, unidentified
MENSITHIAMDTHKKQHAVAWADRETGEVQVFTVPNTPKDIKKMVKKFQRKAPGEVQFCYEAGVCGFTLKRQIEALGGHCQVIAPSLVPRKKGERIKTDRRDARKLLGQFLAGQLTAVHTPNPTQEAAREVTRCRQAAQDDLKRARHQLVKFLTRHGYLYHDGNHWTQKHDRWLRSLQFDIALLREVFDLYYTQLQHCQQRLAMLDKEVAALAAQPAYKEIVGLLRCLRGVETLTAITLVTELFEFGRFDSPRKLMAYLGLVPSEHSSGEKRRPGSITKTGNGRVRRLLIESAWHYRHRPVVSKTLTRRRKDQPQWAIDIADRAQLRLHKRHQRLMMRGKIPAKVVVAVARELAGFLWAILHEWQRRRGDNVSMAQESSWTKADVTATA

SEQ ID NO: 326694 - protein, 359 aa, unidentified
MLYIGIDQHRKQLTVCVRNEEGDIVLRRQVSTEWKRVRAFWTEIRTMAGETSFLAILEVCGFNDWLLKMLSEHGCRQVFLVQPEKQSKKKTDRRDANMLGEILWLNRQRLLDDKRVQGVRVIHLPSAADAEGRQVTQIRKRTGELCTRTINRIRHLLRKHNLEQECPTKGLDTVKGKKWLTEVALGAMDRIEMDLLLAQWKLWKEQIAALDAEISKRQAENKTAAVLATIPGSRAYSSLALATRIGEIKHFRSPGSLPNFWGITPGCRNSGEATDRLGSITKQGSAMARFILGQLVLHVLRRDASMRAWYSKIKRRRGSKIARVAVMRRLATIIWHMVKNNEPYVVGGPPRKKLAKKVA

SEQ ID NO: 326695 - protein, 467 aa, unidentified
MSTARRRPGRKAKARSPFIVLDRHAAGIDVGAAEHWVAVPPDADPIPVRCFGTFTADLQALAAWLLACGVTSVALEATGVYWIPLFELLEARGLQVRLVDARQTRALPGRPKDDIRDCQWIQRLHSCGLLRAAFRPDDQVVVLRSYLRQRQMLIGCASDHIRHMQKALEQLNVKLPEVVADITGVTGMSIIQAVLAGERDPVQLAKLRNKHCKQDEATIAKALHGNWRPEHLFCLRQALALYEFYQRQLAACDRQLDAQLQTFADRSAQAPVPPRPTGKYKKRHKHQGNVPAFDARTRLYRMSGVDLTRIEGIEEGTALVLLSEIGLDMNRWATEKHFCSWLGLCPQHKISGGRLLSRTVRPGVNRAAQAFRLAARGLERSQSALGAFYRRLKSRLGAPKAITAAAHKLARLVYSLLKHGQAYTAQGLEEYEREYQERQVRNLTRKARELGYTLVKPELAADAPVSG

SEQ ID NO: 326696 - protein, 370 aa, unidentified
MSVVRQVTCHPIHLLNEGTAVTTTMADTGVAVTGGVDTHLDTNMAAALDGVGGQLGTKEFPTTTAGYRALHTWLENFGTVVRVGVEGSGGYGAGLARYLGAQGVPVIEVDRPNRQNRRRRGKTDPIDALSAARAALSGEASGLAKTKNGAVEAIRVLRVARSSARRDRTEAINQMRSLVCTAPDELREQLRDLTGLALIDQAAALRPGANMSVIAATKTALRELARRAHYLGEQMDRLTALLGPLVAATAPALVACHGVGTDTAGALLVAAGDNPQRLSHEAAFAHLCGVSPIEASSGKVTRHRLNRGGDRQANHALWRIVMVRMVSDPDTRAYVERRTKEGRSKREIMRCLKRYVAREVYPLLAAEKTA

SEQ ID NO: 326697 - protein, 350 aa, unidentified
MGKINKSGANQKGQVTFLGIDLSKKSFQLHGVDAKGNVVIKKKLNRKALLPFIANLPECVIGIEACGGSHYWCRKFTELGYEVRIIAPQFVKPYVKSNKNDAADAEAICEAMQRPSMRFVPTKTMEQQDIQSLHRIRSQAVARRTALGNQIRGLLMEYGVIIPKGISYIRKQIPLVLEDAENGLTVLFRELLNELYEEMKHLDKRVEKLEQKLETIAANNEACQLLLTIPGIGLLSATAMFAAIGDITAFKNGRELAAWMGLVPKQASTGGVPTLLGISKRGDTYLRTLLIHGGRTVVRVADKYDDKRNNWIKELDKRRGKNISAVAVANKNARIAWAVLTKKEPYKAAA

SEQ ID NO: 326698 - protein, 335 aa, unidentified
MADKVTEAAVVGGVDTHKDLHVAAVVDQNNKVLGTQYFATTRQGYRQMPAWMTSFGALKRIGVECTGTYGSGLLRYLQNAGLEVLEVTAPDRMERRKRGKSDTIDAECAAHAAFSGIRTVTPKTRNGMIESLRVLKTSRKTAISARRVALQIIHSNIISAPDELREQLRNMTRMQLIRTLGSWRPDASEYRNVTNVYRISLKSLARRYLELHDEIADLDVMIAAIVDELAPELIKRNAIGYESASQLLITAGDNPQRLRSESGFAALCGVSPVPVSSGKTDRFRLNRGGDRAANSALHIIAIGRLRTEDKTKEYVAWRVAEGHTKMEAIRESPRV

SEQ ID NO: 326699 - protein, 341 aa, unidentified
MNIVTVGIDLAKNVFALHGVDQSGKAVFIKPKVVRGQLLEMVAHLPPCLIGMEACSGAHYWAREFSRFGHTVKLMAPKFVAPYRMSGKRGKNDAADAAAICEAVTRPNMRFVPVKDVDQQAILCLHRTRQGFIEERTALYNRLRGLISEFGIVLPQKVERLRREIGAHLEALPGWANRCVGDLLMHADRLNERIDEYDKAIAQAAKQDQRSRQLMQLPGIGPTTASALVASLGCGHDFKNGRQLAAWAGLVPGQYSSGGKARLGRITKAGDAYLRSLLVMGARAVLAGLGEKQDRFSRWARALVERRGYWKAAVAIAAKNLRLAWAVMHYGEDFRLIDEIA

SEQ ID NO: 326700 - protein, 363 aa, unidentified
MKIRVGIDLHSNNALCGLRDESGQRLVHKKLPCDLPAILKLLEPYKDRIATLAVESTFNWYWLVDGLQDHGYHVVLANPARMQPYSGMKYPDDVSDAYFLAELLRLKLLPTGHIHDRQTRPVRDLLRRRLLLVRQRTMLILSFKSLNERTLGQRVSLARVKAMKVEEAQARFSEPADPLLSGTEIELVGHLTTAITKVERHILGVAGKWPTYQRLQELPGIGKILGLTIALETGDAKRFADAGNFASYCRCVKSLRTSHGKKKGENHRKCGNKYLAWAFVEAAHFAYRYDDQSRRFYDRKKQQTNPVIATKSLACKLAKAAWHVMKEDGPYDATRVFGPARKKDFGETGREPAKGSGHPSQEN

SEQ ID NO: 326701 - protein, 331 aa, unidentified
MKNYFIGIDVSKMKLDVALHSTEGRLNCNHIVIENNGKGFKDLLTWFKKMKINHQEVLICMEHTGIYADKVVDFFETKGIAYSLQSALHVKKSLGLVRGKSDKVDAFRLSEFCYEKRATIKESQKPSQNIIVLKHLFTERRKLVGTRAQYKQIRSEIAIYQGKGFVKRKERIIKNLQRDIDEIDQEIIEIIKSDPEIYCNFLLLISIIGIGNVNAVGAIVYTNNFKNFSDPRAYACYIGVAPFPCSSGTSIHKRKSVSKMGRLQLKADLTQAARSAILYDPQMKAYFKRKFNDKKGAESNYGTVLNAVKFKLICRMFSVIRRQSAYIKFAF

SEQ ID NO: 326702 - protein, 419 aa, unidentified
MAHDEASEWYVGFDWASEKHRVCLLDRTGRVVGERDAAHDGADLADLCEWLVDKTLAEPGRIAIAIETPHGPIVEMLLERGFAVYAINPKQMDRFRDRFTVAGAKDDSRDAQVLGDSLRTDRRAFRRLCPDDPVVVELREWSRLADDLKQERNRLANRVREQLWRYYPQMLKLTDDVAADWFLALWECVPTPAKVAEARGAAIARILKAHRIRRFNAAEAVLILRQKPLAVAPGAVEAATAHIGAVAERIRLVNQQLKTAYRKLDELCARLEQPAESEPGQKSVQRDVAILRSFPGIGRINLATLLAEAWQPLQRREYSVLRAMSGVAPVTRRSGKACIVLRRLACNKRVESALYHWARVAVQHDPRSRAKYAELRRRGHSHGRALRSVGDRLLFLACTLLQRQTPFDPDYQRGDIAAA

SEQ ID NO: 326703 - protein, 312 aa, unidentified
MTDLICGVDVSSDGLDVRLGRDGEARRFGNDAAGIAELAAFCKQHQVMLVAMEATGGYERLAFAMLWSAGIAAAIVNPRAVRRFAEAMGFLEKTDRIDSGIIAWFAEVKRIAPRPPAGEGQRRLAALVTRLRQLTELRTAQNNQRRLVTDPLALSSFAELLGVIACQIKAIAEEIGKLIATDPLWRKLDLAFREIKGVADRTVARLMAELPEIGTLSGKAASKLTGLAPIARDSGKLSGNRPVRGGRSGVRSILFVVAELVRRHDPDFAAFHRRLTLAGKPKKVIRVALAHKLLVRLNAKARDVRQEIANPT

SEQ ID NO: 326704 - protein, 361 aa, unidentified
MHDSITWIGMDVHKESIVVAAVNGAGGTAARWETPNTSKGKERLAKRLSEFGTVRCAYEAGPCGYDLRRFLETKGIHCDVIAPSLIPKKPGDRVKTDKKDAEKIARMHRMGELTAIRVPTPAQEALRDLLRAREDANEDLVRRRHRLQKFLLRQGRRHEGKNWTRDHWRWIRAQKFEDRNSETVLSEYTAAIDQEIERIGRLDAQIEQESKNPEIAPSIARLKALRGVQTLTAMTILSELIDLNRFPSARKLMDFVGLVPGEHSSGQKQWRGSITKSGNSHVRRVLVEAAWHYRHSPRSTGAAIKKRREGQPPEVIETARKAELRLYKKFTRMVMRGKKTTVAATAVARELVGFVWAIGRI

SEQ ID NO: 326705 - protein, 496 aa, unidentified
MNRREKLLRPRDGCFGRIAPGGARSSKTCLTKASVSSPARLAASVQTSERTIAREAPGIRSTHDGATMHQKKMYPMKEWKEITHYAGFDWARDHHAVLIVDAAGQIVADFEFEHSQKGWETFAEKIALYPNLAIAIETNQGAAVDQLLQRELTVYPVNPVASESYRKRKAPSGTKTDHLDCWGLADALRVDGHGWKPLRPRDPLTEKLRLLCKDEVALIQQRTLLVNQLQQALVDYYPAALEAFEDWTADFTWEFIIEFPTPQSLVKGGKRRWEKFLHTHKLWRPETAQKRLEIFARADRFKASEAVIEAKSQLALSLCKVLRTLDQQLEQYRKQIEALFKDHPDHDLFGSLPGAKAVLAPRLLGAIGTDPDRYGSHNVLQCFAGTAPTRYQSGQVNRVKIRWACDPFLRHTIHLWANAFRKATVWGQTYYEKKREQGMSHACALRCLGQRLLKIVFRMISDKRPYDGEIHARNQKKHGSWVLDLVNGTAASNPGE

SEQ ID NO: 326706 - protein, 357 aa, unidentified
MNPKDKLADFRSQELFVGIDVHKKSWTVTIRLENLELKTFSMNPSSEELKNHMKTKYPQGKYHSVYEAGFSGYWLHRELTELGFNNIIVSPTDIPTSGKERLRKTDKIDSRKLARELSAGNLKGIYVPSLLFQELRGLSRQRYQQTKKLTRIKNQIKSYLNYYGQDLPENCELLHWSMKFICYLRTLEFSYEMGKEQLENYIDELLLLRSRKLKILQSLKKHLQKHNLYNKIKLLITVPGISYITATTLLTEIADIHRFNSTDSFASYIGLVPSTKSSGEKDKVLGITVQFNRYLRQLLVEASWVAVRNDPALTLSFTNYSKRMCNQKAIIKIARKLLNRIYYVLKNEKEYVRSVVA

SEQ ID NO: 326707 - protein, 392 aa, unidentified
MVVSVGIDVSKDKHDCFIVSAEGEVLADVFTVPNNMDGFHCLLQRIRDCTAPQDKIKVGLEATGHYSYNILGFLLDNDLPVYVMNPLHTNLYRKSLSLRKTKTDRVDAKTIATMLLSDVDLKSYTDIAYHNEELKSLTRYRFDKVQECAKLKQSVSRLATILFPELEGLVSSIHGTSIYALLSEYPGAKQISEVHLTKLTNLLTTASKGRYRKEKAIQIREAARASIGSVMPAKSLELKHTIKLIQELASEIDEIEDSIQKIIDELNPPILSIPGMGVNSAAVILAEIGDFSNFSSPDKILAYAGCSPSTYQSGKLTNCYAHMEKRGSRYLRHALYNATKYVCYWNPVFAEYLAKKRAEGKHYNVALSHAMKKLVRLIYALSLIHISEPTRP

SEQ ID NO: 326708 - protein, 363 aa, unidentified
MDDSTRTVTVGMDVHARSIRLVVVRADELLEERSLAYDEEAVERFLRRWPSVRCCYEAGPTGFGLYRHLVERGIDCAVVAPGLVPQRPGDRIKTDPRDARKLARLHAGGLLEPIHVPSAELEAVRDLVRAREDARLDRMRDRQRLSKFCLRHGRLLPTSSWTVVRRKWLGEQRFEHLGEQITFDTYLHAVDLVDARIGQLERSIREAAEQGPWRELVGRLRCLRGVDTHTALALVAEIGDFTRFGNAEQFMAFVGLVPSERSSGEQRRQGSITKVGNAHVRRLLVESAWHARRRPTVGYQLARRQRGQDATAVERSWRCQQRLYQRWQRMAGRGKPHQKIVVACARELAGFVWAIATEQPLRT

SEQ ID NO: 326709 - protein, 344 aa, unidentified
MPTEAPPSLYAGLDLHKHNVFCGLIDQEGKPIYRRRLPAELPVILQALHPYRSQLTAVAVESTFNWYWLVDGLQAADYPVQLANPAEMQKYSGLKQTDDETDALWLAEMLRLGILPTGYIYPKAERPVRDMLRRRMLLVRQATQTLLSLQSMVTRHTGQSVSAAKLQGWTLSEVRATFADPYCQQTAAALLELLGEQRRIQHRLEKQVLAAAKPTGPFQRLVSLPGIGNILGLTIALETGPITRFASAGDYASYCRAVNSRCQSDGKKKGENNRKNGNKYLGWAYVEAAHFAQRYSPRAQAWFAGKTARAGRVVAVKALACKLAKAAYYVLRDAVEFDENKLFG

SEQ ID NO: 326710 - protein, 342 aa, unidentified
MKEYHYVGLDVHKKVIAYCLKKADGTILEEGKMAATRDDLFEFAKRLPRPWAGAMEATLFTGWIYDFLLPYADDLRVGHSYMLRAICAGKKKNDRIDARKLADALRCDWFPEAYMPSPEIRELRTALRYRNLLVREEVRMKNKTAGLLMEAGAEYDADRLHGKKYFSDLLERVDYVPDSIKEIVTASRESTDYFHRAQKRLVDELVKNPALSARIGRLMSIPGVGEITALTWALEIDDPHRFANRKKAASYCGLCSREDESAGKTRRGPLSKQRNKHLQTVLVETAKLATRWNPQLAAVHLKAKDRGANRNEATIEVARMLVAYLLYVDKTGNIFQLKENLN

SEQ ID NO: 326711 - protein, 355 aa, unidentified
MTSTKYIGVDVHKESISIAVMNSAGKIVMECVIETKASMILQCIDGLRGDLHVTFEEGTWAAWLYDLLKPHVTEVVVCNPRKNALLKDGSKSDRIDARKLAEQLYMNKIKSVYHGEHGLRTLKELARSYLTITKDVTRVMNRLKALYRSWGIPCASNEVYAPRHRSEWLSKITEAGVRRRAEHYYQQLDTLRSLRQEVRRDLIVESKKHKAWKLLRQIPGIGPIRAALLVALIQTPHRFRTKRQLWSYSGLGLETHDSAQYRVVEGQLQRSKKPVTLRGLNENHNHDLKDIFKGAAMRASTAAGPLHDFYEALLAKGKKPTMARLTLARKIAAITLIIWKKEVRFDANELKPQAA

SEQ ID NO: 326712 - protein, 400 aa, unidentified
MLSIGIDVSKGKSTVCGMKPGGEIVYAPFEVQHTREGMSELVSLLRSSGEEVRAVLKSTGSYHCPVVAALLENGIFVSVVNSLRMKRFCSQSIRKVKTDRIDAMQIALYGLAYWQELQPARLPEDTYRELQLLARQYYQMTSMLIKAKVDFNALCDQVLPGMQELMSDHAGRHKLSDFVLQYCHTTHILEMGETRFRKDYCKWAEKKGYRNCERMAAHIFATAQNGIPVLPNAPSTQIVITEAIRVLHTVEASRDAILTQMQALAKTLPEYSLVREMPCIGDTLAPRLIAEIGDVRRFHSKRALIAYAGIDAPPYQSGKFCANNRHISKRGNRYLRKTGYEVMQSYVMHKPANDPIFTFIEKKRSEGKSGKLAMVAGLNKFLRVYYGKVTELYRSLPAIE

SEQ ID NO: 326713 - protein, 410 aa, unidentified
MNPLYVGIDVSCKSNVVCLMRPDGTKHSTFSVQNNLGGAKLMSKKITSALTAMQLSDVVIGMEATSVYGDNLMYFLREDGQLGQFNRKLHLLNPKQVKKFKEAYPDLPKNDTVDSFVIADHLRFGRISSEVYMDDYRYKALQMLTRARFSAVQNLTREKQRFINYLFLKCSGLAQEKVFSNRFGAASIALIESFEDVDELANMDLDRLAALIAKNGRNHFEDPKAVAKAVHSAAIGSYQLPQTVNNSVNQAMSVSVVSMRALEAQIKVLDKAIAKQFEIIPNTLTSIKGIGPVYSAGIIAEIGDINRFKGQASVAKYAGLVWTQHQSGSFEAEDTRLIKSGNRYLRYYLLEAANSLRRCDPEFRRYYNLKFKEVNKHQHKRALALTARKLVRLLFRLLKDNRLYIPPEEQ

SEQ ID NO: 326714 - protein, 324 aa, unidentified
MAHYAAFDVSDKETAIHVLDEHGKLVWKGKRPSEPEALAAALRRHAPELVRVGLETGRLTPWLFHALKGLGVPVVCLDARHARAATALQRNKTDARDAETLAQLVRTGWFREARVKSWAAHAVRHLVGARAQLVGMATDLSNQIRSLLRTFGLRITGRAGGTFERKVREQITGSPEVAAVAEPLLAAWRAMRDQIAALDRKLIEAARSNATCRLLMTCPGVGVVVATSFAAAVEAPDHFRRSRAVGAYLGLTPRRHQSGESDHSAGVSKRGDKLLRSYLFEAAACLLIRVQRPSALKAWGVGLVQRLGFKRAAVAVARKLSVTC

SEQ ID NO: 326715 - protein, 482 aa, unidentified
MKKRNIYQNQSQELLRLFEKASSSAKVMCVPMDYAKNDHLVMFCNGHGDILRKPFSVKNTPEGIAYIDDQVTRSCNKRGIQKKHVFFGGEDANSFAKNFVSTLRCKGWLVASVNAHDAKKQRGNVQASTDRIDLMGIATMLLNCRANCSPAQSGIYRNLRTLVRHRRRLVQMLTEVKNRVHGIVDELFPGFLNEKNTGIVPFTQSSLYLMENRFSPKQIRRRRRQTLIEILKRFGTSKAEETAVKLQQYAAKVLHAPVEYVGTMQLSLAQHVKHIRCLKESVAQMENEIAFNLAQTQGAFLTSVRGVGLVLAAGVTAEIGDPNKQKPLNNLASYSGIIPRVKQTGGLDGKTYTGPVAKRCNRILKDYVVKSAYHLGLHGPPDLMADYKRRDASGQHADFGIGRRYLRMAISLMRTSQVYLPPHLRKDDHTLEERAGYYLMSWPYLREKWKKVGALEAAFANNRPLGLWRQIVQEIYDIKLKL

SEQ ID NO: 326716 - protein, 414 aa, unidentified
MERYIGMDVHAASCTLAVISEKGRKLKDFPVETNGQALVEAIRMIPGHKHLVYEEGIQSAWLYEILSPHVDELVVAGVTTSKGQKSDKGDAYALAEKLRIGNLDKPVFKAPREFSRLREYSRIHMTLVRDTVRVQARIKSVYRSRGVMVAGENVYGPRCRGKWQEQLPSIVQTRIEGLYEYLDFLLEQKKQAEVGLLREAKKHRSFRIVETAPGFGGIRAARGVPIVITPHRFRTKRQFWSYCGLGIVTRSSSDWVQNAEGGWLKARVPQTRGLSRQHNHFLKAIFEGSCGRSGHSEYNDGDHTAQQGSHLCALRSASRWRHKAHARKAELGSHDRSDSAADVEGRGGVRSQTSGPAYEQSRRLSGRSVGRMDKKAVIRDRSREKCSQPTPGVDAEVSIHESPGPWLTACRSYA

SEQ ID NO: 326717 - protein, 395 aa, unidentified
MSKCSRVVIGMDPHKRSATIEAMGEDETVLGKGRYSTDQAGFAAMLANATRWPQRVWAVEGCEGIGKHLVLRLLDAGETVVDVPAKLSARMRVYATGQGRKTDDTDAHSIALVGVRMAGLRQVVNDETLEVLRLLVDRRRRIGEDHTRMVCQLHVLLLELIPGGAKKDLSAAQARQLLATVRPKDAAGKTRKRVALELVRDLERLYARKKAANKELVELVKVTRTGLLDLHGIGPSGAARLLVEVGDITRFPTKGHFASWTGSAPIDASSGDNVRHRLSRGGNRQINKALHMMAVVQLRNATEGRAYFDRKVAGGKTPNEAMRCLKRRLSDIVYRTMLDDLVATKATSAGTGPGGHRGNDSNSSAAGSHPHTSSSDKSLPGPARTQPTTPTRKAS

SEQ ID NO: 326718 - protein, 419 aa, unidentified
MFKIFYKNCCGLDVHKTWIYACIGITDATGKTEYHEARFSSFSKGLRTLAEWLQKYDCKLVCMESTGKYWVPVFNILEKTCDVTLAHPKYTKPQKGNKTDRKDAKWICDLFMCGMIKPSFIPPAAIRQLRDLVRYRSKLTNMLTSEKNRAHNCLTVSNLKLDDVFSDVLGKSSRSITEYILDHPGETFDVTPFVDGRCKTPIEEIQAAVDGSVSKEQAAKLRQCLEHIDELTAHKKKIEEEILQIAAPFSDYLDLLRTVPGCSSDKMTAVTILSEIGYDMSVFPSSKNLTSWAGCCPRNDQSAKHVKSTRISRAGAWIKPLLVQISNALIRSKKHPEFSERYRRIKARRGHKKAIIAICRMLLTAIWNILSKLEPYTPDGFINDRPSDKKKTMSTAEALKLLKSRGYVITDLPVDPVTA

SEQ ID NO: 326719 - protein, 476 aa, unidentified
MNSKTKRANNQVNSVMNIQEQREMVEKANRILSEMRSFTWRDLETQGKFSKNEKLSFISDDMLIVGCDIGSETHYVRAIDTRGRELSKKALAFENDAEGFQKARDWAVQLAAANDKKQIVLGLEPTGHYWFCLAAWMISNGISVVQVNPYAVKQTKELEDNSQQKDDRKDPKLIANLVKDGNYGMPYLPEKVYAELRRLSMFREQLMEDRNRHMNRLHREMKIYFPEYKDAFGKIDGAFCIAVLKEAPFPEDILRLGAEGLRDIWHKAKLRGRGYSRAEEIVKYAETSIGLEEGTAAGKEAVRWFAEKITELDEELAEIENKLEGKCGEIPHAENVLEIPGIGGKILAGILAEMGDITRFDDVKEIQKLSGLGLVSCSSGKHKGETRISHRGRKRLRYWLFQAARSAVAHGEEYKWIHAHDTTRAGNPLQKMQSLVVIACKLLRVIYTMLKTGKKYDPEKLLKDILYPESVQSAAA

SEQ ID NO: 326720 - protein, 368 aa, unidentified
MQELITGFVGLDAHAESTAIAVAEVGRTAPRFVGTVGARIVELTKALSKLGEPRSLYVVYEAGPCGYALARELARLGYRCEVVAPSKIPRRPGERIKTDRRDALKLAGLARAGELVSITIPDERDEAIRDLSRARVDAVRARHKARQQLKALMLRHGRRYSGKTSWSAAHERYLATASFAHPAQDIAFTEYRQAVGEGEARVQRLRESLTREVEHWRMHSLVSAVMTLRGLDLVAATTVVAELGDLRRFAHPRELMGYLGLVPSEHTTGSRRRLGAITKTGNTHVRRVLVEAAWNYRYPARISPALQVRQERQPPEIRAIAWRAQLRLNHRYRRLKARGLQHNKICVALARELAAFVWDIGRHVTPSA

SEQ ID NO: 326721 - protein, 284 aa, unidentified
MQDAQTQYSVGIDVSKDQLDVAFQPTDPPAQFSNDPPGHAALVKRLISLDIRHLVLEASGGYERAVVAELAAANLPVVVINPRQARDFARATGQLAKTDRLDAAALARFAAAIGPPLRPLPDETTTALQETLARRRQIVQMHTAESNRLAQARHVHVRQSIQAVITLLERQLKDIDNDLDGMIRACPAWQERAELLKSVPGVGDATARTLVAQLPELGQCSRQQIAALVGVAPLNRDSGTMRGRRTTWGGRAEVRASLYMATLVASRHNPTIRAQYHRLLQAGK

SEQ ID NO: 326722 - protein, 362 aa, unidentified
MTINAGVDLHKTQFTVFVKQSGNQFEQYSTEEDGYKKFLARIQRWKKNGMTVRIGVESTGNTRYFKNRMEKAGAEVVVINTLKFKVVNESVKKTDRHDAATIAEFLEKDMLPESKLCSEESEQLRRLLKVRTTLVRTNVVVKNQIHALLTGLGMKDTRASLQSKRGRQKILDTLERTGNGLVVQPLFETINRLEENVKSIENELEKLTEGDRTVEILMTIPGCGKIGAWTIRAFTDDVSRFASAKKYSAYAGLVPWVQNSNETIHHGKITKRGPEELRTALVQLVMGMRRCRSTASWRLMERYTEMKRNKGSGKSIIATARKLSKIIWCMLSSSEEFNPALMIDKKLLKKAESMRAANRQSA

SEQ ID NO: 326723 - protein, 414 aa, unidentified
MTKSHTAPEAAILVAVDIAKDHNEVLIELRHNQRRRFRVANTLEEYERLVAYLRQFDAPALIGFEATGNYHRPLAYFLHARGFELRLIPTMALARTREAMHNSWDKNDPKDAQVILHMLETGLSQTWHDPLVSGTNDAQELSKTHHQVTLARTRVWHRLRNHYFPLYFPEIEHFIRSDHSDWLIQLLLRFPTPGSITSLATEDFVAQAWSLVGRKVHKAALLAEIYAAAQRSIALPVPSDGAAVAMLRLVLEEYLALGRMRDSIALQAEIILASNPDRRRLMTVPGVGPLTALTILAEAGDLRRFAHYRQFLKFCGMSLSTQQSGRFRGISRLSKYGNARLRTAFWMAAKTAVRMRENSLRRKFDRYVRANPLDADLRRKGYSAVAAKLARIVYGLIKNGTDYRPFFEEAIPGG

SEQ ID NO: 326724 - protein, 331 aa, unidentified
MTNAMRETNSDSRPLEYIGVDMAKARFEWGVHGARATQSATNDAVGFEVLVTDLRPRRVGLIVIEATGGLEHALACRLLQEGLPVAVVNPRAAREFARSMGQLAKTDAIDALALAHYAHTLAHKANQAGVRLTALPEHLELLQAMVLRRKQLIDMRTAETNRRGGAMRVLRQSIDAVLKTLNRQIDALDQDIGTHLGEHFKELDQRFEEIKGIGPNTCAAVVAFMPELGQVSNARAAKLAGLAPLNNDSGNMRGKRSIWGGRSMVRGALYMATLSAVQHNPVITTFYQRLLATGKPKKVALTACSHKLLRILNAMARNGQPWNPQLHGISP

SEQ ID NO: 326725 - protein, 313 aa, unidentified
MSESLVYVGMDVAKATLDLYAPIPPRGQSRQFSNDRSGHRALVRWLRPLGVVQVVCEATGGYERAALEALRAAGITVSVVNARQVRDFGRAQGRLAKTDRLDAAVLAEFGRCLHPKVTAAPSAAQQQLAELVTRRHQVQQLRTAEHNRLEHATHPAVRRQVQRHVVALDRQLEELDAWLTELVRAEQSLAQKVARMCLVVGVGRITAITLLALVPELGTLNRRQAAALLGVAPFNRDSGPRRGHRLILGGRAAARRALYMAGLVAAYKNPWLKSFYHRLVAEGKARKVALVAVMRKLIIRLNRILQDPSFQPR

SEQ ID NO: 326726 - protein, 354 aa, unidentified
MIIVGCDYHPSFQQIAFVDTETGELKEQRLVHREGAEEFYRALAATGQRVCVGMEASGHARWFERLLAELRIELKVGDASEIQRKRGRKQKTDRQDAQHILNLLLKNDFPPIWVPSWENRDLRQLLWHRHRMVQARTRIMNQLQSVALNEGLRCRKRLWRAGGREQLESFGLAPWASRRRHDLLELLDRLNPTIAELSQSVEREAENNPAAQRLKTHPGVGALTALAFVLIIGDASRFQCGKEVASYLGLVPLEDSSGNRRRLGHITKQGSSMLRFLLVEAAQVTARSLPQWRSKYLHLMMRRGRKTAKVAMARRLAVRLYWMMRQGWDYQEWNKFGSHVGQPGNRHGVQSNIE

SEQ ID NO: 326727 - protein, 377 aa, unidentified
MSETKLFVGMDVHKDSVMVAVFPAGASEPTVVKRLPNEARKLRRFFERLSRQGEVRACYEASGAGYVLQRLLTTWGHTCEVVAPSLIPTRPGDRRKHDKKDAVQLARLYRAGELVVIRIPAAAEERVRDLVRCRETFQREVLRSRHYNLKFLRRRDLVYREGRNWTARHLAWLRGLQCAGALEAEDQEVFTEYLALLEYKLQRREELDRRIEALALRPAYRAAVERLCCFKGISTHAAMVLVTELGDVRRFDHPRQLMAYVGLVPSEHSSGEQRRQGSITKAGNSRCRHVLIQAAWSYRHPPRRGVPLKRRQEGQPAAVVVHSWKAQHRLHKLFGRLAYRRCPQIAVVAVARELVGFLWAVMWELEAETHDRIERAA

SEQ ID NO: 326728 - protein, 388 aa, unidentified
MNAVGIDVSKGKSTVTIRKPGDVVLMPPCDIPHTQSAINDLIKQIKSLEGETKVCMEHTGRYYEPVATWLSDAGIFVSAVNPILIRDFGDDSLRTPKTDKADSKKIARYTLDRWAKLKQYGIMDKTRNQLKTMNRQFGFYMDQKTAMKNNLIALIDQTYPGANDFFDSPARNDGSQKWVDFIHTYWHVDCVRSKSLNAFTEHYQNWCKRKNYNFSAEKAAKIYQISSDLIAVFPKDDITKMLIWQAVALLNTASKTVESLRSKMNELASTLPEYPVVMDMNGVGATLGPQLIAEIGDVSRFTHREALTAFAGVDPGKNDSGKHIQNSVQTSKKGSPYLRKALFQIMDSLIKRSPVDDPVYAFMDKKRSEGKPYYVYMTAGANKFLRIY

SEQ ID NO: 326729 - protein, 359 aa, unidentified
MNDVTRSFITRVGVDLAKRVIQVHAVDRGGRVVVAKALQRGAFISWCAGLSPGTLIAMEACSGAHHWTRKLISMGFDARMIAAQFVAPYRMQGIGGKNDANDAAAICEAASRPMMRFVPLKTPQQQAMLAVHRLREGYKEERTACINRIRGLLTEFGLVFAQSPDALRKVLADVIEDATNELPAVMRMALQHAHLHWLELECHIAWCDERIAAHVRTDEQARVAVQLCGIGPVGASALVSSVGDFSQFKSAKQFGAWLGLVPRQNSSGGKTSLGKITKRGDEYLRTLLIQGAKSAVLSAGKRKDRISRWLVQLVERVGWQKAAVALANKNARILWAVLSKGEVFDANYVSVMPGPAAPA

SEQ ID NO: 326730 - protein, 333 aa, unidentified
MQNFYFIGIDVSKKKLDICVMSKSKVLKEEQVSNHPQAIASVIAGLKEELSMSNDSFIICAEHTGQYTYPLMCACNSVGCKLWLENPSQIKYCSGVTRGKNDKVDARRIAEYAMRFLDKAKPYKRPTEELVRLKQLEAERSLYLTDLAKYKAQLTDQDGFMEDKIFKRKARRLKAMINSLEKTLKEIAAEMADVIDASEELSRQMKLLKSVEGVGSVVAMNMIIATEAFTRFDNPRQFNCYVGVAPFAYTSGTSQHSRNRVSQRAVKYIKCLLHMAAVAIAHKKTGDMKTYFERKVAEGKNKMTVLNAVRAKLVARMFAVIRNNRVYQPILSV

SEQ ID NO: 326731 - protein, 427 aa, unidentified
MKARVYAGVDLGGTFHQVQVTTVEGERLGKSFRIGRGRAGLAELRDGVRRVAGDDVEAVYTVEATQNFWLELVHPLQRDGASVYLVSPAKSAALRTFYRRHTKNDAIDAEALSRLPVVDPKLRPASASPPQWDMLRRLVRQSWLLKSQMANRKRRIMGRVLTVYPGYESVFRDRYCGASLLFCRRYLDPAKARRLGRRRLVVLMRKRALGKFDDARAERLWQVIENAPELNLCYDDLQLLLNQDLDLLEAEERSQQALRERIAELYGELDPSTRLTSVPGLGDYLAATITAFIGEPGRFTNADQVVALSGLCARLKSSAGTDAANQPLTQHGDPVLRGCAYLAAEICRHYDPELRAFHRRLTARGKHYKQASCALAAKILRRCFALLREQRDYQIAHQDEMARARSEEGKTVRGSVHEVAERLNDVS

SEQ ID NO: 326732 - protein, 448 aa, unidentified
MEVVYRRCCGIDIHKDFITACVLVNEPGKQREVRKKEFRTYWSDLQKLKLWLYASKVEQVGMESTGVYWKPVWNVLEGHFPLLLANPYHMRNIPGQKTDQKDSEWISDLLAHGLLRPSFVPPRPIQELRDLTRYRAKLTGECNRVHNRIAKILEDANLKLGSVASDILGLTGRRVIEAIIAGQEHPDWLADKACGTLRAKRDQLRLVLKGRITDHHRYMLRELMADLDQIEAKILRLETEIADQMRPYAGAIERLMTIPGFKLITAWSVVAEMGTDMSAFPDAAHAASWAGLAPGNNQSGGKRRSGRTNKGNRWLRRALVQSAWAVSHKKNCFLTAQFYRRAARRGEKKAIVATAHQLLVIAFHILRDGTVYREKGGNYFDQLNPERTKRKLMARLERMGFDFILRHSTTDPIPPPSAPPPSAPPPSAPRRGRPCKCVERGIDCKHSQ

SEQ ID NO: 326733 - protein, 345 aa, unidentified
MKYYAGLDVSVKETSMCIVDQTGKICREVKVTSHPDDLIVVLKDPAWNMERIGLEAGPLSQWLFEGLARAGLPVICIETRHTKAFLKAQPNKSDRNDARGIAQMMRVHLYRAVHVKTLTSQKRRVLLTARKLLQDKAIAIENDLRGLLRNFGLKVGVVGSAKFEARIRELVEGTLDLVEIVEPLLDARRKLREHFATLHRKLLMIARDDEVCRLLMTIPGVGPVVAVAYTATIDIPQRFKNSKAVGPILGLTPVLNQSGESHRVGRVSLCGDGMMRTLLYDAAQVLLNPVAKWSWLKAWAMSVAKRRGLQKAMVALARRLAVIMHRMWSDGTEFCWSREKLPASA

SEQ ID NO: 326734 - protein, 428 aa, unidentified
MNGVDRNRLEEFRQLKQEIRHSEQYLIVGIDVAKDRHHAFFGTASGKTLLKNAVFDNTYEGFRRLLDQTEALRVRHGLSKVVYGMEPTANYHKPFGEGLIELGRNVVVVSGLMAKRNRESLDGRWDKHDRKDSANIADLIAQGKCLFYDYPVPELRGLRNLIALKRRLKKQEQSYAIRIRNQLIARYFPEMDRDYRGLGAEGLPIVRWCLPASEIAQFEVDAFVERVSSKRIRAEKRRRLEALWEKAAESIGCEPVPGLDHEAKLMVEGLKQIREMIQETEQKIQELCKSFSSYGYLLTLPGFGPDVSAKVLGAVGDPERFVNGRQVLKLAGLDLGADRSGKNSDKAIPEISKRGKADLRQALYQAALVASRRNPEFMRYYRSKIRGREKEQGIHRKMLVKLSAKMLVIAWTLMKKQEAFNPAFIKVE

SEQ ID NO: 326735 - protein, 339 aa, unidentified
MKLYGAIDLHSNNNVTVLIDEQDQVVYQKRLPNDLPLIAQQLSGYQDALQGIVVESTFNWYWLVDGLMDQGHRVHLANTAAIQQYEGLKYTDDHSDARWLAHILRLGVLPEGYIYPKEERAVRDLLRKRSQMVRQRTTNLLSIQNLITRNTGSSIRSNRIKTLDTEQVDELLPNPDLALAVKANLAMINCANGQIDILERTVIDRIKLREEFSFLKTVPGIGQILALTIMLETAEIKRFPTVGDYASYCRCVGSQKLSNGKKKGSGNTKNGNKYLAWAFVEAANFAVRYSSRIKSFYQRKKAKSHGVVAIKAVAHKLCRACYCIMKDRVPFDVAKAFAG

SEQ ID NO: 326736 - protein, 344 aa, unidentified
MEHFAGLDVSVKETSVCIVDDVGKIVREVKVASEPEALLAVLKNPAYHFKRIGLAGPLSQWLYSALAGAELPVICVETRHMRAVLKAQINKTDRNDARGIAQMMRAGLYRPVHVKTLRSQKLRMLVTHRKLLQAKAIAVENDLRATLRNFGLKVGVVGTVKFEARIKELVEDVPDLAVLVEPLLVVRRVLREQISVLHRRLLAIVRDDDVCRRLMTVPGVGPVVALTYRVTVDVPVRFRKSKSVGAVFGLTPSRHQSGESDRPGAISRCGDEMMRSMLYEAAQILLVRSTKWSWLKAWAMKIARHRGMKKAIVALARRLAVIMHRIWVNGTAFRWTQEQAAAAT

SEQ ID NO: 326737 - protein, 387 aa, unidentified
MPQPNDLSRSLLPLTQDHTLIAVIEMSQSSWLVAGIVPGVERQPLKKLAPDEHTLLRLLQRWQDEAAKGGRTVTHIAVAFEAGRDGFWLARWLQSRGVEAHIIHPTSVAISREHRRAKTDRLDTAMLLRVFLGWLRGERGHCSMVAVPSIDEEDAKRPSRERESLVGERTRIINRMKSTLVRLGIRGFKPELRLAPQRLEGLRTPEDLPIPPNTLDELRRDLARLALVRNQIETIERVRIERLEQAPKTGANAMVCLLASIIGVGIETADMLVQEVLSRNMRDRRAVARYAGLTGSPDESGSKRREKGLAKSGNARVRRGLIQLAWRFLRFQKESALAQWYRARTEGLNGSRKTTMIVALARKLLIALWRMVTIGEVPQGVVLRPTM

SEQ ID NO: 326738 - protein, 351 aa, unidentified
MSKVYIGIDLAARCCWGVTLDQGGQLISMERFLTSGENLVAYVKGQPGEATVLMEECDLAGWALRVLLPHAEKVAVCEPRTNLWIHRDAVKTDKIDARKLAQIAMSGNYKEVWHTRDQEIYKLQMAVRAYERLSRRTTALKNQIKSELRGVGLITEGAWVFGKRGRRDILALVVDPVVRAIIASDYELLDFTLKRQAEAKGRFVRLGRQIGICRAFEEIPGVGPVVAAKFCAYVKCPQRFAKKGELFRYSRLGVSRRETGGKRVRGEHLDPSGCGALKDISHKAFRAALRTRGDNLIKRSYARTLASTGCEAHARLTTQRKILAIMWAMWKHGELYDDNRDLKERACEARL

SEQ ID NO: 326739 - protein, 317 aa, unidentified
MEATVVGIDVSKDRLDVAVYPSDEPGFAVTRDAAGLDALAARLKPLGPAAVAVEATGGFESVVVASLAAAGLPMLVVNPARIRAFANALGKRAKTDPIDAQVIARFVAATKPELRPLPDEATQRLADLVARRRQIIAMMVAERQRQKRLLAPRLQHSITRLLEALQKELSEVDREIDAEVQGSDIWREKEKLLASVPGVGPVIARTLLAEMPELGRLDRREIAALAGLAPWTRQSGQWRGKSFIGGGRASVRAVLFMGAITAARHNTILKAFHQRLIDAGKPKLVALVAVARKLLTILNAIIRSRQAWKSDVHAASI

SEQ ID NO: 326740 - protein, 389 aa, unidentified
MLFDHPSDGPAAIRTHIGAIFVSLELSRSNWLVTSLSPGKGEKMSKHGVTAGDVAGLMKLFAEFKRKAAIRTGQNYPIITIQEAGLDGFWLHRVLQQERIESHVVDPASIAMPRRRRRAKTDRLDGETLLRALLAYKRGEPRVCAMVVAPSPEEEDRRRLCRERATLIAERVAHVNRIKGLLFAQGISDYAPLRRDRQSRLETLRTGDGRELPSHVKAQIGRELERIELLLEQIKAVEAERDALLAAARKPASEQAARDAVTMLLALKGMGANFAAVLWSEAFYRQFANRRQVAAYAGLAATPWQSGGIRHEQGVSKAGNPRLRTTMIQLAWLWIRHQPKSPLTRWFKERSQQGRKRAIVALARKLLVALWKYVTQGVEIEGAVMKPAA

SEQ ID NO: 326741 - protein, 328 aa, unidentified
MTMNPALPAFNHVVAFEVAKDSLVIHVLPAGEQSVIANKPKAIRKTLLAELRRNAKASLGPLLVVCEATGGYERPILDLCVELGIAVHKAHGSRVRCFARYLGLLAKTDPIDARVLALYGLKTPDLHLYVRPAPEVLALRDLKTRRDQVQEMLFAEKNRLEHARHASVSRSLSAHVASLRKALAALEAEMAALVKASETLARKARLMQTLKGVGPATVAALLAYLPELGALSRSGIACLAGLAPFDDDSGKFKGPRHIQAGRAAVRRTLYMAALVAIRHNPVMRLFANKLRRNGKPSKVVITAVMRKLIVTLNGILRSGEPWSHAKIA

SEQ ID NO: 326742 - protein, 419 aa, unidentified
MAFIIFRKNCCGLDVHKTWIYACIGITDTNSRTEYKQARFSSFSKGLKELADWLAKYSCADVCMESTGKYWIPVFNILEKSCFVTLAHPKYTKPQKGNKTDRKDAKWICDLFMCDMIKPSFIPPADIRQLRDLVRYRTKLTNILTGEKNRALNCLTVSNLKLDDVFSDVFGKSSRSIISYILEHPGQSFDVSPFVDRRCKKPIEEIQAAVDGAVSHEQATKLKECLNHIDEIRTHKQNIEFEIQHLAEPYAYALELLRTVPGLNSDPITAISVISEIGVDMSVFPTSKHLVSWAGCCPRNDKSDSKVKSTRISRAGTYLKPLLVQVANAVIRSDKHPEFKERHRRLKARRGHKKAIIAICRMLLTAIWNILSKLEPYSPNGYLRDKLTEHSVVISKAEGLALLRKRGYIFEDEVLSSSP

SEQ ID NO: 326743 - protein, 364 aa, unidentified
MVVVGTDAHKYSHTFVATDEVGRQLGEKTVKATTAGHATAIMWAREQFGLELIWGIEDCRNMSARLERDLLAAGQQVVRVPTKLMAQTRKSARSRGKSDPIDALAVARAVMRETDLPLATHDETSRELKLLTDRRDVLVAQRTSAINRLRWLVHELDPERAPAARSLDAAKHQQALRTWLDTQPGLVAELARAELTDIIRLTGEINTLAQRISARVHQVAPALLEIPGCAELTAAKIVGEAAGVTRLKSEAAFACHAAVAPIPVWSGNTAGQMRLSRSGNRQLNAALHRIALTQIRMTDSRGQAYYQRLQDAGKTKRAALRCLKRRLARTVFQALRTVHQPSSEHTQPAAACHRSYCSRSCLSG

SEQ ID NO: 326744 - protein, 343 aa, unidentified
MTKLNVIGVDLAKNVIQISVLSPSNHELRNSSLTRRKFAEFLGRQRPSLVAFEACATSHYWARVAQRHGHEVKIIPAKAVFPFRQGHKTDENDALAVAEAASRPNVKLAPLKTIEQQGMQAIQRSRELLVHERVSLSNHIRGLLMEFGIVIPQGFASLYRLLPEILEDGENELPDLYRPTLNLLYGRLCDLREDLARLNHEIETLVQNNPVCRRLTALEGIGPIGSVLLYATLGTGEAFANGRQFSAYLGLTPKQFSSGGKVNLVGISKRVANRRLRAVLITGARAYVYRMKEPKTTKDRWLWAIVERSGKCKAAVALANKNVRTAWAMLTQNTEYRRYPLAA

SEQ ID NO: 326745 - protein, 311 aa, unidentified
MASIICGVDVSSETLDGRIEGSGLELSVRRDPEGIASLGRFCVEHGVDLVVMEATGGYEKLPFGLLWAAGVPCAIANARSVRRFAEAMGVLEKTDRIDARVIADYARAKGLVGQVPESRTQERLRALVTRLRQLTALKVSQSNQRRLVMEPEVMATFDEMLALIARQSRVLEARIAELLDADPLWRALDAAFREIKGVAGRTVARLMAEMPEIGTVSNKAAAKLAGLAPIARDSGKRQGRRPVRGGRAQVRSILVVVAAVVARHDPDMAAFHQRLIQAGKPRMAVRIAVARKLLVRLNAKARDARALMLPA

SEQ ID NO: 326746 - protein, 350 aa, unidentified
MSVKHYIGLDVHKKSVSYCVKRGDGQIVEEGKLPATREALRQWALERNEPWQAAMEATLFSGWIYDTLQPYASQLQMGHPAMMKAIAASKKKNDRLDARRIADLVRCDLLPACYVAPTQIRELRRLLRYRNLVVRQAVRQKNKIAGLLMEVGASYNKRRLHGAKYFHELLEGLEEVPPSVKDLLRLSRGALQMFEVTQRQLLGRLRNDSRLAQRVRLLSSIPGVGEVTALTWALEVGEHERFGSIAHAVSYCGLTSALRASAERQQRTPLSKQRNVHLQTVLIEAAKLAPRWNEQLAAVHARELERGHRNRATLVVARKLVAYLLAVDKSRQPFQMRSPVVEATPSDQAA

SEQ ID NO: 326747 - protein, 410 aa, unidentified
MPEPTSALYVGVDWGNQTHQVAVLDTARGLRGERGVAHDGPGLHAVASWLAELAAPGTVAVAIEVPHGAVVDTLLERGFAVYALNPRPMDRFRDRDTVAGAKDDRRDAQVLAAALLTDRPAFRRLHVDDPQVVQLRELTRIEAELSEELRRLANRLREQLLRFYPQALELCPAADEPWFWALLTQLPTPTAAARRRRGPGAALLREYRIRRRTADEVLTVLRRTPLTVAPGTLEAATEHIALGLPRLELIATQRRACAQRVETLLAVLAAAGQQQGHRDVTILRSFPGVGRVVAATMLAEASQLLAARAYHRLRASGGAAPVTRQSGKQRGVPMRYAWNPRLRNALDYWAFIAARHDPATRQHYEGLRARGHSQGRALRGVADRLLAVLIVMLKTQTLYDPSRREAKFAA

SEQ ID NO: 326748 - protein, 461 aa, unidentified
MSKKAAAARQERSARKNVDLKALEIVHPNAAGIDVGGSEHWVAINPELDAEPVRSFRCFTADLHEMAKWLLEKGVRSVAMQSTGVYWMAVFEVLEKHGLEVYLVNARHTKNLPGRKSDIQECQWLLKLHAFGLLNNSFQPTDEIRVARSLWRQRGNLTAMAGSTIQRMQKTLTEMNVQLSTVLSDLSGVSGMKIIRTILAGERDPWKLAALVDRGVKAKPADIAKSLEGNWREELLFLLRQDVAQYELYQRQIADCDIQLRQHLESFGSKVDLALNPIGPKPKGKKGSKNAPQFDLRSELYRITGIDWAQINGIDVLTAQTVIAEAGADLKAFPSEKQFASWLGLCPTNETSSGKVLNRRSRKVVNRAATAFRTSASTLLRSQSYLGAQYRRLRTRLGAPKAITAMARKLACLFYRLVKHGQQYVDKGTEYYEARYREQQVLALTRRANKLGLQVVIPKTA

SEQ ID NO: 326749 - protein, 416 aa, unidentified
MDVIVARCAGLDVHKNTVMACVRAPGPDGGRISTVRRFGTFTDALRQLRAWLVAEGVTQVAMEATGVYWKPVWHVLEAVPEFELLLANAHAVKNMPGRKTDVADAEWLALLCECGLLRPSFVPPPVIAELRDLTRYRKKLIEERSRETQRVQKLLEDAGIKLDSVVSDILGVSARQMLEALIAGVRDVEALAELAQTRMRPKIPQLRRALEGRFGAHHALMLQMHLDHVDQLSAAITRLDVEVDRVIRPFSAQLQRLITIPGVGRRTAEVIIAEVGVDMRRFATAGHLASWAGMCPGNHESGGKRRSGRARKGNQALRAALCEAAWAAAHGKTGYLPAQYRHLMRTFGKKGQTRAVFAVGHSILVIAWHLLANDCDYTDLGAEHFTRNADPEARKHYLIRQLEALGHKVTIEPAAA

SEQ ID NO: 326750 - protein, 375 aa, unidentified
MKEKLRFLGLDVHAETISVAVAEPDGEVRSLGTIPNRAESIRKMIKKLGPVEKLRACYEAGPTGYVVYWQLAELGVQCTVVAPTLVPTKAGDRVKTDRRDAEKLARCHRSGDLTAVWVPDAGSEALRDLVRAREAAKQDQMRARHRLSKFLLRSGHRPPSGVRPWTRPYLIWVAQLRFTQIAQEATRQDYLHEVEHMRERVARLEQAITEAVKLASPALQQVINDLQALRGIADISAVTIAAELGQVSRFASARQLMGYCGAVPSEDSSGKRTRRGGITKTGNAHLRRIVVEAAWSYRRPPCIWYGLRRRQESISEEVKEIAWKAQHRLHKRYRKLGAVGKDRRKITTAVARELLGFIWAIGTRAEAVARQQVAA

SEQ ID NO: 326751 - protein, 343 aa, unidentified
MERYYYIGLDIHKKIIAYCVKAIDGCLIDQGKIAADRQSLEAWVKGLPGPWIGAMEATIFTGWVYDFLKPHAIVLKVAHPAMLKAITAAKKKNDRADAEKIADLLRVNLLPECHMLSEEIRELRRILRYRNHIVRTAVKMQNKMSGLLMEVGVSYSKKRLHGKKYFRELLERVDEIPPSVKELLQLSRSSYEMFRSFQKRLVATLRTDSLIRDRVHRLMTIPGVGEITALTWVLEIGDPERLSSIRKAISYCGLCSAQKESAGKEQRGPISKKRNKHLQTILIEAAKLAPYWNEQLAIVHERESKKGNKNRATLAVARKLVAYMLAVDRKEADFTLSGAIQVA

SEQ ID NO: 326752 - protein, 368 aa, unidentified
MKKNNTCLKSPKRNKTRKRSLTIGMDLGDKTSRYCVLDSDGEIVREGTVTTTKKGMRQRFGSLAGCRIAIEVGTHSPWVSRLLSSLGHEVIVANARQVKLISASSRKDDRLDAQTLARLARMDPQLLRPIRHRSEKAQGDLMQVRVRAALVDTRTGLVNAARGLAKAMGERLPKCDADQMGVAKTQGMPAELTEALRPLLETVEALTKQIKASDQKLEQLAERDYPETELLRQVSGVGSLISLTFVLTIEDPSRFQKSRDVGCYVGLRPRRSESGESRPQLGISKEGDEYLRKLLVQGAHCILSHKSPDTDLKRWGLKLAGKGNKNAKKRALVAVARKLAILLHHLWVNGEVYEPLRNSRLLEQKAVA

SEQ ID NO: 326753 - protein, 325 aa, unidentified
MEEKNNYCGIDVSSETLDLYFKNKEGILQHFQVTNTVTGFRKMIRLAGQETHFVMEATGVYHLHLIFFLKEQNIAFSVVNALQIKRYIQMHLERNKSDKKDAKRIYEYGVERRPEIYAMPDTEYFECRSLNNAIHDLTKEITKFSNQIHSIKKCPFDTKTIEKSFEKIIKKLREEKQNLEIILQQKLVAWEAEMLKLVTSVKGIGRRAAAELIIYTQGFKDMNSYKQLISYAGLSPTEYRSGSSIRGRVRICKQGGKQLRHILYMCGLNAKKTNSQCKALFDRLVEKGKNKKAAVIAVCNKLLKIVFGVVKNKTMYQDNFIAKSA

SEQ ID NO: 326754 - protein, 419 aa, unidentified
MDSSRTQKVRKINDRTMIVAVDIGKGFHVGYFRGPNGEERKPFPFYNSAKSFNEFWGSVCEFFRKHDLKEVVVGFESSGPYAEPFFHYLRKKPVTLVQVNPMHTKRVKELTGNSPNKTDRKDPRVIADVISLGHALTLVVPKGPAAHLRRLTQARERALKRRTAAVNQLQDLIFVIFPEFLKIMKGISTKTAFYLIKKDPTAEGIVALGLEPLTTLIKTTSRGKLGRQRAEELFDAAQSCVGVQEGKRSIVLEIEYLVSQIGADSRFIVGLEKQMGEYLQEIPYSQSVLSIKGIGRVTAAGLIGEVGDFRKFRTISEITKLAGLDLFEISSGKHRGRRRISKRGRAVLRKLLFFAAINVVKTNGILHEPYQQMLCRGMPKVKALIAIARKLLRIVFALARDNTVYVENYVHNQHLKLAA

SEQ ID NO: 326755 - protein, 372 aa, unidentified
MNNQSIHIDGQPGHRLHNHDNSSPAVSTIKMGLDVHQASVVVVAQWDHSTPKSPQRLSADAFVGWMKRLKAQGHRIISVYEASGFGFTLHRRLEALGVESYVTTAQILDSRLSGVKTDGRDAHELCLRLDRYVQGNLRSLTMVHVPTPEHEQQRSVGRQRQQLVHQRVMLEITGRSLLATQGIFTSGSWWHPRRWDQLKPQLPGWLQSRLETLRPVLGLLQHQIDQLSAELEATVDRSTLPKAVGQLSAAIINREVGDWNRFHNRRQVSSYTGLCPREFSSGNQRRQGSITKHGNPRLRRALVEMAWRLVRFQPGYHAVKKWQLKMREAAATQRSRRKKIIVAIARQLAVDLWRLNTGQTTPEKLGLTLAPL

SEQ ID NO: 326756 - protein, 348 aa, unidentified
MIRNKPSAAVYGIDLGKNVFHVVGTDAAGNVIQRARFRRDTLLAFFERAERALVGMEACPGSQWLARKLQAIGHSVRIIPAQFVKPYVRSNKNDTIDAAAIAEAVVRPTMRFVQIKEPDQVDLQALHRIRDQLVGSRTRLICQMRAFCLEYGVAIRQGAGVFKLDLPRVIADESNDLTPTMRRLLAELFDDLSRLEKRIGGVTREIEGLAATDELARRLMTVPGIGPLVATALLAAAGNAQQFKKARDMAAWLGLVPQQYSTGGRTQMLGISKRGNRYVRRLLIHGARSCMMHLDRSRDRLGAWIDRLQSRMHVNKVTVALAAKIARIAWVVINRPGAIYERRDPAIA

SEQ ID NO: 326757 - protein, 370 aa, unidentified
MKEITTSYIGLDIHKDSIAMAIAEAGRSAPRFIGTMTPEPAALCKALTRCTKRSNTLIVYEAGPCGYGWTRYLSAQGWRCEVISPAHITRKASEKLIKTDRLDALLLARESRAGNLVRVVVPDERDEAIRDLARAREDAGAARLRARLQLKAMLLRHGRAYQGKTSWTEAHERHLAGIKFELPAQQIAFDEYRQAVKDAHERLERLTQALREQCEHWRMKGVVKALMCLRGLDIVAATVFIAEIGDLSRFAHPKALMKYLGLTPSEHSSGNTRRQGPITKAGNKHARRILVEAAWTYRFNPRVSRPIEIRQQAQPKAIRDIAWKAQLRLAYRFRKLNAGRKMTQNKCCVAVAWELAAFIWDIARQVQIPA

SEQ ID NO: 326758 - protein, 346 aa, unidentified
MLYAGLDLSRQRLDVHVLDEEGRTIEVMAVHPDADALRTLAAHVLRHGQEVSAAIESMTGGRFVHDQLEFAGWDVAIADSAKVKGIAPLAAKTDKIDAWVLADLARRNLVPEIWLPDPRVRAERERARFRLHLVRHRTALKNRIHATLMTFGHSVPVSDLFGTAGRELLAGLALPAPWATTLTTSLCMVDELNIRIDACERDLVRLGADHPYIPLLLTVPGVGWVLAYTIASEIGDIARFASPKKLAGYTGLCPFVRQSGNHDLRGPLAKNGPKYLRWALVEAATHAARDAHYRARYERNKKRLGRQRGAKVARIDIARQLAEAIWHVLTKNEPFSPAGPAIALVA

SEQ ID NO: 326759 - protein, 449 aa, unidentified
MSDIPTSSTQPEFGALIGIDWGDKKHAWALQVGDSTKIEKGDIEHTPEAIQQWAAGLRQRFPTGRLAVALEQSRGPLVFALSKYEHLTLFPIHPTSAAEYRKIFRPSGAKSDGPDAVLHLDMLARHRDKLRPLNPDTPETRALQLLTEDRRQLVNERTRYSNRLTANLKSYYPQVLQWFDDLYAPVTLDFLDHWPTLEELQKAKPGVWSEFFQEHNCRDAKTQQRLAAIPMAVTATTDFAVVTAGRASVCAAVRLLRNLNQAIQEYDRQIDQLAKGHPDFAIFQSLPGAGKVMVPRLIAAFGTQRDRYQRAADIQQYSGIAPVTEASGQQLWVHWRWGCPKFLRQTFHEWAAQSIAQCDWAAAYYRVQREDKNKSHHAAVRSLAYKWIRIAFRCWKDRQLYDDSKYELALKTRAKATPEPKQPSAFPLPLRWISCAGFQKLAEKNGENT

SEQ ID NO: 326760 - protein, 461 aa, unidentified
MSLMYRRCAGLDVHKESISVCARVRVAGGRQETESARFGTFTRDLNDMADWLKARQIRHVAMESTGVYWRPVWNVLESTKWKFDLLLVNPQLVRALPGRKTDQEDSGRIAGYLQQGLLRGSFVPPKEIRELRELTRRRTHLQSDRNRVINRVGRLLETANVKLGSVLSNIVGKSGRAILNAITAGESNPETLAGHTFGHVQCTPQELAQALEGRYDDHLRWLLRQLLDDLDVLDRRVAAVDLRIGELTVDQRDVIARLCTLPGVDVTTAYTLMAEVGTDMSRFADAKHLVSWAGLCPGNSESAGKRLSGRTRKGDRYLRRILIQNAWAVAHMKDCALTALFYRVAAHAGMKKAAVAVAHRILTLAYYILRDGTEYREAGGDCYDRRSPAKTAKRLKRRLERIGFEVTLKPRQEAPKTPPPRDTSHKPTPPPGQNCKRCNAWGIPCIHVRPRGTKKPTEPSH

SEQ ID NO: 326761 - protein, 342 aa, unidentified
MDVSLEETAICIVDDAGCIVREARVASEPEALVAFFDACGMTMERIGLEACSLTGWLHAGLTETGLPAICIEARQAKAAMGAMPNKTDRNDARGIAQIMRTGWYRAVHVKSPCCRSWRALLTARRMVLNKRRDVENGVRALLREAGLKVGTPSRKDFPARVRELAADEPVLMSLAESLLSVIDVMSREAEKLTKRVLDEVRVEPTCRRLMTVPGVGPLTALAFRATIDQPERFRKSRDVGAHLGLTPRRYQSGETDVQGRISRCGDELARTALYEAAHSLLIRSTRWSALRAWGMSIAKRRGMARARVAVARKLAVILHRMWADGSEFRWGKQAAAPVMATA

SEQ ID NO: 326762 - protein, 362 aa, unidentified
MRIIGCDLHTRQQTVAMLDTTTGAVERQTLRHDGSNTREFYSALPRPVLVGIEATGSMHWFLNLMEELGIECQVGHPGKIRAAEPRKQKHDRRDAELILTLLVENRFPSIWLPSKELLDLRALLLHRHQWVRMRTRVQNALQAIALANGLRRGPSLWSQTGQDMIASLPLALHTAHRRSELQAIYGKFQAEVEKLNQRVEEQACKRPGARLLMTHPGVGPITALATDVFLGDPTRFADGKALASYVGIIPREYSSGGRQRLGGLSKQGNPLLRFLWGEAAAHAVRRDPELQRFYRRKLLQKGVGKARVAVARKLGIRLWIMLRDEIDYKEFCRRGQMQQRSGDACAGMPEARNGADSHRPID

SEQ ID NO: 326763 - protein, 402 aa, unidentified
MSFVRRFDVVRIYAGSEMAAYPAALHFWRYDMKDKSKVVFVGLDVAKDTLAVSVADEGRDGEIRDWGTVSTAPQSVERLPKKLAARFNKVEVCYEAGPTGYGLHRHITAFGFSCSVVAPSSIPVRAGERIKTDRRDAMRLARLLRAGELTPVWVPDETHEAMRDLVRARESAAEDQRHKRQLISAFLLRHGRIYHRTKTWAMRYRRWLQRQSFDHPAQQIALQEMVLTEHHAVERVARLTTGIEELVPDWQLGPVVEALQALRGVALISAVTFMAEISDVRRFENPRKLMAYLGLVPSEYSTGQTIKRGGITKAGNSRVRRTLVEGAWTYRFPARIGEKKLYVLQKLPPEIQDIAWKAQSRLTAQYRRLSQRGKKKTVITTAIARELSAFMWDIARKTMPVP

SEQ ID NO: 326764 - protein, 424 aa, unidentified
MHNRSATRMKNWKTFTHYAGFDWAKDHHAVVIVDAEGRIIADFEFPHSLEGWQTFAQKTSAWPHLAVAIETSQGAAVDQLLQREYALYPVHPVSARRYRERKAPSGTKTDHLDAWGLADALRVDGQGWKALQPLDALTQQLRLLCRDEVSLIQQRTVLVNQLQQALAEYYPAALAAFEDWTDTFTWEFVLAFPTPQVLVSAGKRRWEKFLHVHKLWRPETAEKRLQIFAQADQFKASEPIVRAKSQLAVSLCKLLCTLGQQLKLYRQQIAARFADHPDHDLFGSLPGAKEVLAPRLLGAVGNDPNRYGSQEVLQCIAGTAPVSYQSGRVEQVRVRWSCDKFLRHTVHLWANAFRKASAWGQTYYQKKRAEGMSHACALRCLGQRLLKILFRMLQTHKPYDAELHARNQQKHGSWVLKLTNEPAA

SEQ ID NO: 326765 - protein, 470 aa, unidentified
MIRHRSDSVLLGPLASVRKPVSQPVIAAVRFMQVELPLHVRLTPQEIESAMRNAGIHADSLLEVRRMYNAVGIDVSKGKSTIAVLQPGGTVIRKPFDVSHTSQSLIELAHYLGSLEGSTKIVMECTGRYHEPMLKALYEAGLFVSVVNPHLIKNFGNNSLRRVKSDPADARRIARYTLDNWAELRQYSGMDNTRTQLKTLNSQFSFFMKQKVAAKANLIALLDNTYPGVNKLFDSPPREDGSEKWVDYAYSFWHVDCVRRIGLKTFTERYRAFCRKHHYIFQPDKPEKLFHASKELVAVFPKEKTYKLLIQQSIQQLNLASGHVERLRQEMNALASTLPEYSTVMGIYGVGKTYGPQLIAEIGDVSRFTHREALTAFAGVDPGVDESGQHKSKSNRASKVGSARLRKTLFQIMTTLLQNAPEDDPVYRFLDKKRAQGKPYYVYMTAGANKFLRIYYGKVKECLRNLEQAE

SEQ ID NO: 326766 - protein, 367 aa, unidentified
MKDSITVVGLDVHKNSIQIVTADTDGAMEVRHFGRIGGTMDALDRAVRKLVSRGSTLRFVYEAGPCGYEIYRHLTGKGFSCKVVAPSKTPKKSGDRIKNDRRDAETLARLERAGELTAIHVPREEDEAMRDLTRAREDAVKALKTARHQLNAFLLRYGQRYPGKASWTPSHLRWLSDIALPHPSQQIVLQEYINTVTVDTERTTRLTDQIAKLLPEWRMFPVVKALQALRGVAPIVAATTIAEIGSMSRFETPRQLMAYLGLVPSEDSSGESTHRGSITKTGNGHVRRALIEAAHAYGFPARVSRHLLKRQEGLPQPVLAIAWKAQVRLCGKFRRLMARGKLKTKIVTAIARELCGFMWAIAREVEV

SEQ ID NO: 326767 - protein, 411 aa, unidentified
MDVVKARCAGLDVHKKTVVACVRLPGQRRGERRGETKTFTTTMRGLGELRDWLLAHEITDVALESTGVYWRPVYAVLEGTVELILVNARHVKMVPGRKTDVKDCEWLAQLLECGLLRGSFVPPRPVRDLRDLTRLRKALIRERGHHVNRIAKTLELAQFKVGGVITDLMGKTGRAILAALSAGVDDPERLAACAQGNLRTKRAALREALVGRLTPHYAFLLQQHLSLIAALDAHIATLDARIEVAMVPFAEEAALVRTMPGVATRAAEAILAETGVDMSQFPTAAHFASWARLCPGNHESAGKRHSTSTGKGATWLRATLQEVAWAAARTRKSYYRALYHRIKGRHGAKKAIVAVQHAMLVALWHMLKHRVAHQDLGIAYFDHRNTERVRRHHIRRLERLGYDVVLVDKVA

SEQ ID NO: 326768 - protein, 351 aa, unidentified
MRYHQSTSAFNCGIDLHARSMYVCVVNPQGDVVLHHNIHDNDFAFFLKKIAPFRHDLTITAECMFAWYWLADACAREKLSFVLAHALYLRAIHGGKNKNDRIDSEKLARLLAAHLIPIAYVYPADKRPVRALLRQRLSYVWRRAELLRRIQSVQQAEGLAPVPRCQSRDRQPWEARLLAALPNPHHQLSLQTDLASVRHYDQMIAVLEKQLVRTTWAIAGRDYALLQTVPGIGQALALTILYEVDDIERFETVQRFSSYCRLVKGTVASAGKIKGLRGAKLGNPYLRWAIGEAAVLGRRHEPRLAQWHEQLCAHKGNFKANAIVANQLGRAIYFMLKNRTVFDLDEFLRAA

SEQ ID NO: 326769 - protein, 456 aa, unidentified
MKASVFARPEERRINQNLKMNQTKLNRKTTVASGRGDFAALIGLDWASQRHALCLYDCATGKRENSTLEHTPEAIAQWAQGLEQRFGGKKIALCLEQAKGPLIYALLEYPFFVLYPVNPATAARYRQAFKTSRAKDDPADAQVCLELLLHHREKLTPWLANDGATRELSRLLEARRSLIDLRTLLTNMLRDALKSYYPQALELAGQDLFAPLGCQFLLKWPSLEQLQKARTESVRKFYYAHNCRRMDVIEKRLQGIAQMKPLCRDRALIEPARIQVKMLARQLLQLGTALKEYDSRIEHLFAQHQDASIWQSFPGAGPTLAPRLCCAFGSERSRYQSALSIQEYSGIAPVQEKSGKNQHWIHRRWARPHFVHQSFFEYASQSALHCPWAKLFLKEQIARGKTYPTAVRALAFKWQRIMFVCWRDRVLYHETTYLQSLKHRGSHLARKLDQELPKAA

SEQ ID NO: 326770 - protein, 422 aa, unidentified
MECLACELSDHGGGPAPPGPLQWPDQKLVQPNLVVTHHSAALMCLPPGVVPADSDRNTVREWNRKESIAMSTIVAHHYPYVIGVDTHAATHTFAVVTSGGEHLDTQTFPTTRDGISRALAWAGRRTDGDVDILWVIEGIGSYGAELTKAVQDTGYPVVEAANMSHKTRRGIGKADPIDAQRIAEAVLPLSMERLRKPRDNQGIQAALKTLLAARDHISRERTKITNALTSLLRSIDLGVDARRAPGKRIIHQIGSWRTRNETLEYATARTEAIRLAKRFQAAEADLKANDAHIAELVAHSPAAGLTQETGIGPFTAATALVAWGYPGRLRNEAAFAALAGTSPLQASSGKTIRHRLNRGGDRKLNRALSMAAMHRMRFDPETRSYAEKRRAEGRADREIRRSLKRYLARRIYRHLNHVTSLD

SEQ ID NO: 326771 - protein, 404 aa, unidentified
MPDLKSLAFVGVDTHKDQHTARLTDCFSHDLGILEVPNHPSKFEEFTSRVTLISSQNGLKPVYGLEDTQGLGQSLARFLVSTGNYVKDVNPLKTDRKRSKSPHPDKSDPDDGLAICKVLIQEFDKLPTIATFDEVHLAIRELSNHRESLVKEQTKVKNRLHVLIHREYPLYKRMFKTTFSKSATTFWERFPHPSHLKGSTVKSLAHFLRRHSHNTVSTRAAQRILDLVSTDGVPSELDLARAATTRSLVRHLRFLQDEITPIEKELRILVAKTEFKLQTLTGVDTVVAAKLINYIGDINRFSSSDKLAKCAGIAPTKNSTGRKLRHKKTKGGHRKLHATIYYIALSQIGKDRAGNLHNPKARQYYLRKIAEGKSKKEALTCLMRRLCDIIYAMMKNKTAYRKPE

SEQ ID NO: 326772 - protein, 360 aa, unidentified
MKKVSKQMQKMEAQEKPEMTVGLDLGDRYSHYCLLDGDGDVVEQGRIQSTEAALRRHFAGEFEMRIALECGTHSPWVSRLLTTLGHQVIVANARKIPAITGSESKNDRNDAEKLARFAAYDPKLLSPLQHRSAERQLDLNLIHARATLVRARTMIVNALRGLVKSAGGRLPACSTESLPARVAQVIPPALAVVTTPLTEQIALLNTQIDGMDKQIEKLAAKYPEIRLLRTVPGVGPIVAAAYLLTLDRPDTASNRSAGAFLGLRPGQSQSGDADPQKRISKTGDSCLRSLLVQSAQYILGRFGPDSELRRWGLKLAATGGKRGKKRALVAVARKLAVILHSMWRNGQSFQAFPQQAAMAA

SEQ ID NO: 326773 - protein, 461 aa, unidentified
MEKAKESSKLRRGGVPMALTAIRPMVAGVDIGSRENWVCGPARSDGKPNVRVFGTTTAELKALVDWLAEQGTESVAMESTSVYWIPLLELLEARDIEAVLVNAHQLHNVPGRKTDFHDCQWIQLLHSCGLLRASFRPGPAVVAMRAIHRQLANLVEERTRCVQWMQKALDQMNVQVHRAVTDLTGTTGMAIVRAIVAGERDPIKLSSLRHHRCHKSVEDIARYLTGTWREEHLFNLASALQLFDAVEKLIATHESRLLEAMAALQPDERKEASPQPHPNPLKEKAIKGRGDQPVRTQLWRFAGLDLMRIDGIGVGAAKIVLTEVGPDLSAFPTENHFASWLRLCPRRPISGGKPLKKRRNSMGANRIAGALRMAACSLQRTKTALGAAYRRIARNKGADVAIFAIARKLAQLIYRMMRYGQDYLDLGEAAYDRQFEARRLAALKQTAKSMGFELTKESAQP

SEQ ID NO: 326774 - protein, 312 aa, unidentified
MTQIIAGVDVSSSTLDARVGRDGVEESFKNNVEGAENLILFCQEHEVELVVMEATGGYEKAVFCQLWQAGIPAAIVNPRSVRWFAEAMGCFEKTDRIDAGLIAWYAQVKRIVAQEPAKETQEQLAALVTRLRQVTEMRASQLNQKRLVRDAEVLASFQELISLLTRQIRVLEDKVAKLIEQDPLWAKMDEAFRTIKGVADRTVARLMAEMPEIGTISHKAISKLSGVAPMARDSGNLKGKRAIRGGRANVRSILYVVADIVRRYDADFAEFHKRMLAAGKPRKVVRIALAHKLLVRLNAKARDVRQNFLPAA

SEQ ID NO: 326775 - protein, 344 aa, unidentified
MSVRRILAKTIDTDLEYEAIGIDLAKNCVSAALLTTDGEVVCIDRLDYSELEKSAQALSPTTFAMEPCTEMNYLVQKLEAWGHRCLVIGGKNVQNYVENHYSGQKTDLNDAQALAFLAQDKQLRTIKAKDIEQQKYASLTTLREQYIKQYRQTIVSLKGICQAWGLNISKGISGKAQLKDLIENHAAFPEELRESLVDMVTHAQTTQKVLNKITKTLEVLAKNDKVCQLIQTIPGLGTICSCRLRATIGDIKRFKNPKDFPAYYGLVPRSIVTGHNEKKGKITHRGDKTMRSLMVQGAGSVINMATKGKLKSKQLTKWILKKQKEKMPWGETCMRCCRKAFTDC

SEQ ID NO: 326776 - protein, 368 aa, unidentified
MLKQSHYKVGCDAHKHYSLFAVFDRQGKPVKRTRVNHTPGAIRAFLSRFPPGTPVALETVGNWYWIVDEIEAAGCLPQMAHAAKAKMMMGHVHKTDKLDADGLATLLHNGTLPSVWIAPGSLRDERELPRTRMAFSKMRTALKNRMHATLAKYALSLDTQSDIYAPKWRPQLMKLIRSLPDETRRCMEQELELLGLIQDQIDQLEARILERVRLTRTIQLIQSVPGPAEILSIVIDREVGSIDRFPSPACLASYAGVVPKVRASGGKVHYGRMIKQANNYLKWAFIEAANVVVRQRHHPAWQSKHVVQIYERTRQRKGHSVAVGAVARYLAEATYWVLKKDEPYREPISRHPAGSESTASSKQGQAPA

SEQ ID NO: 326777 - protein, 309 aa, unidentified
MLSSVGIDTAKATLEICIKPQKIRFEVANNSAGFEALLERLKDFNISRVLIEATGGYEKDVLIALASAGLETICINPARARKFADAMGKKAKTDKIDAEVLADFAAHLSAPQGQPVSPEREELRELVKQRAQFVQSRDDYKRRRQQCRSATVMAHFDEHIEQLKVLIKRLDEEIDQAMVQLDDTRARQLLAVTGIGRVTAANLLASLPELGQLDRRQIAALVGVAPYNNDSGSHRGHRQIWGGRAHVRRVLYMSSWIIIRHNTEFKARYEALRARGKCAKVALVACMRVLIVRLNAMLRDNTPWRVQTA

SEQ ID NO: 326778 - protein, 397 aa, unidentified
MYIVGIDIAKRKHEAAVIDGEGTVIIKPFSFTNNCSGYNRLLAMLTKAKLPLDEVSFAMEATGHYWLALFTRLQKEGFRVQVINPVQTNSIRSFYIRQAKTDPRDALLIAEVIRFGHFSESTLHPENIYELRELCRGRHAIVSMQADVKRKVVALLDQVFPEYETAFTNLFGDTSMAILQTCPTPKELSEMPFEELCHLIEVSSHKRFRMAKAQELQALARNSFGFAMAGDVFSTMIRLYAKHLDFLKQQVREMDCKIAEIMETLDTPITTITGIGPTLGAYILSEIGDISRFSSAAKLAAYAGIDPTMRQSGEYNGVRNRMSKRGSPYLRHAIWLAASSAVLHDPALKLYFQKKRDEGKPYMASVGHACRKIVSIIYAVMRDNKAYTPCIPNEISA

SEQ ID NO: 326779 - protein, 411 aa, unidentified
MNEIFCGIDWAEGHHDIALVDQDGTQVAKLRISDDSAGFHALIELLIQHGDSAEDPIPVAIETPRGLLVAGLRATGRQIYAINPLAAARYRDRGSVSRAKSDAADARVLANILRTDRHAHRSLPDDSEAGQTVAVLARAHQDAIWDRQQMINRLRSHLREYYPAALAAFHGAGKPGLDSPRARVILTAAPTPADAARLTRSQLRALLKRGERPRCGIEAEVERLRAIFRADYLRQLPQVEKALGHQTVALVRQVDAACLSVTQLAAATEEAFLAHPDADIITSFPGLSVLSGARVLAEIGDDRERFADARAMKAYAGAAPVTRASGRSHVVVARTVKNQRLASAGHMWAFAALRTQAPRAHYDRRRAGGERHTAALRNLFNKLLGCLYHCLRNRVPYDPERAFAAPVELAA

SEQ ID NO: 326780 - protein, 338 aa, unidentified
MNSLTIGLDTAKSVFHAVEKNSRGRVLSKAKLTRAKLFTYFANKPPCTVALEACGASHYWCRVISAYGHKAVMIAPQYVASHRKGNKNDFNDANAIADVAQRDDIRTVPYKSIEQQDIQLLHRVRERLVRQRTALGNQTRGLLSEYGIVLRQGVAHLRKELPFILEESNNELTELARRQFFLLHEELLVLDEKVKQADNEIQRVALSHPISQRLMTMSGVGPIISTILLVALGKGEHFRNGRHFSAWCGLVPKQHSTGDKARLLGISKRGNTYIRTQLINGARSALRNASNKNDQVSRWAASLAERIGFNKACVALANKMARFAWAMVHNGQDYQLKP

SEQ ID NO: 326781 - protein, 357 aa, unidentified
MHSNPTQPAIEPNQRIVALDVHCKFTELAAVSPAGKRIASQRCNTTIPDVLAALQKVKKPRTVIIEEGSLADWLMRGLTECGECVRICDPRRNALVAKDDEKDDPIDALKLAQLARGGFLKFVHHPESFERVIFKRRIALYHDRIRNRVRQANRVIAQARLYGVMIRESDFAEDTAAVFKQLPKRKAVRDDFQTLLDGYQAAVTQAMVLRRGVLKLSKAYPEIARFQSLPGYGPIRAATFFAFLDTPWRFRSKAAVWKYVGIGLCRRGSGGSVTLHVPNQVNRVLKSAVLGAAMNAVGGDGEFSRLHERWVKNGLTARMARRNVARLQTAVLWGMWKSGGEYRCDRIARLLEPVTVS

SEQ ID NO: 326782 - protein, 361 aa, unidentified
MLNTTTFVGLDVHARSIKAVALDAMTGEVRSATFGYDAAEVAGWVSSVDPSAKCVYESGVTGFDLQKRLSSMGIDCVVGAVSKMIKPSADRRRKNDRNDAEFLARMLSVGNVVEVWVPDDECEAARDLTRALDDAREDLKRCKQRLSKFLLRHGLVFSETNAKGQRKKNWTAAHWAWIRSISFPDKADDEVLAYYIDAARQAMEDKKRLERLVEAEASKPRWKKRVDSLRCLKGVDAMTAADIVFEAGEFSRFKNARSFAAWIGLTPSEHSSGESARQGGITKAGNKHLRRVLVEAAWHYISASPHPKDLAKGQAPDPAARRHAAKGIRRLVKRREEMLGRGVHGLATSFWTISGGPSLLS

SEQ ID NO: 326783 - protein, 454 aa, unidentified
MSIHSTDPVTGLSPVRVQVGIDAAVVANHHVCVREILPDGQVRLSRFTAPPTLAGLAMLSDRLRGFPGVVAVAEPTSMTWLALSIAMRQAGGDLSLLGARHAARLRGAIIGKDKSDVIDADVLATAGEVFTLTPLRPLAPPQLALRRAVTRRGKLVVDGNRARRRLISLARWAFPDVWSAFAGSQPTAVAVLTRWPDLRALGSARRSTLTGVVAAHTRGVPDVPARVEAIHLAARAWSDFWQGHLDLDALAWEVAEHLHDMAEADQRIARATAQATRYWADLYGDDPLLLSVPGMGPMTAPSVRAFLGDGGAFTTAKAAASYVGMNPSTWSSGTVVQPSRAITKEGPAVLRLAFYQAAGGARRVDPQLAAFYRHLMVDRGHSHTKATVAVARKLIERTWTVLHRDQPYQLRDIDGTPLTRVRAKEIARTHAVPPEVRARARAQSAATHRSKLTR

SEQ ID NO: 326784 - protein, 403 aa, unidentified
MGVDWADEFHQVWVSDSQGKKVAEMKIEQSPKGMSELGRWLHERKAEDIELWAAIEKPHGRIVDFLLDHGVVVYPVNPKAVDRARDRFRMSQSKSDSFDAYVLAEFLRTDHVHLRALKPDSEQAQELKMLTRDHHRLGRHKTRLLNQIEVTLKEYYPRPLEVFSDLESKIALDFLEQYPTPRALSNLTRRKWNRFAKREHHLGEERCKELWEKLSQPQLKIPEHVVRAKSQLLLVLVIQLRSLTEAVKNYSEEVERFFASMPAAKLVKTLPGGKSGITVPMLWAELGDAKSRWQSFRHLQAEAGGVPVTKASGKSRVVQFRYACNKLLRYASYWFSFNSLNRCEWAKKYYRDQRAKGHSHHEALRALGAKWLKIIFVMWRDHKPYDENYHLANIARQQMRQAA

SEQ ID NO: 326785 - protein, 349 aa, unidentified
MLADELDYVVGVDTHRDEHVIAVVAAPAGAVIAAAAAAAGGRGYRQLLRVAMQHAPGRRAWAIEGSGSYGAGLARFLGERGELVLEVSRAPRTERRLRGKDDALDAVRAARTALASDRRAMPRTGERREALRLLLIARRSAVDVRREALTQLRAVIVTAPDELRQELRGLSASKLLDRCKRLRPTRVASVDQHATRLVLRSLARRIEAATAEADELERELLGHVRALAPALLDEPGVGPIVAAQLIVAWSHPGRVRSEAAFARLAGAAPIPASSGQTTRQRLSRGGDRQLNRALHTVILHRRLHDPATKDYIARRVSEGKTTRDAVRLLKRYLARHLYRLLQTQEPLMT

SEQ ID NO: 326786 - protein, 390 aa, unidentified
MERPVKRNDLSRSLIAFDQASTLVAVAELSLGNWLVAGLVPNLVRQPLKKLRSDPEALLGLLLRWRDQATKTGGRIKRIVLAFEAGRDGFWLARWLRARGIEVYVIHPASIPVSREHRRAKTDRLDAGLLMRAVLGWLRGEAKHCSMAAIPSIAEEDARRPTRERETLVREQTRAVNRIKSTLIRFGIRTFKVKLRQASKHLEGLRGPEGEPLPANTMAELRRDLARLQLIRGQIREIERARLERLKRAPGQGTHPMMRMLARIMGIGIETADVLVHEVLSSKLRDQRAVARYGALTGSPDESGSKRRERGLARAGNARVRRGMIQLAWRWLMFQKNSTLAKWYRARTTGATQGLRKAMIVALARKLLIALWRYVTIGEVPAGAVLRPVT

SEQ ID NO: 326787 - protein, 415 aa, unidentified
MSVTHPAPPGRPTGGIDWATDDHAISIVAADGDQLERFASTHDAAGLRALVGRLLAAGVGEVGIERPDGPVVDALLQAGLTVIVIPPGQLKNLRSRYGSAGNKDDRFDAYVLADTVRTDRRRLRPLLADTHATTALRSVTRARKDLVGHRVAVANQLRAHLQVVFPGAVGLFADLDSQVSLRFLERFPSQDKADWLSPKRLTAWLGAEGYSGRTDPAVLHARLADAPRGAAGEGEHTAAHASVTLALVAVLRTLTVQIEGLAARIAEQLTLHPDQAIFTSLPRSGRVRAARLLAEIGDARGRFPTPESLACLAGVAPSTRQSGKLRAVTFRWGADKQLREALCDFAGDSRHANPWAADLYRRARARGHDHAHAVRILARAWAHIIWRCWQDNTPYDPTQHGALQALLNRDQQTAA

SEQ ID NO: 326788 - protein, 316 aa, unidentified
MNTQNKHYIGVDVSKDKLDFYHPKTKRSWTVTNTPSKVKSELLKLSKQQDEIHLICEPTGGYEKCLLAQALELNIPISLVNPKRARSFADALGISAKTDAIDATVLSRFGESITPAPRVKPTALQEKMSAIARIKDRFTRQAAAQKTALQKVTDSFVKKQLKTQIQSLERAIARCQKQLDTLIAKDSVLREKKLKIESIKGLGLAASTVFLSEMPELGAITDNQASALVGVAPFNKDTGTHSGKRHVRGGRHLLRRSLYMPALCATNHNPILKEFYGRLITKGKPHHVAITAVIRKLVRLVNRLLSDPNFEPIKQN

SEQ ID NO: 326789 - protein, 337 aa, unidentified
MEQYVGLDVSQETTSIAVRQDGRRVWRGKCPTDPKALSEVIRKHAPHAVRVVFETGALATWLYHVLQAENLPVVCIDARHAKAALDMAPNKTDANDADGLAQIAEIGFYREVRVKGYGPMLTRTLVGARSQLLRISVQLSNQIRGIMKTFGLIVPKGAGRIFERNARALLETNEAVARVVLPLLETWQVVRARAAELDRQLIAAARTGSSYRLLMTIPGVGAITAVSFVAAIGVPENFKRSRAVGAWLGLTTRRYQSGETDYDGHISRRGDRYLRALVYEAAVAVLTRTRTDCALRSWGLKLKAKVGFKRAAIAVARKLSVIMHTMLKTGAAFAAAP

SEQ ID NO: 326790 - protein, 390 aa, unidentified
MIYVGIDVAKDKHDCCILGSDGEVLFSPFTIQNSLQGFDELYDKICSLSSDSSEIKVGLEATGHYHMNLLRSLLDNGLDSYVINPLHTNLFRKGQSLRKTKTDKVDASSIAMMLLTDKTLKPYSNSSYHNEELKSLTRYRFNKVYERSRLKVSISRLVSILFPELEKLVPTLHISSVYALLSEYPGASYIASANLTHLKHLLSKKSKGHYGRDMAIAIRTAAASSIGTIIPAKSMELKHTIRLAEVITEEIDEIETTINSIMKTLESPITSIPGINTRMGAMILAEIGDFSRFDNADQILAYAGLSPSTYQSGKLTASYSHMEKRGSRYLRYALFNATRYVCLWDPTFSAYLAKKRAEGKHYNIAISHACKKLVRIIYRMQLTGELYHQA

SEQ ID NO: 326791 - protein, 330 aa, unidentified
MKNYSDVIGIDVSKLTLDAHIHNRVVHRVFSNTPKGYKALLSWTETYLKEQVYFFCFENTGHYSTNLSVYLSENDLDYFEESPLAINRSSGVVRGKTDKLDSAMIARYAWLYKEELVLSSPKEQDIQELGRLLSFRDQLVRDRTGKMSSLKEMQTLLSSPSTDDCCNIIKKTIHYLTKQIIALENHIKNLMSKDESLQKNYELLNTLKGVGLVLSCQLLYHTSNFKRFDSWRQFSSYCGVAPFEHSSGTSIHRKNRIHHIGDRKMKTLLTLASVSAIQCDQELKQYYNKKNSEGKPKMVAINNVRNKILSRAFAVVKRGTPYVVLQKFVA

SEQ ID NO: 326792 - protein, 287 aa, unidentified
MSEVITIGLDIAKHVFHAHGADERGRAILSKRISRGKLLDFFAAQPRCMVALEACGGAHHWARQLTQLGHKVRLIPPAYVKPFVKRQKNDAVDAEAICEAAQRPSMRFVAVKSEHQQAAGLVFRTRDLLVRQRTQLINAIRGHLTEYGWVAPKGPSHVAMLAGLIEEEEMVNSLPEAARAMFRVMLDLLAGLNSKIADLDKEIARRAREDEVSRRLMTVPGIGPISATAIAALAPPAETFAKGRDFAAWLGLTPLQRSTGGKQKLGATSKWANARSDACLSLAVAPS

SEQ ID NO: 326793 - protein, 343 aa, unidentified
MSKPNPFMQSTVFCGIDVSAATLAAAVHQEDQRFEQRVFNNNASGHKALIAWLHKRKARVRVSLEATGIYSLDLAMALDRADGIEVAVLNPKLVHRFAQTLRRSKTDSADAQALAEYSRRMPFTPWRAPSLNSLQLRTISRHLLGLTAEYTRQNNRLHAAEKSATTPRCVVNDLKRSMASLSRRILRFRREARQLVRSDETIRKRFELLIGIPGIAEISAVQLLGELSSLSPEMSVRQWVAHSGLDPVHQISGTSVHKPSRMSRAGNRYLRRALYMPALVAVRLDPHLKAFYETLLSRHKAKLQAIIAVARKLLHAIYGMLRSETPYDGSKLFPALLPAIIPG

SEQ ID NO: 326794 - protein, 440 aa, unidentified
MAKKQAGDHSDLKVVNSNAAAIDIGSKMHMAAVHPDRADLPVRVFGTFTRDLHDLADWFRSCGVTSVAMESTGVYWIPAFEILEQHGFDVILVNARYAKNVPGRKTDVSDAGWLRQLHSYGLLRGSFRPAAEIATLRAYMRQRERLIEYAAAHIQHMQKALMEMNLQLHHVVSDITGATRMRIIRAIVSGERDPDVLASFRDVRCHASVETIRAALVGNDRDEHVQAKMADCDRRLEAAVAVLTVKTHGVVAPLPKARVKRKQVNAPSFDIRAALHGVLGVDLTQIHGLGPSLALKLVAECGTDLNAWPSAKHFTSWLCLAPGNKISGGKLLSSRTRRSSSRAAALLRLAAVTIGRSDTALGAFYRRLSSRVGKQKAVTATARKIAVLFYNTLRFGMTYHDPGAAAYDARHRSRVLANLQRRARSLGYALAPAPEAADVS

SEQ ID NO: 326795 - protein, 351 aa, unidentified
MKVTTIGLDLAKDVFQICAADANGKILYNKQLRRHQMAEFFTKLPACLIGVEACGSAHYWARKLLAMGHEVKLMPPQYVKPYVKTHKNDAVDAAAICEAVTRPTMRFVAVKSEEQQALLALHRVRQSFVKDRTAHSNQIRGELAEFGLIVPVGLSALRKRVPVLLEDPLLPAAFGQLIQRLLDEVLHLDEQIKLLERDIVLWHRSSELSKRLAQIPGIGPLTASALLCSIGDISYFKKARQLPAWLGLVPRQHSSGGRTTLLGITKRGDCYLRTLLIHGARSAILAAQRKEQSPEQPSWLHKLLARVHPNIAAVALANKNARIVWALLAKHQDYKRGYAPSLSALPLAQAA

SEQ ID NO: 326796 - protein, 382 aa, unidentified
MRFYTTQHPFYCGIDLHARTMYVCILNQAGETLVHRNMTATPEALLKTIAPYHDQIVLAAECMFTWYWLADFCAEHGIPFVLGHALYMKAIHGGKAKNDKIDAHKIAVLLRGGMLPQAYVYPAEMRATRDLLRRRMHLARKRGELLAHVHNTNSQYNLPAIGTKIAYKANRDGVAERFADPAVQKSIEVDLALITYYDELLRDVELSLVKTAKHHDAHTLYLLQTVPGIGKILSLVLLYEIHDIARFPRVQDFASYCRLSKCARESAGKRSGTSGATIGNAHLTWAFSEAAVLFVRDHPAAQQWLSRFAHKHGTGKAWTILAHTLARAVYDRLQRQTAFDRQQFLQASGRGVGARHASLDHQGMHRIRHAQHTVKNCVVERP

SEQ ID NO: 326797 - protein, 341 aa, unidentified
MDTIGMDLHKRESQLCILVAETGEVIERRIATTRERLTAVLGGRLPARILLEASTESEWVARHLESLGLTVIVADPSYAPMYAHRRRGVKTDRRDAQALMEALQRGHYRAIHRASADQRHVRAQLAVRDALIRTRSRYVNVVRALTRREGLRIPSGGAEHLERRLATLPLEEQLTRELAPLRTVLKPVNAQIAQADELLSLRAREDPRVALLCTMPQVGPVTAVAFIATLDDVARFGSAHQVQGYLGLTPREYSSGERQQRGRISKTGNPRMRSLLVETGWRILRSRDPRLAALHAWGEQVAARRGAAIAAVALARRVAGILYAMWRDGVHYRESASAAVA

SEQ ID NO: 326798 - protein, 344 aa, unidentified
MEHFGGLDVSVKETSICIVDDTGKIVKEVKVASEPAALLKVLGNPTYRFKRIGLEAGPLSQWLFSALAEAELPVICVETRHMQAVLKAQINKTDRNDARGIAQMIRVGLYRPVHVKTLRSQKLRMLLTHRKLLQSKAIAIENDLRGTLRNFGLKVGMVGKVRFEARIQQLVENFPDLSVLVEPLLIVRRVLREQIVILHRRLLAIVRDDEVCRRLMTTPGVGPVVALTYRATVDVPARFRKSKSVGAVFGLTCSRYQSGEIDWSGKISRCGDEMMRTMLYEAAQSMMHSKKWSWLKAWAMQIARRRGMKKAIVALARRLAVIMHRIWVDGTEFRWTREQAAAAA

SEQ ID NO: 326799 - protein, 392 aa, unidentified
MIYIGIDVAKDKHDCFITHSDGEALFNSFTISNNREGFETLFQRIESVSDDLTKVKAGLEATGHYSYNLLGFLPDKGLTTFVINPLHTNLYRKSLSLRKTKTDKVDSRTIATMMMSDMNLKSYSDTSYHNEELKSLTRYRFDKVKERAKLKSSVSRLVCILFPELEKLVPTLHMASVYDLLSEFPGADAVAAAHLTRLSNLLSESSKGRYGKDTAVMFREAAKSSIGSLMPAKSLELKHTIKLIHELTIEIDEIETAIKRIMDEEIQSPILTIPGISYRMGAMIIAEIGDFSRFDSADKILAYAGMSPSTYQSGQLDNCHSHMEKRGSRYLRYALYNATKYVCHWDESFGTYLEKKRSEGKHYNVALSHATKKLVRLIFAMEKSRRAYIPVP

SEQ ID NO: 326800 - protein, 383 aa, unidentified
MTVTIVETRAPARAITGGVDTHAGAHVAAALDPVGGLLGVQEFPATPTGYAQLLGWLGGFGAVCLVGIEGTGSYGAGLARYITAAGVRVVEVDRADRQDRRRAGKSDPLDAVSAARAAQSGRAAGAPKGRDGAVEAIRALMVAKRTARSERTQTINQARALVVTGPDDLRIRFATHAPADLVAELASLRPRPGAVVGYATRIALRELGRRAQFLDRQLERLDGFIVPLVTARAPGLLALYGVGPDTAALLLITAGDHPERLRSEAAWAHLCATAPIPASSGKVTRHRLNPGGDRQANHALYRIVITRMSSHLPTRAYVARRTKEGLSKKEIIRCLIGGLSVSRPGLSGPWLVGRAGRWPRCRAVLTASFSTATPGAPRPRDRR

SEQ ID NO: 326801 - protein, 393 aa, unidentified
MHVGIDAHKRSCTVCVVEEGTVRDSFSFPTTREGVREFMDKIRGKATVVIEASTTGKVLSRMLLDKYEVHMVAPPERKSSIKTDRRDAERIVREDMLQYVRRCYIPSPYIEELRFLVMQQIQVGRKITRVKNQIHALLERNMIHELDGVSDIFGVEGLRRLAGTQLPPPDMIALARYLEELKLVVAHHKQLETEFARIAVSDEDALLLMSIPGIDFFTALAIKSRIGDVGRFPSKKHLCSYGGVVPGASNSGDHTSTHNRVKHGDMVLKYALTCALRGAVAARKNSAVKRFYLKRRKRLGAQKAEVAAARKMACVVWKVLSTRQPYREEDKQLTARKRRILYSKAKREGRRSVTGDIPQLAQSLEGDAAILGRYPADFDEDFESEEHWMKLDC

SEQ ID NO: 326802 - protein, 402 aa, unidentified
MFYSIGVDVSMGKSTIAIISTEGEVISEPFEIEHTKSGFNLILEKIKNIPKDNVKFVMESTGNYCKSLLKIIIDNGYFVTVENPLTIKKYCDMNIRKVKTDKKDALKIACYGSERWHKLIKYTPSDEIYSELRFLSRQYDEQMTLKVMKKIHLSGLIEVTFPGLKKIFKGDSVYMLMLDVYKKYYHPSIVLSKSKSSFIKDVEKISKKTGHRVGTRVAEEMYSLANECIPSSPCNESTQLAVSNCVLLLQNLEEITNNIIAKMDELARKLPEFETVSNMSGVGNKIRARLIAEIGDVRRFKNSNCLIAYAGIDVPPFQSGQFVATNRRITKRGNKHLRKVGYETMKSLKTVKPTKDNAVYLFILKKEDEGKGSITAKIAGLNKFLRIYYARVIEVYKNLENT

SEQ ID NO: 326803 - protein, 343 aa, unidentified
MIHMNMTLGLDVHKRTTAYALVNERGEIQQRGETKTNPKLCLELVSWLPKSAVQIGMESSTYIYPLYDAFNDAGYKVRVAHPAKLSRITKAEVKHDDKDALDLALQLLRNDFPESYILSKEMRDKRQMIRQHMALTNEESRIKCRIHSLLAQHDIRVPCQLGTKKSFEFMQSVQLPTNSKLTLEIFTLQLKKAKELLRIIDTQIHHFVANNKEAQAIMKLDGVGEFTAATFLIELGDWKRFKSVKQLTSYAAMIPKMSGSAHKMYYGRMRTDGNQQIRFAFNRAAEQAIRKDNEFKLYFQKLISKGKRRRTAIGAIANKLLRCCYGVLHAEELNNSGSSMERG

SEQ ID NO: 326804 - protein, 347 aa, unidentified
MKEQNNRSEFTIGLDLGERRHRFCALNGKGEVVEEGTLGNDRVSLGRLSARYRGALVVMEAGAHSPWISRYLERLGWEVIVSNPRKVRAIYQHERKSDQRDALMLARIGRMDRALLYPVRHGSEEAQQDLLRIKLRDSLVRARVALINSVRFSLKSLGYAVSNPSSERFHKVAMETLLEAVREMIAPSVQALAELSARIAVLEREISLLARTKYPQTLWLQQVPGVGAITALYFVLKIEDPKRFKNVRAVGAYTGLCPRRDQSGESDPQLRISKRGDAYLRRLLVSAAQYILGPFGPQSALREYGLRLAADGTTRAKKRAVVAVARKLCVLLLSLWKNQTPYQPYSA

SEQ ID NO: 326805 - protein, 355 aa, unidentified
MERYIGMDVHAASCTLAVISEKGRKLRDFPVETNGQALVEAIRMIPGHKHLVLEEGLQSAWLYETLSPHVDELVVAGIAQSRGHKSDKRDAYGLAEKLRVGNLDKPVFKAPRQFTRLRELSRIHMTLVGDVVRGQSRIKSLYRSRGILVSGANVYGVRHREEWQQQLCSSAQTRATRLYDHLDFLLDQKKQAEIDLLREAKKHPIVRVLETTPGFGPIRAARLVPIVVTPHRFRTKRQFWSYCGLGIVTRSSSDWIQATDGGWIMARVPQTRGLSRQHNHFLKSLFKGAATTVITQLSKDPIYARYERLLDGGTKPTLAKLSLARMIAATVLRMWKDEKEYDPERGGPSTVTREG

SEQ ID NO: 326806 - protein, 342 aa, unidentified
MPHYAALDVSNAETAIHIIDETGRTVWRGKRASDPEALTTALRRHAPELVRVGLETGFLTPWLYHSLKALGVPVVCLEARHARAATALQRNKTDANDAETLAQLVRTGWYREARVKSFAAHAVRHLVGARAQLKGVSVDLSNQIRSILKTFGLMAGKGAGHAFATRVRELLEGRPMLAAIIDPLLAAWQAVRDQIAVLDRHLIGLAKGDPTCRLLMTSPGVGVIVATSFAASIEAPEHFRRSRSVGAYLGLTPARHQSGETDRTGGISRRGDRLMRTYLFEAAASLLIRVRQNSALKTWGRDLAKRMGFKHAAAALAGKLSVVLHAMWRSNTPFQPWPAQAR

SEQ ID NO: 326807 - protein, 363 aa, unidentified
MEVAKEGRHVGIDMGKTGYVLRMIDGRGRVTGWEGKTNPEGRKELYKRLRPEDRIAIEACSLAFIMNKEFKKLTGTELYILNPGKLYQIYMTDKKTDKEDALKLAKEIRDKPEEDLPRVYAPTEEMKEMRKVVSEYRETVKLHTQRVNRLHTVYEHCGITDMKRCDLKTRTNREKNVVLLSGYEKEEALRLMQVIDLLESQKDELEKKIKEAERSNEKIQTVEQVPGVGKITAYAFVASVGGADRFANMTQVSSFLGFVPKIDCSSQTVHYGHITKKGNGYLRGLLVQAAWVLVRSKSGGALKEKYHDLVLHGLSKKKAIVAVARKMAELMYTLLKNNSKYEPRKFVAPLSRTERLAKLAVAG

SEQ ID NO: 326808 - protein, 290 aa, unidentified
MEITTIGLDLAKNFFQVHGVDDAGVAVLRRTLRRSQVIPFFTKLSPCLVGMEACGTSHYWAREIARLGHEVKLMPPAYVKPYVKRGKTDANDAEAICEAVSRPTMRFVAVKSSEQQAALSMHRARDLMVKQRTQMINMIRGLSSEFGVEAPRGLHQALALAHRLIDGEPMPIPALAIEVLASLSKQLLACHDRILDFERAINKWHRSNDVSRRLASIPGIGPIGASALAASVIDPHQFKSGRQFAAWLGLTPLQNSSGGKERLGRISKMGDQYLRKLLIIGMTALILAGR

SEQ ID NO: 326809 - protein, 387 aa, unidentified
MKTFQVFYIGLIKSGGANAYVALRLIQPICIMYTHVYIGLDAHTRNCVLGAIDADANVVSVHDFPTSETGLIRHVKALPATFKYLALEESSLAGWIAGVLTPHVTELIVCDPVQNALISRGGSKDDVRDSLKLARLLRLEELKPVYHNHDPSRVDFKMVAQQYLSITNEIVALKNQIKSKYYQGGVLKISGSLVYRKAHRHSYLKHVESEAMKKVILNFYDPLDCMVRVRENALLLMQELGKKYGEIEQFQRIPGIGVVGAHVFSAFIQTPHRFATKQQLWKYCQLGIRVRQSGGKKLSGECLDRSGASVLKAISYQCWMSSLPAKESNEVSLFYHASAKRTQDLTRARLNTQRNVLATLWTIWRKNVDYHPHLFYRPPVSARKAKQ

SEQ ID NO: 326810 - protein, 425 aa, unidentified
MNYKQNEKINQVKESTLVVGIDIGSTTQYARAFDWRGIELGKVFPFSNSREGFESFKAWMQHLQDKYKKLDAIVGIEPTGHYWFDLGAYLEDEGILLVMVNPYAVKQTKELDDNSQSKNDRKDPKVIAKLVTEGRYSAPYTPDGVYADLRIMVANRKRLIREMTQIKNRFARWFAIYFPEYTDVFGDYEAQSSMLLLKKVCTPEAIVELGAEKINQIWRDAKLRAVGMKRATTLCETAKRSIGLKKGSSAAQYEMKLLLEDYEYKKAQLDAVMEEIEKLCRKIPESEQMLAIKGIGVITVAGFLAEVGDVRRFESPRQIQKLAGLSLRENSSGKHKGQTTISKRGRSKLRAVLFNAAIPLIAKNPEFKSLHEYYTTRANNPLKKKQSVIAISCKLIRVFYAILAKGVTYDAQKLISDIHRQPQAA

SEQ ID NO: 326811 - protein, 407 aa, unidentified
MDLLKTVFGIDVSCRKSNVCIMVNGQKVNDYAISNDMVGFNRLLGDLKQVTKPQIIFEATGVYSRRLQAFLDMHELRYVMMNPLEAKRKTKDDLHQNKTDKLDALYLAKLQSEHPQRLAYVQNKEYQELMANNRIYEQSSHDLITNKNRLHKAVQLTFPEIEHLMVNPRGKNYWSIALRFPHPDIVLETKEADIIDFLKGLSGIGKKRANDITQSLIRLAKVACPAVKKNSAHVRGLKMAINNILSAEEECQTALQEMAKLAPKRDLEILTSIPGIGKNTALRIISELGDIRRFNNPSQLNAFVGVDPQVYESGNLTAHLSISKRGTAIGRKVLYLAINQIQSAKKAGNPCHIADYYEKRKRSSETASHKKAAIASIHKLLRTIFALIKNDQLYSYDVAKHNQRLLS

SEQ ID NO: 326812 - protein, 384 aa, unidentified
MCFIKNNKRFGKVKKIDHDIEGFKRLLEDIQKLEAETNEKVCAVFEATGVYTKPLERFLSKNSIKTYMINPLESARKRKEEIHNKKTDKLDPISISKVYYDKEEMMELKKKDETYNWLRKKNRLYEDQLNHLRKYKVTFQNQLSICFPGYLDLFKDGYSDIPMTILKKYPHPDLLKNKKAETVARYLEKNTCHTHKVSLEYALKIIEFAKKTYPGCEKDDVEVEIFKILLDKVIETQRECEKTLNEMITVASTLEEYRYISSIDGIGPNLAARIIAEIGDIEEFKSREALVAYAGLDPHIYQSGDQDGKHLKISKKGNKYLRCLLFLAVGCSIRGAKDNPVNRFYQKKKQQSNPLNSKAAKTACTAKLLKIIYGICKNKTTYER

SEQ ID NO: 326813 - protein, 347 aa, unidentified
MRFFTDPHQNYCGIDLHARSMYLCIQNLEGKVVLHRNMQAGPEQFLKAIEPFREDVVVGVECIFTWYWLADLCAEHNIPFILGHALYMKAIHGGKAKNDRIDSRKIAALMRGGTFPMAYVYPAKMRATRDLLRRRNHLTRKRAELLSHIQNTNSQYNMEPFEANISYKKNRAGVAKQFIDLDVRMSIEADFELIALLDELKNRLELHITRNAKDHDPQALYRLRTVPGIGSIISLGILYEIGDIDRFGRVQDFASYARLVKCTRESAGKRYGTSGGKIGNAHLKWAFSEAAVLFLRGNPEGMKFKKRLEKKHGKGKALSILAHKLGRAVYYILKRDQAFDMNKFLKS

SEQ ID NO: 326814 - protein, 415 aa, unidentified
MALKIVYKICCGIDVHKTFVVACIASTDNKGITSYESHRFSTYTSGLKDLLQWLLKHNCKDVCMESTGKYWIPVYNVLENDCSIVLAHPKYVKAIRGKKTDKKDAKWIADLFKHDLVAGSFMPPADIRQLRDLMRYRFKLTCFKSSEKNRLQNCLTISNIQLGNVVSDTFGKSAQAILDKLLENPADTSFDLEPLVYKSLKKKLPELRDAIDGYITPEQAGKLKVIKAHYENLESRKAELEELILALAAPYQQELTILQTAPGISSPFTAIGIISEIGTNMEAFPSAKHLCSWAGLTPTNNESAGKKKSVRVSKAGCYIKPLLVQCANAVVKSSKHPEMRNRYLRLKKRRGHKKAIIAIARMLLTALYHMLKNGENYNAELYQKSDLLPVDREITVEQALMIARNQGYKIKSATA

SEQ ID NO: 326815 - protein, 406 aa, unidentified
MSYYYVGIDWADVHHDIHITNDSAKKIDAFRITHSLKGMETILKHVYQLTMDKQKVLFALETDKGLLVNFLLDNGFTVYAINPKSVDRFRDRYDPSRNKTDQIDAMLLADILRTDRHRFRAILPESNELRELKILSRDHKALTVSRTRLTNQLTACLKGYYPLGLELFADVKGPICLDFLQEFPNYKETQKLTLDQLKKFLAKHFYGYRKRSKPLFEKIKAPQIPVEPFIVRAKSKNMLSLVANTKAINAQIAEHEREMAAILERHPDGKIFLSLPAANIILAARILSELGDNRERYKSYNDAQCEAGTAPVMKQSGKYRHVVFRRACKKHFRDAMQQFAFVSITKCQWAKKYYRSQRQRGHTHHQATRALANKWVKIIYTMWKKRQPYDERIHLNMLKNHLIKQL

SEQ ID NO: 326816 - protein, 415 aa, unidentified
MERLFERCAGLDIHKDTVVACVRVPGQEGGRYQETRTFGATTEQLLVLLDWLRSWGVTLVGMESTGIYWRPVYYLLEDHMECWLLNAQHLRNVPGRKTDVKDAEWICQLVEHGLVRASFVPPREIRELRDLTRYRKAQIEERTREVQRMEKTLQDAGIKLSSVASRVLGVSGRRMLEAMVSGTHDPEVLAELAKGKLRNKLPALREALQGRFTGHHALIVSRQLAHIDFLDEAIAELSQQIDEVIAPFANKVTLLDTIPGVDKRTAELLIAEIGADMSVFPTHRHLASWAGICPGQNESAGKSRSGKTRKGSKWLRAGLTEAAKAASRSKGTYLNAQYQRLRGRRGHQKATIATAHSILVAAWHILSREVEYADLGEDYFIRRQAEHAERYRNRLIHQLEKLGHKVTLQPLPEAA

SEQ ID NO: 326817 - protein, 345 aa, unidentified
MPIVGGMDIHRKQITFDYVDLATGEVVCGQIAPADRRHLRAWLERFEGIPDVAFAFEACTGWRYVAAELARAGVQAHLAEPAGTAAARGRKKRAKTDRADSRLMRDLLLQGRLPECWIPPEHVLECRALLETYHALRREHTAWVQRAHAVLFHQGATRLREGGTGTAEGRELLREIAAGQLSPAGQQQIGLYLRMLEVTEAELDALRGQLTGAARRLAGAKALREQLYGVGPVTALALTCWLGGAGRFSSARKAVRFAGLDITVYSSAGKRSPGHLSRQGPPVLRWCAYEAGKVHARGQAPDHGYYAQVKDRIDGKRAALSEARKIIRQACRLLAELGDDALATG

SEQ ID NO: 326818 - protein, 311 aa, unidentified
MTEHATVGIDIAKDTFDVYIDSTRQLLHLDNTPEGHQQLLSALSAITVKLVVMEATGRYHSLLAATLELAGLPVAVVNPRQVKNFARALGTLYKTDPNDARVICEFGRRMEPEARPTPDEQTQRLAGMVTRRRQLVDNRTMEMNRYKSCDDVVVSVGIKRHIDWLTAEIRDADDDIDRQIKVMPLWREKATLLEEVKGIGPTTMAVLLAMLPELGTLNRHKISALVGVCPYAHDSGKMKGKRSIWGGRSAVRSALYMATLSAVRYNPTIRAFYERLIGRGKAFKVAVTACVRKLLTILNAMLRDNKKWVTN

SEQ ID NO: 326819 - protein, 375 aa, unidentified
MKNKTGTVSDNKQVQARVRSQSKARVKLGLDMHYRQVTVAMQEEDGAIKALGKMSHDGFSNWVEQKLQAGFELYSCYEAGASGYWLHRDLEGLGVKNLVVAPKAMGQDRRQKTDRRDSAELVDALDRYLRGNGKALNPVAIPSVEVEEKRALIRYHRQIMADRNRCEARGKGLLCAQGIEVRGKWWQSQSWQELQTHLRLKSWMQAQLEGWRKKRLELEREQQSLRRQIEALAPALLPKGVGAYSAVALEYELKGLARFQRARALSSYTGLCPGIHSSDGRGREGSINRCGNAAVRWNLVEMVWRLLKWQPQYEPVRQLARGLLKSKRARKRLAVKAARQLAIDLWRLHTGRATAQELGLIMQPTTQKPTSRTQY

SEQ ID NO: 326820 - protein, 348 aa, unidentified
MLADQLDYVVGVDPHRDAHALAIVQVVSGSVVFEVTVVASSDGYAQALKLVDEHAPGRRAFAVEGTSSFGAGLTRFLTAHDERVFEVGRLRRERRSGGKTDALDAIRAARSVLASERLATPRAGGERQALQALVAAREGAVNAKRAGLCQLRDLLITTPEPLRSELRPLTRARLLQRLATTRPQGRHDAELRGSLLALRSIARRVLQLTAEERELAREIETITRRLAPRLLDQPGVGPHAAAQLLLSWSHRGRIGSEAAFARLAGAAPIPASSGQTVRYRLDRTGDRRLNRALHMILVTRKRSHPATIAYIERRLQEGKTRREATRCLKRYLARNLYRLLEHGAPLAT

SEQ ID NO: 326821 - protein, 370 aa, unidentified
MAQSTPLFVGLDVHKDSIAVAHATGGQPDPPVFVGAIGSRQADIDQLIRRLRSKASALTFAYEAGPCGYGLYRYLTGKGLPCQVVAPSLIPKKPGDKIKTDRRDAVELARLLRSGDLTAVYVPSVEDEAIRDLCRARDAARVTGKDAKLRLKAFLLRLGHHYVGRATWNEAHRRYLAKVVCPTPAQQVVFQESVRAVDEQVDRLQRLEAELVERTPGWRLAPVVEALQALRGVQFLTAITVVAELGDLTRFDSPRQLAAFVGLIPSEYSSGGTRRQGGITKAGNGRARRALIEAAWAYRHPAKVSLHIQQRIDRLPKSLQDLGWKAQVRLCKRFRRLTARGKHPNVAVTAIARELIAFMWAIAREVPLSA

SEQ ID NO: 326822 - protein, 393 aa, unidentified
MICVGIDVAKNKHDCFILNSEGEVLADVFTIPNNAEGFDTLLQTIRRCARPEDKIKVGLEATGHYSYNILGFLLDNGLDTYVINPLHTNLYRKSLSLRKTKTDRVDARTIAAMLMSDVDLKSYTDTAYHNEELKSLTRYRFDKVRERAKLKQSVSRLVTILFPELEKLVPTLHMASVYALLSEFPGAKQVAGAHLTHLKAVLHDSSKGRYGRDMATTLRDAARCSVGSVMPAKSLELQHTIRLIRELDAEIEDIEAAIQSMMEEIHSPITTIPGIGVRMGAMILAEIGDFSRFDSPDKILAYAGMSPSTYQSGQLSLSGAYSHMEKRGSRYLRYALYNATKYVCLWDPTFAAYLAKKRAEGKHYNVALSHATKKLVRLICALEKSQQPYNTAA

SEQ ID NO: 326823 - protein, 327 aa, unidentified
MLYLGIDVSKAKLDCCLLIDPQAPKRKNKSVANSRSGVVELVAWLARHGAPATQVHAVLEGTGVYHEQAALGLYENNVTVSIVNPAQVRSFAQGLAIRTKTDGVDSLVLARYGFLVRPAPWEPPPPEARMLQALLSRREAIAQDLQRERNRQEKAKATDTPVVVRRSIDEAILFLEQQLRQLQQDIDDHIDRHPGLKDDLRLLQSIPAVGPQVGNNMLAVMSTRKFESAEQLAAYLGLVPVERQSGSSVLGRVRLSKAGPARIRAILYMAAIVATRHNPHVKAAYERLLARGKSKMSALGAAMRKLVHLCFGVLKTRQIYCLDHAKI

SEQ ID NO: 326824 - protein, 353 aa, unidentified
MNNLSNPVSTFDPCGIEVSAQTLRVALARQGRATVRREFPNTRQGHQALLRFLARSGRPVRVAMESTGLYGLDLALCLHQARVAVMVANPRAVRHFATALMQRSKTDLLDAEVLRQFAARMPFVAWRPPSPAAFQLVAVARRLEALTEMRAAEKSRRHAASLSEALPAIIRRDVERSIQTHEHAIQRLTRAAQEFVLSDPALAQRFELLLSIPGIATTSALHLLAELALLPEDLDVRQWVAYAGLDPRLYTSGTSVHKKVRISKAGNKHLRRALYMPALVAIVHEPHLRAFYDHLLRRGKTKLQALVATMRKLLHAIFGMFKHQQPFDGAKVYARREEPVPAPAPEPQEVACA

SEQ ID NO: 326825 - protein, 353 aa, unidentified
MSDDKYIAFDVHQATTVVSVVNAAGRDLDTTILPTQPQALIGYLESWRGRLHLTLEEGTYSAWLYDVLEGRVEELVVCDPRRNALLKEGNRTDHTDARKLADLLRTGMLRPVYHGSRSLRNLQELAHAYQALVQDTTRVMNRLKAFYRSRGIDCAGHGVYSPKQRVSWLERLPAGASRLRAELLHDELEQLRRLRRKARRALLLESRKHTVAARLREVPGFGPLRVALLIARMQSPHRFRTRRKLWSYAGLGLVQEGSGEYSWVEGRAVRRRHAVQLRGLNRNHQPGLKEIFKSAALAAIRQPGPFQDYYDLRVRRGVDPAILRVTVARKLAALTLSLWKKGGRYRAEGVKQA

SEQ ID NO: 326826 - protein, 409 aa, unidentified
MDTIYPHCAGLDVHKDSVMACVRHLQGTAVRQEVRQFGTTTAALLELADWLAAEGVTHVAMESTGVYWKPIWNLLEDRFTVLLVNARDVKQVPGRKTDVKDCQWIAQLLQHGLLRASFVPDRPQRELRDLTRQRSQLVAEKARVANRIAKTLEDANIKLGSVASDVLGASGRDMIRALIDGGSSPEAMAELARRRLRQKIPQLRQALTGRVTEHHRFMLGVLLAQVEHLESLVGQFDRRIEQVLRPFEIEAVRRLDSIPGLDVRAAQNVVAEIGADMGRFPTAGHLCAWAGLCPGNHSSAGKRKRGRTTEGNRWLKATLTQCAWAASRTKGTYLAAQYRRLAGRRGRKRAAIAVAHSQLVAAYHLIKGNVDYEDLGAEHFDTIERDRRARHFVKRLEAMGYEVTLAPAA

SEQ ID NO: 326827 - protein, 340 aa, unidentified
METSIKFYLGIDVSKSWFDVSVLKVVNHEKQPMLTEQFVNTKEGIGSFQKWLEQQGVLFDENTLIVIENTGVYHRPIWEFCSKHNLPLHIGNAAHIKWSLGITRGKNDQIDSKRLCNYCYKQSDELKAMPVLNPVFMNLKDLMTSRTRLIAQLQATKSYVKELLCTNDKALLKTLEKAHKAAIDGIEKSIAQIEKAINDLIVADEKIYRNYELIKSIPGIGSITAIYIICCTNNFANKPSGKQLASYAGVVPFEHSSGSSVRGRNKVHKMANKELKKLIHMCAVSSIRYSSEMKAYYERKKAEGKPGLSVVNAIKNKLLLRVVAVVNKQEKYVENYQKVA

SEQ ID NO: 326828 - protein, 363 aa, unidentified
MEHMFATLGGIHMLICIGMDVHAKKLTCYGIPFDEGDVEAEEFCTEFNREFKVMSGEKKDVIRLSKWLKDVDHSILIESGSKTHEVFWTLTDNGCTVVVANANDLFRITMSVKKTDFHDCRELASYMRRRMLGEKEFSVCLMVDSVWLNRRQMCRLYAAAASDLSDLRRRIRSYMLVRGITIEDLGRDIVSEASLKKLEEVADVPMGFLIEEARWKTAEQKRILKAIEKEFADVPYYNLLKSIRGFGPVTSSYLTAMIIDINRFDSPAAFAAYFGIVPKQRESAGHSKHCGITRRGDDVARQMLLTATMVHVGNDRDRVSSITNMYYRLRARGMPNKKAMTACTNKMTRIIYAILKDGREYRE

SEQ ID NO: 326829 - protein, 331 aa, unidentified
MNYVGLDVHKEYCQAAILDERGKLLSEKRIQTSEQGFKQLAKAMDDGSSIVMEASCSFYTPYDFFSGRGYEVRVAHPKNVKAIAASKVKTDRIDARILADLLRADLIPETYVPDRGIRQLRDLLTHRQGLVKMRTEAKNRIHSVLTKRGIRCELSDIFGRAGRAWLGSLELDPSGKLEIRQSLETIRLLDEQVADVEGGIFAYDRSLPEARLLQTMPGVGRLVSMIMLAEIADIDRFPDEKRLASYAGLTPSVHQSGGVDRRGRITKQGSKMLRTAMIQAAQRAMHRDTKIRRFYLRMRKRHNGNQAKVAVARKMLCWSYFMLKRGEPFAA

SEQ ID NO: 326830 - protein, 342 aa, unidentified
MEKVSIIGLDIAKSVFQAHGAEASGAVVFRKKINRAKLLEFFASQPPCTVAMEACGGAHHWGREMAKLGHEVKLIAPKYVKPFVKRQKNDAADAEAICEAACRPTMRFVAVKSETTQASALVFRTRDLLVRQRTQITNAMRGHLTEYGLVVPQGAGHFKKLVAHLEDPASPLPNEVRSILSLLSQTAMRLDEKISLLDKEIARRTRDDEIARRLMTIPGVGPITATAIAALAPPAATFRKGRDFAAWVGLTPLQKSTGGKQKLGATSKMGERTIRRLLIIGAAAAIHHATRRGVPPTTWLGRMLARKPRMLVTVALANKMARIVWALLVKGEDYRAPGGAAA

SEQ ID NO: 326831 - protein, 342 aa, unidentified
MNQYAGIDVSLECSSVCVVDANGKILREAKVVSEPEALIAWFRSSGFELERIGLEAGPLSQWLFAAMKACGFAVELLETRHVRKAFEAMPVKSDRNDARGIAQLMRLGWFRPVHCKSMSAQETRSLLTARKLVQSKLRDVENSLRGILRGFGLKVGKTTERRFAGRIEELVADHLHLERIADALLAVRAVLRKEFAAFEKQVRKLARSDARTRLLMSTPAVGPIVALTYASAIDDPTRFKSSKQAGAHFGLTPKKHQSGETDYTGRISKIGDASVRTALYEAAHIMLTKPLKGCSQLKSWAMRIARRAGMSKAKVALARRLAVIMHRMLADATPFNTAAAAA

SEQ ID NO: 326832 - protein, 442 aa, unidentified
MKTQIFEFCGCDVHKKMIEVAWFDITGQAFLHGSFENSPEGNQHLWKECLRLGTTKVAMESTSIYWRAIYKSCPKSITVMVFNSATIKLKTRPKTDVKDAMWIARCLRAGFISPSKIELGKAAEIKELCRLRNTIVEEITRKKNHIHKILDEFQRKPSSFCSSLNTHLALYVVTILAQGGSINDLEANCHTTRLKNSVEKKKKALKVFLTPPLPLESRLSLELSLRGLLERAQACAKIDSQLVQRLKEPSIRESLGILNSIPGISGVSALHLLFEIGRIDRFPSKRQVVSWAGLCPRIYSSGGKTSLGHITKRGNAHVRRILFQAARASLRVKSNPLERWYRRLAARKPGRVALVALARKLLVIIYTLLKTRQTFLHAPLKTEIRVHSTAKKLVRGLTSEPIAPLLTVLVNWLDTPRQFRDSLAGVFDSMYREVRQKRGVYS

SEQ ID NO: 326833 - protein, 341 aa, unidentified
MSDYSYFCGIDLAKNHFSIHAVDQHGKVLLHKSVTRSKLLTTIANMPPMRIGVEACGGAHYWARTLRKLGHDARIMAVKYVTPYRTKGKNDLNDAVAICEAVQRPTTRFVPIKSPEQQAILSVHRMREHWVRERTALMNRIRALLSEFGLIIPVGRASLMRLVPDMLENPENELPNLARATLADAFEHLKSLNQNIDNTEITFDAFAKVSTNVQRIMKVRGIGPQTATALLASIGNGAQFDKSLDFSAWLGLVPKQYSTGGKPKLGRITKHGDKYLRTLLVHGARTVIANLGDKQDRFNQWCRRVLERRGMNRAVVALAAKNARIIWSLIHNQTEYENCAA

SEQ ID NO: 326834 - protein, 326 aa, unidentified
MQNILGIDVSKDTLDLVLLTDQGDSHKVMDNNPEGYKRLDKWLVSHHVDKLHACLEATGQYGEGVAEHLYACGHAVSVVNPARIKHYGESKIRRNKTDKADANLIAEFCLKEQPALWEPLNPDLKHLRALVRRLNDLKVNYQQENNRLKSGEKDTWVISDLSTHMQYLKERIAATEKEIQDFISQTPGLKAQQDLLVTIPGIGKKASAMLMAEIGDITAFDSASQLAAYAGLTPKGFSSGSSVHKKTRISKQGRSEIRYYLYMPALVAMTHNSVVRDLCFRLYERRLPKMAIVVAAMHKLLHIVFGVLKTQMPFDPDYGKQFDFSA

SEQ ID NO: 326835 - protein, 446 aa, unidentified
MNHARLSQHRQFLAGKIVVGIDPSKDKHQAAVVDPQGSQMGRSFSFPTTRAGYDRLLSSELPKILGTSAPERVVFALETACNLWETLAFFLHHRGYTVVLVSPLSTHHARPILSIEFSRTDPKDAYVVATVAQRGAFTVYERFPAANNATHLLAITYDKLRKELAQNRARVRAMLDRLFPEFPRIINPHTDSAVYLLKRYLFPDDFLALDIDLESEALAKISRRQLGREELLELRAAACTSIGVVRQDDERIAERLALDAFLATIETLEHQFTQLERELLKRVEPLEQHQRLTSLSGVGKRLAALFLAEVRDLSRYTHFKSIEKLAGFNLRLFDSGRFTGTRHISSLGNTRLRWILYKMAEETARRVPEVRRKYLRRQIKRRSHIRNVVACVPTLLQLIIAMEREKRPYQHRQDHLNELNELEAKYQALRAASPKNTKRKEAKAAA

SEQ ID NO: 326836 - protein, 332 aa, unidentified
MMAQDRLVVVGIDVAKDKVDACIRSLSQRQAFPSTPEGRRALIRWLRRHKVGKAAMEASGGYEREWAKALREAGIEGLVVDPKRVRNFARSAGRLAKNDPIDAEMIAWFAETFIEARGQAYDAARERLAQIVSARQALIDVQTSLQNRKEHSTPDVVQKMQGRLLKRIAAEIAKLEAAIAALIKTTPRFAELAEIIESVPGLARGTSAGLIGAMPELGQIGNKVAAALLGAAPYDDDSGKRRGVRHIQGGRRKVRNLFYMASMGAATRHNPVLKAFYDRLIARGKEPKVALTACMRKLIVILNVMIARGEKWDARRYEVSDSARLPPSACTA

SEQ ID NO: 326837 - protein, 321 aa, unidentified
MKTVLGIDLAKKKFDVALLVNGKYKSKVFENNPTGFSSLLTWLAKNNVETVHACMEATGSYGEALARFIHEAGHCVSVTNPAQIKAFGQSELLRTKNDKTDAKLIARFCEKMEPVLWQPPPAEVEYLRGLGRRRDALVSMRTQELNRLETSNETVNTSVQTVIECLDKEIEQISKLIKDHISKHPGLKHKQDLLNTIPGVGPSTIEAILSEINAFEGFDTIEQVVAYMGLSPKEHTSGTSVKGKSAICKIGNARLRKALYMPALSAIIHNPIVKALYDRMKAKSKNGMVIACACMKKLVHLIYGVIKTNKPFDPAYTLKTT

SEQ ID NO: 326838 - protein, 411 aa, unidentified
MIKENYIYVGIDLHKETHTAVMIDCYNQKLGEITFPNRPADFPKLVAKVKKCNTDGKTIVFGLENAYGYGRALAVWLIDKGYLVKDVNTAISHRQAKHRGAMYRKSDSDDAEAIALATLNMLDKLPDAYPNDAYWSLGQLVHRRDNIMKQRTRLVNQLHEQLCIAYPSYKQFFNDISRPTALYFWEHYPSRKYLKGKSVEDLRAELVPVSHNKCSTKTCEKILDAVASDKVKNNAYQDARDMVTLSIVSDLQHYDIQLAEVDKMLEQMYKMLGCTLTTIPGVNVITAVKILAEIGDIKRFSNANKLAQFAGIAPLHLSSSGKGKDVATKQGNRRLQPTIYFLAIQMVQVSSKDTPRNSVVRAYYEKRKAEGKTSQQTLICISRRLISIIYGMLKNGTEYRMPVVENVGENR

SEQ ID NO: 326839 - protein, 320 aa, unidentified
MNSIIIGIDVSKETFDAAVLINNKVQTRKFNNNSEGFNKLVTWLKSRGTGHVCMEATGIYWKSLAKYLYDYGYKVSVVNPARIKCFAISKLSRTKTDKADSVLIADFCEAMKPEAWYPQPPYIQEQQQLVNCLNVLINHKTQETNRLEGASKAIANNIQMHIEFLETQVKEIEQLINSHIKNNKDLHDKAMLLESIPGVGAKTQAIVLAFFADIEKFSSAKQVVAFVGLNPKHRQSGSSVRGVSRISRTGNSDLRKAFYMPAMSALRYNCIIKQFSQRLSDSGKPKMLILIASMRKLLHIIYGVLKHNSPFNPNVSIIQK

SEQ ID NO: 326840 - protein, 346 aa, unidentified
MSHKLNSGIAVIGIDIGKNSFHVVGLDQRGAIVLRQKWSRGQVATRLASMPRCLIGMEACVGAHHLSRKLTLLGHDARLMPAKYVRPYSRGQKNDFRDAEAIAEAVQRPTMKFVATKTAEQLDLQALHRVRERLVSQRTGIINQIRAFLLERGVAVRQGLRFLRAELPRILAAPCDALSPRMLRVIEDLAGDWRRLDERIEHLSSEMEVLARQDAGCERLMSVPGIGPIVSSAMVAAIGTGDAFTKGRDFAAWLGLVPKQISTGDRTILGKISKRGNRYLRVLFVQAAWAVLIKPKSWDRHGLKPWLEAAKRRLHHNVLAIALANKLARIAWSVLAHGRTFEASKI

SEQ ID NO: 326841 - protein, 385 aa, unidentified
MSELNDLSRSLTSLEQDKTIIAVIEMSQSSWLVAGIIPGIERHPLKKLEPSEEELVRLLMRWRTEATKNGHTITRFAVAFEAGRDGFWLARWLRARDIETYVIHPTSVAVSREHRRAKTDRLDTGLLKRVFIGWLRGEPDHCHMAAIPTLAEEDAKRPNREREGLVRERTRIVNRMKSCLARFGIRKFKPTLRKAPERLATLGMPEGVPLPPNTLLELRRDMARLRFVMDQIKEVEETRAQRLEQAPQEKTHAMVRLIARVIGVGIETADMLVHEILSRQLRDRRAVARYAGLTGAPDESGNKRREKGLAKAGNARVRRGMIQLAWRFLVFQKDSALARWYRTRTESAGKKRKTMIVALARKLLIALWRLVTIGEVPAGVVLRAA

SEQ ID NO: 326842 - protein, 343 aa, unidentified
MQTIATIGLDIAKSVFQVHGVDAAGQMVIRRQLKRRQVLVFFAKLPPCLIGIEACASSHYWARELQAVGHTVRLIPPAYVKPYVKRQKNDAADAEAICEAVTRPNMRFVPIKTIEQQGCLVLHRTRHLLVRQQTATINSIRAHLAEFGIVAPVGRRGVEHLLEVVADANDTQVPEVARACVAALGVQLQQLKAQILEFDRRILAWHRSSEASRRLNHIPGVGPLLATALVASIADPKAFRSGRDFSAWIGLVPKQNSSGGKDKLGNISKRGDRYLRSLFTAGALAVIRYAKIHGTKHRPWLVALLARRPTKVAAIALANKLARIAWALMTKGGRYRQPAALRV

SEQ ID NO: 326843 - protein, 402 aa, unidentified
MNAVGIDVSKGKSMVAIMRPFGEIVSTPFEIKHTASGINSLVELINSVEGESRIVMEHTGRYYEVLAHQLSEANLFVSAINPKLIKDFDNDSLRKVKSDKADAVKIARYALDKWQNLKQYNVMDELRNQLKTMNRQFGFYMKHKTAMKNNLIGILDQTYPGVNTYFDSPARSDGSQKWVDFASAYWHVDCIRKMSLNAFIDHYQYWCKRKKYNFSQSKAEEIYGKAKELVPVLPKDAITKLIIKQAVDQLNSASTTVESLRTLMNETASKLPEYPVVMAMKGVGTSLGPQLMAEIGDVSRFTHKSAITAFAGVDPGVNESGTYEQKSVPTSKRGSADLRKTLFQVMDVLIKTHPQDDPVYQFLDKKRAQGKPYYVYMTAGANKFLRIYYGRVKEYLSSLPES

SEQ ID NO: 326844 - protein, 345 aa, unidentified
MEHYVGLDVSLKLTAICIVDRTGKIEREGVVSSDPEAIAIFIKSHAPHVVRVGLETGATATWLWTELNKLGLPVICIDARHAKAALKMQINKSDRNDAVGIARIMQCGWYKEVHVKDLDSHAVKALLVSRALLVKIKRDLENQIRGLLKNLGLVIGRAKMNVFAVRAAELTEHRPELAAAVVPLLSARAAIEQQIADLDRKVMRLARNNAQARRFMTAPGVGPITALCFLATIDDPTRFKRSRSVGAYLGLTTRRYASGEIDWTGRISKCGDKMLRSYLYEAANVMLTRVARWSALKAWGIRVAKRTGLRKAKVAVARKLAVVLHRMWIDGTEFKWSKEAANQPA

SEQ ID NO: 326845 - protein, 384 aa, unidentified
MNRIVKIGMDVHSTNYTLCAMEPVLDGEDRIFANIKVTPDYKNVIQFISKLKNKLGASDTYSIECGYEAGCLGYSLYHQLTDAGVKCTILAPTTMLTPQGKRIKTDKRDALMIAQCLSYGGYNAVHVPDEKDDAIKEYLRMRDDHKLVLKKIKQQINAFCLRHGHFYDGHKWTIKHREWLKALNLSNLYRETLDEYMATYEEQESKIERLDRRIEELASDSAYKEKVKKLGCFLGIKTHTALSLIVETGDFKRFAKGNTYAAFLGLAPGESSSGDNVNRTGISKAGNSHLRTLLIEGARGICKGKIGHKSKDLRLRQAGNSAEVIAYADKANVRLRSRYYRFMRHEKKKNVAVAAIARELACFIWGMMTDNISIVPERGKQNVA

SEQ ID NO: 326846 - protein, 358 aa, unidentified
MTQVKKLDFIGTTIYCGIDVHKKSWRVNIQDSEFELEDFTQNPDAALLHKHLSNRYPGANYKIGYEAGFSGFSMQRILSQSGCECWVVNAADIPTADKDKRQKQDKADARKLCNYLQSKKLKGIHIPDTEWEHARTLVRTRERIVNNQTRCKNRIWQLLHFSGLSVPAQQQEEQYWSKRFVDSLQKSDCGGSAHLQQSLQLHIKDYLQTRGLLLEATRAIRTLCREEKYEGDIKLLRSIPGIGEVNAAIMLFELQDVSRFKRFDYLCSYVGLVPDTADSGDTKRTKGITNRHNYYLRTALVESSWSVVRRDPALLMKYKEYCKRMEKNKAIIRVAKHLLSRVNFVLKNKKEYVTGVVA

SEQ ID NO: 326847 - protein, 414 aa, unidentified
MGSGCKICVGGMNMNCVGVDVSKGKSMIAVMRPLGELVIPPFEVAHNDAELRKLSRLLGDLDGETCVVMEATGNYHLPVASFLCDSGFYVSVVNAMLVHGYGNNRLRRAKTDKKDAIKLSNYGLDHWLALPKYIPEDEVRLMLKTTYRQYQQCAKVQTMLKNNLISLLDTAFPDVNRLFTSPARADGNEKWVDFVAAFPHCECVCGLSEKAFTAKYQKWCKKHGYNFSQDKALDIYASACGHFSVMPRTDTAKLLVDQAVSQLRAASAALAALRNEMQSLAASLPEYPVVMGMFGVGPALGPQLMAEIGDVRRFHSKKALVAFAGIDAPPYQSGQMEVRSRSISKRGSSALRRTLFLVMSTILRRSPADEPVYQFMDKKRAEGKPYRVYMIASANKFLRIYYATVKRHLDSLEA

SEQ ID NO: 326848 - protein, 334 aa, unidentified
MNCIGIDVSHKELVVVVSVKGKTRKAKTFQNTPAGFKSIIQIASKLKGNVKVCLEATGVYHFDLTIALSYAEGVEVMVINPKISSNFAKVLMSRSKTDAIDAEILAIYAERMPFEAWERPADEYITLRVFSRRIASLNKLKTQTKNQLHALVSTAETPQLVVDQVEELIKVLEKQIENQRLAAIALIKQHSALLNAFVLVTSIKGIADASAIQILAELMILPKEMSAKQWVAHAGLDPRIFQSGSSVEKKPRISKAGNKYIRQAIYMPALVSTRFEPHVKGYYSHMINDNGLKKMQAICAVMRKLLHAIHGMLKANKRFDGERFYKFPAEVIHS

SEQ ID NO: 326849 - protein, 345 aa, unidentified
MNQIIRIGIDTSKYIFVLHGVDAAEQVVLRKKLSRKQVLEFFAKLPPTVIGMEACGASQHWARELSKLGHEVKLMAPQLVKPYVMRNKNDGRDAEGLCEAMSRRSMRFVPVKTAEQQAALMLMGVRDGLIVRRTQLTNTIRGHAAEYGLIAPKGLDAIEPLLARIAQDETLPALARELFVVLGRERARLEGELKAVEAKLMAWHRGDATGRRLAEIPSVGPIVATALVMKTPDPHAFRSGRHFAAWLGLTPKDHSTAGRTRLGKITRAGDEDLRRLLVIGATAVIQQARRGRGHHSRWLLALIQRKPPKLAAVALANKVARIAWKLMATGESYEAARIKPMTAAA

SEQ ID NO: 326850 - protein, 342 aa, unidentified
MKFYCGIDLSARDCHVCVIDEQLKIVVQQKLRNELPKICQLLAPYKANLKIVVESTFNWYWLIDGLQAEGFEVMLAHTLGLYLITGAKVKTDRRDAYALAKLLLVGAVPAAYIYPVETRPVRDLLRRRLHLVQVRAGEYGSLRRLLLRQGILSSKQQEIKTATEAELEQWFEHPLVRLHASQELQRIELYSQQIAELEKTILELAQTEQAYELLQKLPGVGQTIALTILYEVGELTRFANAKVFSSYCRVVSGIAQSGNVTGRGRASKQGNHYLKAAFSQAAVHAVRCYPKVRRYYERQLKRHQGRGRQMICYNIIAHKLAQAAFHVLKEQTEYREELLFGR

SEQ ID NO: 326851 - protein, 329 aa, unidentified
MACVPADNSKHPIMTKISSPVETPTAVLGLDIAKDSVVLYDAATNTTRTVKNTPTALQAALAAYAGHDLMVCEATGGYERAALEAARSVGLPAHKADAARVKAFIAAMGGAAKTDAIDARWLARYGTARFPALARWTPPAPEREKLAMLVRHRQDLLQSRTRAKNRNAAPGASPLASFLEAEIDFLTDQIATIDNAIADLIQSNPILQQAERALRRIAGIGPVAARTLLALLPELGTLSRRQIASLAGLAPHPHHSGTVKRHRRMVGGRNGLKPVLFMAALSAARSHPALAAFYDRLVAAGKAKRLVLAAIARKLVTIADAVLKKPQLT

SEQ ID NO: 326852 - protein, 326 aa, unidentified
MVVQVGIDIAKDKFDVCLLEEESQRHQETFANDKSGIHKLHKWLKQQGAKTAHVCLEATGIYGDQVAEMLYQWGYTVSVVNPARIKAYGESQMRRNKTDSLDAALIADYCRTQQPPAWAPPPPELKELRALVRHLDDLKQEKQRARNRLGAQNASRAVAQHLRDQVAFLGKQIGQTEQLIRQHIDQHPELKNQRDLLKSIPGIGDITACHLLAELGDMSRFEDVGEVVAFVGLNPRQHQSGKKRVTHGISRMGRPRLRAALYMPAVVAKRYNPRLKVWAEQLSQRGLTGRQVIVAIMRKLLHLAYGILKSKQAFDPHYGQPLLIAA

SEQ ID NO: 326853 - protein, 338 aa, unidentified
MHYIGIDHHRQYSHITLLDEKGEKLKYGRVGNLRSELDNFLSGIKEVKAVVEAGRSSYTMVDVLDDMGIEVTIAHPKEVKAIAKAKIKTDKRDSYILAHLLRTDLIPEVYKRSRENRSYQRVLRQRAFYVGSRTRVKNRIHALLSQQSEDVQEEISRVKNLFGTKGMKVIRGLSLAGNQKELLGALVKTFSHLGERRKETNGLVEKLYFEIPEARLIHTVPGFGVFLSVLTAVEIADIGRFENVRKFHCYAGVIPSTHSSGERTYHGKIVKEGNRWLRWAAVEAVWPAIRADFDLRCYYERLKRRKGANSAKVATARRLLTIIYRMLKENRSYIPYKR

SEQ ID NO: 326854 - protein, 425 aa, unidentified
MKIQTIHSKTIPDNKLTVAFDVGKDKLNAYCEYGQHCFQDSFANNTLRIEQKLVTFSGIAESMGYDGLRIIAEPTGIYHLKLFRTARRLGHQTALVNPESVQKFKVVESNDAGKTDNKDPRVINLLAKYGKTLIDRNIHDEYLLLRQLNTMYIDEEKAYTGTRCKIHRVLTELFCDYSFQKDFLYTNTGRIFMNKYRANPYRIVQYGYSTFYRRMKRSAPRIRQSTLMRLWQDAQSSVRHQMPTDYMQILESRLIYLWEELLLRETRMTEIEDAMISITNELRLKDPDIPAPVKGVIKAFRIAQLLAETGPLDDFKTIEQLMRYAGLNIRERQSGYYRGNNQISKKGRSNLRRVLGYIVLPLVKKKSLYGSVYHTKKDYGMVGNKAMVAMMRKFLRMFYGWYKSGLPFNENRVFTGNVKYVQIIK

SEQ ID NO: 326855 - protein, 340 aa, unidentified
MMMSSFVGVDLHRNNFTYCIRENGEEKKIGKCEISELKCFASMLGKNTAMAVEATGNTFMFCRFLKAHVGRLVVVNPSQFKVISMSTKKTDRHDAKVLAEFLEKDMLPEVRMKDDLQAKISSLTQTREKLVQLRTVLKNKVNNLLAANFIVLKREELSTETGLRKALSFHFDPITDTEMFVVVEQIRSLNQSIEKLDKAIEDHGSKMDGFKNLKSIKGIGSKGAATLLSTIGNIHDFRSSKQLAAYIGIVPRVSNSNDTVCHGRITKNGSKIARTTLVQCALVAKRYSPYLHAFHESVKSRRGGAKANIALARKFLDIVYRTLKNNWMFEDFTQFKLVKN

SEQ ID NO: 326856 - protein, 420 aa, unidentified
MHDIIAGIDVHKRVLMVVGGTVSGAVADDASETPERIRFVQRKFGTTTSELLHLLAWLQQHGVQEVVMESTAQYWKPVWLVLEQHFRLHLAQAWSNRAPRGKKADFKDAKRLVRRHAAGELTLSFVPEAEQRQMRTVTRRRTQLTRQRVRIQNQVESLLEETRIKLSSVVTDLLGSSGLRILTALGQGETDPAKLAAMGDARLQCAPAELADALTGSVSEIHRLLLQQHLAQVALIDTQMEQLSLLAADAMRQHSDAVLRLVQIPGIRVLAAQQIVAEAGPQASAFPSAAQFSSWIGVCPGREESAGENHSSRCAKGNTYMRRVLCQAAQAAVRTKNSFFQLKFQRLLPRLGYGKAIWAMARHLSVVIWKILHDGAQYEEHGLPTTPKAAKRRVQILTKQLRALGYSVELKPLNPEAVVV

SEQ ID NO: 326857 - protein, 343 aa, unidentified
MVHYVGLDVSLKQVSICVVNDIGSVVREGVVDSDPEAIVAFVRSRAPKAVRLGLETGPTATWLWTELKRLGLPVICIDARHAKAVLKMQINKSDRNDAAGIARIMQTGWFKEVRVKDVDSHSIRALLASRALLVKIKRDLENQVRGLFKNLGLVIGRAKFNVFAVRAEELIENRPELIAAVMPLLEARKAVERQVSDLDRKVLKLAQHDAEVRRFMTAPGVGPITALCFKATIDDPTRFKRSRSVGAYVGLTSRRHSSGEVDWSGRISKCGDAMLRSYLFEAAGVLLTRVPKWSALKAWGMKLVKRNGLRKAKVAVARKLAVIMHRLWIDGTEFTWSKKEIAA

SEQ ID NO: 326858 - protein, 319 aa, unidentified
MDATSRSVVGIDVAKDSWDMMILPEEKAGTFASDAKGLRQLLRQLPEAGTCLIVIEATGGYERKLVAELLGANHCVAVVNPRQVRDFARAMGILAKSDRLDARVIALFGQHIQPRQLEKAPENQAELEQLVVRRRQLIDLRTAESNRLELTTLKLIRKGIKKMIDQFNRQIEQIEAEITKLIQADDEWRRKKDVLTSVIGVGDVTSVCLIAELPELGRLNRQEISALAGLAPFNRDSGKWKGKRSIWGGRASVRSVLYMAALSAKNWNPVIRQFAQRLEKAGKPFKVVITACMRKLLVILNTMVRTNTHWNSDFINQPS

SEQ ID NO: 326859 - protein, 348 aa, unidentified
MKQVKTIGLDIAKSVFLVHGVDAAGHVVLRQKLSRSRVLEFFAKLPRCLVGIEACGSSHHWARELITQGHEVKLMPAQYVKPYVKRGKNDAADAEAICEAVTRPTMRFVGVKTVEQQSIMMLHRVRLILMRQRTQLSNALRSHLAEFGIVSPIGREGLDRLLTIVADTDDGRVPAEARASLEMLAVQLEGVKAQILENDRRIIASARATEVGRRLLEVPGIGPVLASAFVASVADPAIFKSGRDLAAWIGLVPRQNSSGGKERLGGITKAGNGYLRQMLMVGAMAVIRYAQRNSARRPWLVQLMCRRPTKVAAIALANKTARTVWALMVSGERYRDPQAMQAAVSATL

SEQ ID NO: 326860 - protein, 347 aa, unidentified
MRFYTKQHKHYCGIDLHTNKMYLCILDRHGETVFHRNIKTSPEHFLNAIKPYRDDLVVSAECMFTWYWLADLCEDEGIPFILGHALYMRAIHGGKSKNDKIDSMKIAALLKGGLMPQAYTYPRKMRAIRDLMRRRNHFMRKRAELFAHTQNTASQYNHQEPLGRIAKPKNREGTVERFVLPCVQKSIEANLEMIATYDQVISGLERYIIKSAKNHDPVSYALLKTIHGVGRIIALGLLYEIEDIARFPRVQDFVSYCRLVKCAKESNGKKYGTGGKKIGNAHLRWAFSEAAQLFLKGNEAGQKYLQKITNRHGKGKALSILAHKLGRAVYYMLKNKKAFDMDKFLTA

SEQ ID NO: 326861 - protein, 364 aa, unidentified
MKKIQRPVRKVNCAVLGLDVHQSLIAYAWLDAEGEDVREGTVQATPAALLGLLAQAGEGVHVAFEAGGSSFWLYDVLVEAVGAGRVHVAQSRKIRAIANTTRKNDANDAWWLAYLTFEGRLPECYIPTGLRRELRLAVRERFEAVKRQTRCKVRLRCHLRQMGMRLPHRRLLTQENRQVLEEVSRRAGVQARAVGEALAQLEADRARIQGWEEVIEELAAQLPEVATIAREIPGVGKTLAAVLVAELGPISRFASPRAMGCYSGLVPSDRSSAGHQRHGAITREGSEHLRWALTQAAMGCLRARSGPGLAAGRWIRAKERRMGCKGKARVAGARKLNESIWRLFHLGECFDASKPFGGPVLARA

SEQ ID NO: 326862 - protein, 375 aa, unidentified
MKQFTQYVGVGLDVHKDTIAVAVADAGGGEVRYVGEIASTPEAITKLTRRLKKGAARLAWCYEAGPCGYHLYRQLSRAGEDCQVVAPSLIPRKSGDRVKTDRRDALSLARLHRAGELTAVWVPDQAQEALRDLTRAREDMKGLPRLQRQARQRLSAFLLRQGPRFPGKCKWTKTYFRWLDTVKFDSPVQQIVFQEYIEAVHACGRRVQAIDEQLARVARESVFWPVIEALMALRGINLLSATAIVAEIGDLHRFASARQLMAYLGLVPSEHSSGSKTVRGSITKTGNGHVRRLLIEAAWTYRHPARKTPWMRTHKGEASEAIQDIAWKAQKRLCQRYRHLMARGKQSVQASTAVARELAGFIWAVGQAVPGPAAH

SEQ ID NO: 326863 - protein, 390 aa, unidentified
MIYVGIDVAKDKHDCCILGSDGEILFSPFTIQNSLPGFDELYEKIRSLTSDLTQIKVGLEATGHYHLNLLRSLLDNGLASFVINPLHTNLYRKAQSLRKTKTDKVDAASIAMMLLTDRTLKPYSDISYHNEELKSLTRYRFDKVQERAKLKTSVARLVSILFPELEKLVPTLHMASIYAMLSEFPGASFIASAHLTRLKNLLHVASKGHYGRDMALTIRDAASSSIGSLLPAKSLELKHTIHLIQVLSAEIDEIEAAINNIMVTINSPITTIPGIKNRMGAMILAEIGDFSRFDDPDQILAYAGLSPSTYQSGQLTSSYAHMEKRGSRYLRYALFNATQYVCVWDPAFKTYLARKRSEGKHYYVAISHACKKLVRVIYRMQLTGDPYRTA

SEQ ID NO: 326864 - protein, 345 aa, unidentified
MHAMYYIGLDVHKRTISYCVKDVSGRVHREGTIPATRMDLDGWMSTLPQPWTVAMEATVFSGWIYDQLVPHAAAVKVAHPLMLRAIAVAKKKNDRIDANKICDCLRCDFLPECYMASTEIRERRRTLRYRNLLVRQMVQMKNKVAGLLMEAGVTYNKQRLHKVGYFRELLATSPDINDELRCLLRLCHETAVRLGRTESALMRSLQRDSILQERVERLMTIPAVGPVTALTWALEVGDVQRFSSIKKAISYCGLCGAEKSSGTLVQRTPLSKQRNKHLQTTLIEAAKMAPRNSAALAMIYDREKQKGNANRATLAVARKLVAYLMAVDRGQRSFQAVEASNCTAA

SEQ ID NO: 326865 - protein, 333 aa, unidentified
MNAAGIDVSKGKSMVSVMRPFGEVVAKPFTVRHTGSELKELADYLKSLDGETRIIMEHTGRYYEPVAQFLHDAGLYVSAVNPKLIKDYGNNSLRKVKTDKADSRKIAKYGLDNWVELRQYVSMDKIRYQLKTLNRQCNLYGKTKTMMKNNLIALLDQTYPGVNDLFDSPVREDGTQKWVDFAASFWHLECVKNMSLDAFTGRYRKWCKRNKYNFSSDKAAEIYAGVQDQIAMLPKDALTKLMIRQAINALNAVSATLEKLKAEMLELSSQLPEYPAVMEMRGVGDSLGPQLMAEIGDVMRFARRSAITSFAGVDPGADQSGGHERSNLQEWST

SEQ ID NO: 326866 - protein, 356 aa, unidentified
MQTQVTKKIDFTGKDIFIGLDVHKKSWSVTIIVDGMEHRTFTQPPDPGALNNYLQRTFPGGIYNSAYEAGFCGYGIHRELNSLGIRNIVINAADIPTSQKDKLQKRDPVDSRKIARSLEKGSLHGIHIFDRELEELRSLNRTRFYLMRDLRRSKTRIKSFLQYYGETIPVEYDNNQWTLKFVSWLKQVKMQTKSGQDAFSNLISSYEYHRSQLLILSRQIRERIREYDRELYTLLKSISGIGPLTASALITELGDINRFKNIDQLGSYIGLIPRIRESGEITYTGGITFRCNSFLRTLLIESSWQAIRMDPALMQYYHLHLVNNKGHKVVIKVARKLLNRIRYVMKNRQPYKTGVA

SEQ ID NO: 326867 - protein, 393 aa, unidentified
MLYLAIDQHKTQLTINIRNEQGDVIRKGQVSTHHTDIDDFFADFAKKARKHRGYMAIVEVCGFNDWLLEKFKKTRCSEIVVIQPENSAVSKTDKRDANALCELLWNNRKRLQGGQRPNGIRRIFPADPADAQVRQLANFRQHLVRQRTRIVNKIKGILNKHNMAQDAPTQLYDTKKFRQWITTVPLPAVDRLEVDMNIQSWELYDKQIAEVEAELVKRSETKGPDVCRLKAIPGISAMGAITLLSRIGDIKRFKNPDSLANYFGLTPGCHNTGGKHRVGGITKRGNTVARQVLNFAVIHIVRKDPEMKAWYKKIKNRRGAKTAKVAVMRRLATIIWHILRWEKPYQFRYDPPTPTPKKGDLRSPKEVLKGICNSHHSQGRGKTPLKCRGKTRA

SEQ ID NO: 326868 - protein, 389 aa, unidentified
MKYVGIDLHKKTISGCVVVKERGKRKVAARKRLECRDEAGIKGWFSELGKFEVVVEATASYEWFVKLVEPLAQRVVLAHPKKLRIIAESKRKSDKLDAQVLAEFLASDEIPLAYRPGPRVREQRALVRWRNFIQRRITSVKNKLRHILAAYNADVPNLFTAEGREHLATVQLSAADRFVSDQLVVELEQHQERLATSNRRLREFAASAPLAEREARAILDSIPNVGPVTTDVIMAELGDWRRFHSQAEVASYAGLAPGFRESAGKAKQLGITKEGSRLLRWVMIEFAWRMVGSSRKWGGHYHRLEARVGAKKAIVAIARRLLGMIFALLRTGRKYSLALEIPPPASCRSKSPRDTNPSDPACLRGQPRQASSLGAGVNYSGPLSVPEKE

SEQ ID NO: 326869 - protein, 339 aa, unidentified
MKEVSTVGLDLAKKVFQVHGVDARGTVVVRRAPRRSQLLAWFAKLPRCLVGMEACATAHYWARELVKLGHDVRLIPPAYAKAYVRRNKNDPADAEAICEAVSRPAMRFVAIKSERQQAAAGIHRVRDLLMKQHTMLRNQLRGLMAEFGIVAAKGRRGLGELLAILADAEDQRIPSPLRAGLLLIGETLRETDRKLATIDRQLAAAGREDATYRHLITAPGYGPILSSAMAAMVIDPAAFRRSSDFAASLGLVPRQEGTGGRVWLGPISKRGNGYLRRLLVNGATSLLNSKRAKQDPWLVKLLATKPRKVVAVALANKLARIGWALMVRQEDFRGLPAAA

SEQ ID NO: 326870 - protein, 355 aa, unidentified
MTTVPHDEVRVTVGVDTHEDVHVAVAVDQLGRWLAETWIATNTGGFARLVGWASEFGVIDRFGVEGTGSWGAGLARWLRAEGLVVVEVDRPKRKHRRHGKSDAIDAEAAARAVLSGEATAVPKTGDGPVEMIRVLRLTRRSAVKNRTMTANQINALVITAPDALSQDLRPMSTRRRVAVAAKFRTGDEPTTVLDATRYALRELARRYQHLTEQITRLDTQLDRLVAETAPELVAKVGVGTHTAAALLVTAGDNPERLAREGSFAHLTGTAPLDASSGKQQRHRLNRGGDRDANCALYQIALTRSSVDEDTKLYLKRRIAAGKTKKEAFRCLKRYIAREVHQILVRTPALQVALDT

SEQ ID NO: 326871 - protein, 452 aa, unidentified
MAQAKPQVIDDEEHERVYERVAAVDVAKDTGMVCARTPHRSRPGARQSTVWTVKARMASIRALGRQLKADGIEMVTLESTSDYWRIWFFVLEAAGLAVQLVNAAQARNLPGRPKTDKLDAMWLARLTELGLLRASFVPPAAIRALRDYTRARTRLVQERTRCFQRLEKLLESALVKLSSVASKLTTESAKDMMKAMIAGERDPHTLAALARTRMKAKHDDLVEALDGMFDDHHGELAQLLLDQIASLDGRIAQLGARAAELAAAMPEAWGINADGTTGPDAGAGPGAPALNAVARLAEIPGISDDVARAIIAETGLDMSRFRTAAHLVSWAGLCPSARQSGPRTRAGKKGQGDTWLRGALGQAATSASHTDTFPGERYHRIARRRGKARAQVAVARSILVIIWHLLADPAARYTDLGPGYYQARTGKDKKVKNHIRQIEALLGHPITITEAA

SEQ ID NO: 326872 - protein, 320 aa, unidentified
MTILTSPTVIGVDVAKAEIVAYREDLKNIQVINNDRTSIGRWLKTLPAQSSISLEATNLYHLDTAELAHGMGHRVYVVDPYRVSHYRESIGQRAKTDPCDARLLARYLTSEQHRLRVWSPPPRHYTVLKSLLNKRAQLMKARVSIMLSWSNEPLLEDLLAHGLEHFKQLDQAIQELLRKVSQEAGISENIRRCKAIEGIGELTATGLATTYMRGEFASADAFIAFLGMDLKAKDSGKKHSPRHLSKKGDGELRRLAHNAAMAACRSPVWKPFYESYLARGLARTQALVILARKLCRVAFALMKNQSEYQPNLRLQGSPAT

SEQ ID NO: 326873 - protein, 336 aa, unidentified
MKVKAIGVDLAKSVFQVHGVDEQDRPLLRRQLKRAQVLGFFARLEPCLVGMEACATAHFWGRKLAALGHSVRLIAPKYVKPYVKTNKNDARDAEAICEALLRPSMRFVALKSVEQQGLLALHRLRQGLIDSRTALVNQLRGLLAEFGVVVAVGRTRFEQALPGLIGDEQSGVPALLRQALEPMRTQLLALNEHIGQLDRRIAAWHRTNAPSLRAAEVPGVGVLTASAAVASIGDPKVFDSGRGFAAWLGITPGQHASGGKQRVLGITKRGDAYLRKLFIHGARTVVRHHRPGTDRWLDGLLARRPKNVAIVALAHRNARIVWALLAHAERYAPRAA

SEQ ID NO: 326874 - protein, 340 aa, unidentified
MGEITTIGLDLAKQVFQVHGIDADGTTVLRKQLRRSQVLSFFSRLAPCLVGMEACATAHYWGRELAALGHEVRLMPAQYVKAYIKRNKNDAADAEAICEAVVRPTMRFVPAKTAEQQAALLLHRGRERLVRQRTGLVNALRGHLAEFGVIAPQGLRNVGKLIAVVRDPSDARLPDLARQVLEVLATQIEQLEGAVAAVEKQLMAWHKSNPVSQRLATIPGIGPIIASAIAASVAEPGGFRSGREFAAWLGLVPRQNSTGGKHRLGGISKRGNQYLRRLLINGASANLLRSKATKADPWVIGLRRRRPSLVVAVALANKTARIAWAVMQRNENYQRMAAAA

SEQ ID NO: 326875 - protein, 355 aa, unidentified
MNDAKYIGMDVHTATISAAVRDSSGNLVMEATLETKSETILEFVHGLRGSLRVSFEEGTCASWLHDLLKPHVTEVLVCDPRKNALLRVGNKNDREDARKLSELLFLNKLHPVYHGETGIRTLKELARSYLTITRDLTRVMNRLKAIYRGWGIACAGRQVYAPRYRAEWLAKITEAGVRRRAEIYYQQFDALAALRQEVRRELLAESRKHPAMRLLRQIPSIGPIRAALLIALMQTPHRFRTKRQLWAYCGLALRTYDSGEYRFVGGQLKRSKKAVTIRGLNKNHNHDLKNIFKGAATRAAATAGPLQNFYEARIANGMKPPMARLTLARKIAAITLLVWKKGVRFDAEQLKQQAA

SEQ ID NO: 326876 - protein, 388 aa, unidentified
MTQASCSLSPPVTLDYENTLVLAIELSKTKWVLSAQVPGLLRVKAKQTIEPKAEALLAAIDGYRNRSRAAGRTIERVVAIYEASWSGFWLARWLGRHGVETHVVQPSSVPVDRRARRAKSDGIDAELLLRTLLAWLRGEPRVCSMVPIPTEADEDERRRVREREDLMAERVSLVNRIGAVLATLGVGDYNPLRRDRRTRLESLRTALGDPLPPHARARIRRMLDRLDLVCAQITELEQERDAVLDKEAPDRAEKMIQQLVELRGIGVQSATVLVREAFVHEFANGKALGSYAGLTPTPFSSGATEREQGIDKAGNRRLRTVMIELAWLWQRYQPGSAQVSWFRERACGTGRRMRKVMVVAMARRLLIALWRFATQGVVPEGAIVNPAG

SEQ ID NO: 326877 - protein, 349 aa, unidentified
MGEVSTIGVDIEKSVFQIRGVDAEGTVVIRKRVGRAKFLEFFEQLPPCLVGMEACATAHQWARELKKLGHDARLMPPTYVKAYVKRGKNDANDAAAICEAVTRPSMRFVPIKSVEQQSALMLHRTRDLLIRQRTQLINALRAHLAELGLVAAKGHEGLQQLVMAVTESRDERLPSDAGFACQTIVAQLHAVQTQVNGLDKRITQAHRANADSKRLDAIPGFGVILSTAVAATMTDPKAFRTGREFAAWIGLVPRQNSSGGKERLGSISKQGDRYLRRLLVLGAISIVRTARMRPDKYPWVIELLARRPAKVVAVALANKMARTAWAVLAKGETYRAPAHSSNAAIAAAA

SEQ ID NO: 326878 - protein, 376 aa, unidentified
MRETLRFLGLDVHAETIAVAVAEPDGEVRSLGTIANREDSIRKFIKRLGPPEQLRTCYEAGPTGFVLYWQLTQLGVDCAVVAPSLVPKKPGDRVKTDRRDALKLARCHRNGDLTAVWVPDKASEALRDLVRQREAAKQDQLRARHRLTKFLLRTGQRPPLGLKAWTERYWRWLAQVHYTQPAQEVTLRDCLNEVEHMNARVRRLEEAILEVVKLAPQATQELVRGLQALRGIAHISAVTIAAELGNISSRFQRARKLMGYSGAFPGEDSSGNRIRRGGITKAGNAHLRRIVVESAWCYRHLPRVGARLRKRQEGIPAEIIEIAWKAQNRLHKRYRKLTMAGKDKKKVITAVARELLGFIWAIGVKVEHACQQPIAA

SEQ ID NO: 326879 - protein, 338 aa, unidentified
MKLYGGIDLHSNNSVVALLDEEDRVVYRKRLANDAALVLEALAPYREAITGLVVESTYNWYWLVDALMDAGYRVHLANTAAIVQYSGLKYSDDDSDAAWLAKLLRLKLLAEGYIYPKEQRAVRDLLRRRSRLVQQHTANVLAVQNLFSRNRGRSLSANAIRRLTPGRVGELLPDANLALAVQSTLLAMRGQEAAIDLLEHEACAQVKSRPEYRHLLSTSGIGQVLGLTILLETGPIERFAHVGNYASYSRLVGSERLSNGKRKGRGNTKSGNKYLAWAYLEAANFAVRYNPAIKRYDQRKRAKTNGVVAIKTVAHKLARACYYMLREGTDFDVDRAFA

SEQ ID NO: 326880 - protein, 394 aa, unidentified
MNRIVYIGMDVHTSNYTLCSLDSGYGVEKDNYFAEVQFTNNFVTNVVNYVTNLKKKLKDCEFVCGYEAGCLGYSTYKDLTKVGIKCVLMAPSTMAVQKGGKKVKNDRRDARVIAQCLAYQTYKEVYVLSEHDEAVRGYLRMRDSHNKALKRIKQQIIAFCTGHGLFSPTKSNWTVAHLKWLKDLKFNDPVEQEILNEYLSSLTFLSDKIKAMDVRIEELASEKQYLENVKKLRCIKGIETNVALTLLAEIGDFNRFSKPTDFASYLGLIPGEQSSGDKVRGTGITKAGNSTLRRKLTESAKGYWRGRIGIKSATFKKLEKELPKEVTEYALKANTRLQRKFFNMTHVKGKNMNVAASACAREMACFVWGLITNHYDKAPAVPKTDEELLDLNLG

SEQ ID NO: 326881 - protein, 335 aa, unidentified
MHYLYYVGLDVSKETFDASLVAFEDANEMAHRKFANSRKGICSCLHWVEKRHGIRLDDVIFCAEDMGSYISEMAVCASDRTLNFNFSLISPLVIKYSMGIARGKTDRVDARRIAEYAITHYRKIALYLPAEKELCQLRTWLILRAHLAKQRVAKLVLLEKLDYKEKFADVSIQRSMLQEEIAYAETHMKTIEREMKELIAADSNICRNYKLLTSIKGVGPITANVMLCSTLNFTKITDHRKFACYCGLAPFEHSSGTSVRGGCHTSSMANRDIKVQLNRSALIAIRCDPQLKAYYERKVAEGKHKFSVLNAVRAKIAARCFAVVRRGTPYVALQI

SEQ ID NO: 326882 - protein, 409 aa, unidentified
MRIVGLDIHRGFAEAVALDDGKLKRLGRVDMRRHLLEAFAKRLSKEDVVVVEATGNAASVTAVLAPHVKRVVIANPKQVRIIAYAKIKTDTIDAGVLAQLYASGFLPEVWIPDEPTQALRRQVTRRNQIVRQRSRLKNIIQSILHSHLIPSCPHADLCGTSGRAWLFNQVLPEDERMAVERHLREFDRLAEDLKVIERDLARSALADEAAQRLMTIPGVDMVVALAMVAAIGVVTRFDRPQKLVSYLGLNPSVRQSGPGPAYHGRITKQGRGHARGMLVEAAWVAARAPGPLRAFFLRVRARRGQHVAAVATARKLAVIIWHLLIKGESYVWARPALHAKKLRDLELKAGHKSERGQKGAAHAYNIKSHRDQERRWVEQAEAAYARFVVGWNRRGPKQARTGAATEVRR

SEQ ID NO: 326883 - protein, 430 aa, unidentified
MNYNTQNKKIESITEKTLVIGIDVGSETHYARAFDWRNYQYSKKAFKFRNNAAGFASFKAWMNDIASENGKDVILPGMEPTGHYWFNLGMFLEDNGMKPVLVNPHHVKKSKELDDNNPNKSDSKDPKTIATLVNEGRFSYPYIPRGIYADLRGLSTLRFQTQEELTRIKNRIARWFSIYFPEIKDVYRNLDSVSGTMIMKLAPLPVDIITLGVEGINQIWRLAKLRGAGLKRAESLVAAAKHSIGSTEASEFARIEIKNLLSDFEMYTERMDEIMSLIEEKLMEIPFVEKLLAIKGVGIKTVSGFIAEVGDISRFDNPKQLQKLAGYAIVSSSSGKHKGESHISYRGRKRLRYVMYEVALSLVGKNIEFSQIHAYYTTRDKNPLKKIQSVVAVACKAIRVFWAILTKGSDYDGEKMISDIVRPTEIRKAA

SEQ ID NO: 326884 - protein, 411 aa, unidentified
MEVVYACCAGLDVHKATVVACVRVPGPRPGERRGETKTFATTTGGLAELGDWLRGHGVTEVAMESTGVYWRPVYAGLETRVRVMLVNARHVKMVPGRKTDVRDCEWLAQLLECGLLRASFVPPRAVRDLRDLTRLRKALIRERGHHVNRIEKTLELAQIKLGCVVTDLMGKTGRAILPALSTGIDDPDQLADYAQGLLRKKRAALREALAGRLTPHYAFLLQQHLALIDTLDAHIATLDARIDEAMRPFADAAALVQTMPGVAIRAAQAILAETGMDMVAFPTSAHFASWARLCPGNHESAGKRQPVSTGQGATWLRATRQESAWAAIRTKKSYYRALYHRLKGRGGAKKAVVAVQHAMLIALWPMLKHRVPHADLGADYFDRRNTERARRHHVRRLERLGYNVVLVESVA

SEQ ID NO: 326885 - protein, 352 aa, unidentified
MTVTIVETRAQACAITGGVDTHADVHVAAALDPLGGLLGVQEFPADPAGYARLVEWLGGFGTVCLVGIEGTGSYGAGLARHIAAAGIRVVEVDRSDRQDRRRRGKSDPLDAVSAARAAQSGRAAGAPKGRDGQVEAIRALMVAKRTARSERIQTINQARSLIVTGPDDLRARFAGHSADDLVAELASLRPRPGSMIRYHTLLSLRELGRRAEFLDGQLQRLDALIVPLVTARAPGLLALYGVGHDTAAKLLIAAGDHPERLRSEAAWAHLCATAPIPASSGKVTRHRLNPGGDRQANHALYRIVITRMSSHPATRAYVARRSKEGLSKKEIIRCLKRYVAREVYPHLRPGPR

SEQ ID NO: 326886 - protein, 343 aa, unidentified
MQVVTTVGLDIAKSVFQVHGVDAAGQVVIRRQLKRRYVLAFFEKLPACLVGIEACASSHHWSRELKTLGHTVRLMPPAYVKPYVKRQKNDTANAEAICEAVTRANMRFVATKTPVQQSCLTLHRTRHLFIRQQTAVINVIRAHLAEFGIVAPVGRKGIETLLDVVANPTDKRVPVIARACLAALGAQLRRLKEQILEFDRMIMAWHRSNEASKRLDAIPGVGPVLATALVASIADPKAFRSGRNFSAWIGLVPKQHSSGGKDRLGNISKQGDRYLRSLFMAGALAVIRYAKIHGTTHRPWLTALLARRPTKVAAIALANKMARMVWAMMTRGERYKDPIALAA

SEQ ID NO: 326887 - protein, 482 aa, unidentified
MKAKPQEKNKRATNHPTQHHWHEMNRKQRRETMRKIQSEDLSLEVIHPDAAGIDIGNESHYAAVPPSRDSQPVRCFGCTTAELKAMAAWLQQCRIRTVAMQSTGVYWVAVYDILEQAGLEVYLVNARDTKNLPGHKSDVQESQWLMKLHTYGLLRNSFRPSQKIRTMRTYWRQRNDLVQSASRHILRVQKALTQMNVQLANVLSDISGVTGQAIIKAILAGERNPHKLAEFRDPRVQASEEEIAHYLEGNWQPDLLFVLKQEQDGYEFCQQQMAECDRQLEQYLQSTEDRSHGAPLPEEKRKGRLKKKKGNKPQFDLREGLFRMSGTDLTRIDGIDVMTATTVISEAGYDMSKWKTENHFVSWLRLCPDNRISGGKVIGKGRLPTNNPVSIALKMAATTLRQSKTYLGAQFRRLRTRLGAPIAIKAMAAKLARLVYRMLRYGMKYVDQGAAFYELKHRERQVHQLKWKAAQLGYKVSLISAA

SEQ ID NO: 326888 - protein, 417 aa, unidentified
MSQSFLFFVGIDWGTENHSVCVLDREGNKVAECQARHSGTGLQQLLDWLRKQTGVSPDQVAFGMEAPAGAVVDTLLEHSYAGFHINPKQLDRFRDRHTVAGVKDDSLDAYVIADSLRTDRPCFHPIQPDDPQIHRLRTLSRLEDDLGQDWSRLTNQLREQLHRYFPQMLELSPAADELWGWELLQTAPLPAMARKLRCSQVRKILARHRIRRFSAQQVREKFQTPPLPVASGVAEAASEACLLLILRLHLLAQQRKHVAQSMKAILADLGEDTHRKQHRDVQVLSSLPGVGRIIAATMLVEAAQPLANRDYHALRAYGGVAPVTRQSGKRRQVIMRYACNQRLRNAFYHWARVSLQNDDRSRAHYHGLRKKGHSHGRALRGVADRLLAMLVSMLRSGTSYDPQRRSPNQLSAEPLAS

SEQ ID NO: 326889 - protein, 351 aa, unidentified
MLIIGCDYHPGVQQIAFMDTETGEFGERRLEHGEGEAEKFYRGLQQAGIRVRVGMEATGHARWFERLLEELHFELWIGDPLEIRATRVRKQKTDRHDAQLLLKLLLEDRFPRIWVASWENRDLRQLLWHRHRLVQMRTRIMNQLQAVALNEGVRQKKRLWGQAGRAQLESFVLAPWASRRRKELLELLDRLNPSIRELNAAVEQEATRRPEVRRLMTHPGVGSLTALAFVLIVGTPQRFACGKQIASYVGLVPTEESSGSRRRLGHISKQGNSLLRFLLVEAAQATVRSDPDWRRRFLHLAMRRERGIAKVAMARKLAVRLYWMWRKEWDYEQVKRFGSHAGQPGNPLGVK

SEQ ID NO: 326890 - protein, 427 aa, unidentified
MTYRIAAVDVHKRMLAVVVADVAAEGEYQFERRKFGATPGEMQVLAQWLVLHEVEEVVMESTAQYWKPVWGALEQYWKPARQQREGAGKMSGALHLCQASSNHGPGGRKNDFADGERMIKRLVAQELRLSFVPDPEQRLWRSVTRRKHQLTRARIGFRNQLESLLEQAHLKLSGFVSDLLGVSARRMLKALAEGETDPAALAALADHRLRATPEQLRDALGACRQMNAVHRRLIHLALQELQMIEEHIELLQREAMSLFQDHQDTVQRVAEVPGFGVDSALQMIAEVGPQAASFDSAKQLCSWVGVCPGDEESAGQQHSTRSPKGNRHMRRLLNQAAQSAAKVKGSIFEIVFHRLLPRMGYQKAIWAIAHRLCRLLWLILHKGVRYEERGPAVTARSKRTRTARMIRELRKLGYRIEGGPLPVGACT

SEQ ID NO: 326891 - protein, 340 aa, unidentified
MKSTIIGIDLAKNVFEVYLEDEGEQGIKRCRLSRKKMLPWFANRAPALVGMEACGGAHYWARELAKLGHEVRLIAPQYVKPWVQTNKSDQADARAICRAVQEPGMRFVGMASEAQQAVQALHRVRSRHMGNRTALVNQIRGILLEYGVAIPQGVASVRKALPLLLAEERWAPLIQQFLTDQQTELLYWDAKIEAVTAQIKRENATQPICHRLEQARGIGPLGASALWSKTAGQSYQNGRHFAATLGLVPKHTGTGGKVRLGGISKRGDRYLRQLLIHGARAVVRQVGEKPDRLSGWIRRLVARRGMNKAVVAFANKNARVAFALIHEDQPYDVTKMCGAA

SEQ ID NO: 326892 - protein, 384 aa, unidentified
MIKHNILFIGLDTHKTFTEVAYIEDQRGAKSTHLGKILSNKAAFKKLARQLQSKYPDATLHFVYEAGPCGYWIYRLLTSLHHCCYVIAPSLIPKKPGERIKTDKRDALKLAKLLKSEELTPIYVPEPEDEAVRDLSRSRETAMKDLKDAKYQLKALLLRNNINSKIKDNWSLQHLRWLAELVLPHPCQQIVLQEAVSTITERLKRLKRLDNELTHQVKAWRYYPVVKAVQAMRGVRLLVATGVIAELGDLTRFDHPRKLMSYLGLVPSEHSSGGKRHLGAITKCGNSRARRLLVEGAHSYKHNANISKEMQLRQEGLSKEIIDIAWQAQLRLCRRYNRLMHKGKHRNVVVTAIAREMIAYIWAISREVVLPVIDVKLRLARMPA

SEQ ID NO: 326893 - protein, 415 aa, unidentified
MKGTEDTRKIDRYIALDIHKEYVLAGGQNAKQEWVLPPRQISMAKFREWAIANFQEGDAVVIETTTNVWDIYDIVAPLVTRIVVAHAGAVRQIAEARVKTDKEDVKRLIRLLIADIVPEVWVPPLEVRELRGVISYRNRLVKMGTMVRNRLQSLLHRHNILLQKGKLLDASWWQEQKMSMLEKMQIQQELMMLEELNRHKREVDMELGRQCLREPWGKQAVRLLQLPGFGVVMTMIVLSAIGDIQRFESAKQLVGYAGLGAGVHDSGKEHIEKRITKSGRKELRWALVEAAWQAIRISPYWKEQYETYLRRMRRPNQAIVVIARKLLVAVWHVLTKEETDVHASEEDLAYKMLVLSWDLDESVRMGLTYKQFAKYALMKLGVETDITRFVRKNVPRRIAPREEVLVRMQELGLST

SEQ ID NO: 326894 - protein, 322 aa, unidentified
MSKKKSKSFIGIDVSKQQLEVAAHERDYQFRCPNKLSCFGQLIAELIALRPVLIVLEATGGLEIPVVNALHAVALPVVVVNPRQVRDFAKALGQLAKTDRLDARVLAHFAAAIKPPLRPIKSKEEQELDALTGRRRQLIAMLTDEKNRRGSATSDQVGDKIKEHIDWLADCIAELDQQLKALLQTSACWQAKDKILQSVPGVGPVTSFSLVADLPELGKLDRQKISKLVGVAPLNRDSGQQRGPRHIYGGRAQLRRVLYMAALTAARRNPIIKEFYERLRANHKPFKVAITACMRKLLSIINVMVRDSTAWNCPEVQFQLDT

SEQ ID NO: 326895 - protein, 406 aa, unidentified
MTLYIGIDWSEKKHDVVMMNEKGGVVIRLTIPHSVEGFGQFNLVRQKTGAPVEECVVGLETQHNLLVDFLWGQGYQRVYIMPPSTTESGRKRFKVSPAHDDQDDAELIAELLRVELHRFRPWHPGSELTQAIRSKVKYIQFLTRQVVRTTNRLRAVLLRYYPGVVGVFSSLDTQIALEFIRAYPTPQAAEGLKLDDFKAFGKQHHYTRPKHLAACYAQLQKSQPQASPAIVAAYQEEAASLAEMALGMVRTRIKILARLQELYLQHPDYAIFHSLPEAGEFLEPALLAMLGDDRARFPTANTLQVQAGTCPTTERSGKHTYASFRRACDRDFQHIAQQWARATLHSSVWANAYFKDVLVHSRSENHALRCLANRWLAILWRLWVEHKTYDENYHLERHAQRAKPKA

SEQ ID NO: 326896 - protein, 380 aa, unidentified
MRNVALDLAARKISYCEVADGRVVARRTVGSLRALEDLLGPTAAPARVAIEACREAWHVYRVLEQWGNQPLLVDTTRVRRIGVGEHGRKTDRIDAEKLARAVADGKIPVAHLLSPMRQRLRMELSVRRALVESRAQYIVTVRGLARAHGVRLPSCSADDFVSRIAAAKLDAELHERVRPLLNTLATLDHELAKMDRRLHELCADEPVIMLLMTVPYVGVIVASSFVSVIDEARRFPNAHKVGAYLGLVPAEKTTGDLRRLGAITKQGNSYLRSLLVETCWGILKLRNSDDPLHCWVKAVAKRRGNRIAVVALARRLAGVLWAMWRDGTAYEPDRVGYRSARGLGRQAQDIQLRAAAMARAADKARQRARRFERKLTEVRA

SEQ ID NO: 326897 - protein, 351 aa, unidentified
MLIGVDVHKDTHTAVGVSPFGEKMFELTVGNYQKDFDALTAKVEAAAREAKLSPYFGLEDCHGYGERLAMYLDAAGYPVMHVASTLVDRQRHVNTHPEKSDSLDAYGVAEVMLRKSDTLPRYTVTEASTIAKDIKDVATDRQNIVLERTRLKNQLHDILHRIWNTAYKEKFIDPFSQKALRHWSRAACKDASLFLMRSMKRKVRRLQALHIEIKELDHELVRLLKESGITIATASGCGTVVASTIIAEIGDISRFHSPAALAKYAGCAPREYGSGKKQRYRKTRSGNRRLNSAFHAMALTQISPTGNDKARAYFKKKMSEGKSKSQALVYLRRQLVNVIWCMMKYKTEYRP

SEQ ID NO: 326898 - protein, 464 aa, unidentified
MTKRIAAHNRAGRKENKPAAVFSVVEPNAAGIDIGATEIYVAVPADRDPQPVRSFPTFTADLGRVAEWLKACGIETVAMESTGVYWVPLFQILESRGMRVCLVNAQHVKNVPGRKTDVADCQWLQYLHSVGLLRASFRPPDEICAIRSLWRHRNDLLQMAAAHIQHMHKSLDQMNVQLQHVISDITGDTGMAIVDAILAGQRDPQQLAKFRDPRIKVSEDVIARSLVGDWRPEHLFTLRQAVQAWRHYERLIAECEEEVRQYLDRWQPPADLPPLPPSGKSRKARQKYEPAFDLRSRMYNAFGVDLTQIPGIGVLTAQVLFSEVGCDFSAFRSASAFASWLALCPDNRKSGGKILRSRTRKRKNRVAIALRMAAQGLLRSQSALGDFCRRMRAKLGSAEGITAAAHKLARIIYHVVTKREPYEESKLVKLTAQTRDLNRLKKAAARLGHQLIPLTREVHPEGVS

SEQ ID NO: 326899 - protein, 365 aa, unidentified
MDKAYYTTIGMDVSDRKTQICVMAKAGATPKVVMETTIPTTKDGLAKFLATQDKSSPVAFETGTHCRWMHEVAEGMGFKVYVANPCRLRMITESKTKNDVNDARMLARIALADPGLLHPVRLRSAEHQKMINLHEMRNLLVKQRTGIVVQLRSVAKSMGFRIPKCQAASFHNLDRKTWPKEFRDIAWPMLKNLEQLAVTIRTYDKQIRELAATPTFKAKVERLMEIRYVGLYVATGFVAVTGGDMDRFETPRDVGPWLGVTPKQDQSGDIDRQCRMTKAGSPFMRRLLVESAQLIMRDGSAPTDLKVKGLRICARGAKISKRKAISAVARSLAVLMVAMLKKPDVPYVPLSERCEKELLAIMATA

SEQ ID NO: 326900 - protein, 342 aa, unidentified
MKDTMIGVDLAKNVFQLHGASMTGEVKFRKKLTRPQFMAFMADHPAAVVVLEACGSASYWARELSKAGHEVKLIAPQYVKPFVKRQKNDAADAEAIVVAAQRPEMRFVPPKTEEQQARAVLFRARERLVHQRTELSNALRAVLYEYGHAVPQGAVHLKRIVEILEAETCDLPELAREEARDLLEQITEKTVRIEAKTRKIAAQAALTPTARRLQTMPGVGPMTALAVEAFAPAMATFKCGRDFAAWLGLVPRQMSSGGKERLGRISKAGQSDIRRLLIIGAMSRLNWMGARSIREGSWLDRLRARKPKMLVAIALANKMARMIWAMLTKQQDYKDPVPAGAA

SEQ ID NO: 326901 - protein, 476 aa, unidentified
MSKGSGTTRGDRRRNERRERLRRMLPRDGAVIGIDLAEDKQAIAVIDHDVRVLARKTVRVKTFRLGPALDWAVAQARAKGFAAVTVACEPTGPRWLQVQQLCAERGLPLVCIQPLVSHIAREQQDYTPHKTDEADCVLIARLATELHCYLPEQLDETWAHLRHLGRRRAQLITSATASVQRIRDFLSVAWPTVTEACAQPLESVTWLAAVQVVTSRCGGQPGRLAGMGPQAFTALVRGTVPGWGGRRVWGRICDRIFAALTDTEGVVVSCRRGLLRRCADELGDLQRTRAQLRAVEADMVAVLAELGLSRLADIPGLTAVGAAAILAETGDPRRYDSSSSLVKHAGLSPSDNASGAFYGEARISRRGRPGLRLTAWRAVWPLLIHNPVMAAKYQAMTQAADTAAQAAAAQADMGSRQVSPAAAAARARRAKARVACAASLLRWIYSMVVHDTSWDPAVAAGAAASQHALRDQPEAA

SEQ ID NO: 326902 - protein, 349 aa, unidentified
MALYCGIDLHSSNNYVAILNGRFERVAEQRLPNDLETVLRMLGAYRSELEGIAIESTFNWYWLVDGLMAAGYEVHLTNTSAVKQYEGLKYSDDRHDARWLARLLALGILPEGYIYPREERPLRDLLRRRAFLVSKRTAMLLSTRGTFESWTGMRTKCADVKKWTEEDLEHLLEDPTMRLGVSCLLEPIKAIGVQVKVIEKAVLPHARLREEFRRLETVWGIGKVLALTIMYEVGDIARFAKVGNFASYCRLVKSDRLSDGKRKGSGNTKNGNPYLSWAFTEAAHAAKRHRQPARRFHHRKHAQRNGIVAIRSLAHKLARASYYVMRDKVDFDPEKAFGPVGRSGEDTPG

SEQ ID NO: 326903 - protein, 356 aa, unidentified
MSRDIKYIGMDVHKEAVVIAVLSGTGKQVMESIVETQANSILQFIHGLQGELHVTWEEGTWAAWLYDLLQPHLQQVLVCDARGNALLKEGNKSDKIDARKLADLLRTGMLRPVYPGEHGLRTLRELGRSYQTISQDLNRVMNGIKALYRGWSIPCPGTQVYAPRYREEWLQKIEHASVRRRAELLYPQWDGLQTLRRTLRAELLAESRKHKASKLLRQIPCIGPIRAARLIARMQTPHRFRSQRQLWTYSGLGMETHDSAQYCYVQGQLQRTKKPQQIRGLHRNHNHEMKEIFKGAATRARCGVGPLRDFYVALLAKGMKPEMARLTLARKIAAIALTLWKKEKRFDALPLKPQAT

SEQ ID NO: 326904 - protein, 370 aa, unidentified
MENRSMFVGLDVHKETIDISIAEGERHGEVRHYGVIASDLEPLDKVVRALRAPDRRLHFVYEAGPCGFGIYRHLTARGEACIVVSPSMIPKRSGDRVKTDRRDSQMLARLHRAGELRAIYVPDATDEAMRDLVRAREDAVVVGTQAKYRLKAFLLRQGRRYTGRDGWTLPYRRWLSDLSFHSAAQHIALQEYRDAIAETEQRIDRLTEQLRQLAPTWRWAPVVAALQALRGVSFITAVALVAELGDLTRFRHPRELMAYLGLVPSEYSSGPQVRRGAITKAGNPHVRRLLAESAWAYHGIPRIGRRHADRQEALPKVVCDIAWKAQLRLTARFRRLVARGKAKPKVATAIARELSGFVWAIAREVPPTSL

SEQ ID NO: 326905 - protein, 480 aa, unidentified
MNVKARRTKKQVNVENQAINLLSKEELNKKIEVVEKELRSYTWRELETNGKFAKNDKLSFITDDMLIVGCDIGSETHYIRAIDVRGRELSSGAFEFSNTSEGFANARAWVLALAAKNDKKQIVLGLEPTGHYWFALAAWMISNGISVVQVNPYAVKQSKEIEDNSQLKDDRKDPKLIANLVKDGNYGMPYLPEKVYADMRRLSMFRDQLTEDRIRNINRLHRELKIYFPEYMDAFGKIDGAFTLEVLKVSAIPTDITVLGAEGMKNIWHNAKLRGRGYSRANEIVSYAEKSVGLTDGTDAGREAVKWYAEQILRLDEQLSEIESALHEKCREIPYAENILAINGVGENILAGILAEMGDISRFDDVKEIQKLSGMGLVACSSGKHKGQTKISHRGRKRLRYWLFQAAKSAVSHADEFKQLHEYYTTRSNNPLKKMQSLVVIACKILRVIYTILKTGTTYDPQKLLKDIKHPAASQAPMAA

SEQ ID NO: 326906 - protein, 391 aa, unidentified
MIYVGIDVAKDKHDCFITNSDGEVLFKAFTITNNLDGFNDLHQKITSVMDDVTNVKVGLEATGHYSYNLLGYLIDKGLPTYVINPLHTNLYRKSLSLRQTKTDKVDARTIASMLMSDVNLKSYSDISYHNEELKSLTRYRFDKVKERAKLKTSVSRLVCILFPELEKLVPTLHITSVYALLSEFPGAKHIATAHLTRLTNLLSEASKGRYGKDTAITFRDAARASIGSNMPAKSLELKHTIKLIQELDSEIDEIENEIKIIMDEINSPILSIPGINYRMGAMIIAEIGDFNRFDSPDKILAYAGFSPSTYQSGQLDGAYAHMEKRGSRYLRYALYNATKYVCHWDPTFAAYLAKKRAEGKHYNVAISHAVKKLVRVIYHLEKTKQQYIKAA

SEQ ID NO: 326907 - protein, 458 aa, unidentified
MSTPKRSGRLRKTTATTMARVIEPNAAGIDVGATEIFVAVPPDRDPVAVRCFSTFTCELLRAADWLRVCGITSVAMESTGVFWIPLFQILEDRGIRVCLVNARHVKHVPGRKSDVADCQWLQYLHSVGLLRASHRPPQSICAVRSVWRHRESLVQMAAVHVQHMQKALDQMNIQLHHVISDLTGTTGMAIVDAILAGEQDPIRLAQLRNPKIEASEATIAKAMAGDYRPEHLFTLQQSVQAYRQYQKWINDCDKEIEVQLHHLQTRIEPDQKPLSPRKDRHKPRRNEPRFDLRTHLYRVFGVDLTDVPGVSVITAHTLLTEVGTHVNNFPSAGDFASWLGLCPDNRISGGQILSTGTRHVSNRLAIALRMAAQSLYRSHSYLGQYFRRMRTRLGAPAAITAAAHKLARILYHLISTRQPYDETVFASVEERARERKLRHLKKEAAVFGFQLTPVGCVP

SEQ ID NO: 326908 - protein, 412 aa, unidentified
MRRVIGIDIHRTFGEVVIWENGELRHAGRVDMTRSALEGLGNRLAATDEVVIEATGNSMAVSRVLSRFVARVIIANPLQVKAIAHAHVKTDKVDAGTLASLRAAGYLPEIWTPDVATERKRRLVARRYQVVRHRTRLKNEVHAILHAHLMPKCPHADLFNARGRAWLARQALPDDEGAAVERHVRELDRLAEDLDLLDREIAQSALDDLAIKRLITITGVNLTVAAGIMAAIGDIGRFKSPGKLVSYFGLNPRVRQSGLGAAHHGRISKVGRSHARAMLVEAAWAAAKAPGPLHAFFVRIRAKRGHQIAAVAVARKLTVLCWHLLTKDEDYLWARPALIANKTRAMELQAGKPQRKGNQRGSAYAYNVKALRGQEMQIAEQAERNYTRFVARWKARPSKAKVRERLNPARQE

SEQ ID NO: 326909 - protein, 349 aa, unidentified
MKVLKQVLGIDVAQKELVVTLGRMFEDLSIDLYAYKVFRNNEKGFLLLLKWVKKLTKDKSKILYVMEATGVYHQKFAYFLDENDQEVCVILPNKISNYMRTLDNKTVTDKTCSEAIAQFGLERKLDLWHRPKKIYKNLQQLTRERDQIVFERAMVKNHLHAEQAEAEPNESSILRISARIKFLSGQEKEIKKEIVNWVNKDADLKKEVENICTIPGIGELTAVIILAETNGFELIRSKRQLTSYAGLDVKEKQSGTSIKGKPRISKSGNRHLRKAMHLPALTAVRWDDSFRDMYARIVSKHGIKMKALVAVQRKLLEMVYTIFKNKCPYDKEYETKRIEQKNSVHTKTA

SEQ ID NO: 326910 - protein, 351 aa, unidentified
MKSQTTAVPKLFIGMDVHKKSWTVHFKTDLFDNKTVTMPADPLALINYAGKNFPDHEASCCYEAGCCGYWIARALKEKGWKVSVVNPADVPRNNKQDWQKTDKIDSRNLCKHLWDGNLKGIFIPGEEQEQLRSLFRRRIHLSRHLRSIKNHIKSQLLYYGIQLPEQYDNPNWSREMKTWIGNIKWKYSSAAESMSSRLKQLEFIWYEELHISNVLRAYCRKHFKKDYYLYKSVPGIGGITATGILSELGDIRRFNRLDELAAIVGLVPGIYQSSENKINLGLTKRSNHQLRSLLVEASWVAVRTDMVLQQYYRKHAHKEPNKAIIKVAHKLLSRIRAVIISGVPYQTGIIK

SEQ ID NO: 326911 - protein, 406 aa, unidentified
MYIGWDWASEAHDVTVLGNDGRIVDRWALTHDEAGLAETLRRLATHGHPGELAVAIEATASLAIDRLLAAGHPVVPIHPNAFHVTRPRWGASKAKSDPGDSYKLADDLRTDGHRLRRLQPLDAATAELRALVRLRGDHVEAKVAATNQLRALLERHWPGAVTIFGRLDSAIALDFLEDYPTPASGARLGEARLAMFCRRHSYCGRRSPAELLERLREAPAATEVLSPEVVAECVRAQVRLLRSLLTTLADLDRAVGAALLGHPKASLLAPLPRIGEINLGQIVAEVGPILTRALDVEHACAEVGASPVTKASGKSNAVNFRWAVNTKARQALATFADNSRHSSPWAAQLYAEARARGKRHPHAIRILMRAWARVMWACWHSDTAYDPAMHGAERGLAQPRDNESAA

SEQ ID NO: 326912 - protein, 467 aa, unidentified
MSTVRPHSQRRPTKRRNPSLPEVLDRVNLHAAGIDVSAGMHHVAVPAGSSPSGEDVREFGAFTEDLVAVAEWLRRCSVETVAMESTGVYWIPLFEVLESAGFEVLLVDPRQMKSVPGRKSDVLDCQWIQTLHTYGLLRGAFRPPEQVCMLRAYVRQRAMLVTYASHHIQHMQKALEQMNVKLNRVITEITGVTGMAIIRDILAGERDPLKLAAHRDRRCSSDEATIAKSLEGTWREEHLFALRQAVELYDAYQGEILACDRAIEELLASWEPRQPQHDVPTTPGGKRRRNQTHFDVRTALHRVSGVDLTRIEGIDASTALKIISEIGTDVSRFPSVKHFTSWTSLCPGTRITGGKRRSGRTRPSANRVAVALRIAARSLWNSKSAMGAFMRRKAAHKGMPKAITATAHRLARMVYFMLKYGTDYVMRSQEDYENAYRERLLKNLTRRAKDLGFSLVPQIAPPQSVPA

SEQ ID NO: 326913 - protein, 429 aa, unidentified
MIMGFTKPIEHFNLQRKKVITMNTLYVGIDVSSKSNVVYLMLPNGDKHSNFSVANSHEGSTQLVKRILSVLTSHSLDTVLIGLEATSVYGDNLVYFLREDATLAPFNRKIHVLNPKQVKKFHDAYNDLPKNDYVDSFVIADCLRFGRINKEVYMGDYRYKALQNLTRARFFAVQNLVKEKQRFMNVLFKKYSTMTQEKVFSDTFSTTALAVYDEFESAEALANMDLHELTDFIMEKGKNRFPDPDAVAKAIQKAARSSYRLPKTMNDSVNQVLSISITSMKALESQIKEFDKAIKAQMELLPNVLISIPGIGPVYSAGIMAEIGEIDRFNSQAALAKYAGLAWKQHQSGGFEAEVTRLIPSGNRFLKYYLCEAAFSLVRCDKEYSDFYHLKYKEVNRCQHKRALALTARKFVRLVFRLLKDNRLYCPAK

SEQ ID NO: 326914 - protein, 408 aa, unidentified
MRVIGMDIHRTFAEAVMIDGDRLIRLGRVKMSRDHLAAFAAKLRSEDHLVIEATGNAHAVVEAVAPFVGRVIIANPRQVHLIAKARIKTDVIDATVLARLYASGFLPEVWVPDQSTLRLRRQVTRRNQIVRQRVRLKTMIQAILHAHLVPQCPHADILGPKGRAWLLTQLLPDDESAAIERHIREYDRLTDDLRVVERELARDALGSAETKRLMTIPGIDMVVAVGLLAAIGPIERFTSPGRLVAFLGLNPSVHQSGNNPARHGRITKQGPCHARTMLVEAAWQAVRGPGPLRAFYERVRGRRGTHVAAVAVARKIAVIVWHLLTRGEDYAWVRPALHARKLRDLELRSGFPARRGQRGAGYAYNLARSRREERQRGERAEAAYKRFTQGWTKRGRRVSADASKEERL

SEQ ID NO: 326915 - protein, 480 aa, unidentified
MQVATASARTHLLSIPPPCSHPYSEAPRKHYKLQQLLARRHFIQNRFIVGIDPAKARHQAQILSADGLPVGSSFSFAHSFSGFNHHLWKHLYARLPDLAHLKRHRFNECLAFAIETSCNLWANLTDYLHREHACIVLVSPLSTCHARPSKSGDFSRTDAKDAYLIADLARDARFHFHTCYTADQQAMHCLAITYDKFRKSLQQHYARLRASIERLFPELLGVLKLRSRTARHLLGSYLFPEDFLALDVEREAAMLMQISRAQHGRETLLKLQVRARHTIGVSLSQAEQHAERRSVSAWLRLVEALEAEIRETTVHLIRLSKETPYHAQLVSIKGISDLLAALFLAEVRDPSQITHTGQVERLAGLKLYMHDSGTYSGRRRISHRGNARLRWVLYRMASETAKYVPEVRLKYLRRKLNGHTNRNKNLVAVIPKVLALILALVREDRPYEEREATLLEMHRLEAELERKHPSKRHRPARAAA

SEQ ID NO: 326916 - protein, 435 aa, unidentified
MTTLRFIGLDVHAETIVIAVADGGSAPAVILKVIGYNEGRLLAELRKLGTLDSLRVCYEAGPTGFGLERFLRSHGVDCVVVAPSLTPQSSGSRVKTDRRDARKLAHFLRSGDLTPIWVPDEQTESLRDLERAREDARLSERRARQQLLKFLLRHGRRFTEGKSHWTQKHWRWILQQRFEHEAQNRVLGDYVLTAQQATQRVARLTQDIQELVEGWALMPVVKNLQAFRGVELVTAVGLTAEIGDFTRFRSAGQFMAFVGLVPSENSSGGTRRQGGITKTGNSHVRRLLTEAAWHYYGWTAGISRTLEARRVGVPAEIVTIADKALRRLHKKAYLMKERGKSPKKIAIALARELAGFLWAAAVETASPGSSTRTQPAVTPHECSPPSRRLTTRAAKAEARSGTQSTTGDPGTLKERPKRRAIPRRPRGEAAGATRL

SEQ ID NO: 326917 - protein, 408 aa, unidentified
MDLTPMHKRVIALDVHQAKITACAIVEHEDGRVEVTKRDFGAFKRDRRALAQWSLEIRPEVVVMESTGVYWKSPFAALEAVGIIAWVVNARHVKAVPGRKTDMADAQWLATLARAGLLRASFIPPLLMRQLRLVARQRQKLVGMCSAEKNRLYKVLVDAGIRLNVVVADIHGASARAMVKALIAGRPMHEVLDRKGRLRASRDDLFEALSTEQFSDVHRFVAEEILQHIEQIEQRVARLDQYLLDGLKAYEPQLRLLQTIPGIDLQGAAMLLVEIGADMANFGSAERLASWVGICPGNNESAGKRKSGRIRRGNAWVRRLLCEFAQAAARTRCALKAKFESLAIRKGHKKSIVALAHKMLRTIYAMLSTGTHYQDKTVDYEALSVARNAPRWIKMLRKHGFIATPTAA

SEQ ID NO: 326918 - protein, 408 aa, unidentified
MEILYPRCAGLDVHKDSVVARVRCMSEPAVDETRSFATTTAALVGLQEWLSTHAVTHVAMEATGVYWKPVWHLLEEHFELVLANAQHIKNVPGRKTDVNDAAWIADLLAHGLIRSSFVPPAPIQELRDLTRTRKQLVREISQHTLRIQKTLEDANLKLSSVLSSVIGASGRAILSALIAGESDPQRLADLAQGTARHKRAALIEALHGRITSHHRRLLKLHLQLIGALETALAELDRDVGKLLAPIRECARLLTTMPGVSELTAQVVLAEIGADMARFPTPAHLLSWATMCPRNDESAGKRRSTRTRKGSPWLKTALVTAAWAAVRVKNSYLQAQFLRLRTRRGAKKAILAVAASMLTAIWHMLKNGVEYRDLGADHFSRRDRTKAILRLVRRLNDLGCDVQLTPQAA

SEQ ID NO: 326919 - protein, 320 aa, unidentified
MDQDHNRLFGKRLPNKLDKILTVLEPFKDDLQGVVVESTYNWYWLVDGLREHGHRVHLANASAIQQYEGIKHTDDKWDSFWLAHMKQLNILPEGYIYPKEQRAVRDLLRRRLFFVRHRTANILSLQSTITRNLGIKMSSNAIKKLDMDDACDLFDSSNLVFMAQNNISTIKHLAKIIKGIEKQVKSQVELRKDFAMLTTIPGIGLILGLTIMLEVGDIGRFFKVGNYTSYCRCVDSKRVSNGKKKGENNKKNGNKYLAWAYVEAAHFAKRHIAKAQRFYQHKMAKSNGAVATKALANKLARASYFIMRDQVPFDEDMLFR

SEQ ID NO: 326920 - protein, 264 aa, unidentified
MKYTPVGVDIAKHVIQVHFINENTGEVVDKQIRRQDFLTFFSNREPCLIGMEACGGSQHWARELKKPGHEVRLLQARFVKAFVMANKNDVMDARAIWMAVQQPGKEIAVKTEEQQSVLVLHRTRRQLVKFRTMRINSLHGTFLEFGETLHKGRAAMVREFPEALERLKERLPPYVISALENQFNRLNELDLQIDDIEKQLTSVAKQNETCKRLLDIPGVGPLIATAAVAIMGETSAFKSGRGFAAYVGLVPRQAGSGGKIRLPG

SEQ ID NO: 326921 - protein, 429 aa, unidentified
MDDVDDADLVVERVAALDLGKAGLEACVRVPNPQRPGRRMQELRGYATTTAQLLALVGWLRHWHVQRVVMESTSTYWKGVYYLLEAEGFDAWLVNAREVKNVPGRAKTDRADAVWLAKVAERGMCRPSLVQPPEIRRLRDLTRYRRALVQDRTREQQRVEKLLEDAQIKISAVLSNLHGVTGRAMMDALIAGERDPRTLAGLAKASARKKTDRLEEALRGFFTEHHATILQMMLDNSDRISAQIAALDARIEEAIGPFSRPAARLADIPGVSTVAAAELIAEIGVDMTRFPSAAHLASWAKFCPQIHQSAGKSTSKGRAKGNPWLAGTLGRIAFVNSRTDTFLGARYRRLARRRGKQKALVATGNSVLTVIYHLLSDPDARFCDLGPGYYESRINKHRRARDLATQLQALTGQHIAIRDGKAVITDTAA

SEQ ID NO: 326922 - protein, 338 aa, unidentified
MEWTVAVGVDTHKEVHVAVALDALGGQLGSREIATTTAGYRSLLSWAQQLGVPAFAVEGTGSYGAGLCRFLEAAGVDVFECERPRRQERRRGKSDLIDAALAARRLLSGEPLGLPRGAGRREDLCLLLLERRGAMQARNAALNQLHALLVTAPDQLRARLGALSGDRLAAAAARLRPSTEVTNGVLRRLGRRVERLSREIEEAERALADLVAELAPTLLEECGVGPVCGAQQLVSSGDPSRMRSEASFAALAGTSPVDASSGKQRRHRLNRGGDRQLNWALHVVALARIRHHAETGAYYQRLLAAGKTSKEARRCVKRALARRFYQHLRELPTLPLTT

SEQ ID NO: 326923 - protein, 409 aa, unidentified
MNLYLGIDVGKNKLDFCALDSDQRCCFQGETTNDLNGAIKIKQTVLTETQTHHYEKITAGMEATSVYNFHPMTFLAEDSELQALGLSVITINPYTSHHFSQLFNDGKTDAIDAKQLADLLRVEPLGTPVARQENYVALQRLTRERYHLVKQMTDSKNHFLNNLYYRCNTLERELPTSVFGSAMMTLITDEELTLDEAAALPLDELVTHLQQLAHGKFGDAEAVAKAIKKATRSSYRLSKVVTDSVDEILAVYANEIRMLKKQIQVLDKTITQISTQNTDINCLTSVPGIGPVYAAGIVAEIGQIERFPDESHIAKYAGLAWLPHESGTSVRQATPRTRKGNQYLRYYLVEAANSIRRYDITYQRYYHKKYEEVPKYRHRRAIVLTARKLVRLVEVLLRNHQFYIPPKVV

SEQ ID NO: 326924 - protein, 455 aa, unidentified
MRKVKTKKTKAKNVMQMAIVNPYAAGIDISDTEHVVAVPEGVATERVRNFGAMTSDLLSIVGWLNECEIDTVAMESTGVYWKPLFSLLVQNGFEVYLVNAEHVKNVTGRKTDESDAMWIQRLHSCGLLKSSYLPDDEQEALRTLVRYRRALVQDMSRFVNRMQKSLELMNIKFHTVINDITGKTGKAVVEAMISGERNAENFLHFVGKRIKADKGTIIKSLEGNWRDEHLFTLKESYEMYKTYRQRIENCDREIEKKLQQYEAKQNEGVIEMKNTDKKLRIKKGKDKNHPRFDVRGYLERIHGVDVLNVYGLSETGGLELLAETGTDLSKWKNENHFVSWLNLCPNNKISGGKLISSKLQKKKPNPASLAFRQAANAVHRSNHWLGDYFRRMKAKGGHKYAIIATANKIAKIYYKMVRYKQDFKPMELELYQQKYKQAKIAFLERKLLQLKREVA

SEQ ID NO: 326925 - protein, 387 aa, unidentified
MPAATSVSERPAAIRVDLGAIFVSMELSRSKWLITSLSPGGGEKMSKHVVAGGDLAGLLDLFAALQAKAQARTGHSYRTIVLQEAGLDGFWIHRALEKEGIESHVVDPASITTSRRKKRAKTDRIDGEALVRTLLAYKRGEPRVCSMVRPPSPEEEDRRRLVRERKALITERVRHSNRIKGLLFAQGISKYEPLRRDRRARLAALRTGDGRELPAHLKAQISRELDRLELLLEQLKAVEAERDALLAQEQVHANAPAGMLLKLKGIGPEFAAILWSEGLFRHYDNRRQLAAYAGLAPTPWQSGQIDREQGVSKAGNPRLRVALIQLSWLWLQHQSQSALARWFEARVARNGGRLRKSTIVALARKLLVALWKYVNAGVAIEGAVLAS

SEQ ID NO: 326926 - protein, 410 aa, unidentified
MEVLHQCCAGLDVHKKTVVASVRLAAENKLVTEVKTFATTTAGLLALSDWLSENGCTHAAMEATGVYWKPVWHVLSDGDIELVLANAAHVKNVPGRKTDVSDAAWLAELLAHGLIRASFVPDGQTQELRSLLRTRKQLVRELSRHTQRIHKTLEEANIKLTSELSDVLCKSGRAMLNAMVAGETDPVRLAALAHGTVKSSQARLQEALRGRVTRHHRFLLQLHLRQIDSLDASIATIDREVEANLAPFRIAVELISSIPGVSTLSAEVIISEIGLDMSRFPTVGHLLSWAGLCPRNDESAGKRRSTRLRKGAPWLKTMLVQCAWAAKRKKASYLQAQFLRLRSRRGPQKAICAVAASILTAVYHMLKDGTVYHDLGPDHFNRHSKITQSQRLVRRLEHLGYAVDIKPLAA

SEQ ID NO: 326927 - protein, 316 aa, unidentified
MSVETWFVGIDVAKDRLDVAVHPTDERWTGSNDPAGIEALSEQLVRLAPQLVVLEATGGFEVPLVGALGAPGLPVVVVNPRHVRDFAKALGRLAKTDRIDATVLAECAARVRPVVRPLPDEEARELHAWLARRRQWVEMMTADENRRQQAAAPIRRQIEGHLRWRRCQLAALERELTTRVRRSPVWRESETLRRSTPAVGPVLARTLLADVPDLGRLNRQQIAALVGVAPFNRDSGPRQGHRSLWGGRAPVRGVLDLAALVATQHNPVIRAFSQRRVAAGKPWKVVLTACMRKLLTILNARMKHRTAWKPVPALGA

SEQ ID NO: 326928 - protein, 335 aa, unidentified
MVEGTEGSHHKEGSTKMAKRITICAGIDTGKSKLDVALDGSGEQLQVENTSEGHGMLLDWLRQHRVKRIGIEASGGYEQAVVAELRRKRFVVVVFQPAQVRAYARFQLQRAKNDKIDAALIAACTVAVRKIHAAPDSRLLPFAERLTMIDQTSEDIARLKNRLESCRNAHIRELWKQEIVRLAKREKAELEALAAAIRQHHDLADRLHLICSIDGIGLKTAVAILVRMPELGQITREQAAALAGLAPYDDDSGEQVGTRHIEGGRERLRRALYAAALPASFRWNQHLIALYQRLKAKGKEHKRILIACARKLLVYANTVVARGTPWQDRPFLGST

SEQ ID NO: 326929 - protein, 347 aa, unidentified
MKEVTTIGLDLAKKVFQVHGVDHAGAVVVRRALRRSQVLAWFAKLPPCLVGMEACATAHYWGRELRRLGHEVRLIPPAYAKAYVRRNKNDAADAAAICEAVSRPTMRFVTIKTEQQQAVAGIHRVRDLLIKQRTMLRNQLRGLLAEFGVVAAQGRRGLNELLAILSDPEEQRIPSPLREGLMAIMETWRGIERKLEEIDRQMVAAGRADATCRHLITAPGYGPILSSAMAALVIDPGAFTRGCEFAASLGPCSSQGQALVPRQDGTGGKVRLGPISKRGNGYLRRLLVNGATSLIKCQRARQDPWVAKLLASKPRKVVAVALANKLARIGWALMTRQEDFRSRLAAA

SEQ ID NO: 326930 - protein, 349 aa, unidentified
MKIIGCDFHPGYQQIVMWDKATGEMLERALSHERKEEVRAFYAGLQGPVRVGIEASGQSQWFEQLLAELGHEVWIGDAAKIRASCERKQKTDRRDAELLVKLLDEERFPRIWVPTPAERDARQLLLHRHKLVRMRTQLKNQLQALALNQGVQRKRKLWSAAGRKPLEALPLLPWASRRRAELLVLLDQLEASIGELDGAAAEQANTRPAVRRLMTHPGVGPITALAFVLTMGPAQRFRRGKQVASYLGLIPTEHSSGGRGQRLGHISKQGNPFLRGLLVEAAQSAVRHEPEMRRAYQRLAQRKCRALAKVAMARKLAVRLYWMLRTEVDYAQLIQGSHAGQLESFRGRV

SEQ ID NO: 326931 - protein, 414 aa, unidentified
MEDILERCCGLDIHKESIVACLLKGPLGEVLKPESEIKEFGTQLSDLIALRKWLALHECRHVAMESTGIYWQPVYAILETALSDEMRLLVVNARHMKNVPGKKTDMRDAEWIATLLRAGLLKGSFVPERDIRDLRQFTRYRKALIRDITSQKNRIEKLLQSNGFRLSSFLSDIFGSSGLAIMHQLVQVGFISSQSLDRCLKARARQKAGEILSSLNGTLSVPQRKLLKMQLAHLADLQANLREVEEEIRNGFSQFQGPIDLLDSIPGIDQTAAYAILAEIGKEMSAFPTAQHICSWAGLAPGSHKSANKQKKQRITPGNNYLKTMLCEVAWVIASHKKMYLSGWYWRLKQHTDSKRAIVALARKLLVIIYTMLKTNQPYNEQKFLERKNASEQKRVKRMVNELTRLGYAVSLAA

SEQ ID NO: 326932 - protein, 345 aa, unidentified
MEQQRQYVGIDLHRRRSVIVRRSAAGETLKVTKVDNDDLLAFERAVMAAGEHPEVVLEACYGWYWATDLLEELGCKVHLAHPLGNSWGNRRVKNDTRDAEDLADLLRLGRLAEAWIAPPKVRELRELVRYRAKLVCLRTNCKLQVYAVLAKEGVNVPMTDLFGVLGSELLETCQLATAYRTRVESLRDLIEVFDHEIAKLEGDVRHELRGHAGYQAIQQIPGVGPLFASVFVAEIGDVTRFRSPAQLASWAGLTPKHHESDLMVRRGPITKQGSRLVRWAAVEAAQRQANRTKLRADFARIAAHHGDSAGARKIARVAVARKIVTLVYYGLRDGTIRSKAISEAA

SEQ ID NO: 326933 - protein, 456 aa, unidentified
MARKTRSRKPRGMPTVNPHAAAIDIGATMHMAAVGPERDADPVRAFGTFTGDLHRLADWFAKCGVTMVAMESTGVYWIPAYELLEQRGFEVVLVNARDAKHVPGRKTDVSDAQWLQRLHEYDLLRGSFRPTGDIATLRAYLRQRERLLDFAATHIQHMQKALTQMNLQLHHVVSDITGVTGMKIIRALVAGERDPGVLASHRDRRCRASPETIEKALVGNDREEHIFALAQALELYDVCQEKVAACDACIQEALKRLKAKAAKPVGKLPPPRNSTKQPNAFAFDVRAALHAILGVDLTQIHGLGSYLALKLVGECGTDLSAWPSAKHFTSWLCLAPSNKISGGKVLSSKTRRSGSRAAALLRLAAVAVGKTETALGAFQRRLSARIGKAKAITATARKIAVLFYNALRHGMDYADPGASYYEERYRHRVLTNLQRRAKAFGYALHEINGEPEAAVS

SEQ ID NO: 326934 - protein, 382 aa, unidentified
METMTRAGERSAPPIHLLLAFELGERWWKLGFAVGVGQRPRIRRIAAGAVELLSEEIARAKTRLRVPAGAPVISCYEAGRDGFWLHRYLVARGLANHVVDSSSIEVNRRARRAKTDRLDLAGLLSLLARYSQGDHRVWRVVRVPTVVEEDARQLHRTWETLQQDRTRLMNRLKGLLATVGVRLPVDGRFLERLATTRLWDGAPIPDGIRQRLTRVWAQLELVERHLEDVRATRAALQPDPATPTGRFVRQLQTVRAVGPMSAWVLTTEIFGWREIRNGRQLGALVGLAPAPYHSGETQRDQGITRAGNAHVRRAVVQLAWGWVRYQPTSALTQWYQRRFGGGSRRARKIGIVALARKLLVALWRYVETGVVPVGAQLKGTAG

SEQ ID NO: 326935 - protein, 348 aa, unidentified
MIIIGVDFHPEFQQIAWVDTDSGEFQEKRLVHPEEAENFYRALAGKKVRVGMEASGHARWFERLLSELQFEQWIGDAAVIHSKRVRKQKTDRQDAQLILQLLLEDRFPQIWVPSWENRDVRQLLWHRHRMVQARTRIMNQLQAVALNEGLRCKKRLWRERGRQQLESFRLAPWASRRRQDLLELLDRLNPTIAELTQAIEQEAEKCPAAQQLRTHPGVGALTALAFVLIIGEADRFHCGKQVASYLGLVPLEDSSGKRRRLGHITKQGSSILRFLLVEAAQVTVRRLPEWRSKYFHLALRRGRKIAKVAMARRLAIALYWMWRKRWDYEQVKKFGSHAGQPENRHGVK

SEQ ID NO: 326936 - protein, 344 aa, unidentified
MTIIRIGLDTSKHVFQIHGVDENEKPVLRRQLRRSEVEKFFAQLPPTRIGIEACGASHHWARLLRGLGHAVLLMPPQYIKGYVKRGKNDAIDAEAICEAMSRPTMRFVPVKTAEQQAALTMLGVRDLLVKQRTMLINALRGHAAEFGVAAAKGPHKIVELLQRLATGEGVPALAREMLGMLASQLEAVNGKLKAIEARLMAWHRQDQTSQCLATIPGVGPIAGVSFALKIPDARAFRSARHFAAWIGITPRENSTAGKHRPGKISHEGDESLRRLLVLGATAVIQRAKRGSRLAVALGIAGAQAKKARSGRAGQQNGPRHLGHDDQRRGIPASTGGLSPPATDS

SEQ ID NO: 326937 - protein, 343 aa, unidentified
MNANMIGLDIAKSVFQVHGEDAAGQLVLQKRLRRSQVVDFFAKLAPARIGIEACGGAHYWGRQLRALGHDVRLIPAAYVKPFVRRNKTDARDAAAICTALRQPDMRFVAIKSEAQQAARGLERSRDLLVRQHTQLMNSVRSQLAEFGIIAAQGRRGFAELAQAVASGEAGVPAVLIEPLRLLVQHIEQLGAAVALLEQRIVRAVRAHPAMRRLTTIPGVGPLTAHAIVTAIGEGKQFASARDFAAWCGLTGRVDQSADRQRRRGISRQGDSGVRKLLVLGASTLMRHLRTSPERATPWQHGILARRPVKVAVVAQAAKNARIAWAMLQSGETCRRPHTTAATA

SEQ ID NO: 326938 - protein, 357 aa, unidentified
MNIAQTISFANAHFFVGIDAHLKNWKVTIRLDSIELKTFSMNPAPLELIAYLRKHYPDGTYHIVYEAGFCGFWALRIFRQNNVDCIVCNPADVPTTNKEKVNKSDPIDSRKLSRELENKSLRSIYIPDTFHEELRALMRLRYRIIQSQTRIKNRIKGLLYAQGIQIPIQFSGRARWSHNFILWLKQLHLNTDAGNFTLQNLIIQLKEIREHNKNIIKQLRKEARHPDIAPIMKVLQGVPGVAFVTAMYLYTEIMDMKRFSNDEHLVSFVGLVPSTQTSDDTVYSNGISFRQNSFLRSMMIETAWTAVREDPAITLKFNELTKRMNSQNAIIRIAKKLLKRIRHVWLKQEEYVYALVA

SEQ ID NO: 326939 - protein, 411 aa, unidentified
MPKRTTGDRPELKPINVGAAAIDIGSRMHMAAVKPACTDVPVRAFGTFTQDLHDLADWFKACGVTSVAMESTGVYWIPAYEVLEQRGFEVILVNARYAKNVPGRKTDVSDAAWLRQLHSYGLLRGSFRPDAEIATLRAYLRQRERLVEYAAAHIQHMQKALMEMNLQLHHVVTDITGATGIRIIRAIVAGERNPDVLATYRDVRCHSSIETIRAALVGNDRHEHVFALTQSLELYDVYQAKMLACDRKLEVLISALNNKGARPVGKLSKPRIKTKQVNTPTFDVRTALYGVLGVDLTEIHGLGPSLALKLIGECGTDLRAWPSAKHFTSWLCLAPGNKISGGKVLSSRTRRSSSRAAALLRLAATTVGRSDTALGAFYRRLSSRAGKSKAVTATARKIAVLFYNTLRHGMS

SEQ ID NO: 326940 - protein, 313 aa, unidentified
MQQLKYVGIDVSKHHLDVAFPGVAKVWRTPNDASGIAALVRRVRRLGSPHVVCEATGGYTRLLTCDLATETVPLSRVNPRQVRDFARATGRLAKTDEIDAAAILRFADAMQPLASPAPSPEQVRLTDLVRRRRQIVDAAAQEKQREPIPGQPLVTGSVERHLAFLAKEIAAIDEAIADAIEADATLARRAALLRTIPGVGAVTAATLVAELPELGLTGNKQIAALTGVAPMNRDSGMSRGQAHIAGGRMSARCCLYMATIVAIRCNSAIRPFYKRLREQGKPPKVAIVAAMRKLITVANSMLTYDRPWHADPA

SEQ ID NO: 326941 - protein, 373 aa, unidentified
MSQLNDLSRSLTSLEQDNAIIAVIEMSQSSWLVAGIVPGIERHPLKKLEPNEGELLRLLMRWRAEATKMGCTITRIAVAYEAGRDGFWLARWLRAHDIETYVIHPTSVAVSREHRRAKTDRLDTGLLKRVFIGWLRGEPDHCHMVTIPTLAEEDAKRPNREREGLVRERTRIVNRMKSCLARFGVRSFKPTLRKAPERLAMLVTPEGVPLPANTLLELRRDMARLRFIMDQIKEVEEARGQRLEQAPQEKSHAMVRLLARVIGVGIETADMLVHEILSRSLRDRRAVARYAGLTGAPDESGSRRQEKGLAKAGNARVRRGMIQLAWRFLLFQKDSALAQWYRTRTESAGKKRKTMIVALARKLLIALWRKKRI

SEQ ID NO: 326942 - protein, 327 aa, unidentified
MQGKVSPEPNAQARVYVGIDTCKAWLDVYVHPIGLAFRVPNSRDGLKQLKRRLAGLAVVLIVMEATGKLHREAHRNLNDSGYAVAVVNPLRSRLFAKALGQLAKTDKVDARMLALMGAALEPNAKPPAPEAIELFQELVRGRDAFVRERTALLNQLGDAKATFLKQQIRRQISTIEVAIERLEKEVTRIVKADPWLARRYEILLSIKGVGPVTAVAMLANFPEIGTCNAKQTAMLVGLAPIADDSGDRTGTRSIRGGRAGLRTGIYMAALAATKSNPGLKAFYDRLVAAGKLPKVALTAVMRKLIVLANTLIREDRLWQPKHAPARA

SEQ ID NO: 326943 - protein, 352 aa, unidentified
MEQFIGCDAHKKFSVFVAVNEKGQAGEALRVAHDRQLYREFLAQLPARSAIAVEASGSYSWLVDEMEQLGHRPKLCNPLEAKRRMGLTNKTDKLDARGLAILLRNGTLPEVWIPPGELRDQRELLRLRIFLVRLRTSVKNRIHGTLARHNVQVPGADLFGVAARLELGTRLPELPEHSREAVEQELATLDFLETQIESAEQRLAAIMKVSAEADLLKTLPCVGKILSMVLMLEIGRVDRFPTAAHLASYAGLVPRVHSSGGHTRMGQVCGNVNRNLKWAFVETGNLIVISQRRLAGTHVVRLYQRIKRAKNHQKAVVAVARHLAEAAWWVLTKQEVYREPKGAQQTLSSTHG

SEQ ID NO: 326944 - protein, 419 aa, unidentified
MSFKILKNNCCGLDVHKTWIYACIGITDSFKRTEYKQARFSSFTKGLQELCLWLAKYNCIDVCMESTGKYWIPVFNVLEKNNIFVTLSHPKYTKPQKGNKTDRKDAKWICDLYMCGMVKPSFIPPADIRALRDLVRYRFKLTCMITSEKNRAQNCLTVSNLKLDDVFSDVFGKSSRSITEQILQHPGEKFDVSPFVDGRCKTPIEEIQAAVDGAISMEQAVKLRQCLNHIDELEKHQAEIEREIFRLSDKYESILNLIRTVPGFDKNPLTAIQVLSEIGGDMSVFPTAKNLVSWAGCCPRNDQSNHKIKSTRISRAGSYFKPVLVQVANALIKSKKHPEFTTRYRRIKARRGHKKAIIAICRMILTAIWHILTDLKPYTSEGFLESRPVNKEKVLTISQALNLIKQRGYIIKDDVGPVT

SEQ ID NO: 326945 - protein, 373 aa, unidentified
MKKRSSSQKSQKPTVKNKGTKERVTIGMDLGDKTSRYCVLSHEGEILREGQVTTTKAGMVEAFGSLGPARIAIEVGTHSPWVSRLLRSLGHEIIVANPRQVKLITESTRKDDRLDAQTLARLARIDPALLRPIQHRSEKAQTALMVIRVRAALLSARTSLVNTARGLAKALGERLPKCDADQMGVPQTESLPPNVRQVLEPLLKEVESLTEKIKESDHEIEQIARRDYPETALLQQVSGVGPLIALTFVLTVEDKDRFQKSRDIGCYVGLRPRRCDSGQSQPQLRITKEGDPYLRTMLVQGAHYIISRRGPDTDLKRWGLHLAESGGKRGKKKAVVAVARKLGILLHRLWVTGEVYEPLRNHNLRQERKKIAA

SEQ ID NO: 326946 - protein, 348 aa, unidentified
MKYYIGLDAHSTTSTFAVVDENGQCVLRETVKTSEQSLVHVINKVIGERHMTFEESSISQWLFLQLKDKVDNLLICNPTYVAKKQGAKTDFRDALHLANELRTNHLQPVFHDTSHWMEIRTTVSGYLDIVEEIVRFKNRLKAVFRAEAIQTDENSFYKNKSRVKELKNPAAKFVAEKLFDQIEFLENEKDKYKDVFERNRKKYRPIRNLMTIPGISIIRANIIAAIVCQPNRFENKHKFWGYCMLVRHIQISGGKIYGNKRFYGRRELRNVFLGAAENVMRLDGELRDRYDALRVKGADHQDAKVNLARQIASIALCLLKNNDKYNENYGDYIKERKKLRKDFFEQSL

SEQ ID NO: 326947 - protein, 350 aa, unidentified
MNYVGVDYHKRYSVATVMNEAGETLAQRRLDNRLTAFRSFLEPFGEFKATVEATRNWSVPVEILEDLTDQVVLAHPYLTKAIAKHKFHSDKIDSRILTEMLRVNWLPSAYLRNRVNRDQQLILRVRCYFVRLRTSIKNRIHDLVDRQAEPIRETAQTFSDLFGKKGLAWIRGLALDYPYQALLAKLLAAYDVLTEQIKGSDDLVKELYQADPSCQLLASIPGFGKFFAVLVNVEIGDIKRFPNSGRLCSYAGVVPWNESSGGKVWHGSLTKQSNQWLRWAFIEAAIPAIVGDEGLKSYYDYYRWRKDVKTAKVVIGRRLCCIAYRVLAQQRPYYDQKPRVKTSREDRAKQ

SEQ ID NO: 326948 - protein, 395 aa, unidentified
MFYCGIDIAKYRHEASVIDSDGKPLFDSISFTNSKEGCEKVLALLQKLEITSDSVVIGMEATGHYWLSVYEHFLGLGYDVKVFNPIHSEALRKMYLRPTKTDSKDSFVIAQVMRFGQYSSSTMSDENIIALRQLSRYRLALVDSCGDCKRRIIALLDQVFPEYGKLFSDTFGATSTEVLLNCQTPEDMLDVSTEKLTELLRKSSKGRFKEAKAMELKTAAKNSFGVSFAKDAFSFQIKQLVEQLVFIENQVKELEAEISILLNKINQVITTITGIGETLGAIIISEIGDINRFDAPNKLVAFAGLDVRVNQSGEFNGTRNKISKRGSSYLRRAIWIASTRAAFCDPVLSEYYQSLRARGKHHLTAIGAVARKMCNIIFVILKENRPYESLSPKKS

SEQ ID NO: 326949 - protein, 351 aa, unidentified
MPRTSTVRAVTTIGIDMGKSTLHMVGLDTLGAIVLRERVSRGRITSRLANLPPCLIGIEAGMATHYVARDLAALVHDVKQVPPGYAKPFRQGHKNDFRDAHAVAEAVQRPTTRFVPAKTNEQLDLQALHRVRSRLVGERTAVINQIRGFLLERGIIVRQGHRFLRHLLPDILAKRTDVLSPRMVRIVSDLAGDWRQLDERIETVTDEIETLAKSDDNCRRVMTVPGIGPLISSAMVAAIGNGTAFAKGRDYSAWLGLVPKQMSTGDRTILGRLSKRGNGYLRMLFMQAARVILLRPTNWPKHGFGAWLVRAAQRLHPNVLAAALANKLARIAWTVLAQQRSYEARVTKAAA

SEQ ID NO: 326950 - protein, 420 aa, unidentified
MKEESIEFAAYIGLDWADRTHVIRLRCAGSQAVEQREVTHTPEALAAWVSELQQRFGGRPVAVALEQSRGAVVHALMSYDFVVLYPVNPKSLAKYREAFRVGGAKDDPDDAQLLLELLTLHRDKLRAWVPDDELTRTLVLLVQYRRQLIDERTSLTNRLTSLLKLYYPQALRWAGGLATQQAGEFLRHWPTLADIQRAPATTLRKFYLAHGCRKAKLIEQRLQEIKLAQPLTRDLAVITASVSMVQAIVNQLRALITAVAQMEKQITELFGQHPDHDLFDSFPGAGPVLAPRLLTAMGADRQRFSAAREVQQFSGIAPVTERSGQSCWVHWRRACPKFVRQSFHEYAARSIRWSPWAKAFYEQQRQKGNGHHAAVRSLAYRWIRIVYRCWQQRGLYSEVTYQQALIRRHSPLAKLLPAPH

SEQ ID NO: 326951 - protein, 438 aa, unidentified
MNENVAGIDIGSKHFFVGVGSEDGKGEVKNFETYTEGCNELLSHLQQKDIKKVAMEATGSYWKVLYSILTNAGIEVTVVNGRHVKHVPGRKTDVKDCIWIKELHNHGLLRGSFIPDSNVETLRYYMRIREKYIENKSDACRRMDKALIAMNIRISNVISDIQGKSGMAIIKAILDGQHDAEELVKLCDIRIISQKKEEVLKSLNGFYKPEHLFALQCAYDEYMFYINKMQQCDKKVEEIIISMTADKPEIKTKEQFKRIYHNKPAIKDIDIKVMQLYNGKNLTVLPGITSYTLLRFFAETGSDYTAWPTNKHFTAWLALASSKYQSGKTRKYKKIKCNTMAGQILKEAAQSLLKSKNSALGLWGRQVAARRGPSVAIKAMARKLAVWIYNIVMKGMQFVENGIKQYEEKQKHRNIKWLKKQAAKYNLALVDLDTAQVA

SEQ ID NO: 326952 - protein, 359 aa, unidentified
MSETVPKPDTDVIIGVDTHKLTHTAVAVSALGVRLGGLTISASSRGYQALQAWARSLGAIRSIGVEGTGSYGAGLARFLSEHGYPVLEVNRPSRQLRHQKGKDDTLDAESAARSVLAGQAKALPKSGTSTVEMIRHLKVARDTAVKARSQAMLTIKAIIVSAPSALREQFDRMVGKMTLLRSLAALRPGPLTSTTASAKTSLRALARRWFALDAEVKDQEAHLAQLTQQLAPDLLQAHGMGTGTAAEMLILVGDNPERIHSEAALAKLCGACSIPASSGKTTRYRLNRGGSRRANAALYRVVIVRMRRHQPTLDYVRRRTAEGKSKPEIIHCLKRFVAREIFGYLCRPADIRNTASAGS

SEQ ID NO: 326953 - protein, 429 aa, unidentified
MQEPSKAASAAGVAAYVGIDWADQKHDVTLRAAAEPAKVEHQRIAHELDALMEWVGQLHQRFAGKGKVLICLEQSRGALIYHLMGYDFVELYPINPGQLASYRETFSPGGAKDDRPDSELICELLYFHRDRLKAWKPDDELTRKLAFLNEGRRKAVDQRTELANEIKSLLKVYFPLALQVLGNDTSTMLAADLLLKWPTLEALQKERPHKLRKFFYAHNCRNESKLLERLELIKAAKPLTRDLAVIEPAALRVQLLAKQLKSLLPFIALYEKQIAELFGAHPDSFLYRDLPGAGAALGPRLLTAFGTDRDRFDNPTELLSLSGIAPIRRASGKKTGKRASVHFRHACPKFLRQSFHEFGACSIRYCPWAAACYQTQRDRGKGHHAAVRAVTFKWIRILFACWKQRQPYDPQRYQQALQMRRSQYAATAA

SEQ ID NO: 326954 - protein, 416 aa, unidentified
MNERGTVAAGTGTRKDARALCVIDLVGRVVATGAYAADGEGRDRIAAAIGDPRDCVVVGVEGTGSYGAGISRRLAELGYDVVEAVGPKREKRMAGRDKNDPADAERAARDALAGKASGAPKAGGGWAGALRFRMVARDAAVSGPARAANSAHALIVTAPAPIRGELGGMKTPALMKALSRRRRARDVVESSLWESLRSLSLSWIGAKKAAAAHEEAMREILLANAPALLDIHCCGTISAARLAVTAGDNPERVSGESAFASLCGASPVEASSGKVKRHRLNRGGDRQANRALHTIARQRMKRDSRTKLYVDKRTKEGKSRREIERILVRYIAREVYGALMRPMDAACEPYRASARAAKSERLRAGAAQAQASRALGVASARISEMERGRLVDAPLLQRYRSWLESLSAGERRESPE

SEQ ID NO: 326955 - protein, 399 aa, unidentified
MKLPCIAIDVSKDSSHIQAFTSNNKKFSEVKVIDHDDNGFNNLKALINELSLFTSKEVIVAFEDTGVYDKSLQMFLTTNEVRYAPINPLVSAKSRKTSLRGVKTDAKDCSNIAKVYFNSDVRYKLLESEYRHRLRKLNRYYEESIAHLRKYKVNMHESLDVIWPMYSKVFKNMFTNLPLRIIEEFGHPYNLKRKHHKTIKRFIFNNSNHRDTWCDKKAFELLNYANSCYPGCLEEGVDVEILANKVMDIRVCLKRVDDTLEEIIDLAKLDPNFKVLISIPGIAQNLASRIIAEIGNIERFDGPKQLIAYAGLDPIVYESGKYKGKLAISKKGNKRLRCLLYLAVRCSLRTKSQQNSIKDYFKRKTQQGKLHGVALIACCNKLLRIIYSMCITGTTYKYN

SEQ ID NO: 326956 - protein, 409 aa, unidentified
MKAVNEVCCGLDVHKKTVVACVLTSRTRETRTFGTMTHELLELADWLEDVKVTHVAMESTGIYWAPVFNLLEGHSYQLMVVNARHVKAVPGRKTDVKDAEWLAELLRHGLLKPSFIPDRPQRELRELVRYRRTLIQERARLTTRVQKLLEGANIKLGDVASNVMGMSARAMLKELAAGNRDTTAMSELALSSLKAKKPQLKQALTGSVGPHQEFLLQSQIRLFEHIEAEIEAVSAEVEERMRPFEPALALIDEIPGIGRRGAEQILAETGVNMSRFPSPEAFASWARVCPGNNQSGGKRHNASTGQGNPWLRSALIEAALGAARAGRTRPNFFSARYSRLAAHRGSRKAAMAVAHSILIAVYHMLRDGTYFKDLGPGHWDDHHREAVARRSVERLRRLGYAVTIAEATA

SEQ ID NO: 326957 - protein, 319 aa, unidentified
MLGVREFGNEPKGHSSLLKWVNEQGEPRRIGIEGSLHYAAAASQRLLTEGEDVREVSPSLTHLERRRRQKGKSDAVDAVAIARVVAADEKLPPARRLAVLSDLKLLVDYRYQLVRGRTQLANRLHADLVVIHPGYEKVVPNLRAKRNVMKARSLVSRDRSVRGDLVRRRFGDILRLDKEIADTDRRIEDKLNEVGTTLTEIRGVGPFIAAKILGEVGEVSRVRSKASFALLSGTAPLVASSGQTHRHRLNRGGNRQLNWALHYIALVQSRFSPEAKSYLARKREAGKSHKEAMRCLKRQLSNVVFRHLVADARSLEQLA

SEQ ID NO: 326958 - protein, 426 aa, unidentified
MDVRDAKLAMVQGALIVGVDLAKVRHWWRGIRPESGISVTPALCFENNRKGFEALVGEMRRAMERAGLSRAVVGLEPTGPHWRPLAQYLMEQPGIDVVLVNPYHVKRDKEKADNTRSKSDRKDCRIIADLVRNGEYLRVLWPRGAGAELRQLSVARLEAKKGWNAACNRVRSWLFERFPEFLEVFRDPFRQAARWVLEHCPTPAEVLAMPTEELVAGLKGAARGRVGQKRAAVLRLAAVDSIGYRDGAAGAKERLRGYLQDVDHWGERLASSEQAMEAWLKRSGMAESLLSVPGIGVVTAATFLGEVGDLDAFTHPKQIVKLAGFNVAEKSSGQSQGRAQLNKRGRPGLRLVLFLAAVNAVRHCPALRAFYDDLVGRSRKPLRKMQAMVAVACKLIRILWHLAKHRLTYDGAKALGRVRGRLTRAA

SEQ ID NO: 326959 - protein, 390 aa, unidentified
MNENQGKRIIGLDMHPDVYAAAALSVDPKTHHAAWVQDRMPTAELEAWAAKRLIPDDVVVLEASGNSFEVAARLHAIGFSAVVLESAQAGKIRDNFCNDDRHSAVKLAKVYRSGLAKEVWQPTATTREHREVFFAHRNAVKDATRCRNRIHCFLNEHCVRLKRGVRLTTPSGEAAAQAAKPWSALQADLIAEAFEQLRQVEARRKKLERIMVRELVANPGWARLWRLMGIRHRVAFGLMAMVGDVHRFPTAKKLVGYLGLAPRKTQSGNDAKGRDGGMGKFGRGDVRGLLIQSAQNALTQRNSPWHHWGWKLMMKKHRNEAVAAVARKITVSVWHLLMGHFTPLLEVTEHLRAKLLRLATVIGKDGVKALGFENRDAFVSAQIQSIQLST

SEQ ID NO: 326960 - protein, 328 aa, unidentified
MTLYGGIDLHSNNNVVALTDETDRIVFRKRLANDTQTVLEALEPYREAITGLVVESTYNWYWLVDALMAAGYQLHLANTAAIVQYSGLKYSDDDTDAAWLAKLLRLGLLPEGFIYPKAQRAVRDLLRRRSSLVQQRTANVLAVQNLFSRNRGRSISANDIRRLTPERVAELVADVNLALAIQSTLLAMQGQQAAIDLLEHEAWRQTKTTQVWQPLLTVSGIGRILGLTIVLETGPIERFAHVGNDASYCRCVGSQHLSNGKQKGKGNTKNGNKYLAWAYVEAANFARRSSAIINASARRPRAWWRSRRSRTNWPAPATTFCATAATST

SEQ ID NO: 326961 - protein, 352 aa, unidentified
MIIIGVDYHPEFQQIAWVDTNTGEFQEKRLAHPEEAEQFYRGWAGQEVRVGMEASGHARWFERLLAEVRLELWIGDAAAIRTKRVRKQKTDRQDAQLILQLLLENRFPKIWVPSGENRDLRQLLWHRHRMVQARTRIMNQLQALALNEGLRCKKRLWREHGRQQLEAFRLAPWASRRRRDLLELMDRLNPTIAELTRAIEQAAENNSAAQCLRTHPGVGALTALAFVLILGDSERFPCGKQVASYLGLVPLEDSSGKRRRLGHITKQGSSILRFLLVEAAQVTVRSLPEWRSKYFHLTLRRGRKIAKVAMARRLAIALYWMWRKGWNYEQVKKFGSHAGQPGNRHGVQQNTE

SEQ ID NO: 326962 - protein, 440 aa, unidentified
MIDTNQKQETDFAAFVGIDWADQKHSWALQSPTHSGVESGHLDHTPEAVEAWAAELARRFGGRPIAVALEQSRGALLFMLTKYAHLVLFPVHPTTLVNYRKGFRPSGAKSDPSDASLLVDLLVRHREKLRRLDPDTEQTRTLQFLVEARRKFVSDKARCSNRLTAYLKMYFPQALDWFSAITSPIAGDFLERWPSLQKVQKAKPETLRKFFLQRHSCKLDNIDRRLEEIRRALPATHDVAVTCTCSAAVVALVRIVRAVRDAIVCYDRQIETLTREHPDFAIIDSLPGVGPALAPRLIAALGTQRDRYQSASELQSYSGIAPVLASSGKQCWVHWRWACPKFLRQTFHEWAAHSIGSSAWAKAYYEQQRAKGKPRNTVVRALAFKWIRILFRCWKDRKPYSEELYRQALAHRHQLAVKSSRVELQWKTCAGFSKITAITS

SEQ ID NO: 326963 - protein, 366 aa, unidentified
MSDHTATRLPVAGLDVHAASIRLAVVREDELLDERTLPFDCQLVERELRRLGATRVCYEAGPTGFGLARHLRDAGLQCDVIAPGLVPRRGSDRVKTDKRDARKLALLYQGGMLAPIWVPSLEQEAVRDLIRAREDARQDRARARQRLGKFVLRRDRRLPGKGWTLARRQWLGQQAFEHAAQQAAFDDYLLACDLLDRRIETLERQIDEWATHDSFRQLVGRLRCLRGVDTLTAIGLIAEIGDFSRFKTAPAFMAYLGLVPSECSSGERRRQGSITKTGNNHARRLLIEAAHNQRRRPARSAHLARRQAGQPAGVVARAQQAQLRLHKRWQRMSARGKHSNKIAAGVARELAGFVWAIATDQPLRAG

SEQ ID NO: 326964 - protein, 321 aa, unidentified
MAMLSFGGIDVSKDRLDVMVLPEEQCSSVSNAAGWDKLIEQLRGSSIAAIGIEASGGYERGVMRALLAADLPVRQVNPFKLRQFARASGVLAKNDPLDARMIASFVAIMPTRPAQRQAPAAQRLTEMLAVRRQLSAEKVAAENASRLLEDAMLQRLSRRRIVRLAADIDLLDQHMVEIIATDAALAHRYHLLSSMPGVGPVLACTLIALLPELGRMSRKQVAALVGVAPYAFESGTLKGRRCIWGGRAHVRQVLYMAAMSASNWNPAFKTFHDRLKAAGKLPKVAIVAVMRKMITTLNAMVRDDVIWADRLTGRHSVPTAR

SEQ ID NO: 326965 - protein, 405 aa, unidentified
MLFAGDDWAEDHHDVEVQDGSGRVLGRARLPEGVAGIGRFHELIGRFADPDAGPDQVVIGIETDRGPWVAALIAAGYVVYAVNPRQAARYRERLGTSGAKSDAGDAHMLADMVRTDSHQLRAVAGDSGQAQAVKVVARAHQALIWERTRHVLRLRSALREFFPGALEAFDDLTAPDALELLARAADPASAARLSIAQITAALKRARRRNTAEKAKQIQAALRSQQLAQPQVVAAAYAATVRAAVAVISVLNEQAGVMEAQVESHFGEHPDAEIFVSQPGLGMVLGARVLAEFGDDPDRYADASARKNYAGTSPITRASGKKKAVLARYVRNRHLADALHQQAFCALTASPGARAYYDQLRGRGTSHHAALRQLASRLVGILHGCLKTGTPYDEVTAWQHRLEDAA

SEQ ID NO: 326966 - protein, 345 aa, unidentified
MSIVGGLDIHRSQITFDYLDTQTGEVRCGQVRPADREHLRAWLGRFAGCDDVAFAVEGCTGWRYVVEELAAAGIAPHLAEPADTAFARGRKRHAKTDKTDSRHLRMLLAEGRLPECWIPPGHILECRALLELYHDLRAEHTAWVQRIHAVFFHQGAPALGDGALRTGKDLAALRAAAAAHLSPVGQLQVAVSLEVLEALEARMHQVRHQMLAAARHLTGAKVLAARLYGVGPVTALAMTCWLAGKDRFSSSRQAVRFAGLDITVSSSDRKGPPGRLSRQGPPVLRWAVYEAGKTHARSSAPDHRYYAQVKDRQDGKRAALSEARKILRQACHILAELGDDALAAA

SEQ ID NO: 326967 - protein, 351 aa, unidentified
MPHKSTVHAVTAIGIDMGKNTLHMIGLDLRGAIVLREKVLRGRIASRLANLQPCLIGIEAGMATHYVARELAALGHDVKQVPPTYAKPFRQGHKNDFRDAHAVAEAVQRPTTRFVPAKTNEQLDLQALHRVRSRLVSERTAVINQIRGFLLERGIIVRQGLRFLRQQLPDILAKRTDVLSPRMVRIVTDLAGDWRQLDERIETVTNEIETLAKSDDNCRRVMTVPGIGPIISSAMVAAIGSGAAFARGRDYSAWLGLVPKQMSTGDRTILGRISKRGNGYLRTLSMQAARVILLPSANWPKHGFGLWLVRAAQRLHPNVLAAALANKLARIAWTVLAQERSYEARVTKAAA

SEQ ID NO: 326968 - protein, 329 aa, unidentified
MFVGLDLHKNYLQAAVMDDQGRVLSQERIPNKDDSIEEFTRKTLKDSHAEIVIESSSTWYHVYELLSQKENCHVVLSNPVKTKAIASAKVKTDKVDALTLANLLRTGYIPESYIPPRHIMDLREMVRYRTSLVRMRVEAKNKIHAILLQNGTRIKEKPFTIAFVEELRRLGDYRIDGYLNIIQSLSQQILTVSSTIKREAREDESTRLLMTIPGVGYFSALLILSEIGDINRFPDSHHLCSYAGLTPSTHSSGGVTYHGSITRSGSRYLRWILTECAKAHIRTRRDSQLTRFYTRLAKRRGGSKATVATASKLLRIVYWVLKEKRPYHS

SEQ ID NO: 326969 - protein, 339 aa, unidentified
MQVITIGLDLAKNVFQVHGVDAEGETVVRKKLRRVEVVAFFSAVSPCLVGMEACSSAHRWARELIALGHEVKLMPPSYVKPYVKRGKNDVADAEAICEAVTRPTMRFVPVKSAEQQSVLILHRSRDLLIRQRTMLANALRGHLAELGIIAAQGLRKLPALVEAVCNEEDDRIPTVARQALSVVIGQMQDLQIRIQALERELLAWHRGNEASRRLATIPGIGVITATAIAATVTDPAHFKSGRQFAAWLGLVPRQNSTGGKERLGRVSKMGDRYIRKLLVVGATALIRFARNRATPLTAWADKLLTRRPARLVSVALANKMARVAWAVLARREPYRSAAA

SEQ ID NO: 326970 - protein, 358 aa, unidentified
MAKSKQTTPVVGGVDTHKDLHVAAVVDDNDQVLGTQSFATTRQGYKLMLTWMRSFGDLQRIGVECTGSYGAGLLRYMQVAGVDVLEVTAPDKQDRRRRGKNDDFDAQSAAHAAYARRRTVTPRSRDGMVESLRVLKVCRKTAVQARRIALQIIQTTIVCAPDRLRELLRNMTRMKLIRTLAAWRPDLTGYRDVEEAYKVALKSLARRYLELHDEVADLDDMIEAIVTDLAPELIARNGVGLNSAAQLLLTAGDNPERLRSEASFAALCGVSPVPASSGKTTRHRLNRGGDRAANSALHIIAIGRLRLDPKTQEYVLRRIAEGHSKLEAIRCVKRYIAREIFNVIARRHKQINQAQIAA

SEQ ID NO: 326971 - protein, 321 aa, unidentified
MMLPALGIDVAKLKFDVCLLNVEGKLKHKQFPNTTTGFAQLAAWLVKHNAPQVHACMEATGTYGEALAYYLHAAGQTVSVINPAAVKAFAASRLSRTKTDKVDAELIARFLLAQQPLAWTPPAPEVRQLQALVRRLEALVEMRGMESNRLEALASTPIVKALVEEHIAYLDGQIKSTEALIREHINTHPGLRQQSELLDSIPGIGATTAAVILAEVADITQYRSARQVAAYAGLVPRERRSGSSVRGRPQLSKIGNARLRRALYFPAITALRCSEFFKVWAAGLRERGKCKMSVIGAAMRKLIHLAYGVLKTGMPFDPEWT

SEQ ID NO: 326972 - protein, 355 aa, unidentified
MSQEKYIGMDVHQATVSAAVRDRNGNLLMECILETKADTLLEFVQGLHGTLSLAFEEGTLAAWLHDLLKPHVNRVVVCDSRKAALLRDGNKSDRIDARNLSELLRTNQLKPVYHGEHGLRTLKELGRSYLTVSKEMTRTMNRIKSLYRSWAIPCAGTTVYAPRHRRQWLAKIAEPGARVRAEHLYEQLDHLQPIRVRARRELLQESNKHDAVKRLRQIPSIGQIRAALLVALLQTPHRFRSKRQIWAYSGFAIETHDSGEYRYVRGKLQRNRERITVRGLNRNHNPDLKNIFKGAAISASSRPGPLQDFYETRVAMGMRPTMARLTLARKIAAITLTLWKKGANFDPQQLSRQAA

SEQ ID NO: 326973 - protein, 377 aa, unidentified
MSITQTVLQGQDTVIQADLYLSFELSDKQWNLTLSDGRRGPSRYSIEAGDTSAVMQCIVKAKARCKLDPRAKVHSCYEAGRDGWWLHRWLREQGIDNIVVDSASIEVNRRARRAKTDRLDGDKLLAMLLRHRAGERVWSVLHEPTAQDEDARRMHRELERLTHERTAHTNRISSLLVLHNLRPRLIIGGRKWAPWWASHSEQVPPALRAEIERESARLALVKQQVKALEAARRQDLADGKQPLVAQLSQLRAIGPKGAWILVKEVFGWRRFANRRELAGCLGLAPTPYASGDSQTEQGISKAGNRRARALLVELAWSWLRLQPDSALSQWYNRRFAQGKRTRRVGIVALARRLAIALWRYLERGEIPDGAVLKPTGA

SEQ ID NO: 326974 - protein, 330 aa, unidentified
MKQEIVYVGIDVAKAHLDVAWEKQFHRLPNDVAGTKQLLCLLKAIAGQVQVIWEASGGYERSVMQTLQRGGIKASVVQASRVRQFARAIGILAKTDCIDAAVLCAFGKAMQPQVTAPSNPQQERLREMESHRRHLSRLLVAEQNGRAQLTDPTVLALTERLVGQIQKQIERIDLLIKELIEGSPGLSSKAQKLMALTWVGPRTAALLLAQMPELGQLNRREAAALAGLAPFNRDSGKLRGRRTIFGGRRAVRTGLYMAALVATRHNPILAAFYRRLRAAGKPPKLALSATMRKLLLALNTSQTPTNPRLNSTQLLQLQNAATWHRRLNHH

SEQ ID NO: 326975 - protein, 444 aa, unidentified
MTRGDRNRNRRIAGLREAVARDRAVLAVDLGEDKQVAVVMDHEGRVLARKVVRVKAHQLAGLLEWAAERAVKAGFAGLTVACEPTGHRWKALMGLADAAGQGFVCVQSLAVARAREGDDYTRDKTDHRDAYLIGKLVVRLDCYLPERADEAWARLRHLGARRFALVADVTSCMLQAGDLLGCAWPAPLSAAARPLESVSWLAGMTVITGRCGGDPRRLRAMGYEKFLAAVRRELPRWGGKIVRYSIVAGLWDALADTGGVAAQRPGALERLHLLLGDWCELRLRLAGTEQRMVAVLGELGLAELVASIDGMSALSGAVILAETGDPNRFASGRAVVKHAGLNPSERTSATINGQTRISRRGRPGLRAAAWRAVWGALRHNTVLAAKYAHLTSRDHGRLADGQARVACAAALLRWVWAVVTSGRAWDARIAAGEITAVPVTAAAA

SEQ ID NO: 326976 - protein, 342 aa, unidentified
MNYYAGIDVSLKCSSIAVVNANGEIVREAKVATDPMVVIEWFRSYGLQMERIGLEAGPFSQWLYAGMKEADLAVELLETRHVRNAFKTMAVKTDRKDARGIAELVRVGWYRPVHCKSMDAQETRTMLSARKLIDQKLRDVEMSLRGLLRGFGLKVGKTTPTRFADRIKELVSGNATLQVIAESLLAVHQVLLREFKGFEKRVRTMARDSAEARLLMTTTGVGPIIALTYAAGIDDPGRFKKSKAVGAYFGLAQKKYQSGETDITGRISKAGDAGVRTALYQAAHIILTRPVKSSALRSWALRLAKRVGMSKAKVALARKLAVVMHRMLVDGKPFNPAAGAAA

SEQ ID NO: 326977 - protein, 338 aa, unidentified
MRLYGGIDLHSRISWLVILDGALKMVRQVKLGNDLKEFLRLLEPYRAELAGLAVESTPNWYWLVDGLQEAGYRMHLTNTCAVQQYSGLKYTDDRHDARLLAHLLALGILPEGYIYPAHERPLRDLLRRRGFLVDKRTSMLLSLRSAFECHTGHRVSSDTIKKWTAVEIEELLDNATVARGLTCLLEPIKAMSTQIKMLEKEVLAQAKLRDEFALLRTVWGIGPILALTVMLEVGDIKRFEKVGNFASYCRLVKTDRLSVGKRKGSGNAKNGNPYLSWAFSEAAHFAIRYHDDAKRFHQRKLAKTNGIVAVRALAHKLARASYYVMRDKVEFDPERLFA

SEQ ID NO: 326978 - protein, 315 aa, unidentified
MVDVPCRVGMDVAKAQWDIALRPSGERWAVPNDAGGVGTLVEQLQARHPTLIVREATGGLERAATAALATAGLPVVVVNPRQARDCARATGQLAKTDAWDARALAHFADVIRPTPRPLPDAQPQALRALLGRRQQLIVMRTAEQNRLAGTCGRIQTDIEAHITWLNERLATLDDDLETRLRASPLWRDNDDLVQSTPGIGPVCARTFLLELPELGTLTRQQIAALVGVAPLNGDSGTLRGRRMIWGGRAHVRTVLYMGTLVATRSNPQIKAFYERLLAAGKVKKVALTACMRKLLTILNAMLKHRTPWHAQEVQG

SEQ ID NO: 326979 - protein, 420 aa, unidentified
MKVVYQTCCGVDVHKSFLVATIIKTTSGVEPSYQKKCFSTFNNSILQFKSWLIENKCRDVCMESTGKYWIPVFNLLENDINVTIANPKWVKAVKGNKDDTKDSKWIGDLFRLGLVPGSYIPCKPIRILREFTRYRYKLTSCRTSEKNRYQNALTVCNVALDSVVSDIFGKSATSVIDYLIEQPDNSINHEEIASRLLRSLKKKSDSVIESIEGYQMTDFQKYRMRLVRAHLDYITSTINDIDTMLDSLITPYENAVQLLCTIPGVDRNSAITVISEIGTDMTPFSNSKRLCCWAGLTPGNNESAGKKKSVRITRAGVYLKPALVQVAHAAVKSDKSPYYKQKYERITKRRGKKRAIIAIARMILTAIYHMLSTGEAWNPTDLYKTDMPEPLKEKQKEKAIKQAKKLLIREGLLSESQLVS

SEQ ID NO: 326980 - protein, 339 aa, unidentified
MNIKVVGIDLAKNIFQIHGVDEKGKAVFQKRVSRPKLAEIMANLPPCLVGMEACGGAHYWARKFFSFGHTVKLMNPQYVKPYVKTNKNDAADSEAICEAVTRPNMRFVPIKSQEQQDIQGLHRIRSRLIQNRTALANQVRGLLQEYGIVIPQGLSHLRKRLPDIITSSDTILTPAGQELFADLYEQVVEFEKRIHAYDARIQKLCRENEVCQRLIQVQGVGPITATALIAAVGDAKVFKNGRQMAAWLGLVPRQCSSGGKQVLLGISKRGDRYLRSLLIHGARASIRHISQKFDAVSQWLKELIQRRGHNKACVALANKNVRILWALMAHNRQYRERHC

SEQ ID NO: 326981 - protein, 345 aa, unidentified
MQLTTVSVDLAKTVFQLHAIDQQGRTALRKRLKREQVVPFFANLEPCLVGMEACGGAHYWARKLQALGHTVKLMAPQFVKPYVKSNKNDVADAEAICEAVTRPNMRFVPIKTVEQQAILAVHCARQGFVKARTAQANSIRGLLGEFGVVLPQGIRHIVERLPDILEDHENALPGSLRQLMQRLMEHFKELDRQVVELEREIQQWHRSNEGSCRLAEIPGVGPLTATALVASVGDAKNFSNGRQMAAWLGLVPRQHSSGGKPTLLGISKRGDGYLRTLLIHGARSMVRVVESKTDPSADWLKGLLARRHTNVAVVAQANKTARIAWALLAHGTKFRPDYTPDVTVA

SEQ ID NO: 326982 - protein, 417 aa, unidentified
MGKLKIVYPICCGLDVHRDFVMACVASTDAQGVTSYDSKRFSTFSGELRDLRDWLSQHECRDVCMESTGKYWFPVHNILESTCNIVVSHPKFVKAIKGKKTDKKDAQWIADLFKHDLVRGSFIPPEDFRQLRDLCRYWQKLTSYSTGEKNRAQNCLTVSNFKIDSVFTDVFGKSASAIITHLLDHPGEHFDVAPFVHGRCKTPIDEIQAAVDGTFSQWQGEKLKVIRDHMDGLDKAKVFIEDLILRLAEPYMRQVELLLTVPGISEVMTAIRILAEIGVDMNVFESSKHLCSWAGLTPQNNESAGKKKTTRIGKAGQYIKPLLIQCAMAAANPRSKLYPEIFQKYQHLKKRRGSKKARVAIARKLLTAIYQMLLKDEAYSPYIALEKESIPENRVLTPEQAFAMLKSRGYIISEEIA

SEQ ID NO: 326983 - protein, 451 aa, unidentified
MSRRRPAPPRAAAQPCVNPNAAGLDIGSAEMWACVPEDRDPQPVRVFGTFTPDLYALADWLAACRIETVAMESTGVYWIPIYEVLEERGCRVPLVKARHLTHVPGRQSDLKDGQWLQDLHTCGLLSGSFRPAAQMCALRAYLRHRAALLEHRAAHIQHMQKALQQMHVQLTQVLSDITGASGLAMLRAIVAGERDPGLLARFRDRRCACSPAEIIKALTGHYQPEHVFALKQALALYEFYTLQLQECDAAIEQQFHAIKPAWEDELPPLDPTDKANSHSKNAPRYDARSLLYEVTGVDLVAIPGLNTGTVQTIVAEVGTDMTKWPSEKPFCSWLTLAPHHDISGGKVLRRYTLKTGNRAGQAFRLAAQSLSRSHSALGAYYRRMRARLGPKAAIVATAHTLARLVYHMLKHRTPYRHLSAEDYAQRARERDIATLQKRAAKLGFTLVESPA

SEQ ID NO: 326984 - protein, 320 aa, unidentified
MKTIHSTTSSEEQKCGGVDVGKAFLDAAIEGGPALRTPNTPEGRAALVAFFRAHGVACVGLEASGGYELEIRGDLRDAGFEAVLLQPAQVRAYARMTRQRAKTDRIDAALIARCVDVLKSPARQEDPRLAALAERLTFLEQIEEDIARLRTRRDRFREPDLIARLAAEIKRRVADRKAALAELIALLRAHDDLAHRFDLIESIDGLGPRTALTLVVRMPELGSLSREKAASLAGMAPVTRESGRWTGQAHVEGGRSRVGRALFAAAQAACQRWNPQLVAFYRRLRAAGKHHSVAVVACARKLVIYANTVLANGRRWVNQC

SEQ ID NO: 326985 - protein, 321 aa, unidentified
METATVHVGIDVAKEKLDIAVHSSDQQWTFPNSDAGIGRALSCLQELNPALIVVEATGGIEVPLVAALAVAHLPVVVANPRQVRDFARATGRLAKTDTLDARTLAHFAAVIRPPLRPLPDAHTQEMAAVLTRRRQLVEMLTAEGNRLGAARSKAVRRRISAHITWLEKELVNVDDDLNSSIRKSPVWREKDNLLQSVPGVGPVLSTTLLAHLPELGNLNRRQIAALVGVAPFNRDSGNLRGKRTVWGGRSAIRAALYMATLVATRYNPIIRAFYHRLCAAGKPKKVSLTACMRKLLTILNAMLKHRTPWHYAGIQTFGPCS

SEQ ID NO: 326986 - protein, 343 aa, unidentified
MERYVGMDVSLEETSICVVDCDGEIVCEGTVISEPEAIAKYLKTKAMGAKRIGLETGPTTTWLWHELRALGLPVICIDARHAKAALSMQINKSDRNDAAGLARIMQTGWYKEVQVKSVRCHESRAVLNSRAQLVKIKRDLENQIRGLLKNLGLRIGKAGDSAFSRRVEELVADQSLLQQAVRPLLAVREGARREVADLHRKLLALAREDEDSRRSMTVPGIGPITALAFHTVIDDPSRFRRSRSVGAYVGLTPRRYASGEVDWSGRISKCGDRMLRTYLFEAAGVLLTRVPQWCKLKAWGHRLWKRVGFKKAKIAMARKLAVILHRMWRDGTDFMWSSKEAAA

SEQ ID NO: 326987 - protein, 349 aa, unidentified
MNPITLVGIDLGKNTFHVHAQDRHGKMVLRKKLGRAALLHWLMSLPPCTVAMEACGGAHYLARQLRSHGHTPRLIAAQFVRPFVKSNKNDFIDAEAICEAASRDSMRFVTPHTETQQVLNALHRVRETLVADRVRAVNQIHAFLLEYGISLPRGDKALTTLAATVESHSQLALGMDEIVMGQLARLRGFEAELAALDRKLALLLAGDELGQRLQSIPGIGPITASLLCARMGDGSQYTSARAFAASLGLVPAQHSTGGRSTLLGISKRGDPHLRSLLVQCARSWLQRLARYQGPLADWVRALMQRRHGNTVACALANKLARIAWAVAVKRTPFRVDMASTVRTAGMATA

SEQ ID NO: 326988 - protein, 333 aa, unidentified
MLNMNPQGGVANRDQGPNAGIDVSKQHLDACWLANELHLTNDATGWDELAAKLRHANVDLVVIEATGGYERGLVCALQSAGITVARVNPRQARDFAKSMGVLAKTDRVDARALRDFANVLAQHKDRHKYVTPMIDAERLALAELVTRRRQLVDMRVAELNRLEQAGKLAVRSIKKVIRLLDQQIAQIDHDADDHLDRHFKEQRKLLDSVKGVGPVTILTMSAALPELGRLQRRQISKLVGVAPLADDSGRRKGPRRIWGGRSDVRAVLYMATQSAIRHNPVIKVFHSRLIAAGKPKKVAIVACMRKLLTILNAMVRDNALWDPAKHDQSIKTA

SEQ ID NO: 326989 - protein, 313 aa, unidentified
MPQFSPKAGVDCSSDRLDVHIHPLELAFSVANDAEGWRELDRRLAAAQVEVVAIEASGGCELRVCHFLIERGYSVRLLNPYRVRLFAKAIGRLAKTDPIDAAVIAHFAAVVPTRPMVRHTAVEALAELVGARAQLLDQHTALSNQARWHHDATLRRISRRREIALKADINTLDRLIAAKVEVDPDLAAKNAILRSMKGVGPVLAHTLLALLPELGLLSRQQIAALVGVAPFDDNSGKRLGVRFIQGGRPSVRAPLFMAAMAAAKHNPILKACSDRLRSAGKKPKVAIVAVMRRMLTILNAMLRDNAPWQNHAA

SEQ ID NO: 326990 - protein, 353 aa, unidentified
MSSLTDLREVVDVVIGVDTHVHTHSAAAVDAGTGGVLGEITVEATADGYARLVTFADEHARLRAWAIEGTGGHGAGLARHLAELEEVVVELDRPQRAHRRNGAKSDPLDAIRAAREAMSRTRLGTPRHGGDRQALSVLLAARRSAVEAATNAQRQLFSLIIAAPEPIRGRFRGQKLPGMLTTAAGLRIHSSWDAETTATVTVLRCLARRARDLAREAAEHEKAVLAIVRSWRPDLLAQPGVGPIVAATVLCAWSHPGRIHSEAAFAMLAGVAPIPATSGQVTTRHRLNRYGDRQLNRALHTIALSRIHYDTATRDYVARRTIEGKTPREIKRCLKRYIARDLYRLLEHQPSPA

SEQ ID NO: 326991 - protein, 319 aa, unidentified
MAQNDLVVAGIDVAKDKVDVCIRAPSLRCTFASTVEGRRELASWVRRHKVGKAVMEASGGYERELAKALRDARIEVRIVDPKRVRDFARSAGRLAKNDAIDAEMIAWFAETFDEAPGQAYDAEREKLAQIVNARQGLLDLRTTLQNRGEHAGPEPVQKMHARLLKKIAAEVVKLEAVIAAMIKATPHFAELAEIIESVPGLARTTSAGLIAKMPELGQVSNKVAPALLGTAPYDDDSGRRQGERHIKGGRRKVRNLFYMACLGAATRHNPVLKAFYDRLIAKGKKPKVALVACMRKLIVILNIMIARRQKWDPNLHALS

SEQ ID NO: 326992 - protein, 348 aa, unidentified
MPVMIGVDQHKTSHTAAALDEHGRLLDCQQVRATLEGYHALRQWAAQWDDRRWAVEGAHGVGRALAQWLVGDAEAVVDVPAKLTARVRVLSAGHGRKTDPADAVSVASAAQGAAWLRPVGVEDHAVVLHLLTSHREDLVGTRTQTINRLHRLLADLIPGGADRNLTANRAEALLGEVRPTGAAATIRWQLAQDLIADVRDLDQRIATVEDRITLAVKHSKTSLVGLFGVGPVLAAKLLGEVGDVRRFPSKHHFAAHTGTAPLEASSGQVVRHRLSRAGNRRLNHALYLMAIVQIRHPTAGQAYYRRKRAEGKSAKEALRCLKRRLSDAVYRCLLADQHDQWRPAVTTN

SEQ ID NO: 326993 - protein, 337 aa, unidentified
MINFFIGIDFAKTKFDVVILSRDNLVSKGEHKQFCNTKDGVKQLEKWLHLVCGRDVIVESVICGENTGVYSVLAAKILTREGYTVCLESALRIKRSMGISRGKNDKKDARDIAEYAARHYDKLVVYREPSQTSEALKTLFTQRRLLIKQRGDLQRRNKELTGLYKENPLLKKMLASDTRIINAIDAEIEKIEAHMKSIIDDNPEVRKVYDILTSMKGIALVNAVALIVYTDNFKRFDYDARRICSYWGIAPFANQSGSSINGKPHVSHFADHYLKSLLTQAAICAIRYCPEISNYAQRLIARKKHISIVHNNCKNKMIHILVAMVKNGTYYGEFQKK

SEQ ID NO: 326994 - protein, 344 aa, unidentified
MKKSNVIGIDLAKNVIQVCTINKHGELLSNKAISPKKLKELLATVKSSIVAMEGCSACNFWGRLAESHGHDVRIIGPRKVKAFLQGQKTDANDALAIAVAASQPGMVFSQLKSEDQQCMQSIESSRKFISKELLSLTNHMRAKLYEYGITTRRGQKGFKQLIVDVLDDHIPGFPEALRPVLRILWERFCQTLEQLDGIEKQRAQLIEKSEPCQRLKKTEGVGDVCASLLFANLGKGSSFKNGRQASAYVGVTPKQYSSGGKVSMRGIDKVGGNKELRSALFQGAFSIINRLPEEPRTTKQAWLISLVRWVGVKRACIALANKTVRTAWAILASGEPYKASPIMH

SEQ ID NO: 326995 - protein, 400 aa, unidentified
MGQPLWAGVDAGKSDHYCVVIDADGKRLLSRRVANDEAALLELINAITALADGSELTWAIDLNAGGAALLIALLIGAEQRLLYIPGRTVHHASGGYRGEGKTDAKDAAVIADQARMRRDLQPLRPEDDIAVELRILTSRRTDLVTDRTRAINRLRAQLLEYFPALERAFDYSASKAALILLSGYQTPDGLRHAGAARLAAWLRKRKARNADAVAAAAIEAAKSQHTVVPGQQLAAAMVARLAEEVMTLDTEIGDTDAMIEERFRRHRHAEIILSMPGFGVILGAEFLAATGGDIAAFGNTDRLAAVAGLAPVPRDSGRISGNLKRPRRYNRRLLRACYLASHIAIRTDTASRIYYDRKRAEGKRHTQAVLALARRRLNVIWAMLRDHKPYQATAPNAAAA

SEQ ID NO: 326996 - protein, 351 aa, unidentified
MSHKTAATVAHTIGIDTGKNTLHLIGLDDQGAIVLREKIARGRIAARLANVPRCLIGIEAGMATHYVARELGALGHDVKQVPPAYSKPFRQGHKNDFRDAHAVAEAVQRPSTRCVPVKTDDQLDLQALHRVRSRLVGQRTAVINQIRGFLLEHGIAVRQGLRFLRQQLPDILAKRSDVLSPRMIRIMEDLSGDWRRLDERIEHITKEIEVLAGTDVNCGQLMTVPGIGPIVASATVAAIGNGAAFARGRDFAAWLGLVPKQMSTGDRTILGRITKRGNRYLRMLFVQGARAILLRPKSWVKHSFGPWLTTAARRLHRNILTIALANKLARIALSVLIQGRSYETRIVPAAA

SEQ ID NO: 326997 - protein, 453 aa, unidentified
MAKQRKAAKRKGSRNRPIPVINPNAAGIDVGAREVYVAAPQDRDPEPVRTFATFTPDLVELANWLAVCGVTTVAMEATSVYWMALFTILEERGIEVCLVNARHLRRVPGRKTDVLDCEWLQYLHSVGLLRGSFHPSEAVAAVRTVLRHKASLVQMGSSHVQHMHKALTQMNLQIHHVISDITGVTGMAILDAILAGERCPEVLAELRHRTIKADEKTLAKALTGTWRREHLFTLRQSLGAYRHYQAQIQQCDEELHQLLGNFGSRVDPGEDPLPPAPGRRREPRGLDLRTEFYRIFGTDLTAIPGIEVHTIQTLFAECGRDLSSFPTAGDFASWLGLCPDNRITGGKVISTRTRKVNNPAANALRLAAQSLHRSPSALGDYYRRMRYRQGPAKAITSTAHKLARILYTLVTTRQFYDETVLSQHQHQTRARKTRRLKTQAAALGFDLVPVEAA

SEQ ID NO: 326998 - protein, 343 aa, unidentified
MEQPITIGLDIAKHVFQAHGADATGHVLFRKRLTRARLLGFLAAQMPCVVAMEACAGSHYWGREISKLGHTVRLIPPAYVKPFVKRQKNDAADAEAICEAAQRPSMRFVPVKDEEQQANGVVFRARDLLVRQRTQCINALRGHLSEYGYIFRQGITHAATLIAHVKDPNSSLPESARVILRLLIDTFAALESQIKELDAEINRRSKADPVARRLMTIPGVGPITATAITALVPSAGSFRTGRDFAAWLGLTPLQKSTGGKQKLGAISRRGERTIRRLLILGASAVVRQAGRRGAPAKSWLAQILPRKPRMLVTVALANKMARVVWALLVRGGVYRAPATAALS

SEQ ID NO: 326999 - protein, 481 aa, unidentified
MLTMEEVAMKHTLKRKRTGNQAQGSLSLLERIQPDAAGIDCGQNSHFVAVPPDRDCEPVREFRTFTAGLHELADWLAQCGVKTVAMESTGVYWIPLFEILEQRGFEVLLVNARNVHNVRGRKSDVSDCEWLRELHSVGLLRASFRPAAAIVPLRSYLRQRETLVEEAATRIQRMQKALSEMNLKLHTVLTDITGQTGLTIVRDILKGERDPQRLATHRDPRCHASHAEIVAALTGNYRTEHLFALKQNFAAYEFLLQQIGECDSEIEALLTTLAAQQPPPTAPLPAARRKRISKHTPGFDIRSPLHRLTGGADLSQIDSIGPHAALQIVAEIGLDMSRWPTAKHFTSWLALAPNNKVSGGRLLSSRTPPSANRAAAALRRCAMSLARTSTALGAFYRRLGARAGKAKAITATARKLAVLVYRSLSGDLIYNDPGATAYHQLNRRRELKSLRKRAHLLGCDLLDRSTGEVLLHANPASLSVS

SEQ ID NO: 327000 - protein, 334 aa, unidentified
MNTPRLSTLGIDLAMDSLVACLLDPGGRELKPPTPFDTTPAGLRRLVAWLPEPAATRVVFESTGVYGKKVILVLDPMVASLHQLNPRIIKRRVSSSVQTKTDHADARAIARVGHDLALTDPRVLENARVRFDPAMEDLALWLTEFHRLAMNAATLKTQIESAQHNPAPATKVLLKRLRRELEHAERRKAEVAAIMDDAATRADAQSVDLIDSIPGIGRATAATLVARIGDGRRFESADALKGYLGIYPRRTQSGGREGPARMANHGSALVRHMLWNCAKSAARFNPDCKALFDRLRDKGKNGAACYGAVERKLVHLVYGVLKHRQPFKSALPTA

SEQ ID NO: 327001 - protein, 344 aa, unidentified
MGEVSTVGLDIAKSVFQVHGVDGAGAAVIRKRVGRAKMLEFFSTLPPCLIGIEACPTAHHWSRKLQALGHTIKLMPPSYVKAYVKRSKNDANDAAAICEAVTRPSMRFVPTKSEQQQSGLMLHRSRQLLVRQRTMLSNAIRGHMAELGIVSAKGRNGTAELLTIIANTEDDRIPRDARFSLDVLARQYAVLAMEIGAIEKRIHAWHRSCESSRRLEEIPGIGPIVATALIAEVGDWKTFSSGRNLAAWIGLVPKQHSTGGKERFGGISKQGNRYLRWLLVAGAMAVIRYARQHGTKRLWIARIMERRPIKVAAVALANKIARMAWAMMVSGERFKEPTLLPAAA

SEQ ID NO: 327002 - protein, 345 aa, unidentified
MQSMYYIGLDVHKKTISYCVKDGSGRVHAEGAIPATRLDLDIWMKRLPQPWTAAMEATIFTAWIYDHLKPHAAAVKVAHPLMLRAIAAAKKKNDRIDAHKIADCLRCDFLPECYMASTEIRERRRTLRYRNLLVRQAVQMKNKIAVLLMEAGVSYNKQKLHKVRYFRELLATNQDIDDGLRSLLRLCRETVVRLGKTESALVRSLQRDSLLVERVERLMTIPAVGPITALTWALEVGDVQRFSSIKKAISYCGLCGAEQSSANIIKRTPLSKQRNKHLQTMLIEAAKMAPRNSPDLAMIYDREKQKGNANRATLAVARKLVAYLVAVDRRQKDFLIVERENRTAA

SEQ ID NO: 327003 - protein, 451 aa, unidentified
MSKQRNKVVSLPVIEPNAAGIDVGATEIFVAVPADRDPEPIRCFPTFTVDLERLADWLQQCQIRTVAMESTGVYWIPLFQILEKRKIDVRLVNAHHVKKVPGRKTDVSDCQWIQHLHSVGLLRGSFRPDDEICAIRSLWRHRDSLIQLATLHLQHMQKALDQMNLQIHHVISDLDGTTGLAIMDAILAGERDPLKLAQLRHPRIRASEETIMKSLVGDYREEHLFTLRQSLKAYRYYQELIQEVDAQVKQMMQRLPSKVAEGEEPPQGSKRRARKTPWRNEPSQLREDLYRAFGVDLTEIPGVNSLTAQMLLTEIGPNLDRFPTAAAFCSWLRLCPDPKISGGQVLSSRTRPTKNRAALALRVATQALHRSDCFLGNYFRRMKARMGTPKAMTATAHKLARIIYHMVTTQQPYDTTIFQEQEERRQHQKSARLHAQARELGFQLIPINVVP

SEQ ID NO: 327004 - protein, 351 aa, unidentified
MSIDIVGVDTAKAVFQLHGEDATGKAVLKRKLRRSELVPFFEKLPACRVVLEACGASHYWARTLAGFGHDVKLIAPEAVRPFVKKGKKNDPADAAALVAAASQATIKFVPVKDTEQQGILSLHTARELLVKQQTMLANAVRGLAAEFGHTAAKGLEKLTELVTTLEADEGLPARARQAIVGLYDQCRALDEGIATLEAEIVAHARHDERARRLATIPGVGPITSSLVVATVTDFSAFKSARHFAAWVGLAPRQNGTAGKMRLGKITKAGNKQIRTLLVLGSTSMVRRAEHWNSALGRWTAGLLAKGRSARLVTVALANKVARVIWALMLRNEVYRPHGRAKTVAAQAVAVA

SEQ ID NO: 327005 - protein, 348 aa, unidentified
MNTPVCVGIDVSHAQLDVAVRPGKGFSVSNDAGGWATVVAHLQPLKLVRIVLEATGGLEVPLVGALAGAGLPVVVVNPRQVRDFARATGQLAKTDVLDAQILAHFAEVIRPPLRPLPDAQTQVLAALVARRRHLVEMLTAEKNRLRTAAPAIRRSLRQHLVWLQRERTQLDTELAETIHSSPMWRATDDLLRSVPGVGPVLTITVLANVPELGTLTNKQIAALVGVAPLNRDSGTLHGKRLVWGGRAHVRAALYMAAIVATRYNPVIKTFYQRLCQAGKAKKLALTACMRKLLTILNAMLKSGTPWRHGMDTVCKGIGEPGLDGDRRFYAKYVRRVFTGDSENTLFDS

SEQ ID NO: 327006 - protein, 418 aa, unidentified
MIENVQWFVGIDWATQNHRVCLLDVEGRHVNERDFAHNGAGLSELRDWLLEKTKAAPGQIAVAIETPHGPVVEMLLDHAFLVFAINPKQLDRFRDRFTVAGAKDDSRDARVLGSAVRTDRQAFRRLAVDDPVMIELREWSRMADELQQERTRLANRIRQQLWRYYPQAIELTDDIADDWFLALWQQVPTPATAAKASEKTIIRILKDHRIRRLDAATVLQTLRKTPLFVAPGTTEVACVHIRNLAARLRLVNQQIKEAHRALDGLCARLEAPTENSSGQNREQHDVTILRSWPGIGRIVLATLLTEATEPLRTRDYHALRALAGTAPVTRRSGKQCFVIRRLACNKRLQNAVHHWSRVAIQHDTAARRRYDALRQRGHGHARALRTVGDRLLYALCTTLERQTSYNPNCQTAQLTAGR

SEQ ID NO: 327007 - protein, 342 aa, unidentified
MDHYAGIDVSLERSSVCVVDATGRIIRETKVASEPEALVRFFRELGLPLTRVGLEAGPLSQWLHAGLTGAGLEAVLLETRHVKAALSAMVVKTDRKDARGIAQLLRLGWYRPVHRKSPDAQEARALLAGRKLLQAKLRDVELSIRGILRGFGLKVGEVSKGRFAARIGELIAGHEMLEAVIGAMLQAREGLRAEFARLHRRMLAIVRGDAVCRRLMTVPGVGALVALTFKTAVDDPERFRRAKAVGAHFGLTPKRYQSGETDVSGGISKVGDASVRTALYEAANAMLTRTSGISALKRWAMGVAKRRGMKRAKVALARKLAGVLHRMWANGADFRRGEEAVA

SEQ ID NO: 327008 - protein, 317 aa, unidentified
MEQRKTSTAVAGVDVSKRMLDVAVHGVEEMLRMANRPDGFAQLGAWLVDHGVKRVGLEATGGYEQPLVWWLQAQGYEVVIHPPAAVRQFARFKRLKAKNDKIDARLIALATTQVEAVKAAADPRLAELAERMTAYEQAADHLARMKTEVEHIRQTDLRKLFAGQMRSLLTLKRKLITDLMARIRAWPELAQRYQLLQSLLGFGRIVAASLVIRMPELGSLRHGQAAALIGVAPFDRDSGLHRGQRFIWGGRERPRRMLYIAAVAAKRFDPAYKAFATGLTQRGKPPKVATVAVMRKLIEAANLVLGRGQPWTNASAA

SEQ ID NO: 327009 - protein, 363 aa, unidentified
MKKVSKVSRQTKVGQAKPEMTMGLDLGDRYSHYCLLNRDGDVVEEGRVQSTEAALRRHFEGEPALRMAMEAGTHSPWVSRLLTGLGHQVIVANARKISAITASVSKNDRNDAELLARFAAHDPKLLSPVAHRSQQRQQDLNLIHVRATLVRARTLLVNALRGLVKSAGGRLPACSSESFPKRVPASVPPALAASAAPLIEQIALLNRQIGGLDQQIEKLAAKYPEIALLRTTPGVGPVVASAYVLTLDQPRAGLSNRSAGAFLGLRPAQSQSGESDPQRRITRAGDNYLRSLLVQSAQYILGRFGPDSALRRWGLKLAATGGKRAKKRALVAVARKLAVLLHSMWRSGKSFQPFPQPAPAAAA

SEQ ID NO: 327010 - protein, 324 aa, unidentified
MIDGILGIDVSKKTLDVSIAICTKVRSKSFANSSDGWRLLLDWLIAQNIQRVHACLESTGRYSLGIAYALYEAGHVVSITNPAQIRDFARTKLGRNKTDGVDASHIREYCELFKPSPWEPPTQAHRRLGELQTIRSGIIAGLTEWKNRKNSGIVGVEAQALADATISHFTSQLGAVDEAITRTIDNDCDLRSKRDLLLSISGVGETLAGVVLAELPGPDVLRSSAEVVAYAGLNPRQYQSGTSVVRATRISKIGNAVLRAALYMPALSAMRYNPAIVALVTRLKSQGRLKPKQIVVAAMRKLLVLCFGVLKTRRPFDAAIAMGC

SEQ ID NO: 327011 - protein, 346 aa, unidentified
MDTIGVDLHKRESQLCMLAPDGTATEQRIVTSRDRFTAVLGQRPPARILLEASTESEWVARHLETLGHEVIVADPNFAPMYATRTRRVKTDKRDARTLAEACRLGAYRVAHRVSPARRHVRAELAVREALVSTRTRYIALAKALVRRDGLRVPRSASHLVMQRIAALDLSPTLRAELVPLVHVLAPLNAEIAAADRRLVALSTDDPVVARLATAPAVGPVTASAVVATADDIRRFRTAHQFAAFLGVVPGERSSGEKRRVGAITKTGNARVRSLLVEAGWGLLRTRAPEAAALRAWGLAIAARRGKRIAVVALARRLAGILYAMWRDGVAYDARHLRARGRLPATG

SEQ ID NO: 327012 - protein, 425 aa, unidentified
MNYKQNEKINQVKESTLVVGIDIGSTTQYARAFDWRGIELGKVFPFSNSREGFESFKAWMQRLQDKYKKSDVIVGIEPTGHYWFDLGAYLEDEGILLVMVNPYAVKQTKELDDNSQSKNDRKDPKVIAKLVTEGRYSAPYTPDGVYADLRIMVANRKRLIREITQIKNRFARWFAIYFPEYTDVFGDYEAQSSMLLLKKVCTPEAIVELGAEKINQIWRDAKLRAVGMKRATTLCETAKRSIGLRKGSSAAKYEMKLLLEDYEYKKAQLDAVMEEIEKLCRKIPESEQMLAIKGIGVITVAGFLAEVGDVRRFESPRQIQKLAGLSLRENSSGKHKGQTTISKRGRSKLRAVLFNAAIPLIAKNPEFKSLHEYYTTRANNPLKKKQSVIAISCKLIRVFYAILANGVTYDSQKLLSDIHRQPQVA

SEQ ID NO: 327013 - protein, 370 aa, unidentified
MMNVTTFAGLDVHARSIKAVALDVVTGEVRSATFGYDACAVAEWIRSIDPGARCVYESGVTGFDLQKKLSSLGVDCVIGAVSKMIKPAADRRRKNDRNDAEFLARMLSVGNIVEVWVPDDECEAARDLARALDDAREDLRRQKQRLSKFLLRHGLVFDERTPSGQRKGNWTGAYWSWISSISFAEKADNDAFAFYVDAVRQAEEDKRRLEKLVADEASRPRWKKRVDSLRCLKGIDVMTAADIVFEAGEFARFRNARSFAAWLGLTPSEHSSGESARQGGITKAGNKHLRRVLVEAAWHYISASPHPKDLAKGQAPDPAARRHAAKGIRRLVKRREEMLGRGVHKNKANVATARELACWCWAIGRMVENG

SEQ ID NO: 327014 - protein, 384 aa, unidentified
MIVIGTDTHKGEHALAAVDEGTGRVRGQREIRADEAGHLAAVRWARGLDEERVWAIEDCRHVSRRFERALVAAGERVVRVAPHRMGESRKGERQPGKSDQIDALAIARAVVKDGVEEFPVAYLNEQAMEIRLLLDHRNDLVAERTRTVNRLRWHLVIVRPELERSVKPGAFNQARELDRVDRQLRKLPAGARVRTARELIARIRQINRQVDELRGELLELVKAHRPQLLAELGCGPLVAAILIGHTAGAKQFRSDASFAMLAGAAPIPCSSGKTTQHRLNRGGDRQLNHALHIIAITRASHDPTTKQYLARKQAQGKTTKGALRSLKRALARRFYHLLTEPPAAQPQTAELAAELELPAIPGRPRPRGEVQQIDQAPSPMACIN

SEQ ID NO: 327015 - protein, 360 aa, unidentified
MPTTMTFAGLDVHARSTHVAALEVASGELKRIRFGPGSEEVIAWLAALPQPVHGCYEAGPTGFALYRAAEQAGLRLDVVAPSKTPRAAGDRIKSDRKDAELLCRLLMAGQLKPVTVPAPAVEAARHLARAREQVRVDLMRCRHRVSKLLLLHGRVYPERSTWTQAHRRWLSRQRFEQPASELAYLDCLAAVDGLVARKQELDERLSRLALEGEWWPTVARLRCFRGIDTLSALVLCLEIGDWQRFARPAQLASWLGLVPSLDQSGENRLQGSITKTGSSYARRLLVEAAWHYLREPRIGVTLRNRQQGQPAHVLQIAWRAQHRLYRLQRRLRERRKPSNVATVAVARELACFLWAAAVAP

SEQ ID NO: 327016 - protein, 355 aa, unidentified
MKRSYYIGIDISKKTLDASIFVEKMEEKRFPHLKVDNNKTGFKEILKWARKEKVNLKDCMFCMENTGHYGLDLYSFLEQKGIEYCSICPLVMKRSMGISRDKNDKIDSARIATFAFEKAYKLKPSKLASEDILKLKQLQSERAMYVSERAKYKAYISDKSEKKGSTFKRMSLMVKALSQQIEEVETEIQSVIQRNEDLKTSYDLITSVPGVGKVIAISTLTHTNNFQSFSNARQYACYAGVAPFARTSGTSIHGAATVSRIGDTQIKAELSQGAMSARHNDPEMSVYAARKREEGKHPGVILNAIKFKLIERMFAVIHRGTPYVLTHEYKTMKNTAEGCHSGGRRKVSQERVFAS

SEQ ID NO: 327017 - protein, 308 aa, unidentified
MIAQNYVGCDISKQWLDFFDETSGRLRRIDNQVDAIAAYVAGLDPDRDFVVMEATGVHDRLLRHALAKAGVPFSRHNPAHTHHYAKSTRRRAKTDPLDARMLSDYGRRYQPEAEPAPSEEVEQLQSLAGHRDQLVEMRATLKRQLSEAFEEIVITSLKDLIAGLDARIKAFESQIAEVIRQNQDTARDHALMVSVPGVSKVGALSLLALLPELGKRSPKAIAALVGLAPFDNKSGKLNHRSQIQGGRSRVRRALYMAALTAIRTCDRFKSFYAALAARSGSKKLAIIAVARKLLVVLNAIIRDKTAFA

SEQ ID NO: 327018 - protein, 457 aa, unidentified
MKNHEQNCKKKIVKRQGLRIVHPYAAGIDVGSRKHYVAIPAKCGNETVRYFGCMTPDLHEMAKWLKQNRVDTVAMESTGVYWIAVAQILDQYAIEVNLVDARAAKNVPGRKSDVQDCQWLQELHTFGLLRAAFRPTNDMAVLRSYWRHRKELVKAAAEQIHLMQKSLELMNLQLHKAISDITGVTGMKIIRAIVSGQRDPLALAKMRHRSIKSSEQTIAKALTGDWREEHLFTLEQALEAYDFYHRQIASCDQRIERYMKTFPSKGDVNDNDKGDRGHRRKNQVHFDLRSELHRITGVDLTTIDAIDVLTAQTVISECGYDMSRFPTENNFSSWLGLSPNNVITGGKVRRRGTRKVYNRAAHALRLAAQSLHRSKTALGAYYRRMKGRLGPPKAITATARKLAILIYRMLKYGMEYVDRGQKAYEQQYQERLIKSFRKRALQMGYEIVNLQSGEVVS

SEQ ID NO: 327019 - protein, 317 aa, unidentified
MSKSSTIAGGIDVAKTHLDIAIHGCKQSWQVANSVEGFGELVRLVRQHQVRLIGLEATGGYEHDVVEHLRAAGLTVIVLQPKQVRAYAEIKLRQAKTDRIDAALIAAFVSEHGIVRETPDPRLGALAEQLTYLEQIEEDMARIKTRLEHVRDAGLRGNWTNDLARLRQRRASLIAKLLTLLRNHHDLAIRLDLLLSIDGIGPRTAIALLIRMPELGRLSRGEAAALAGLAPFNNDSGKRSRSRTIAGGRTRLRTSIYAAALPAAFRWNAALVRLYNRLKAAGKPHKLALVACARKLLTFANTVLARGTPWVQVAAPV

SEQ ID NO: 327020 - protein, 394 aa, unidentified
MKLIGIDIGKNKHFFCVMDQQTGEIISQPVSFSNDKEGFDFLVQKIKSYPKDSILIGMEDTGHYHFALLKYLLDLQYTVALINPKTTDFNRKMQGGITKNDKLDTINICDVLDTPERKKQYRITKVNSFNLYEQKQLTRHHHNLKEEENVYKNRLQKCIDIVFPEFNKLFNSKYGIVYMNILKMFGSAENIANTDIRTIRKCFEIEGRGNRISLTPERLKECARSSIGISSSAEVIQIKHLTAQIELIEEQLTEIDKKIEEFSIQNNSPILSIPGISHFSGTSILAELGDISNYSKPSQIIKFAGVAPLHYESSQFNAQHTAITKKGSKYLRKTLYQIILPVIRHNPVFNKYYQLKISQGKGHRCAQGHCVRKLLRIIYHLLKTNQQFDPQLLR

SEQ ID NO: 327021 - protein, 320 aa, unidentified
MQTPTQVLNIGADVAKDEIVMACSAGSFPVRKLANQRTALRAFLKSLPPGSRIGMESTGIYHELFANLAHKLGFIVFVLNPKDARHYAKGVGMRGKTDRVDAELIARMIAHEHTKLYAWTPPTPEQYEIAQLLKRRAKLTSLRAALGMSLKGVDGFCADLKALKKRFDQVIARIDQRVKVLIEANPDRKQHVTHLQTIYGVGSVVSATLVNTLEHIPLKNADAFVAFTGLDPRPDDSGHHRGKRRLSKRGPSELRRLLYLAALSAIKTKTWRPIYEHYRGKGLSSTAAIVIVARRIARTAWSMYTYKTEFDPGRLTKGLT

SEQ ID NO: 327022 - protein, 394 aa, unidentified
MKLIGIDIGKNKHFFCIMDQQTGEIISQPVSFSNDKEGFDFLIQKINSYPKDSVLIGMEDTGHYHFALLKYLLNLQYTVALINPKTTDFNRKMQGGITKNDKLDTINICDVLDTPERKKQYRITKVNSFDLYEQKQLTRHHHNLKEKENVYKNRLQKCIDIVFPEFNKLFNSKYGTVYMNILKTFGSAENIANTDIRTIRKCFEIEGRGNRISLTPERLKECARSSIGISSSAEVIQIKHLTAQIELIEEQLTEIDKKIEEFSIQNNSPILSIPGISHFSGTSILAELGDISNYSKPSQIIKFAGVAPLHYESSQFNAQHTSITKKGSKYLRKTLYQIILPVIKHNPVFNKYYQLKISQGKGHRCAQGHCVRKLLRIIYHLLKTNQQFDPQLLR

SEQ ID NO: 327023 - protein, 340 aa, unidentified
MTKLYGGIDLHANNSVIVLVDEQEQVVYEKRTPNDLSTILSQLCPFQPRIHGLVVESTYNWYWLVDGLMEAGYSVHLANTAAIQQYEGLKHTNDRSDARWLAQLLRLGILPTGYMYPKEERAIRDLLRKRSQLVRQKTSNLLSIQNLVTRNTGTSLTGNRIKTLTAEAIRDLLPTPDLALAATSTLAVMRCVTEQIAAIEHEIKARVSLRPTFRHVLTVAGIGQTLALTIMLEAGDMHRFPTVGQWASYCRCVNSTKLSNGKRKGQGNTKNGNTYVAWAFIEAANCAVRYYPDIQRFYQRKKSKTHRIVAIKAVAHKLARACYYVLRDQVPFDIKKAFAT

SEQ ID NO: 327024 - protein, 396 aa, unidentified
MDSFIGIDVAKDFHVAAVVDGNGSPVGDFSFLNDAAGFALLAEWLASLGLNPQNSLVCMESTGHYHRLLLHRLRSDGWRVAVVNPVRTDAFRRVRSVRRTKTDLIDAYLIADFLRVERPEPVESSPGGLSDLRRLTRLRSELVKHRTALKNRMAAAVDVLFPELPFYLGGLWSASCRKVLELWPDPMELALVPEEELAEVLRSSSRGRRGLGDVVTLQRVARCTIGRCDPCAAFEVRSILRSVASLDDEIKRLDMECQRVLKASDAAVLLTVPGLGPVLASSIAAEVGDARLFRRANSMMAFAGMDATKTQSGKFESSEEHMSKRGSSHLRWALMQAANQVRRRDAYFSDYYDSMRARDKHHYVALSGVARKLCGVIIALWSEQRAYESRPTVRRE

SEQ ID NO: 327025 - protein, 354 aa, unidentified
MKIIGVDLHTRQQAIAMLDDQTGELVEKQLAHEGEEVREFYAGLPKPVLVGLEATGSMHWFLRLLEELGIEFRVGHPAKIRAAEPRKQKNDRRDARLLLTLLAEKRFPAIWMPSREQHDLQILLRHRDQFVRIRTRVQLSLQALALSQGLRRGHSLWNRASQHTLRTLPLTGHVREQRDTLLALYPQLQSPIDELDRQVEKEAQQRAHARRLMTHPGVGPITALATEVFLGDPQRFADGKAVASYIGMIPREHSSGGRQRFGRISKQGNSLLRFLWGEAAIHAVRRDPDLRRFYRRKLAQKGMGKARSAAARKLGIRLWIMLREEIDYTEFCRRGHQRQQRSGATCAGMLREGQ

SEQ ID NO: 327026 - protein, 422 aa, unidentified
MVAHVVIGMDPHKRSATIEVIDEREKVLGTGRFDTDRDGYRRLLAAGRKWPDRVWAVEGCAGVGRHLAQRLVADGEAVVDVPAKLSARVRVFSTGQGRKTDATDAHSVAVAGLRTPGLRLVAADDTAVALRLLVDRRDELGVARTVTVNRLHRLLVDLVDGGAKKALSANQAKALLGTVRPRDVVGRTRRQLAAELIADLAGIDRKMKAATAQLTVLVQATGSGLLKLTGIGPSGAARLLGDIGDVARFPTRGHFASWNGTAPIDASSGEQNRHRLSRAGNRRINRVLHIMALVQLRHDTIGRDYYRRKLAAGKTGMEAMRALKRRLSDVVYRQLVADQKRLRRAGDGAAPGGQAGAATSSSAAGSHPNTGTSEKSLPGTAGPQATPTQRSHRRGFSTLGRPAADALTRPDGAAIDSLKPAS

SEQ ID NO: 327027 - protein, 397 aa, unidentified
MNRLLYIGMDVHKESFTLSTYHVTLDESELTQDFIGAPLKITDATASGVEKYVKNLKTMLNIKATDNVWIQCGYEAGCLGFDLYFQLKAKGIECVILAPSTIQKSANAKKKKNDPLDSKAIAMALANKTYKSVHVPDKDDLNVREYLRMRNAHRDAVKKVKQQILAFLLRQGIKYSNTNWTKAHITWLHGLKFDHALLKETLDEYITSLENYVAKLERLDKRIEEFAQGDKYQEKAAELGCLLGIKTQVAMTMMSEISDFSRFRTASEFASFLGLVPGENSSGEKTQRISITKSGNSQCRKTLIEAAAGICRGKVGHKSKELMRRQALCNNPIAISYADRANERLRSKFYRLNLRNGKPANVAKTAVARELACFIWGIMTDTYNGKVPRNDEYALGK

SEQ ID NO: 327028 - protein, 371 aa, unidentified
MLNDAIGFNRLLNDLKTVHNPEIIFEATGVYSRRLRAFLEEYGYAYTQLNPLEAKKQLDSLRVRKTDKIDAEKLAHSQFILNRKPTYAQEEVYQHLRDLSRFYQNLTEDIVRAKNRLHKVLQVTFPELENLLSTPTGEQYWNLVMAFPCKEFVLNLSQNELCKIIRQSTSKRISEKRIAYLTDKLIKLAKQSFCAIKKISPMLEEVRYYAQELLRLSEHRQVVLDDMVDLAQPLPEYDILRSIPGIAEITATSIIGELGDIRRFQSTNQINAFIGIDLRHYESGNFLAKEHITKRGNPYARKILFKCIHNIASASHTNPCHIADFYEKRKRQSTIASTKPHAIASIHRLIRTMYYLITHNKLYDYSLTQNR

SEQ ID NO: 327029 - protein, 430 aa, unidentified
MDEVNRNRLEEFRQLRQEVRHSEEYLIVGIDIAKDRHYAFFGTATGKTLLKRIVFSNDHEGFRKLLDHAEALRVQHGLKKVVYGMEPTANYHKPLGEYLINLGRAVVLVSGVTVARNRESLDGRWDKHDGKDSANVADLISQGKCLYYEYPSAELRGLRGLLSLKRRLKKQEHGYRVRIRNQLIAQYFPEMDRDYERLGAEGLSIVRWCLPASQMTELDVEPFIERVTSRRITMEKRRRLEEVWEKAAESIGCEGVPGVEHEAKVMVEGLKQIREMIKETEGKIQELCEHFLEYKYLLTIPGFGPDVSAKVLGAIGDPDRFQNGKQVLKMGGLDLSADRSGKDSDRAIPEISKRGKADLRYALYQAALIASLKNRDVMIYYTSKIRGREREKGIHVKMRVKLAAKLLVIAWTLMKKKEPFNPVYLKAELN

SEQ ID NO: 327030 - protein, 341 aa, unidentified
MQHVAIDLGGRESQVCVRATEGQILLERKLPTASLKKFLQQQPHSRIVLETCAEAFRVADFALSYKHEVRVVPATLVRSLGVGARRIKTDRRDAQVLSEVSCRIDLPSVHVPTDVARMRRSMCGMREELVSSRTALINCVRGWCRTRLLKLPAGTSRTLSERIRETALKNANGLPDYVERLLKTIDVLNEQIALADHELAQLAEDDPVCKRLMSVPGVGPVSSMRFAAAIDDISRFSTAHAVQSFLGLTPGENSSSEKKQRTGITKAGPAPVRRALVQAAWNIRRFRPLDPISRWAAQIEQRRGKFVATVAVARKLAGIMFAVWRDGSVYEPNHRPRSQQS

SEQ ID NO: 327031 - protein, 314 aa, unidentified
MTSNAEFVGVDVSKATLDVASRTSNEYKRFRNDPTGIQELIDWLKILQPELIVLEATGGLELPFVAELAYAKMPVAVVNPRRIREFARSIGQLAKTDKLDAKVIAHFGEATHPEARKLPTNDEEKLTALITRRRQIIEMLTAEMNRLHSARFSMKERIETHLAWLNSELRDLDEEITKFIHQSPIWKEKDKLLRSVSGVGPVTSATILAMLPELGTLNRQKIAALVGVAPVNKDSGRRQKKRRVYGGRANVRSVLYMAALSASKHNPRIKAFYDRLIRMGKEKKVALTACMRKLLVLLNAIIRVNQNFDLKPAN

SEQ ID NO: 327032 - protein, 390 aa, unidentified
MTTSTNSAEITGGVDTHLDTHVAAALDALGVELGSKAFPASPAGYRSLLAWLRSFGRVVTVGVEGTGAYGVALTRYLANEGVAVVEVDRANRQQRRKVGKSDPLDALAAARAVQSGAATGEAKGRDGAVEAIRVLRVARRSASGDRVRAINQLRAVVATGPAPLRELLRSLPRPRLIAVCASARPGGHLDPTTATKHALRELARRIQRLDEELARLDALLEPLVAATAPELVALHALGPETAGALLVAAGDNNGRVRSERAFAQLCGVAPLPASSGRTVRHRLNRGGDRQANAALWRIVLIRMGSDERTKAYVARRTTEGLSKPEIMRCLKRYVAREVFAALPASVERRERRRLAKEALVAEQVDVGGPLDPGDEEATEVALGVEIAVAV

SEQ ID NO: 327033 - protein, 324 aa, unidentified
MDNTICWVGIDVCKQHLDVAIRPHDQMLQFPNTDGGIAALVAQLRPLQPERIVLEATGGMERAAAVALQSAGLAVAVINPRQGRDFARAIGRLAKTDRIDATVLAHLGEALRPPVRPLPSTEARHLKELVTRRRQIVEMIGAEKSRLSGTTGAAKADIQAHIDWMQERLGRLDREIEAVKRQHVEWSEKADLLESVPGVGPVIAMTPIVELPELGRLNHKQIASLVGVAPHNRDSGKVRGKRTIWGGRAAVRAALYMGALVGKRFNPALKDFYERLKPLKDFYERLKQGGKATKVALTACMHKLLTVLNVMVKKGERWRAPSAA

SEQ ID NO: 327034 - protein, 383 aa, unidentified
MQPTRANDFTPEVEVFAVALELSSKSWKIALHDGKREKPAIQTVSDETAAGRLNETVQEIEKFKAKWGLAAEVRTVVLYEAGQDGFWIERALSKLGYEVVICDPASIPVERHKRRAKTDRLDAIKLVLTLRGWLRGEYDRMHVIRVPTVEAEAQRHVVRDRGELQKETQQHRDRIRKLLRTVGCWDGVGGDVGARLNKRELCCYDGDPLSAQLQQRLEQECKRLELAQQQLAALEKGMAEQLPPEVRQRIADLERLKAVGPVGATRLVLELFWRKFENRRQVGACVGLVPQPYDSGESRVDQGISKQGNRRVRALLIEMSWFWLRYQPDSVMTKWFARRTQGGQNKRGKRIAIVAVARKLVVALWRYLEHGIVPEGAQLKRAA

SEQ ID NO: 327035 - protein, 366 aa, unidentified
MAKKAKKVKSAKGAELRIVNPDAAGIDIADGIMQVCIPADRSKDNNRAFGAYTSDLHAISAWLRECGIKTVAMESTGVYWIPLFCRLQEDGLDVVLTNARDVKNITERKTDESDAEWLMLLHQYGLLKASFQPHNDAKRMRTLTRHRDTLSREASSMVLRMQKAMQQMNIKLTLVLSDITGKSGIRIIEAILAGERDPKKLAELADIQCKTPKEEIAKALEGNWEEDLMFVLRQNYDTFKHYCTQLGECDAELEKLMENYRAEVAKVEDTSYSPAKKRRDYKKTRHTVSFDVERKAYEMWGVNVFEIPGISHLTALELMSELGHDFTRKFPSSKQFCCWCNISPNTKISGEKEYQATCHTVGTMSG

SEQ ID NO: 327036 - protein, 375 aa, unidentified
MSASPMSRPVVHLTLELSVTSWVVAYRLPWSDKVRLQKVSAGDNAALLALVSDLREKVAARVGPDVTLASCFEAGRDGFWLHRLLTDNGVINHVVEPTSILVTRGARRAKTDRLDAQGLLRVLAAAFAGDREICRMVRPPSVAEEDDKRPHREREYLVQERVRIENRIAALLATQGVRKRPSLRTWAAALDTLRTGDGRPLPPCLKAELGRLRRRLLMTLEMIREVEVAREQAMEAHDNPANQTVNALCKLRGLGDNFSAILAKEVFYRTFDNRRQIAAYLGLAPTPFQSGGMDRDRRINRAGNSRARKTMVQLAWLWLRYQPESGLARWFRERVGELQGRTRRIAIIALARKLLIAIWRFVTTGVVPEGAVLAA

SEQ ID NO: 327037 - protein, 342 aa, unidentified
MDHFAGLDVSVKETSICIVDDTGRIVREVKVASEPQALLQVLKNPIYGFRRIGLEAGPLSQWLFSALAEAELPVVCVETRHMQAVLKAQINKTDRNDARGIAQMMRAGLYRPVHVKTLRSQKLRMLLTHRKLLQSKAIAIENDLRGTLRNFGLKVGMVGTVKFETRIQELVENFPDLAVLVEPLLIVRRALREQIVILHRRLLAIVRDDEVCRRLMTTPGVGPVVALTYRATVDVPARFRNSKAVGAVFGLTPTTYQSGEIDWSGRISRCGDEMMRVMLYEAAQSMLRSKKWSWLKAWAMQIARRRGMKKAIVALARRLAVILHRIWVDGTEFRWTRETAAA

SEQ ID NO: 327038 - protein, 311 aa, unidentified
MNLGIDVAKAHLDICVRPSGEEWRTEHTAAGITALTARVVALQPARVVVEATGGLERPLARALQTAGVAVAVVNPRQVRHFARAVGQLAKTDRLDAQLLARFAEQVQPEPRALPSVETAAAAELTARRQQVREMLTAEQQRLKQAASAAARAWVAKHIAWLEAELAEVEAALEKALTATPEGAQKAAVLRSVPGIGPVVTATLLADLPELGTLGRKPLAALVGVAPLACESGRLRGRRLIWGGRGRVRAHLYMAVLAGLRANPVLKTFYQRLHAAGKPAKVCLTACMHKLLTILNAMVRDGRHWAPKTPEA

SEQ ID NO: 327039 - protein, 485 aa, unidentified
MKKRTIFQQQSQALMQIYEQAGNSKKVLVVAMDYAKKEHTVMFCNGNGDILRKPFAVWNNPEGVNYLLKQVQKSCNYHKIKRKHVFFGGEDSGSYTENFTQCLREQDYLVAGVNAHDAKKQRENMQASTDRLDLLGIARMLMSRRGNCAPSQSGAYRNLRTLVRHRRKLVTLSTEERNRMHCVVDRLFPGFLEERNSGLMPFHEPSLRVMESRFSAAQIKRRKQATLADLLARAGAQKPEQKAKQLQTYAGTVLQPPREYVTTWQTSLTEHVRLYRCLLGNITSLEREMALWLAQTQGAFLMSVKGIGLVLAAGVTAEIGNPVTQKPVGHLVSYSGIIPRVTQTGGSDNSAHTGSVAKRCNRILKDYLVQSASHLGLHGVDDLRADHKRREANGQHANFGIARRYLRMILHMMRFSHIYLPPYLRMGVASEARGEYYQMTWPYLLDKWKRYGAHEIAFAPENPLGQWRDMVQDIYNITLKIESRR

SEQ ID NO: 327040 - protein, 483 aa, unidentified
MKNKQPEKTEEAPCRPTQGHWHEMNRKQRREMMRKIQSDDLRLEVVHPDAAGIDIGNESHYVAVPPTRDSESVRRFGCTTAELKEMADWLKQCGIRTVAMQSTGVYWIAVYDILEEAGLEVYLVNARETKNLPGRKSDVQESQWLMKLHTYGLLRNSFRPSQEIRTLRTYWRQRNDLVRAAGRHIQRIQKAMTQMNLQLANVLSDVSGMTGQAIIKALLGGERDPQKLAEFRDSRVKASKEEIARSLEGHWQEDLLFVLQQEQSGYEFCQKQMAECDQRIEQYLKQREDRSAGDNLPEEKRKERLRKKKKGNAPQFDLRAELFRMTGADLTQIDGVDVMTAMTILSEVGWDMTKWKTEHHFVSWLRLCPDNKISGDKIIGKGRLPTNNRATSALRMAASTLRLSNTYLGAQFRRLRTRLGAPIAIKAMAAKLARLVYRVLRYGMQFVDKGAEFYEAQHRTLQINYLKWRAAKMGLQIIEAPAA

SEQ ID NO: 327041 - protein, 369 aa, unidentified
MADRITYVGLDVHKDSIVVAVAAGGLRGEVREYGRIANTSTALDRLLRKLGGDGMRLRFCYEAGPCGYGIQRRLSTRGHECVVVAPSLIPKRAGDRVKTDRRDAASLARLHRAGELTAVWVPDAGHEAMRDLVRARLDAVHSLRRARQQLSGFLLRHGCHYGRPAWTRLHRRWLAGLKFEQAVHHIVLEDYIAAVEAAEARRNRLTAQIEAMLPDWTLAPVVAALQTMRGMALVNAASLIAELGDLSRFANPRQLMAYLGLVPSEHSSGASVKRGGITKAGNAAARRLLIEAAWSYRFPARLSRELLLRQERQPRLIRDLAWKGQLRLCARYRRLARTGKPANIVTTAIARELSGFVWAIARQVAVTTD

SEQ ID NO: 327042 - protein, 326 aa, unidentified
MKKYTVGVDVSKDKIDFCILATQDHAIISRGVVENEKKSLLSWLKKFDSKQYSFALEHTGNYGAMLAWLLSEANYCFYMINPMALKKSMGIQRGKTDAVDAYRIASYVISNEHKLEAYQLPTEELRKVKALMAARDRYVKISVQLKNSLKSNKILNKTIDVKELIKEEKRQIKAISRSIKKVEKQIMELIKSTENLNKSYQKITKIIGVGPITAVKSIIETNNFLNFKDARKFSCYCGLAPFPYQSGSSIKGKSKTHHLRNKKLKSTLFKAASSAIQHDPQLKAYYQRKTKEGKHKLSALNAVANKIVLRIFAVVKREEPFVKLAA

SEQ ID NO: 327043 - protein, 352 aa, unidentified
MIVLGADTHKRSHTIAAVSAATGEVTGEQTAQVGAKGFAALVVWARGLGSERVWAIEDCRHVSGSFERFLIERGERVVRVTTKLMADSRRRARGRGKSDSIDAIAVARAALREGLDDLPAAQLAGPELDLRLLVDHRERLVHQRVALNNTLQWHLHDIWPELQLPGSSLFYGTWAPRVARRLARAEQTMRVRIARDELRRIRELSQAIKTLEAEIAQLVARIAPQLLTEPGFGPLTAAKLVGEIAGASRFATDAKLARAAGVAPIPVSSGKTSRHRLDRGGNRQINATIHRIAVTRLRCHPETQDYIARKRAEGKSTKEAIRCLKRHLTRRLWHLLTETAPPRPGHPHPSTS

SEQ ID NO: 327044 - protein, 431 aa, unidentified
MRGKPEERFSPPGFHKRSIPMKYVGVDLHKKSISICVVVLEGRKRKVLARKRFACQDVDGIYQFFRELGTFQVVVEATASYEWFAGLVERLADRVVLAHPKKLRIIAESKYKTDKIDAWVLAEFLALDMIPEAYRPTPRQREHRALVRYRYYVQKRTVSVRNKMRHILANYNADVKELFTAQGLAYLGEQKVSAADRFVLNHLLEEWREHRRRLVEAEKQLETFAKEAPLAEQESRQVLATFPLAGPVTIDIVLSEVGDVKRIRSLKRAGSFAGLAPGFRESAGRRKEQGITKEGPRLLRWAMIQLAWRVVGRTAYWGGIFAKLEHRVGKKKAIVAVARRVFCVIMSMLRSGQAYRTPGGEAAAGFRRDGKGVRGEGAAKKRGKKTPASPRQAAARERTVDQEAKPREVKPQKKPQASRRRPRRGALSAHP

SEQ ID NO: 327045 - protein, 344 aa, unidentified
MANLNQFCDFTKLIGIDIAKSVFQIYSCDTQTGEITNVQIKRDKVLESPANCGKCLIGMEACGSSQYWARKLQALGHTVRLMDPKLVKPFVRHNKSDKADAEGVYHALVSGVRAVAVKTETERDIQTLLTMRALLVKQRTARINHVRGLLAEYGHVMPKSVDQFDKKVDECINSLEGDAVQLVIDMLRDTVKSIRDEHDRIKTLQREISRLANQTRNAKHFLTVPGIGETIMAYMCVLLADPAQFSSGRQFAAYLGLVPMHTGSGGKTVTTKIPGRCDKALRALLVQGAHAVARSKCRTDWVKTILAKKPKKVAMVAIANRMARQCWAVASKGQDWRRMPVTAA

SEQ ID NO: 327046 - protein, 368 aa, unidentified
MKQQTSATTETDIKGRNIIDFTGKTIYVGIDVHEKDFQVAKVLGDICLGNHRMPANGQGLIDHLRTHYPGAGFKCVYESCAWGFTLQRQLQQAGIDCIVVHAADVLSSDKEKKRKTDKVDALKLARNHAAHQLAGIHVPNEEIQKQRNLIRFRKKLVGDLNRSKNRLKSLLKYQGINIPELLGKKNNWSYNFMNWIEQTARKDVLLQDTLLLMLEEVKLLRQLLLKTESALRKLMQTSYNDKAKLLMSTPGVGRTTAMLFLLEIGDIQRFGPFDRLNDFVGFCPDTDSSGETDRDTGITSRRHKQLRSALIEAAWEAVRIDPALLDMYQKLTKRMKGNQAIIRIARKLLRRMRAVLVSGIPYQKGVVV

SEQ ID NO: 327047 - protein, 323 aa, unidentified
MTVYIGIDIARKKFDAAELCDGAYRCKTFENTPAGFTALYNWLKAGSIPDIHVCLEATGNYGTALATFLYEKNLKVSVVNPARIKGFAASELTRTKTDKADSRLIARFCKAAQPDPWRPVPAPVRKLQALVRRIGALNGMLRMECNRRENADIDAQESVERMINHLKMELESVRRAIKEHISNVPELKKQNDLLLSIPGIGTVSASLILSFMASKEFTKAKEVTAFLGLNPRHHQSGTSVRGKTRMSKMGDAKLRCALYMPALVALKHNPDIRAFGLRLLTAGKPRMLVVGAVMRKLIHIIFGVLKSGTGFSSRVAVNAGMNQ

SEQ ID NO: 327048 - protein, 547 aa, unidentified
MVKIVTKATTGKKSTKRRTKAFAAAVMGRPAGQIQERVKLAGPEHFGIVSVDCAKDRSKWMLADFYGRILVPPTVVEHQRSQIQLTLLMLKQAIEKHGIKASIVAVEMTGTYHQIIFRAFRDAKFETRIVHPFASSHYRAPEHGDVKTDDHDLIAIFRAAVNGFGLLEQPWDDVHRALQLLVRHRRDLVNKRAKLQCQIRHHLERSLPGYSNSFPDDSLWTQPVAIRILQYIAEHGGTHQALLDAGIPGVSKWLKQQNVAFQSRTVARVVAWAANAVVGDPMRTMMTRIWQTLLIDWQSKTQQISLLERDIAGLLVKTPWVLMMSHPGINVISAAELAAETGPIEHYASAKAISGRAGLFPSRYQSDGVDRGGNLSRFRNGRMRAAWMLTAECLLKCNVYWSGKFQHWKSQGHDPRDIRVRIANRITRTAFQMVAGRKVFNHRSRLDRGYILDKLLTFHREHDTPIVQILSDLKSATDQVPTHAHADEAKPLQEVHRKSMRSRKSGPQQIGNLLVAVLARLGVTISSPAVNLTSLEAPAAESDKGDR

SEQ ID NO: 327049 - protein, 454 aa, unidentified
MAKRKQRKKRLVVTRLPEQLQHVNLNAAGIDVGSDRHLVAVPGGRDEVSVREFSAFTSDLHSLADWLLKCGITSVVMESTGVYWIPLFELLEARGFEVKLVDARQVKNVSGRKSDVLDCQWLQQLHTYGLLAGAFRPPEQVCVLRGYMRQRELLVQAAAMHIQHMQKALQQMNLLLHNVVSDITGVTGMKIIKAIVSGIRDPQVLARHRDQRCHNSAEVIAKSLQGNYREEHLFALTQAVSLYETYQTKIGECETAIAGYLLQQPNQTEDEPPPGDKSVRNRDRLRGGVDVRSQLYKMTGVDLFSVPGLAADTLLTLAGEVGFNMTPWRSEKHFTSWLALCPGTKKSNGKVLSRKTKRSANRAAAAFRIAAASLARSQTALGAFYRRIRIRVGPAEAVTATARKLAVLYYSLLKYGSAYIEIGQAAYEQKYQQRRLNSIQKQALALGYHLIPAA

SEQ ID NO: 327050 - protein, 356 aa, unidentified
MGGEYQKGKVLARGKDVYIGIDVHKEKWHVTVRVEGEEVFHGSMLSEYQSLRKFLQRFKVCKIKIAYEAGPCGFGLYDKLSADEIETIVVPPSLIPVESGNKVKTDKRDSRKLAKLLESNMLKKVYVLTEEDRANRELVRTRRQLTEHRSDVMRQIKSKLLFHGIKSPFPSKQRWTKQYVKWLRELHLEHEVVKVSFNTLIDLYEYLGSQLMRISKKIVALSQSDKYSHKVKLLRSVPGIGILIAMELLVELADIERFKTADEIASYMGLTPSEYSTGQYVRQGSITRCGNTRARVCLVESSWHLIVKDLFWRGKYMKLKYRRGAKRAIIAIARNLIIRIRRILLNNEPYRIGLAA

SEQ ID NO: 327051 - protein, 349 aa, unidentified
MKIIGCDFHPGYQQIAMWDKATGETLERALSHEGKEEVRAFYAGLEGPMRVGIEASGQSQWFERMLGELGHEVWIGDAAKIRASCDRKQKTDRRDAELLVKLLDEDRFPRIWVPTPAERDARQLLLHRHKLVRMRTQVKNQLQALALNQGVQRKWKLWSEAGRKQLEALSLMPWASRRRAELLVLLDQLEASIGELDRAAAEQANTRPAARRLMTHPGVGPITALAFALTMGPADRFRRGKQVASYLGLIPTEHSSGGRGQRLGHISKQGNPFLRGLLVEAAQSAVRHEPEMRRAYQRLAQRKCRALAKVAMARKLAVRLYWMLREEVDYAQLLQGSHAGQPESFRGRS

SEQ ID NO: 327052 - protein, 349 aa, unidentified
MKVFKQVLGVDVAQKELVVTLGRMNEDFSIELYSYTVFSNKETGFIALLKWLKKNTLTDISLRVVLEATGVYHQKFAHFLVDNCIDLSIVLPNKISNYFRTLEVKTITDKSCSEAIARFGLERKLENWKKPNKVYKLLQQLTRERDQIVCERTMIKNQIHAETTEAEPNERSLKRLEERLLFMNKQEKEIKQDISDIIKQDKTVEEQIGYMTSIPGVSVLTASTILGETNGFELIRNKRQLTSYAGFDVKEKLSGTSVHGKPKISKRGNKYLRKCLHLPSLCSVKYILEYKELYTRIVSKNGIKLKALIAVQRKMLELTYVLFKNQTVYNPNYEIQKRVPLKEENTLTS

SEQ ID NO: 327053 - protein, 319 aa, unidentified
MAPTLTFIGIDVSKAHLDVALRPTEAAFRTPNDPAGLATLIERLTPLAPTLVVVEATGGYELPAVAALQAAGIAVAAINPRQARDFAKGTGRLAKTDRIDAAALAHFAEAVRPEPRPAAPAERLALDALLTRRRQLLEMRVMEGHRLATCRDAAVRAGLERHIAWLDAEAADADRRLEEAVRASPAWRQRDELLRSIPGVGPVTSRTLLAALPELGTSDGGRLAALAGLAPFARDSGTMRGPRAIRGGRPEVRRVLYLAALSAARHAGPLKDFADRLRARGKRAKVVLVAVARKLLTIANAVVRTGRPWDPTLAATRGA

SEQ ID NO: 327054 - protein, 312 aa, unidentified
MERVYIGIDVSKDSLDVAIQGVKNLMRVKNDQSGIQKVVRLAVKRNATLVCFEATGGYEMPLYVALSEANVSVAPLNPRQVRDFARSMGKLAKTDTIDARIIAHFASTVPGLKSRPIPDTQGLKEIMTRRNQLVEMTTMERNRLRGANTDLRVSIKAHIAWLKQQLDEIDGMLRSSIDQDPVCREKDDLLQSTPGIGPTVSASLVAQLPELGNLNRRQIAALVGVAPLNRDSGMSKGKRIIWGGRGRVRAALYMATLVATRFNPVIHNFYNRLLSAGKAKKVALTACMRKLLTILNAMIKHRTVWSNSHSPV

SEQ ID NO: 327055 - protein, 421 aa, unidentified
MQETDEPLELVERVAAIDIGKSGLVVCVRTPHDDKPGRRCQEVREYTTLTASLLALADWLRSQSVTLVAMEATSDYWKPVYYLLEAEGFTCWLLNAKHVKNVPGRPKTDKLDAVWLAKVVERGMCRPSLVHPKPIRQLRDLTRYRRSLVRERTREKQRVEKLLEDAQIKLSSVISDIFGVSGREMLAALIDGHRDPKALAQMARGPMRSKVPILQEALTGHFTDEHRFLCRLMLSRIDDLTSTIEIVSGRIEEQIAPYTAAVAQLDEIIGVGPIAAQELIAEIGVDMSRFPTAGHLASWAKFAPIDNNSAGKKKGGSTGKGNPWLGATLGEIVAVTARSNTFLGERYRRLSKRRGRKRAIVAVGNSVLTIVWHLLSDPDARYHDLGPDFYQSRIATRHRERDLVRQLERLTGKTVTLQPAA

SEQ ID NO: 327056 - protein, 411 aa, unidentified
MEHIVARCAGLDVHKESVEACVRRIEANGRVHSETRHWGTMTRDLLEMADWLEAEGVTDVAMESTGVFWKPIFNILESRFVVLLVNARHLKQVPGRKSDVRDCQWIAQLLQCGLLKGSFIPPRPQRDLRDLTRHRTQLVEAKTRTINRIQKVLEDANLKLASVASDVMGVSGRAMIQRLIGGETNPCKLADLAQRQLRGKIPDLEKALEGKLTNHHRFLLKLLWKELSQQEELITELDSKIEEHTRPHAAEIERLDAVPGVDRRVAEVLLAEVGPDMNPFPSDEHLSSWAGMCPGNEESAGKRHRKRITPGSRRLKQTLAQAAWAASHTKNTYLASQYRRLAGRRGKKRALIAVGHSMLVIYYHMLKAGTSYADLGGNFFDRLEPKRLTHYYLKRLERLGYKVSLETSDMG

SEQ ID NO: 327057 - protein, 412 aa, unidentified
MDRLVERCAGLDVHKDSVAATVRIPGPDGQRLQETCTFSTTTRGLLTLADWLASYGVTLVGMESTGCYWKPVYYLLEERFECWLLNAQHLRNVPGRKTDVADSAWICQLVEHGIVRASFVPPKPIRELRDLTRYRKAQIEERSREVQRLDKVLQDAGIKLSSVASETLGVSVRRMLEALVAGTHDPEVLAELARGRLRRKLPALREALTGRFRSGHHGLLIAQILAHIDYLDETIATLSARVEQVIAPFSTERELLMTIPGVARLGAEVLIAEIGVDMRVFPSDAHLASWAGQCPGNHESAGKRRSGKPRKGSKWLNTTLTESAKSASRSKGTYLSAQYSRLRGRRGPGKATGALRHSILVAAYHILERKVPYEELGADYFDQRRSHEQRTKRLVRQLEQLGHKVNLEPVAA

SEQ ID NO: 327058 - protein, 411 aa, unidentified
MNPVYDVVAAIDVHKRMLAVVVAELRQEQIEYRQRKFGTTHGELEQLADWLRQQQVTEVAMESTAQYWRPVWMALEGRFRLHLAQPRSTLAPRGRKSDFADATRIVRRLLAEDLTLSYVPDREQRQWRTMTRMRVRMTTQQTRLRNQMEGLLEEGRIKLSSVISDLVGVSGRAILWAMVRGMVDPGELAALASQRLRTPTAQLEEALRGRLDPASRLLLKMLLEQWEQFQTLIEQLEMHMITALQNWEQATTRLLEIPGISRVAAQQIIAEVGPEARAFLAPEKLASWVGVCPGTNQSAEVSYSARSAKGNPMLRRLLTQCAWAAVKVKDSIFDQKFRALLPRLGAKAAIWAIAHRLLRVIWKVLHDKVQYVEQGILDPASVERRRNRYVRQLRKLGYAVALTPLEPRPAT

SEQ ID NO: 327059 - protein, 343 aa, unidentified
MGEVSTIGLDIAKSVFQMHGVDSAGAVVIRKRISRAKVLEFFATLPPCLVGIEACPSAHHWGRELQALGHTVRLMPPSYVKAYLKRSKNDANDAAAICEAVTRPSMRFVPIKTKEQQTGLMLHRTRQLLVRQRTMLSNAIRGHMAELGIISAKGRNGTAELLKVIANAADDRIPPAARFCLEVLARQYLTVTAEVAAIDKRIHAWHRSCKESRRLEEIPGIGPIVATALVAEIGDWKQFRSGRNLAAWIGLVPKQHSTGGKERLGSITKQGNRYLRWLLVAGAMAVIRYARQYGTTRPWLTRVMARRPAKVAAVALANRIARVAWAIMVRSERYKEPKLLLAA

SEQ ID NO: 327060 - protein, 430 aa, unidentified
MDNSDVKQTTEEECYAALIGIDWADEKHDVWIYEPESGKQSHRVIQHSPETLVEWIAELRSAYQGRPVAVSLEQSKGALIHALLGHEFIHLYPINPATLAKYREAFRPSRAKDDPTDAGLLMELLLKHREKLKVWKPDDVDTRTLSLLNEERRKAVDLRTKFTLRLKATLKGYFPQLLDFVAGNLASDLACDFIQKWPTLEALKRVKPQTVRAFYYGHNYRRGNLIKANIEKIRSATALTQDRAVVTVSTITAQALARQIRSINAAIEQYDTQINELYHKHPDVFIFKSLPGSGEVMGPRLLSAFGTDRDRYADAGDIQTYSGIAPVVERSGKQERVHWRWRCPTFLRQSFHEFAGCSRLFSLWARAHYELQRERGKKHHAAVRSLAFKWQRVIFRCWKDRKPYDEQQYIEALKRNGSPLWARIQALQNP

SEQ ID NO: 327061 - protein, 330 aa, unidentified
MKSYNYFFGVDVSKRTVDITSLINQKTEHRRFDNDPEGMGLLLHWLKESNIVFEQTLFCMETTGLYCFPLTAFLTTNEIDTWVEHAARIKKATALSRGKNDKIDSQRIATYASKNLEKVRLWKPVGTTLQQIKHLSALRERLVNTKKRLVTPIKEFEDVGNLAMAKLLNKSIKSSLAAIDKDLKNLEAKVIEIINGDDNLKQLYKLITSVVGIGFVTAVNLMIYTNGFTVMKDARKLACYCGVAPFAYTSGTSIKGRTRVHPMANKKLKCNLHMASLSAVKLDSELKAYYERKVEEGKSKMSVLNAIKNKLLARVVAVVNKQEEYVKKAA

SEQ ID NO: 327062 - protein, 452 aa, unidentified
MEKKKLALDVVNPQAAGIDVGSRSHYVAIGQTDEDVREFGVYNEDLIALSQWLLDKEVKTVAMESTGTYWQSLFTTLQSVGLEVILCNGKFTKNIKGKKTDVKDCQWIQKLHTLGLLSGSFLPDEATEQLRTYCRHRANLLEQAADTSRKMQKYLRLLNLRLDVVVKDVTGLTGLTIIDAICKGEVNPEKLASFRHGNCRKSEKEIAKALQSNGRKDLLFSLTHEYELYQVFQDKISQCDKQIQKLLNEQINNDENKKQHYIDGKVHKRINKNNPDININLLSYQYFEGVDLLAIEGVSHSTVLTLMSEVGPGIHKFESAKQFASWLRLAPNNKISGGKILSNKIPKGSNRLKIALRQAANAVGNLKDTALSNFFKRIAFRKGRTSAISATARKLAVIIWNMLVKKAPYKSETNYEFLDQKRKRKVMEMKKLIHKFGITPDDLGLQLNISNL

SEQ ID NO: 327063 - protein, 442 aa, unidentified
MQFSNLQMKRHFISGKVVVGIDPSKEKSDTAVIDQYGLLQGKTFTFQNNHEGFKNQLWNCLNERIFQLSKETTVFAIEAACNLWQKLADYLINQGYTVVIINPLCTYKARSLINHSFSKTDAKDALVIANSAREGYFGFYRSHSDAIKAMHDLAVTYDKLKRTLTQTKLRLRSLVELTFPEFPKIVKLSTNTALYLLEHYITPQEFLYANVFKAIKGMEKVSRKKKGVKELKRLQEAARNSIGLTLDEEQIKAAHIARDAWIAMIKLLLIQIDGVQEDILSKAKQRPYFDILTSIKGISDISASLFIAEVRDLTNFHHYKQIEAFAGLGLRNSDSGKYKGYRHISRIGNNRLRSIIYRMTTETKNHIPEIRIRFLKRKMTHDRYRRNVIACSSNLLKLIMVLVQENRPYEFREEKVKELQELEKQFEKLQEKKTQKSYKKAS

SEQ ID NO: 327064 - protein, 354 aa, unidentified
MTDIKYVAFDVHQATISVAVLNLEGKLLTQAVMQTDATAIRDFLRGLSGVVHLTFEEGTQAQWLFDLTRPLVSELLVCNPRLNHSKKRDNKSDRLDAFNLVRDLRAGLLKSVYHGSPQTQTLKQLVHHYESVTEDTTRCMNRLKAVFRSQAVRCAGRDVYYTSNRAAWLAKLNEKGLRMRAEFLYKQLDHLRDLRREARKSLLKEARQQAAFTRLCAVPGLGPIRVAQFISVIGSPHRFRTKRQLWTYCGFAVVTRSSADYKVVGDKLERRHKNTQTRGLNPNHSRRLKLVFKSAALEALKEEFFKKMYERLQAAGVRAEMARLTIARKIAAVALAIWKSGEQYDETKLSKQAA

SEQ ID NO: 327065 - protein, 340 aa, unidentified
MKLYGAIDLHSTNNVTVLIDEEDKSVYQKRLPNDLALILKDLSVYQPRLEGMVVESTYNWYWLVDGLMEQGYKVHLANTAAIQQYEGLKYTDDHSDARWLAHLLRLGVLRQGYIYPRAERPVRDLLRKRSQLVRHRTTHVLSIQNLLTRNTGSSMKANQIKGLDVQQVDELLPHRDLALAVKANLSVMSSAAEQIEILEHRVTELVELRPQFRFLKTVPGIGEILALTIMLETGDIGRFASVGNFASYCRCVGSQKISNGKKKGQGNTKNGNKYLAWAFIEAANFAIRFSATINGFYQRKKAKTKGVVALKAVAHKLCRACYYIMRDQVPFNITKAFGQK

SEQ ID NO: 327066 - protein, 427 aa, unidentified
MTDQLQHKAYDSWVAIDIAKDYNVVMVELTDGKTRRFRMANSGKDHDRLIEVIRELPQPCHIGFEATGNYHRPLAYRLLTEGFDVSLISSLASARYREAIFNSWDKNDPKDAGILLELLKRGIVQTYVEPMRSGYHDIQELSKTYSNITLARTRLQHSILTHYLPLYFPEMAKFWCSTRSAWWINYLLHFPTPASVTQHNEQAFCQIASPIIGRKMNKQAKLLELYEAAQHSIGLPIAPDSLACQTFQLQLKRYQELTNQRQQLEQQAEATLSTHPDYCLLKTVPGIGPIVAMTILAEGGDLRRFHHHRQFLKYCGLDLAKNQSGNFRGQDKLSKRGNARLRLALYMASLHAIRQTENSFRNKFHRYTQATPKDADCKRKAMTAVMAKMARVIHALIKSGTPYQGYFEVSPSGSIPLSRAVGATRTP

SEQ ID NO: 327067 - protein, 478 aa, unidentified
MDDRRLVGIDLGISSAHTVRVLGGDGSLVCRARAIPTVDSLEQVERVALAQTPAGTLLEVVLEPTGPAWLPIAVFFSARGHTVYRVSSAKAHDLRRVLSRHAKSNGIDADTLARLPLVDPAGLHPLELPSAERAALDRRVRACDRLTRQAASHKRRIKDLVHQLLPASPLVGELGQADLAVLERWADPHALVAVGRARLQRVLGTASAGQQGAQRAEQWLAAARAALELYGDHPAIAWQDLAAEVTSEVRLLRATQAELAAHARQREACYRRVDPAGLARSLPGLATVGGPALIATMGTASRFATAGKFRCFTGLAPKASETGQTDRKGQPISKAGNRLLRTTLVRAADHARRQDPQLARIYWTQMVQRGKDHLGAVCVVAAHLAERAWVVMDRGTPYVVCDTDGTPVTAQQAKAIIAERWTVPEQVRLRRRSRKGKAPQQVLTGHVHGARGATRRPSPSPTSLGRRTVPVKPTQPQP

SEQ ID NO: 327068 - protein, 376 aa, unidentified
MRKTTRFVGLDVHADSIAVAVAESGREGEVRSLGTIPNRPESVQRLLKKLGSPGDLRVCYEAGPCGYVLYWQLIKHGVACEVIAPTLVPVKAGDRVKTDRRDAVKLARCYRAGELTAVWVPDAAHEALRDLVRAREAAKKDQLRARHRLGKFLLRHGRRPAVKTRAWGTAYMAWVRVVKFEQFAQQATLIDYLTEVDHAAARIVRIEQAIDQAISEAPAETRAIIDALQALRGVAKMTAITVVSEVGRLSRFDHPRQLMGYSGAVPSEHSSGGPGKARRGGITKTGNAHLRRVLVEAAWSYRHRPGLKGDLSKRQEGLSESIKEVAWKAQHRLHQRYRRLANSGKPLPQVVTAIARELLGFVWAIGVQAEVEQPAA

SEQ ID NO: 327069 - protein, 436 aa, unidentified
MRGCRCSMIMGFTKPIEHFNLQRKKVITMNTLYVGIDVSSKSNVVYLMLPNGDKHSNFSVANSHEGSTLLVKKIYSALTSHSLDTVLIGLEATSVYGDNLVYFLREDATLAPFNRKIHVLNPKQVKKFHDTYNDLPKNDYVDSFVIADCLRFGRINKEVYMGEYRYKALQNLTRARFFAVQNLVKEKQRFMNVLFKKYSTMTQEKVFSDAFSTTALAVYDEFESAEALANMDLHELTDFIIEKGKNRFPDPDAVAKAIQKAARSSYRLPKTVNDSVNQVLSISITSMKALESQIKEFDKAIKALMELLPNVLISIPGIGPVYSAGIMAEIGDINRFDNQAALAKYAGLAWKQHQSGSFEAEVTRLIPSGNRFLKYYLYEAAFSLVRCDKEYSDFYHLKYKEVNRCQHKRALALTARKFVRLVFRLLKDNRLYVPAK

SEQ ID NO: 327070 - protein, 385 aa, unidentified
MQKLNDLSRSLTPLNPDGTLIAVIEMSQSSWLVAGIVPGIERHPLKKLEPNEGELLRLLMRWRAEATKVGCTITRIAVAYEAGRDGFWLARWLRTRDIETYVIHPTSVAVSREHRRAKTDRLDTGLLKRVFIGWLRGEPDHCHMAAIPTLAEEDAKRPNREREGLVRERTRIVNRMKSCLARFGVRSFKSTLRKAPERLATLVTPEGVPLPPNTLLELRRDMARLRFVMDQIKEVEEARTHRLEQAPQEKTHAMVRLLARVIGVGIETADMLVHEILSRSLRDRRAVARYAGLTGAPDESGSKRQEKGLAKAGNARVRRGMIQLAWRFLLFQKDSALAQWYRTRTESGGKKRKTMIVALARKLLIALWRLVTTGEVPAGVVLRAA

SEQ ID NO: 327071 - protein, 441 aa, unidentified
MELVYPRCAGIDVGKAEVVVCVRVAVGPGLVDRAVSEWGTRTSDVLALAQHLVGEGVDRVVMEATSDYWKPVLFPLREAGLDVVLAQPKRVKQIPGRKTDVCDAQWLADLAAHDLVPASFVPDEATRQLRDLVRLRESLTRQRASNVQRIEKTLEGAQIKLSVAISDLMGASGQRMLNALVAGSRDPAVLAQMAHPLVKASHRELVEALTGRFTDHHGQIIAVLLASIRDTDKQLARIGLLIEAYFEPDHDPPPGNSADQAWRERARESRALLATIPSWSPRTAEKVLAEIGLDMSAFPTAEHLASWSGLSPGSNQSAGKSKSSKTRKGNKHIRAALGTSVLTLTRMKDTFLAARYRRVRASAGHQRAMLAVQRTMLEAAWHILTNREPYKDLGGDYYDRRRPKNAARAGFKRLRQAGANVEQTGPDTYTITLPPGTRLAA
